United States Patent Application Publication US 2014/0057251 A1 - sequence listing, part 173

SEQ ID NO: 341413 - DNA, 923 bp, Cannabis indica
attgagattattaaatttaaggacttttgtccaatttcattcaattgtactaatttagtaattgtttatgtactaaatcatgctccacagactttaatatctactaaattatgctcctcgaactttgacatgtgtcaaatcatgctatttgaacttttattaatgttagactttttttactaaacttagacaaaagttcttaaatccaacaatctcaatagttcaggagggatttttaatgaccaaaaaagttcaaggggcataatttagtatatgtcaaagttcgggaggtaaaaatcctaattttaattacgtaccaatttattttattgatatattctcattgacattacattttatattcatgccaaacataaaagtatgtatgatgtgtataaaaatataaatctatatacaattgaccactgcatatgaaaaactttttttgacttgccacataaattcaagaagttagtttttttttttatatcaaattctcatcaaccaagcagggcaattttttatttatatacaagtaaatatacaatattacaaaaaatgtgtaaaaaaaatattattacataattctatacaattttataaatatttacaaataaacatatatatatttataattttaacatgttaattatttttaattaatttttttaaaaaaatacataaagttaaatatgtaaatataaaaattgatatttatattttaatatattactaaaataatatatttattaaaatttactgcaacgggacaacgtgttaattttgggaagtcttctgtcttctttagttctaatacttcatctgatttgcggagggccatctgtgctactctgggcattcaggaagcgactgagaacagtatgtatttggggctcccgagtgctgttggcaggaataaaaat

SEQ ID NO: 341414 - DNA, 711 bp, Cannabis indica
ccaggtcccggttattgtgtgggttttgatctgggttcgtgtttgggtttaggtcgtggtcctggtcctagtccttgttcggttctagttccatttgtgattctaagttcgagttcaggtttgagttcggttcggtgtacgagtcctggtctgagattgtgttcgggtccggatttcagtctaggtctagatcaggctctgggtgtgggttcgcgtcctaggttttggtctcggtttggtccaagtaccaagttcaactcctgatatgagtctggattcagttcttggtcaaagtccttggttctgatcctggtctgggttcgagtttgggtctggctctgggtctagctttgggtctgattctaggtgcgtctttgagttcgcgtctaagtctgtgtccgggtttgtgtcaaggtttggaccccgatctgggtctaggttctggtccaggtccatgttcaagtcccgattgcgggtccaagtttgggtcttggtcaggatctctgtccagatctaggtcaagcatttcgatccctgattgggtcttggtccgaatctaggttcgtatccggatacctatctaggtctaagtctgtgtttgggatcgggtcccagatttaggtccaggtccgggtctcttttccagtctgggtacacgaatgtgtttggccccgagttccagtctcaatttgggtctaagactaggtctgt

SEQ ID NO: 341415 - DNA, 531 bp, Cannabis indica
caaatatagaaaattaagaaataataattacaaaggtagactaaaaaagttacaaatgatctaaagaattactttaatcatttttttaatcatgtgtacttattatttagcctcagaaaactaatcaaaggtttttagagtggtagggacatcaataactctaatttattttaagaagcatgaatttttttcaaaacatttcagtggtgaattcaatcgtgcataaagtgaaatatagcataaatcaaaaatagtgattcacataggagtcaaacacacaaatcacatgcaattcgttatcatttaacatcacttaaagcacaattcaaagtttcatcatcgaccaatgctttcaacaaaactttattaaacctcatcaaaataaataaactaaactaaactaaaataaaataaaatatgatagacaccacaattattctcccccaatacttaatataagcattgtcctcaaggtttaatcaaataaaatcaatgcaaaataaaaagaaaatggtaagaaaaactcctata

SEQ ID NO: 341416 - DNA, 716 bp, Cannabis indica
atttcacataagctgaaatatcctttatacggggttaagtgttttaaggattaaatatcttttaccaccatatcacccatatatcatacttattccactaaaatcacacacacatatatatactaatttaccctaggggtagagtggacatagcttttggattttaaaatactagtggtagtggattataatttaatgggccaatttatagtcattagggtgcttccatgtgcctcaaatgcagataataaaaccgaccatcccattatggtcctaattgcataattggcattataccatgcaaatagttatccacatatattaatattgatgagcaacaattatttatgtaagtccatataaaatattctaatatttaaatatcattaattgcgctgtttctttcccatttatttttaaacttgtaatttatattttcatatttattttaaattatcttttttttttcatcaatttataaatgaaaattgaatttaattacaatggattgcaatttaatttcttaatggaaaaattattgatcttgagcttttttcctaccttagcacttgtgtacctgttaattaagtgtatatgatgttttctatttattgtttgatttctttatgactttttagtgatgcagtttctgttaggttttatgccctaaataaaactccatttcaatgtaatctattttattcaacatcaataaa

SEQ ID NO: 341417 - DNA, 703 bp, Cannabis indica
tcaaataaccacataaatgtttatgatgatttaccccaacaaacatagcaaaaggtcgacaatcatgattttttcggtaggttgtgtcaaagctaacaacatcaccaaagttatagtatgattccttcattcgtgcatccgcccaaaatatatttgttaacaaatcatcttcatccgcttgcaatgcataataaaaattaggatcttttgacttcatcttttgaagatattcaagaacaccacctgtatctcctgcacgcatttgaattgttcttttggtgcgtatgtaatttcgacaatcatccaaaataaatccaagattttcgtgtccgccggctcgcctaatcattagttccatactggctttaggagcaattcctgaattctcagccatttcaatttcagatgcttgagcaggggttattcttctttgtgacctatgtaagtgactcatattagggcttgaagtcacatgtgtatgctctgcattaaattcaataacttgatattttccaaattgatgaagttttatcttcatcctcgccaaacaaccaaatcttgttgtagcacgatgacatttcacattatcattccgtttatctttctcacgaaagccttcacatgagcaacaaaaagttctattttttatttttccattttcattatccttatgacttttgcttctccgtatgctaaaaccaac

SEQ ID NO: 341418 - DNA, 1869 bp, Cannabis indica
agtagaacaattcgaaataaataaagaaatgactaaagcatcatggtgaggattaagcaaatctgaagcttcgtcgtccacaaagctgatggtttggccgctataggttgctggttgtttctttggtctaccctgtgtcccgactatttcacatgcatgcctcttagcggctgagtatgttatgtcgctgacctctgaccctctagagatgacattacatgtccgagtgtactaaggtgcctctgttggtgttgtcggcctcttgtctacttccgtcacggtcgttttttccttgtttgataaaaaatctcgcaattgacctttgctacgcactctggagtggtatgtctgtggtcattatgaaattcacaccactttgtcgtgtcgcgcattgctgctggttttttaatcctttcaggccacttgacttggtttcccattcccttcattactacaactacttcgacaaggctaatgtttaggttgtattcaggaatcggtcccttgtcagattccctcatccgtcgaggtagtgttgtcttggcaatgtaatcccttggtctgtgtgattgggtggagttctcgctatctctgtatgaccgtgatctgttggttggataaggttctgaataatggtaggactggcgtcgctctaccctcttcggtactctactgtcgcgagagtaagagtaggatgttgtcgattgtctattggattcgtcttcctcccacttgatctgcgcccaagctttggcaagcacgtcctccattgtcctgcatggatattttgtaattcttgtaaaggtcagattctaccagcaggcctttacggaaggcagtaatggctgtgtccacattgcatgctatgatggaaactttttcagcattgaatcttaccacatagtcccgtaaggattcgcctctcctttgtttgatgcggtataggtcatctgagagtttctctaatttcttgatgctcgcaaattgttctacaaaaacatctgttaattgagcaaaagaagaaatcgaattattggataaattcgtataccattggagggctggtccagccaagctagacccaaaccccttacacatgcatgcctcgcgcaactcgtgagggatggcggcagtgaacatcctttgcttataactagctatatgatcatttggatcggttgttccgtcatacatcctcattaatgggaacacaaacttctttggcatttcgaccaatgcaatggcatcaacaaaaggtgagtcgacaaaactgctaggcagacttttcattattggtgttggaacccctgggatacgttggatcattgcttccatccctttgaacctccgagcgatcgctcgtttaatcaaatcctcctgagttagagtatgaatggtggtatgacctgcatcaagagaagatggaatcagattggagtttagcataacttgtgtggcagttacccgtgatggtgggagtccttcaagaggagacgttgttggacgatcagatgttgtagtgccaaaccccaagttgttagtcattgggaggctgactgtaggcatgcaggttgtaggaaggctgactataggcagatccattgtaggaaagctgaccgtaggtagaccagttgtaggaagattgaccgcaggcaggccagttgtaggaaggctgaccgcaggtaggccagttataggaaggttgaccgcaggcaggcctgtaacgccctaaataattaggcacgctacccaaaatgattatgaaaccctaatcccctaaccgggattactaattaaaaatagcgcagaatttaaacttttatattaaacagactgaaaataaacttgtaatatatttaaacttttcaa

SEQ ID NO: 341419 - DNA, 637 bp, Cannabis indica
ccaaaagagaaaaaagaaactatgtatggcgaagcttaatatcatgactatatctttatatattaaaagtgcctatctaacggtatttcttggtttaacagaatatactttacaaataaaagaatattctgttaaatttaaccccaaaagcttttaacgccgttaactttaactttcattttagtttaatcgttttctcactctcaattccaatcacagaatctcttcaatcaccagaccactccagtcccataaatagttctccctcccactgtcccacatgccctacccataaaattgcaatccaaaaagtaacaatcttgaatgtgcctagaagcccgatcaaacgatgtgatcgattacagctgcagcaatgggtgcggctgaatggtcggaggtctatgaatgggaggtgatctctaatcgacgagtagatgcgatggtggggacaaaaggtggtgagcattgattagcttccatcaaaaatggtagttttcttttcttcataaatattctggaaatttttcttgtggtgagctttagcttccatcgaaaacggtagttctctttactctataatattcttaagattagattttttgtgaaaatttacttatgagatgcgttttattaatga

SEQ ID NO: 341420 - DNA, 657 bp, Cannabis indica
tttttttttgtatgaatcagaatcaaacatggaagatgagatttataccacaatttggtattgcaaaatgtatactgttaccttatagtacaaggatattcattattgttcattagtgaaatgtgtttttattttttcaaattctagggatcatctagctactactcttcctgtggctggttttggtgttgttgactcactacctaatacaaattatttttccagactataaaatactaatattattagggaaatatccttttactttgggtttttttctattttaggttaaaattagttaaaataaacatttataccatcttaaggaaaaataaacatttatacttttactaattacaaaaataatatttataaagtttctttattacaaaaatacaatagagagataaataccaagtagaaaatgagagagtgagatacacatgtgaatagaataggagagtgagactcacacccgagtggggagagtaaagttttttactgacgcgcgtcagaactacaacgtcagaatgtggcagtgactctgcggctgccacatggcagtttggacgaagtgagtttgggcgtgttgggttttcttttctcaatgcaccagttatgcgaaaacaactaattaacaacacaaaaacaacttaa

SEQ ID NO: 341421 - DNA, 1154 bp, Cannabis indica
aataaataaaataattataaataaaaacaaaaatctcaataaggcttttaaacttctaaatttatattaaaattaatcattagttattattataagaaaatgaagatatttaaaaattttacaatttaaaaatatttaatatctgttgttgaagaaatttttacaacaccaaaaataccttataataataacaatatagagaatatatgcgagtactcaacccagaatggcgagtattcaaatatggacacaaaatacttagcaaaaactggaaatacaaagaacacaagggagtatagtggttcagtcagatcacggtctgcttagtccactgttgcaaggatttctgtcctatcttatttcatgatggatcgctcctttatatacaaagcaagtgtcctatgatttacacatggattgcattcatttatcaatccgttcatacatttaattagaataattaaactaaaatacgtaaacataataaatgaagagcagtttccagtttaattcactaaatacaacaacgtatgcgactcctatagtgccagttggctgttcgtattcttgcataagctcgaaggctttaagatgcattcgagacaagtcgagtctaggatgtttgcgtcctcttcaagttggttatacggacatcctataacaagctaatagaaccaagacatgtgagtctttatcggtttatcaaggctgttgggtcagcgggactagctcgcagaatagagaatcaatctctatgtttttgcaggaggatcacggggatacttgcatataccctggtatatgcgagctcaaaaccgttccttggtcctacataatgcgagtcataccaatgcgattagactcggtcatgtttgcatcatctcgctgagtctagtttaggcgaggttcatattagaggggtctctcaatcgacatcttagctctcctagaagaaagtgaatacacgtgtctttttaataggagtctgttctcgagtttctaggtgagaaaatctcactataacacatgcccatagtttcgcgactgacagatgaggtcatgacggaaactatagtcgagaggcaggcgaagagatgtcacgaggtggtgacctttggttgtcccatcgagggtttcaaaaaatgacggctgta

SEQ ID NO: 341422 - DNA, 514 bp, Cannabis indica
ttaacatgtactaaattatatttcctgaatttttttggcggttaaaaattctcctaactattcagattgttagatttaaggatttttgtttaatttcatttaattttactatttcagtaattgtttatgtactaaactatgatctccagactttgatatctactaaatcatgcccttcgaactttgacatatactaaatcatgctctttgaactaggggtgttaattggatcacatccaatggatttggacccatccgatccaatccaattatttattggatattggatttttccatccgatccaatccaattgaattgagtcatccgatccgatccgatccaatggatgtattggattggatcggttccatccattggatgctttaactagtttttattagattaaattggattcatccaatgaatcccatggatgaattttcattggatgaatccaatccattttaaccactatttaggctaatttcattaaaatatatatatatatgaaaa

SEQ ID NO: 341423 - DNA, 524 bp, Cannabis indica
tgcaatcagtgtgctaagcaggtgtctagtcctggaaaagaacattggaaagccataaaatggcttatgagatacttaaaaggtacatctaagttgggattggtctactagggtcatcaaacacatcaggagattgaagggttcacagatgcagattatgcgggggacaaggacactagaagatctacttcagcctactttttcttaacaagggaaattgtactagttgaaaggtacaattacaaccaatagtggctttgtccactattgaatctgaatatatagctactacagaagctattaaagaggccctatggttaaaaagacttatggaggaactaaagttaatagaaaaggtgcctataatctactttgatagttagagcagcatctatttgtgcaaaacccctattttcatgataggacaaaacacattaagataaaataccactttatcagggataaagttgttgggttttatgccctaaataaaccccatttcaatgtaatctagattattcaat

SEQ ID NO: 341424 - DNA, 469 bp, Cannabis indica
taggtaaaaatattattattttttaaaaaaatatatatttttaatttaaaatatgtaatttgacacttaatattggtatattaattgtgttttttagatttttaataattataatttgtagttttttatgatatatattattgttattgtaatcttatatatttatataatttttgaaaacttatgaataatttgtagtgtgacaaatagcttacaattaacttataaaattctttaaaagctcaaacccaacattatgtcgcctgtatttgataaagtagattttttctttttaagaaaaaatcagctgtacaagtgcacggtgcaccaatatcaaatataaaatatatttttttttattgttaatgatccatttaactttcctatactatgaggtaaagataaaaaagagttacattagatttctccttgttaacactctaactagcataggccgtattacgtgatt

SEQ ID NO: 341425 - DNA, 593 bp, Cannabis indica
ttatttttattcattataacattcttatagaaccggttctattttaattataattagtttgagttattttgtgttatttatttgtattcattatattatagaaccgattctaatttaattttaatcggtttaaattattttgagttatttatttttattcattatgttataaaacggattctatttttaataataatttatgaccagtttaaattattacgtgttatttgtttttttattcattatgttatagaaccgtaactattttaatttataaccagtttgagttattattctattcttatatatatttgagacatctacttatggtgactttttcagtgagtttttcgacgactttcctggtgatttttccaatattgatgactttttcgataatttttcaggcgccagtaactcttctgaagaaattttttattaaaaattttatcaaatttattgattttttttatttcctatattttaaactttaattattctttaatctcatatacatttttatgttatttatttatgttatataaaaaataagtttcattaatttttttccatatttatataaaaaaaaaaaa

SEQ ID NO: 341426 - DNA, 676 bp, Cannabis indica
gtgactatgttagtaagcgcatgataggagcggaaacgcgatacccggtgatcgaaaaactagtttttttcctcctgatggcttcgagaaagttgagaccttacttccaagctcacccaatcaaggtattaaccaaccccccactccggaaagtcttacaaaagccagaggcatccagaaggctcctaatatgggcaatggagctaagccaatttgatctacactacgttccacgaatttccataaaggggcaggctctagcagacttcatcacggagtgtaatgaagctgaagctaccgcaaacgtacccacaccgtcggtcccggcgtggaaggtattcatggacagagccttcaacgagaatggatccggagcaggggtcacaatgatatccccgaacggacttcgactccaagcagccctatggtactaattctcagcttctaacaatgaggtcgaatacgaagccttgatagcagggctgagattagcaaaaaccgttggggctaaaggagtagaagtctacagcgattcgcaactggtagtaaactaggtgtcgggagaatatcagatgcgccgagagaaaatggccacatatgtagcgatagtccgggaattgctccacgagttcacaaactataaagtagaaagaatccccagggaaaagaatgctca

SEQ ID NO: 341427 - DNA, 582 bp, Cannabis indica
attttacaaaattaagaagaaaaaaaaagaagcaagtcattttcctctcaagctctctcttcctctatctcgaaatcatagggggctgctagggttaattgtgttcttcaattcagcaagatttcagcaagttttggtgttattctagttgaggtaattgttgatcaagctccccttttacttcttggaactttaagatttgagagtttttgcatgtttgtgaattttggggctgtggttattgtttgtgtttgcttttgatatctgaagtttagttatgttttaaaatgatgatgcaagcaagtttttatggttgttagttggatttaatctattatggagttttagactcaaaacttggtttttatggtaaaatgaggaattttgttgctgtgtttgtggtggttgttttctgctgttttgcagaagcttagttatgcatatttaagtagatttaagcaggtgtgatgcatgtttattagatttaactaagcttgagttttgaactcaaagcttggagctcacatggtggtttttgttttagtgcatgaagctttgtttaatgctttggaattgttattt

SEQ ID NO: 341428 - DNA, 501 bp, Cannabis indica
tattaattattacgaccaaattttttaatacaatgtgtgttgtattatttaatacataaaaaatggttcgtattagcttgttataatatttacaaaggatttggggtcacaacaatctccgacccgaacttagacccggacccagacccagacctggacccggatccggacccagactcagactcgaacccagacctaggacctaggcccgaacctagaccccaaacccgaactcagactcggacccgaacccagaccccggaccccggatccgagacccggacccagacctcagactcagacccggacccgcacccgaaccccaaactcagagccgaagccaaacctggactcggacccggacctgggacccgaaaccggacctggacccggacccggtgttaggttttatgccctaaataaaactccatttcaatgtaatccattttattcaatatcaataaagaaacagaagtatttttcattcatttgtatgttttg

SEQ ID NO: 341429 - DNA, 1637 bp, Cannabis indica
gacgagtgcgaggaagccttcaatgcaatcaatgcagcattggtgcgagaagaaggaaggcaccagcaacgtgtttactatgttagtaaaaggttacaaatggtagagtcgaggtatccctctcttgaaaaactttccctatgcctaattcatgcatctcacaaattaaggccttacttccaggcacatccaataaaggtgttaactgatcaaccattgagacaagttttgtcaaaatcagatgcgtctggaagattgataaaatagtctattgaactagggaagttcgacataacctatcacccaagaacatccattaagggccaagctttggcatatttcttgatagaagggatcgttccaaaagaaaatccacttatccagtgaaatgcggacacttggaagttgtacatggatggagcatctaatgaaaatggcttgggtgcagaggtgatattgatctcgccagaaaacttcaagtttcactatgccttaagattccaatttgacacttcaaacaacgaggctgagtatgaagccttgatagctggtttgaatatagctaaagtattaaaagtcaagaatcttatgtgctaaagtgacacagctaattgtaaatgaagttctaggtgaataccaagcaaagggcttaaaaatggcaaactatttggagaataatcggaagaacatggaaaagtttatttattttaaaattgaacaaaactctaatgccgatgccctagtaaaactggtctctcaaaatgaatttgatgacttaaatttggtatcggtggaagtattaaaagaaccaagtatatatgaaaaggaagaagttaagattattgaagcctcgtcaacatggatgacaccaatagtcaactatctactcaagggacaacttcctactgacaaaaacgaagcacgaaagcttttgtattcaatacctcgctatacgatagtaaaaggcaaattatattgaagaggttattcaatgcctctcctacggtgtgtgctcctcacagaagcaagcaagataataaaggaaattcacgaaggcttttgcggagacaatgccggttggcaaagcctatcaaaaaagataatctgtcaaggatactattggccaacaataaataaagacacacatgaattggtcaagaggtgcgataggtgtcaaggattttcacatatacctcgcgtaccaccaacaaaactaagaatgatgatctcactgtacccatttgcaatatggggaattgatttgattggggcactgcccacagggcgaggaggagcaaagtacgcaatagtagcggtcgacttcttcacaaagtggacaaaagctgaacctctagtttccataacctgcaagaaggttctcaactttgtcgtcaaggatataatttgcagatttggaatacccattaagatagtatcaaataatggaactcaatttttgatgaggagttattcactaacatctgccagaggaacaaaattattaagagcttctcgacagtcttaaggcctcaagcaaatgggcaagtagaagctgttaataaaaccttgaaggatactgtcaaaagaagttggatgctgcaaaaagtagatgggtagatgaactaccacaagtactt

SEQ ID NO: 341430 - DNA, 557 bp, Cannabis indica
tataaaagaccatgctttatatttagaagtaattacataaggtaccattctttgtaaaaaaattacattttatgtttaaagattttttttttacatttttacggcttttatagaaattagaaataacacgaaaataacaaaaaaatacataaaagtaacatgaaatgacatctaaataacatacaaataataaaaaatcaacaattaattacaagaatacaacttcaaaagaccgtattttctataaataaaataaaaaaaaaaatcgtaaaaatgtttaaaattttgtgaaactatgagggtgtttggcttcgtagtttaaaaacagttttctgttttttaaaactgaaaacagtttttaaaaactattaggagtcgtttggcaaaaatttttaaaaactgttttttaaaaattgagttttaaaaaactcgaaaactagaaaacaatcaaaatagttgttttcaatttttcaaaaataattttttttagttctaacatattatattttatattttgcttcacatactcggatcctagatccgaaaccatacctgaa

SEQ ID NO: 341431 - DNA, 1246 bp, Cannabis indica
gaagcttcttcaagcagctatgtccaacagcaaagacagttgaggcaagcttattcttatgttgaagacaaccatgttgtcggatttgggaaagatatagaagggttggttgcccttttgactgaaaaagagaaccctcataagcataataaggtgatttcaatatgtgggatgggggggtttggggaagactactcttgcaagaaaggtctatcagcattctcaagtcaggactcactttgattgttatgcttgggcctcaatatctcagtagtgtaacacacgccaagtcttcgaaggaatttactttgctttaacttctcccacagatgcacaaagaaatcacatcaaaaacttagggatgttgaattagccaaggagctttacaacttccagaaacagaaaaaatgtttggtagtccttgatgatatatggaccccaacaacatgggatcttctaaaacatgcattccctactactactcaaggagacacattgcatagcaagatcttactcactactcggaataaggttgtagctttccatgccgatccacatggtttcacccacgaacctcatttgctcaatgacaaggagagttgggagctatttcagaacaagtactattctactggaacagatccatcaggtaatatactattcttcactctttttaacccgatcatcataatattctttcttttatttttgctaccatttatatttatacatgctatgttcctagtctgttgaaaagagatatgtttagctttaccagagttgataggaatattatactggtattagtgagataggatgtaactggcagagctcaatttaattatactttatgcatatgtttgacatgatgacaatctaagtagaattatgtaagcctccctacttaaaagttaaatcataattcttttgtggtcattttcaatggacaaattcagattcaaatgatgatgaagaaaggaagaaagaattagcggtagagatgcttagaaagtgctctggtctaccattagccatcattgtgctagctgggcttctatctaagaaacacaccatacatgactgggagttgatgaaagcgaatgtaattcgctgcattggtcaaggtgatcaacaacatgatgacgactcaaaataccgtagtgtttcaggggtgttaggtttgagttacagtgagttaccatctcacttgaagccttgttttttgtacttggctcgttacgctgaa

SEQ ID NO: 341432 - DNA, 968 bp, Cannabis indica
ttagattggttgttttggatctaataatacttggtatttttcttcctgccattgaattaccaaaatatagtatgttagcttgggtgattgagcaattgtacagcctgaaaatactaattataagtaaatatgcataagagccaattggtgcaaaatgagaaaacatcactcttgcctaaaaaaatataatataatctttaattttaaccgttaattcataaaataatgtgatattaatatagtggtgtatttatttaaatttagataacaaaacaaataaaatgagatttcttcataaaataagaaaaaaataaatacatgaattaaagaaccaaaatccaataaagccaaaacttaactttaaatttaacacaaaaaagaatgaactttaaatttaacataaaaaataatgaataaaatctcaatttatattctatttgttttacactaattgaagtagaaaatgatactcatgaatatgtatataattgtttatatatataaaaaaaaaaatatgtatatgtattgtgttatgtgggtatatatatacatatataatatgataatatgatatatttatataaattggaaaatatatataataaaacttaccggaatggtgattaaactaaaagaatttcttgagtttaatctatggagattggattgattacaaattagggtttatttttaggaattttaaaggagtaaatgacagatttaaggagaagatatggagatgaatttatgaaaaaaaaaatcttaaaaaaaaacaatgaggtgaaaagaaaacaaaataatagttgagctcattattggagttggttgaaataaaaagatgaagaagagatgaaaaaataaacaagagaagaagaaaaatacgtggggattaggacaggagtttaggttgtgtttaggtgggtatattagtaatttactttattgattaataaaaaaaattaaaaaat

SEQ ID NO: 341433 - DNA, 1136 bp, Cannabis indica
aacatatcataataatttttgacttgtacttaggcgcccatacacctatttacaaggcttaaaagatgagtaagaacgttccgtactagagtacaatcactataccacatacactacgtaccttgttgtacgagttttggtagggtttgtttcgtactctgagtaccactgagagatataccacaaacaccctttacttactcgtactcgtgctggtatcactttaatgtactctcaaacaatattcactataccaatgcactctctaccttaactgtacaagtgttggtagtgcaactaaaccataagcatgcatatacacttaacacatatatacactcagatattcatattacacgttatacacagttcttaccttctttccagattcaagtgtgttggtcgacctgaacggaaagtctcgcgctagacggatgccctaatcacataatgaaaccaggtaaatcacacgatcaaaaaccctaatctgagaaacccgaacccacaacccttggttctgttatactctctacgggttactctaactctagaaaaaatgaaacacccaactatggcactgaaatggacgagaatcgagaaaatgaagcatttggggaccgtgtcgaaactggatagccagtttgcaccagttcaccccaaaatttccatttgttgctcaatccttcaccaaatacaaccagccttcaagagtacctaaaccatgcatagacaacattttctaaccagtatttcacagaaaaagtcagtataaacaaacatgccattaaagacctaagctttgagtttctaagctcaaacttgcataaattcaatcccatatacaaaaaccagatgtaaaaagctatattcaactcaaatgaaccctaaaattcgaactacaactcaacctaaccctaacagccaccaatttgcaaaatcactacttgaaactaataaaaatcttgagaaaacacaactagaaaataactagggttaccttagcttgaacctccttgaatcccttgttgaaatcaccaaagttcagcaacaaacccccttgctcttggctggttcgaagagagagaagggaaggagagggtttccttcattttggttatttctgttgggttttatgc

SEQ ID NO: 341434 - DNA, 527 bp, Cannabis indica
attttacattacaccatatattgacttatttaaaatatattgcaaaaattttatttttttacaaattttaatatattttattcattttaaagatataatattaatatttacacattttcccatataaaaagtgaattacaacctcaattaattaataaaatttgtttatagtaatgaatagtattttataaatatagagtatatataatgaattttaaagaaactttaaaatagagaaagaatttagaaaatttgatatacgcaagtgtgtttttaggtggcaattggttggaggtaattaatgaaatgaaatggaaatgaaaagaaacagtttttattctatttctttgtttggttgcatttaaaaccattagaataccattttgatgaaattgcctttccatcattttggtattatgactattttattttgaaatggaagaaaaaacaatttcaatgtaagatttgaaaaaatttaaatttttttttattcattttaaattttattccatttctattctaattct

SEQ ID NO: 341435 - DNA, 2152 bp, Cannabis indica
tatgaccgccattaattgatggttggctcttctattttgaagctccacacgatagcattcgcaagccaacaactggtcacctcaaactacaactactcctgttggtgtttggaatttcaaggataggtgtttgattgaactggctgcccctagtctaatcaatgcggggcaacccatcaaaatgttataaacggatggtagatcaacaactaagaaatcttacattaatgttgtagataatggtggctcacctatagttaatgggggttcaatgatgccttgactagcgatactatctccggtgaatccacataagttcaccatgcaaggttttaactttgcattttatagtcccattttcttcagtgtatccctataaaggatgtttacagagcttccattatccaccaacactctttttattcttttgttggcgagttgaactgtaatcactagaggatcgacgtgtggatacctcacgtgttttgtatcttcctctgagaatacaattggaggttcttctattttggctttctttagtggtttcggagcaaacactgattgattatttttaacttcaatgacatatcgcttctaggcattactactctctccagcgagatgtggccctcccgagataaccaatatatcttctccctcaatagggggaggttgcattctttggttatctgggttgttgggctgaacaagttagttttgttcatttccttggcgcttcacatattgtccaaaatatccatgagcaatcaagctttctatctcgtcttttagttgtcgacactcttatgttgtatgccctatgtctatatgaaatcaacataatctattcgggtcgcgtttatgtctcgcatgcctcattggctcaggtttgcggaatgcaatcctgtgctcacttgcaagacagatgtttttccgagtttcattaagctcggtataaacgatgtaaatcggcggatatttatcgtgcttttttttatttcttcttatttttagatgattccctcgagtcatcttttcttttggtgtttgaaccactttgattgtcagcctttgtcgagatggtacttgctgtggcagtgctgggtttatttcccgagccagtcttcaacaacttaatctaatttcttacttcctcattaagcacaaaaacttgcgctctttcgttgaattcattaatatttctcactggacgaccttgtaggttattccacagctcgcccctagctgttgagaggtcagtcgtgatccctgcttgaagagcagtaagttgaatactgtcattcaagtttttaactttagcagcggcagtactgaagtgacttaggtaagccttagggactcgtctggttgctgctttatgttagttggggaggatgattcaggttgcctgtctcttgcgcctgaaattgtttcttaaaatcattggacatttgttcccaagaagttatcgaatgatgagtgaatttatcgaaccagctacttgtttccctagtcagcgaggcgggcaataaaatacaaagattattcgagacgttgctggctcgcgttatggtactaaagttttaaaggtgagtgacttggtctaaagtcccatcatactgcaacacgtgagggtttttgaatccctaggggaattcagagttcataatatcaggatggaaagactcgggctcctcgtgcgagtcataaccaggtaacttcccatattccccatcttggtatctcctcaacttatcctctaactcaatgattcgcaattgtattggatcctcttgctgtcggttagcattaagctgttggcgtaagtcaagtttattctgatttaggcgcttgcgtaaattgggttacctttgattcaaatgttcacgaagatctagttgtcttcgttcatagttgttcacggacctcgtatctaagtaactctcagattgataactcctcgtattgctcatactctcttgatcagcataatgtcgaggtctgcttccttctcgcatttgccttcctgatcgactttgcccccgggaccttgaatgtcccgagctagaacatgcctcatattgcacaggccttctccttcgaaaaaggttagatacacgccctctgtctaggtatgtgtatgcctcctccc

SEQ ID NO: 341436 - DNA, 666 bp, Cannabis indica
atattattttataacattattgaggtaataaaaatttgacttatgctatattttgtataaaacaatatttagcacatattttacacaactaataaagcttcaatttttttttttaatttttaaatgaggtcaaatataataacacattacttttataccctctttttaaaatgttgttcattacaaaaaaaatatcacttttatgataaccttttagtcacaacaaaaacatttgtgactaaatgagacttttcgtcacaataaaaaagttatttgtcattacacatagtatttagatacaaattgtcactaatttagttgtagttacagtaaatattgtgactaaaaatagatttagtcacaacaaattgtgatttttttggttaatacttttagcttcagactttttagtcacaatgtaggaatgataatttataattagtcactatttttttatttttaattacatgttttattgcgactaaaagtaaaatttttaataatggttaataatatagttaaagtaatctttgttggattaaaaaattctatgtgtgggcacatatgtataatgtatatgctattaaaaagtgtgatacaaaaaattaagtgaccaattctgttatgggtatcaaaaaggtattaaattgtcatggaaataatgtg

SEQ ID NO: 341437 - DNA, 642 bp, Cannabis indica
cggtatatgcgcgaccagtattagcttctcgcgatcctgcttatcttttgactgtgttgggcacaatatgcaactagaccctctcccgatcgcatcttctctcaagttcacatcatgtgaaataaaccgaccattctctctgaccgcattagttgtcgtgtccacacttcttctttctacgggtagcaacactttctgcagttaaatacgagagtagagacaagcacacacttgcagcaaatcatcttttcctacaaagactgactccatgtagcaacttttcacaagattatgctcgtatttttaggcaaaaaattaacactataacactagaataataaattatccaaaccaaatgaacaattattttacaaaaaaaaaaaatcctaacaataatcaatatatgatgaataaaaaaactttatttcacaataataataaaaaacatttttacttataaccatagtaaaaatattttaaatgtttttcataaataccatttaaaatgtcttcttttaaagatacaataatttagggctattttcttagaaaaggagaaaaaagtcacaataaacttcatttgtttttcaactctcaaaccaattcagtcgccgtcgtcgtcgccgtcgccaccgtcagtgt

SEQ ID NO: 341438 - DNA, 494 bp, Cannabis indica
tgtctagtttacgaattttcactaagctagggcttaattgtgaagaaaagagattctggggtttatttgttaattaagagactttgttaggtctaattaataaatatattaaatggcaatattatttaataattaattttaattattaaataattagaattggcatttaagtggttaaattggaaaaattgtatttttgagaaaataagatgaaaaattagaaaaatggcaaaattgcaaagtgggacccacaatccatggccggccacctgggaagggttttgccactttattttttcattttttaatgctaattaaatctaacctaaccctaagtggtttcctataaataggtagtgatggcttcaaagaaaaagatgatgcaactcattccttcagtaaaaatttgagccaccttcaccctcctattcgaaaccttctctctctcttcctctcttcaaaaccgaagccatatagtgaaaagagtgagtgcc

SEQ ID NO: 341439 - DNA, 748 bp, Cannabis indica
cagtttttggctaattagtgctcagattgaatcgtacctcgagaacgccatttattcacatgcttttgacggttacccttctccaagtactcaaatgcttttgatttcccaatatttactttttgggggaaatcggggcgtttgaaatgctaattgactgcacctttccactaatatgcttataaatagggcaggaaatcctaataaaccatttttagcatttttctcgttaagtaatttcagagcaaaaaacacttttctctctcagattcttcgtggaattaatagaaagagccgatcagcgtcgtccgagcgacctcaaagcttcgaacagtgagtaagtttctcatcttttcctctttgaatgcctgaattttcaattttctgggttttcatttaagaaaatttcaataatcttgacttgttttaggaaaattgtagagaatctaggttcagaactatgaaactttgactgtagtagatcatataacttgattgttgtggcactccgactttaacttcccgatattcggttctcactttgcccattcagggtttagtgaagattaacccttaattcaaggttttgaaattctgggttatgaacctaaaccacacgaaattttcatctttttaatcttttgattagacttggtcagtatatttttcttgtttttgttcgatatcccggccaagtactcatcttgtgtcttatcttttgtagatgaacctgttgggttttgtgccc

SEQ ID NO: 341440 - DNA, 730 bp, Cannabis indica
gagttccaaccttgtgagacccccacagaccagcatggtcatactccaatggcctcttagagcaatgattgcttgccatgaacttcagtctgtgatgctttcccaacacacatgcttcacagaatggtaataaattaggtttgaaatttcctagtagcccttgcttggtcaattctttgatcccttgctcactcatgtgacccattcttttatgccacatttccatctcggtttcttggtgttgtacaatactggcttcacaagccattactatttttccttgcagaatgtataagccattattcttttcacctttcatgatggtaagagacccctttgcaattctcttctgaccattgcaagatttataattgtagccttcatcttcaagtgttccaagtgatatcagattttttctcaactcttgtatgtgtctcacttcatgcagtattcgaacagtgccatcatagtgcttgatagcaacttttccaatgcctattaccctacaagaattgtcacagtgatttttcaattgcagtgctatctttgctaatcaaagaattttcttgaaaatcgtgtcaaattaaaacttttagtattaactataaaactttataagctttttataattagttacaaaagtcgggatcccgtttctaatatttttttacgaaatattccaaaatacagtacaaaatgataaccccagatgtcccgtgaccgaacactc

SEQ ID NO: 341441 - DNA, 593 bp, Cannabis indica
atataatatgactatatttaaaatttggggtttcaaaacctcacctaagcgatgcacattaactatcggtggcagtaaaaattggtgtactggaaaattagccaaaaataggactagtgtatatcaaaatgacaaccttgacgggtagatcacacccatgccaaccgtttgtcaaaacggtacacgatgtcaccggaaagtcgctagaaaggggcggagctataaaaatgtcatcggaaaatgtagcgaaccgggaaaaattgtttagtgtaggttgttctcctcgacgagatgaatttagtggtgaaaacgtctcgtcaaacggacgccggaggtgaccgaaaaatccgttcaaagtttgaaacccaaaactttgacttgcgatcccgagctaacaacagcgaaaggagcggcgccgcttggggggtgaggtcgccgacacttgggcttccgatttgttcggtgcgtggggccgggcggtggccggagtgtggttgtgagtgtggtttgtcggttttcttgttttgtgtttgagtttaaagagagagagaaagagattgagtgaagaagaggacatgtgagtgagagaaaaa

SEQ ID NO: 341442 - DNA, 647 bp, Cannabis indica
gaaggacgtagacagagttgaatagctcagcatagacctaactattttgaaaagtgtgcgatttcttctttctgcaactccattttgctgtggagtgctaggggcagtatactgtgattcaattccaagtttaattaaatgatctttgaactgaatatccatatattctccacccctatcagttcgcaagatctttaatgttttacctaattggttttgagccaaagcatgaaattcctgaaacttttcaaacgtttcagatttcttttgcattaggtaaagaaaactatatctagagaaatcgtcaatgaaagtgacaaaatactcataacctcctctggctttgacatttagaggtccacagacatcataatatactaacccaagaggttgtttgacacgctctccctttgcagagaaagagtgcttggtcattttttgttcaaggcaagattcacaaactagtaattcacccaagatgacatttttcaatggaccgtctttggttaacctgtgaagtctatcatagcctatatgacctaatcataaatgccatagatatgtttcattattgttatcgatcttttctcttttatggtttctcggtttaacaacattgaaaagtttgttgttaagtgcgatttgta

SEQ ID NO: 341443 - DNA, 1908 bp, Cannabis indica
caaaaaaccagcacagaattcggcatttgcaccagtagctgactggtttatagacgataacgcccagcaagagcgtgagaaagagcagtccaccaagacatgaacaattgtctccacatgcatattacacaaaggacataaaagatcaacattaacatgttttgaatgaagttgtacctttgttgggaggcaaccagagcaagccttccaaagaaaatggtgaacttttgagggcacgggcagcttccaaagtttcttccaaaaattgtcatcttgcatgaacaaccaattccctcttgatgcttggagaaacttgtaagcacttttaactgaatagaaacccgaaaattccatactccaataccaaccatcaatagcccgagattgactaagttgaatacttcttattaagttgacatcacgctcttcaaacatatcattaagaagctcaacatcccaagatcgctccccaattatcatcaaactagacacatattgatccactaggcccggattagaggacaaaataaagggattagaatcattgggtaaccaaggatcatgtaaaatgctaaccgtgttttcgtcgagctccttgctttacaagatcttgagccgcccaaatacttctccaaataaagcttgggttttgtcctagttcggcattgaggaaagaaccatgagggaagtatcttgctttataaatcctcgccacaagtgtgtcctccatagtaagcaaacaccaaccttgtttgcccaaaaaagagaggttatagtcacgaagatcacgaaagccaagaccaccaacatctttatgttgacaaagcttcttccaactaatccaactcactcccctactagaagagttcgattgggatttccaccaaaactttgccatcattccttcaaggctcgaacaaatttcttgggtcaaaagaaagacactcattgcataactcggtaaggcttgcgctactgacttaattaaaacttctttgccagcttttgataaaaacttagtctcccaactcaaaatcttcttcttcatcttatccttcaaaaagcccagaatagcatttttatttttccccatgatgcaaggaagacccaagtagaagctatcattagaagccgcatttaaccgcataagaccacataaacgatccctcacagccgaagtaacatttttgctaaagaatatagaagatttagcaaagtttacttgctgtcccgaagctagctcatatctttgtaagaggcgcagaacactctgagcttcattctcattggccttacaaaacacgtaactatcatcagcaaatagcatatgagacaccacaggggcacccctagccactcgacaaccagtcaaccagtgttgccgctcaaagtacttcaataacaaagagagaccctccgcacaaatcaagaacaaataaggcgacaatgaatctccttgtctcaaccctctggtaggattaataggccccatagaatgacctccatgagtaatattatatgaaactgaagtaacacaggacataatcaagtgaacccaatggcggtgaaagcccattcgaagcaacatattctcaataaagttccactcaactctgtcatacgctttactcatgtcaagcttgatagccataaaaccctccttcccaactcgcttccttttcagatagtgcataatctcaaaagcaaccataatattatccgatatcaatcggcccgggagaaaagcactttgatgatttgagattaccacaggcaaaacatctttaaatcgattggccaacaccttagaaatgatcttataaagcacattacatagagatatagagcgcaaatcagtcatagactccggatgttttttcttaggaataagcacaatattagtatgat

SEQ ID NO: 341444 - DNA, 826 bp, Cannabis indica
ttcccttggtttggattggtcggaagctccacagcctttgaatacattattgtcgtcaccgatagaggtttgaagtccttggaaacaaatggaaatggcttggtgtgtctgggtattatgaggttgggaggatgaacttctgaactcagaagggacactttggcaggaaagagatgatccattctgaaagtggatctcacaaaagagccaaaggtttatgaaaaatgacaagctcgagtcgcccttttatacccaaagtccagtgacaagaaagctaagctttgaaaaatccaacggttgagagaagtgtcgaatatgaaaagccgattcataatgaccctcgaaaccgtacaaccgccagaatcaaaggatgcattttttccaagaaaagatcttgacgaaaatgccctctgtaattattaaaaagctctttttactaaaaaagaactttttaaaaggcaattgttatacccaaaattcggctggaggacacgtgtcaagataaagggaatgtgaatcgatacaatagctttttatggaataactcattaattacgtaagtattagagtatatttgtaacccgctgactgtaaggtcttaggcgagaaatcaatgtacaaactagcacttagtatattagcgagaaaccatatgtcaataaaatatgaatggcgagacatcaaggaaaaaacacattggatgatgaaagcggtgttaggttttatgccctaaataaaattccatttcaatgtaatccatattattcaatatcaataaagaaacagaagtatttttcattaatttgtgtatgttttggttcacctt

SEQ ID NO: 341445 - DNA, 833 bp, Cannabis indica
tatataggtagacaaatgtcactctatatagtctccacttcattcctaacatttatgtgtattatggctgcgaaggaaggacttgctaattcaatttttaattaggtaaaactagtataattagcctacaataattatttaaataaggcaaatgtgccttaacagctggggttgttcatgtgagggagggttgggtccagtatgtggtatcccactactaatgaccctctaactctcacacaaggcccaaaggagaagaatttaacctttatttaaataattgttagagaaatgtaagtaaatgaccctatttctaactctacttatagtttatgcctcttttttaaaataataaagcaagtgtcattttttactttttaatacctaaaatatccttcattatataaaaggtattatattttttatcccttcaaaaaaaattatgaaaaacgatgcagaccttgatcaaaacatggagcatgtcttcaatcttttccaattaattcagttttgttcaagcttatcataagaatttctgtcgtcattcatccaaaaaatgatcaaaggttatgctctcatataatttttctctctagtaaattttttcaattattttctcctactttctcctaatcgaaggtgtgaagaagctctcctcatttttcgattggatttcacacctcaaacttatagatctaaaattacagaggctgaatccaaacaacgaccaaagcttcttctccctcaaaattttctgtttacttcgcttgaatttttggatcattgcctcccgattcttttctctcctccctttaatttttcaaatttgttca

SEQ ID NO: 341446 - DNA, 515 bp, Cannabis indica
tacgcaacaacaatttcataattgaagctttctacccagcttgggttgctaatcccgtactggtacccaagccgaacaagaaatggcgagtttgtattgattttactgacctcaacaaggcgtgccccaaagactattttcaacttccaataatagatcagcttgtggatgcaacagcagggcatgaaatattaagctttatggatccctattcggtgtataataaaatcaaaatacatccacaacacaaagaacatacaagttttcgaacagatatgggtctatattgctataaggtcatgcaatttgttctcaaaaatgctagagcaacataccaaagattggtaaataagatgtttaaagaccagatcgaacgaaacatggaagtgtgcgtggatgacatgctcgtcaaatccaggaaggcacgaatgcttcaaagtcctcaggatgtataacatgaaacttaatcccttaaagtgctcctttggactcagctcgggtaagtttctaggctt

SEQ ID NO: 341447 - DNA, 637 bp, Cannabis indica
taatccaaaaaaatttacatcaatactatagtaatatatttatcttggtgtattttcttaatggtgaatttgttcatattaaatcatgaagagacatatagttagagttacgtacgtggaaacactactttgatttttaatatttcataacagttgcataaatattttgctaacagttatttagtttgattgaaaccttcgtttgatgtaaccttcggctaaccgcccagcaaccttcgtctgattgaaacctcgtttgatgcaaccttcatctgattgaaactttcgtctgatgcaaccttcggtcaaccactcagcaaccatcatctgattgtgtaagtaatagtgtaagaaatattttggtaattaaaagcacataaaaaatataaatgttgtccacagcttatggagatatttttataaataaaatgtcattttgtaatttccatgtattaattcatttctataattgtatttatctgaatatatatatttatatagaataatatatatacttttaaatcgttaccaaaatatataataatataaaaaaaattattgttttgtatacataattgttaattccatttttagcatatttaattgacaaaaatattttattatttaatgtatattt

SEQ ID NO: 341448 - DNA, 953 bp, Cannabis indica
agattctagagcacttcagtacttcttggaggacaattgtataaccaaggaagaaagccctatgacagtagaaaagaaagaagagatggaagaaattccatatgcaatggctttggggtgtctcgtgtatgtcatggttagcacaagacctgacattgctcatgctttaagcatattgagtaggttcatgtcaaatcctgggataaaccattggagggcactcaaatggttgttgagatatttgagagggacatcggatattggattgacttacaagagagtttcagagaaagtaacattgaaaggatatgttgatgttaattatgcatcaagcaaggatactagaaagtctactacctcttgtgtgtttcaaactaatggagattgtattagttggaaatcacaactccaatccgtagtagcactttcaactacagaggcagaattcatggcaaccacaaaggccttcaaagaagcaatttggctacaaggaattctgaaggagttgaagcttctagttggaaaggcaagggtatattctgacagccaatcctcgattcatttgtgcaagaatcttatttatcacgagaagacaaaacacatttgcattcggttgttttggataagggagaagatagaagaagtaatagttggagaaagtgaagtcagaagagaagcttgctgatattggcactaaggtgttacctgttagtaagttcaagcatcgcttggacttactcaaccttagttgctaagtagctacacatgaaagcattaccacctccattggacatatatgcttagcttgttggggcttgaagaaataaggtgaaatttgtggtattattccttaaacccctaacaaccaagattcggtttgttagttagtctttaactaacttaactatcaaaaaggcaacttgcatattgggtcccttggcctatataaagag

SEQ ID NO: 341449 - DNA, 749 bp, Cannabis indica
caatgctgcttcttcatgtacaattgatagtcattttcttcaatgttcaaattgtaatgagaagggacatcaggaagaacgatgtcccagacttctaaacaattcgaacgaaggtaatgcttttgtctttgaatcatgtgttttagagaatgacaaatccttatggattgttgattctggatctactaaccatgtttgttcttcattgcagctgcttgaaacttgggattatcttaacccagaggagttaaagctcaaagttggaaatggcgagttagtatcggtccaagccaaaggaagagcccgcctcaagtttcaaaagaaatttttagttttagaaaatgttttatttattcctaattttagtagaaacttgattagtgtttcatgtttacaaacacaattttataaattgaatttttcgagttctatttgcacaatttctcgtaatggatttcaattatgtgttgctcacatggaacaagggctttatgttttgagatcggatatacaaatcgcactaaacaatgaacttttcaatgttgctagacctagaaaccttaaaagaaaagagattgataatgatgatcaaacttatctatggcatttacgtttaggtcacataggctatgatagactccataggttaaccaaagacggtccattgaaaaatgtcgtcttaggtgaattacctgtatgcgaatcttgcctagaaggaaagatgaccaaacgttctttctctgcaaagg

SEQ ID NO: 341450 - DNA, 505 bp, Cannabis indica
gtttctagtcaggcgagaattgattttttatcgggatttatcgtccttgacgcgtcatccttttcgtacaagaaataagtccatgtgtcagttatatacgagactgttgtactcattatttaaattaaaaaatcatcaggtaagcaacagaatcatactacatcctcaagatcaccatatgtatatacattaaatttgaaataaatagaacgaaaagaaaatttacctcttgaagcctatcagagtattcttgtttcttttcgtaagttatatcattggatgatgatgatgaaaaactcacatcgtagtcttccgtatcttccaccatacacaagaattagtgtgagctaataggataaagtgtatattatgttcaaggtttaatctcaaaacatgagcaagaattttgagagtgatgataatggaaaaaggttttaatcaaattaatcttaagaactatacgtatctatttttagatttacatggtatctatataaattaaaac

SEQ ID NO: 341451 - DNA, 846 bp, Cannabis indica
gtcccgagtgcaggtccaagtttttgttttggtcaggatctcggtgcagatgtaggtccagcattccgatctcagtctgggtcatggtccgagtcaaggtttgtatcgggatcactatctaggtccaagtctatttttgggatcaagtcccagatttaggtccaagtccgcgtctcagttctggtctgggtacacgaccgtgtcaaggcccgagttccagtctcagtttgggtctaaggttatgtctgtgttcggttctaggtctgggtccgagtcttgatcacagttctagtcttgttctaggctcctggttcggcgattcttgttcagtttctaattttgggtcccagatctaggtctgggttcaggtttggttcttcgtctgggttcgggtttggtttttcgtctgggtttgggtttggttcttcgtctgttctaggccccgttactcgaatctcgagtcaagatctggatcgctgtcatgggtctcggtctggttccggttaaggtcccaggtcccatttctgagtttgggttcgggatcgagactggggtgcaattctaggtcccgaccttggttctgtgtccctagtgtggttgcttgttttggtctgagttcatgttcgggttcgggtctcgagtctaggtttgtgttgggatccggttccagctcccaattctggtctaggtctgatttggagtccgggtccgagttcggttacggttctgggtctaggtccaatattagttatgattccatgtccaagtcctagttctagtcgcggttgacatccggtttcggttccaattttcggcacaggtacgggttcgggtccacttttgggt

SEQ ID NO: 341452 - DNA, 627 bp, Cannabis indica
tgggactcagactaggaccagaacccagacgatgaagcaaacccaaatccagacctagacttgggaccaaaaattagaacctgaactagaatcgccgaaccaggaacctagaaagagactaggaccgtgaccaggacccagaccccgacctataaccgaacacagaactagcctcagaaccaaactgagattagaacttgggcccagacacggccgtgtgcccagaccgtaactgagacatggacctggacctaaatctgagatccgatcccaaaaacacactgggacgtagatagggatccggatacgaaccaggactcggacaaagacccggacttggatcgaaatgcttgacctagatatggaccgagatcctgacccagaccaaaacttggacccgcactcaggaccccaacttggacctggacccaaacctagacgcagatcgaggtctagacctagacacaaacacggacacaaactcagacccgaactcaaacccacacatagaatcagaccaaaagctagagctagaccaagacccaaactcgaacccagaccaagatcagaaggaaggatttagacacagaactaaacctagactcagatcgggattggaacttggga

SEQ ID NO: 341453 - DNA, 621 bp, Cannabis indica
aggctgtgaagaatccagtttcaagagaaggagattcggactcagatcttggtgatactctgctacagataggatacaagggttatagatctgagtataaggagcccttattattccgctgcacccactgtaaggtttcttaaactttatatgtgtttaattacattgttttataaattcatatttaggatgttaaacaacatacatagtaataaatctagatcctagtaaaatatattcccacaactggcctcatagccatggtaatgatttactttcatgaaatataaattaaaacgatgtttgtgttgatttggatggtgtcatgatggtttatgtgcttattgatgatagtttagaaatcgcaatatatgttgtaaaaatattttttatttcattctgaaaatatttttattagaaagtagacaaaaaaattaattaatttaggcttctacagaacccaattaggattttttatgaattagatgattttttgaatttggatgaaaatatttgaaatcaggtgcacacgtgtgcgcgcgctgaccctaggcgtcactcggatagcacgcctcttcagacaggagctgaccgagttttctcggacacagtcctgtctga

SEQ ID NO: 341454 - DNA, 992 bp, Cannabis indica
gtaaaaagctttgagattttgagttcttctattggaggatgctctttggttgtaaattggtatagatgaatatacttgctgaattctcaaaaaaaaaaaaagaaatatgacacttttaagtttgaccaatttatatggtatttttttttaagcatttttatggtatttaagatgtcatatatatgtaaatttaatttttaaatctcatatttaatatttttattcgttaagctagttttatttgtcacggataccgaaaaagttgtcggagttttctatcggtgccgaaaaaataaccagaatagctgtcggtgccagaaaagtcgtcaaagttgtaaaccgatgccgaaaaagttgtcgaaattagcatagtcatcgggattggaatagtgattttttcggtgatttttctaacggcaatgtcaatttcgacgaattttctagcgccgacagcaactccgacaccaacagctactccgacaattttttcggtatcgacagaatactctataaaagtcgtcggaattagcattgtcgccaaaaaaattactgaaaaaatcatcaagaaatagtttcttgatgaagaaaccagtttctaagtgattttttcagggacaatgccaatttcgatgactttttcggcaccggtagcaactctggcaatttttccgaagctaatagctacttcagcgactttttcggcgctcacaacaaactccgacgccttttcaagcaccaatgataactctggcgatcactatagtttcatttattttattttgaaaaaaaaatatgaaggaaattttaatatttttttatggtaatttaatcccatatatgttaagtttttattttaaatgccgtattgaataatttcataatagaccaaaaaattgaaaaaaaaaatacaaaaatacgaaaacacgattttttaaaaatttattctttgaacttttttatttacaaaaatacatcttcagtaaaaataataa

SEQ ID NO: 341455 - DNA, 640 bp, Cannabis indica
cctcatatatgaataaatttttttggatatttacatataagttattcaatattaaatattaataatttaatattcatgcatatatcaaaatattcaactcttattaataatcaaaaatatctttacagacttttgaaggcataaaccctaataattctcacttgccctaaaatcaaattgggcatctcccttaatcccatattagtcatatgacccataaaagaatttgttgttagcatctttatgaatggatctgacatgttatgttgcgacgcaatcttcatgactgtcacatcatccctctctactatatttcttagtagatggtacttcttctcaacatgctttcctctcttgtggcttcttggtttccttggagttgaccacctgtaacaccctaaataattagacacgctacccaagatacttaagaaatcttaatcacctaaatgggattactaataaaattagcgcggaaattaaactttaataacaaatagaataaaaataaaaacttgtaataattaaagttttccaaactaaaagttacaaaagttgggatccaaaaaaatatttacaaaatactattacaagttctttttcattggccgacctaagcggcaaaacagagtcacaaaat

SEQ ID NO: 341456 - DNA, 631 bp, Cannabis indica
tctacacttattatattataaaataatataacaaaagaaagaatcaaacttatatgtttgctctttcctacaaggacatacttttctatgtagaattatcactattttctctcaatgtttacctcgttaaaaaaaatgcttcacaattgtattgtcttgaaataggtccttgcgaaaaacaaaaactacaaatcaaacaaagcaacaccaaattaaggcaaacgcaaaactaatcaaaataaacgcaaaactaatcaaaataattataaataatgattatatgtatggtgaaataaaattataaatcaaataactcaaaagtctcatacgtacccatcaaaataaagcttagtattgtagccatgatgcctatttgctcacaattaccaaaaagtcttaatggaaacaaataaatgataattatatgtaattctcacggactgtgatttaagatttagatttttttttcttaaaaaagaattattaactaataactattaaaaatttaatacgtactagcttattttattgaaacaaaatatctgttacagaaaaaataaataattttaaaataaataaatatagagaaaaaaacaggaatattctaaaaagggaaaaatattacaacaat

SEQ ID NO: 341457 - DNA, 516 bp, Cannabis indica
ctttagggaaaattcgcctacccctcactgttgcacaagctccgaagagcattagtgtgatggcacaattcctagtacttgatcttccaatatcctttaacgtcatgttaggtcgaccaaccttatatgacttaaaagctgttacataaattttccattcgcgcatcaagttcccaacaaagaatgtggtagggtgcctaaaaggaaatcaacaagttgcacaggaatgttacaaccttgccctaaccaaggccgaaaaggaagaatcctctggtcagagttcagacaaggggaaaagcattgccaaatagggaaccgccctagggagggacgaagatgtggatacccgacttggggagccaaataccaatgtttggccagtggaagaattaaaagaaatagaaattgacccaagtgttccgaccaggaaactcaaaattggaaaaggttttttgcttgaagtaaaatatgctctgataaaatttctaagagcaaacctagacatttttgcctggt

SEQ ID NO: 341458 - DNA, 503 bp, Cannabis indica
aaggcacaactggaagatctcgaactagttaaagttcgaaacgaagtaatggctggtcggcctaaaggctttttcagtctcaaacagtggaatgttgttatacaaagctcgggtttgtgcttctaatgatgaagagattaagaaggaggtacttgatgaagctcataccacacctatttcgtgcatccgggaaccactaaaatgtatcaggatttaaaaccctatttttggtggtatgggataaaaagagaagtggtggattatgtgcccaagtgtttaacctgccagcaagtcaaggctgaacatcagggaccggcagggtttttgcaacctttagttcttcctgagtggaagtgggaggacattgcaatggattttgtaactggattacctagaactatgggaatgtatgatttagtatgggttatagtggatagattcacaaaaatcagctcactttctaccagtgaaaattacatattcagtggatcagtacgctgaat

SEQ ID NO: 341459 - DNA, 784 bp, Cannabis indica
gggtggaaggcatggtttccaatagtggggattagaaatctaagtggttttacgtttttaagtaccaagattaggagcgatttttaatcgtcgacctagtacatcgcacactctaacacttagttaattttcacgttaccttgtggcatgatctaacacgctcttccttattgttcgcagatagaccggctcgacccgtattagactcggctagcaaggaagttgctgaggttctcggttgtctccctatttaagattgcgactggcgaaagctgtgcacgaccttgaagctgcgggaacacaagttaattccagagaacaccagccttcatcgggagccagtatacaaggagccatctgagaagcaaaatgagaagatagataaacgtctttctaaacagacctctcgaccaacatcaggtaacacagcacatatatgcggtatatatatatatgagccattgtttatattttaacttatcttttcttatcttcgcagaaatgacttcttgaaacaagctcctgttctcaatcgcaagccgaagaccgaaacagcgacaacttctcctgtcgttcctcagaaaaggaaaagtgacatcgtgattatcccagctgctgatacgtccaagaagctggcgaggccctcgcaagacaaggagaagaaagtcgtgatcgatccagctgttcgagctcgcgattttctagttcttcaggagaagtttgtgggcgaggagttcatgtcaaatgttgagaggactccctctgaggaacttatgcctcgctc

SEQ ID NO: 341460 - DNA, 1010 bp, Cannabis indica
cacgccctaaacatcgatccaaactttcggtctatttaacaacaaagaagattgctggataaagaatgggcccaagcactaaaataagaggtagaaaagttgcgcaacaacaacttcatcattgaggctttctacccggccatggtagctaaccccatgctgatacacaagtcgaacaaaaaatggcgtgtatgtattgacttcaccgacctcaactcggcgtgcaccaaagactgttttccactgccaagaatagatcaacttgtggatgcaacgaccggacacgagatattaagcttcgttgaagcctattcagtgtataatcaaattagaatgcatccaccggaccaggaacatacaagtttctgaacagatatgggtctatactattataaggtcatgccattcggtctcaagaacgctggagctaataccaaagattggtaaaataatgttcaaagaccagatcggacgtactatggaagtatatgtggatgacatgcttgtcaaatccaagaaggccgaggacatatagatgaactggacgaatgcttcaaagtccttaagaaatataacattaaactcaatcccttaaagtgctccttcggagtcagctcgggtaattttcttggctttattgttaatgcccgaggtattgaggcaaatccataaaaattcaagccctcctgggtatgaaatcacctacaaaaactaaagaagtcaaaagtttaactggtcagattgccgcactcagtagatttgtttcaagatcaacggacaagtgtgttcctttcttcaacatcttgctaggaaacaagatttttgaatggatggaggaatgtgagaatgccttttacgagctaaaaagacaacttgcaaaacctcctgtactctcaaaaccattggacggagaagagttaaggatatacctagctatcacagaacatgctgtaagtgcggtactgatcagagaagaaaacaatatccagcattcggtctattacatcagc

SEQ ID NO: 341461 - DNA, 1461 bp, Cannabis indica
aaataattaatagaatttttatattaagtattagaattaatatttaggatgtatttgtcaattcttataaaagtaggttaaagaaagcatacttaattctacggaaatttcaacatcataacgactataacagaacgttcctaaaaatttaaagctattaataacaacaaaatacaactcaaaattatataaaataatcataacaacatttagcaatacaaaaatttactacccatctgaccgcagtacatacattcacagaatctactccactacggatgagtatttaagatatttaaactcatctaacatgcatattattccacccatcgacctgaccgcagtacaatatatcacagatgctactaaattactagttagtaactaattatagtatactatatataatttgtaactaacttctaaattattaactatataataattgacgctcctcacgcatccatgatttatccctaacaaaaattaacaaaaaaatcctaataaccaagtttaagagaaacttataccaaataattttatcctaattctactgaaattccaaccacataacagctataattgaacactcttaaaagttttaaagatattaataacaataaaaaataatctaaaataagataaaacaagtgatgatgacttagataatttccaatcatcattgcatttgtcattaatattttaatttgagttttatgagtcaagtgtgttctaagataatagaatttaggtttctagttctagaaacgtaattatctttactttagtttaagttttatgatacatctttggtatgtttaaatgttatgtaatattttattcatctttaggtgttctaaaatgttatttcaatataatttatgaggcttacgtatcaaatacctcgaggcttatgaaattaataattagtaattaattatagtatactaaattactaattagtaactatttttaactttaccgaaatttcggcagtataacgactaaaattgaatgttcaaaaaaaaaatttaaaattagtaataacaacaaaatacaatccaaaataatataaaacaatcataataacatttcacaatacaaaatttaccacccatccgatcacaatatatgtattcgtagaacctacttcaccacaaataaatatttaagatattcaaactcatctaacatgtatattattctacccatccgaccgtcatacaatatatcgtagaacctacttcgctacggatgaatatttaagatattcaaactctactaagcattcataattaattaataataaaagttagtaaatgtatacctcgagctagctagattctaatcaacactaaataagttggatccttacatattaacctcacaacccacaatataaagaaatactacaaaattaaaaatttctttatttaactagttattagttatataatttat

SEQ ID NO: 341462 - DNA, 1736 bp, Cannabis indica
tctagtggatttggtaccttgttacctaatgaagaaatggtaatctccatgaggtgggtaaggtctctaactgtgttagtagaagggagagaattgtcagtggatctaattgaattagatttagaagattttgatgcaatcttgggaatggattggttgactaagtacaatgctaccatagattgtaagaggaaaatggtgacttttgaactagagagtgaaaccccatttgtttttatgggaaaggttcagggaccttagattccaatgatatcaacacttgggaccatggagttattgtgagaaggatgtatgggatacatgactagtgtattagataccacaaaagatatatctgagggaccggagaaggtttgagtagtatgttaattttcaaatgtatttccgaaagagttaccaggactaccaccaaagagagagattgactttgagattgaattggtactaaggattgagccagtttctaaagccccgtatagaatggcaccggtagaattgaaggaattgaaagtccaattacagaacctgcttgatttgcagctcacgaggctgagtacctctccttggggtgcaccagttttatttgttaagaagaaggacgcgtcactacgcatgtgcattgattatttagaattgaacaagttaacaataaagaacaaatatcattttccaatgatagatgatctgtttgatcagttacatggaaagaccatcttctccaagattaaccatcaatctcgttatcaccaattaaggattcaggaagaggatattcctaaaactgctttttgtacttgatatgggcactacgagtttctactaatatcctttggcttgactaatgcaccatcaacattcatggacttaatgaatcaggtgtttaaggactttcttgataactttgtgattgtgtttattgatgacattctagtttattctaaatcgaaagaaactcatgagaaacacctctgtatcatattacagcgtctctgagaacacaagctttatgcaaagtttaagaagtgtgagttctggctatccaagtgagtttcataggacacgtggtaagtaaggatgggattttggtaaatccaacaaagattgaagttcttcgggattggccacgacctaagacagtgaccgaagttagaagtttcttaggattgattgggtattataggaggtttgtggaaggttttgccaagattgctactccgttaaccgagctaacctgaaagaattgtaagtttgtgtggaccgataaatatgaaaatagcttctaggaattaaagaaaagattgattactccacgagttttgagcctaccagtcagtaatgaaaagtttgtgatatattttgatgcctcaagacaaggcttgggttgtgtgctaatgcaatcatggaaggtcatcgtctatgactctaggcagctgaaagattttgaagagcattaccctactcatgatctagaactagcagcagtggtttttgccttgaaggttttgcatcactatttatatgatgaaaagtatgagatttctattgatcataaaattttgaagtactttttcactcaaaaagatctgaatatgagacaacgacgatggttagagttagtcaacaattacgaccgtgaaatcctctaccatcccggtaactgttggaatttattttaccaggatcttagatctactcacaagtatgttgtttaaaca

SEQ ID NO: 341463 - DNA, 806 bp, Cannabis indica
tacattatatacatataatcatgaaataaatcatgtgaaccatgcaacacaaaatgttattctgatctttattaataagcaaatctcattatattgaaatgagttttatttagggcacaaaacccaacatacgtgtcccttcaactttacccacaaacactaatgggttagcactatcgggatcaaataccaccatcttccgtttgcagtcgatcgttgccccatacttggacaaaaaatccattcccaggattatttcgaaatcagacagttgcaattctattaaattggcagttaattcagaaccgtcaatccagaatgacaaggatcgaatccacctagtggatactataaggtctcccgatggtaacagggtaccaaaccccgaagcatatatatcacatggtttatgggaactttcaattactctacttgacaggtaggaatgggtagctcccgagtcagataatacagaataagaacagccatttatagataactgacctgtcaccactgatggactagcatctgcgtcagcctgagtcatggtaaaaagtcgtcctgagttttgagtagtattcttcttaggctcctccttcttggcctgaggataatctctgatgaaggggcccaccatggcacactggaaactagtcttggcccgatattcaccctgatggtgtttcttgcatttcagacactcaggataagattggaatgaagatccgcggccctgatggccacctctgtttccctgatactttctattacccctgatgttccagatgttggatatattttaccag

SEQ ID NO: 341464 - DNA, 551 bp, Cannabis indica
taaataaaatcaaaatgattcaaataatgatatcgtaacataaaagtcaaagaattaataatattgatggttcagtactaaaaataagtaaataagatgtgaaagtatagtaccaaataagtaattatacacttatcatgatatttgaatacttcaatatatgatcatagtatattcccaatttataattttctttttccctatacgtggaaatggtttaatttttccagtcgatatatcgatctatgaattttttcatacagtcacttatatattatttattatttaaggccatatatatatatatatatatagcgtacgcacgtaaaatattaattattgaaagaagacttttatgcatggttggccattttttattcaagctatatatttatatatggtcgattcataggatcataggcctatgtaataatgtagtagcttacttaggatggtaatagctatattattaaattctttattacaatacagagttggtatttagttcatcatagctaaattcgtaacacttccagaccaaaaaaaaaaat

SEQ ID NO: 341465 - DNA, 866 bp, Cannabis indica
aaaccctatttttggtggtatgggatgaaaatagatgtggtagagtatgtatccaagtgtttaacctgccagcaaatcaaagctgaacatcaaaggccggcagggttattgcaaccattaacccttcctgagtggaagtgggataatattgcaatggattttgtggttggtttgcctagaaccatgggatcgaatgtatgattcaatatgggtcatagtggactgattcataaaatcagctcattttctaccagtaaagattacctatacagtagattcgtacgctgagcttatgtaaaggagatagttcgtctccatggagctcgtaaatccattattttagatagagatccaaagtttatatcaaaattttgggtaagtcttcaaagagctataagtataaagctgaaattcagcacaacttttcaccctcaggctgatgagtagtcagaaagaacaattaaggtattagaagatttacttcgagcctgtgtcatggacttcgagggttcatggagtaagtacttgcctttgattgagttctcttacaacaacagctaccaaagtacaatagggattgctccctatgagatgttgtatggtaggaaatgtcgttccacaattcattgggacgaaactagaggaatgaagtacttgggtctgaaattagttcaaaagaccaatgaagctatggacaatatcaaagctctgatgcttgcttcgtaaagcactcagaaaagttatgctgatccgaagcataaagatattacatttcaggtaggggaacatgttttcctgcgagtttcttcgatgaagggtattagacgcttcaggaagaggggtaagttaagctctaagttcattgg

SEQ ID NO: 341466 - DNA, 637 bp, Cannabis indica
tgcacgcatgcaccaggagcttcagacaagaagccgtgcgcgcgcatgcctggacgagtgtgcctgaagacacgacattgcacccgttcagacacgcacaaggctgcaaatctcgtgtcaagaccttgcatttgcctacgtttgccgcacaagacaccctgcagctttgcttgtgcgcatgcggacaaggctgcttgtagccaatctgtgcagccctcctaggtagcacacccaaaaatgcaattttggtggagttttccccaaatatttggattttttcaattttgaaaccctaatttcattcaaagtaaaatattatctttttaaatatattttaagcttaaatatcaattttaaattaataatatttatttttaatagatttttaaaaatttgttaattttttaatttttatatattatttaagtataaggatagatattttaataatggacatattttaaattaaaagatagctttatattaaacttatcttatatgataaattaaataattaataaatgtgaaattcacctagatattttcatagattttctaaccataatattttcaaattaaaaattggttatgttgacttcgcttttagccaacgacaatgagtctttttgataagcga

SEQ ID NO: 341467 - DNA, 659 bp, Cannabis indica
aagtttttggtagggtagttccggtcggtggacgagtaggagttagcaaggacagtgagtaagaccgaacgttcagcagaggaggaaggtggttgctacagcatacttccctacttttgctataatccactgtaccctctgaggagagagagagagagagagaaaaggtagtgaaatgtttgagaaactctgtactaaaatgacctttttataggaaagcttgatagagatttttcggtaggtatggttatttggattgcatatgtgcgtggtggcaaagtgggctgctaaatcactgtattttgattattgactatattaaaaactgtaatgtacagctgttgttcaataatagtttgttccaatttatgtagtcatagatattatacgaaggaactatatatgtgatggtttagaaaatatattggatttggcagtgtgtttataataatgtaacgttaaatcttattatattaagatatgagaataattagtaagccaagagacaccactctggtatactatatattgggtgaaaccattaatcatattcatagctatcgtttaattatttaatagtttttttattgaaaaatattataattttaaagggtgcgtttggtaatatttttttgattagtttttttatttttaaaatt

SEQ ID NO: 341468 - DNA, 531 bp, Cannabis indica
aaaaagagagggaagagagtaggatttgattgatgatggatggggagagcacacgtgtatgcatggaatgatgagtaagtggtaattgtgtaataaaagcaactttgtaagtaaaaatgtagtcataggcgtgtgtgagtaattatgtaataaattgtgtaaaatagatttttcatgtaaaaatttctaataataatgtattaatgagttataaagtaattaaattgataataaaactaaaatatgtcatcaaacattatagttctataactgagattattagatcatgtaaattaatgccattctataattaacttttagagctatgttaaaatttataattcaataattataattttttatctctgtaaatttttattaaaaaattatataaaaataaataaactttactaatttagttcattgattgtaaaaaaaaaagaataattacataagacaccattttttgtaaaatatttacatttttacgttcaaagaatgttttttttttactatttttacggttttcca

SEQ ID NO: 341469 - DNA, 734 bp, Cannabis indica
accaaggcagtcaagaaaaagttcgagcgttggcagaatgctaacagcaaagctcgatactttatgctatctagcatgatcaacaccttgaaaacaaggttttccaatattctcacagttacagatataatgaaccagttgactgaactgtttgggatggcgtcagatcaagctcggtttgaggcaaccaagaatttcatcaatacacggatgaaacctcatcagattgtgcgtgatcacctgctcgagatggcaagttacttccaggaagctgaaaatcatggagctattatagattaggaaactcaagtgagtttgatcttgaatagtttgactccagcttttctacccttcacctcaaactatgtcatgaataagttgacttttgacttccgtgagttaatcaacaaccttcagacatttgagaattgattggaggtccaaagaaaggaggaaacaaagctcctagttctggcactgctaatggtacggctaaggctgagacaaacattgcttctacttcaaaacccagcaagaagaagaagtggaagaatagcaagaaacctcttaaagatgttaatacagctaataagaataaaaaggctcctgattcaaaggcaaagcaaaaagaaaagtgcttctattgtaatgaaaatggccactagaaaccccagtgtcctaagtttttggcaaagaaacatggtatttctatctttgttataattccatgtgtt

SEQ ID NO: 341470 - DNA, 540 bp, Cannabis indica
aaaaaaatatatagagatttggacgataatttttacgtggttcgagtattaacaaacactaatccacgagtaaatattattatatggttggaaaagcttatttaatttacatagtgttttgtcaagattctaaaccctagaacttgcctaagttctcaaatctcgagattatatccctttgcatgaatgaattttcttatatttatggtccaagggttttcgtatgcaggggcggagccaggacttaaatgctaggggggccaaattgtaatttagtatcaaataaaatttttgtagtacatatttatatgcaatactaaaatttaaaacgatttttttcttatgtcgaaaatcatctataataaaatattaaaataaaacaaaaagtactctattattcaaatttctacttatattatctaaattggaaatattactacacttctacttaaggcacaaattaaattttaagtgtggtaaatttttttataaataaaaatttatatgaataaaataattttaacataatctaacacttaa

SEQ ID NO: 341471 - DNA, 536 bp, Cannabis indica
agtttgttgcaatatatgagttttttaagttttaattgtggatgtgatttacttctattcctagtatgtttaatttagtccagtcaagaataacgatagtgttttgtcaccaccatcactgcagtgttctgttgtgtgggagctcttgctatgacggggtctctgcatcatatcgacaaagaccttctagggtggtggttgtgtgagcggcaagtcaaatctggaggtcttaatgggtgtccagagaaacttccagatgtatgtagaattcttatttaaaaagaaatggcatatatttacagccctgcttcttagacctcttgttagagatattattataatggaagaaaatccagatattacaactctattgtaaaaataatataaggacaataaaagagattgattaaatatatgttataatacacatatatacactatatatatatcacacacacatatatataaatatatatgaaaggttgaagaagaagattacaacacatgtaaaataatatatatatatataacaagag

SEQ ID NO: 341472 - DNA, 1149 bp, Cannabis indica
tataagtattaataagttgacaactactacatgattcacacgtgcacacgtttacgcgtagaataatttcttaaaattattattattattttatttatattttggaaatatttctttgcttacctctccaaggtccactccaaatattgaaaattactaaaatatattattggcactactagtattattaatgtaattaagtgttgaattatatgtaaaagttatattttagtacacttaataaaaattattactctaacatagtattttaaaaaatatactaaatttaacacatactaaaaattatatcaaatttgacttataataaatattacttttttctccaagttgtaggggagacaaattgtttgatcgttgtgcaagcgttgcggaattcttttgaaatgttttctttgtttggtttgattatcaaagagtataaattgttacttgcagaactaagaaatgtttctttttattttgttatgcgttcagcaaacgtggtggctcatgtttttgctcgagcttctagtttatatcctgaatgtacttttagtatggggaatattccaactgaactgctatcatgtttggtagcagagtttgaagtttaataaagcttatcaatattcaatttaaaaaaaaaattaacttttactaaattttacactctatatatactatattaccattatttaaataataataaaaaaataatgatttttatatattctcaataaaatatcaaatggctatcaatataattgagtatttatttacttattttacattttgtatattgaagcacaattataaataatgagctaaatataatacaaacttattttttgtgccaaatttaatacaaattttacatcttgcattagaaatgatctaagacaataactttcgagaaatattactaattataattataaggtgtcacttgtaaaaggtgttacccaccacttgtgtccaacaccctgagaatctctaatgagaggtcttatagttgtcaaaaggtaacacatcatctcaaaatattatttttttttattttctttctcatccacataagatttgggaaaattttttttttacaaaaaatactccaataattgacaactcaaaaagttgtccactataatc

SEQ ID NO: 341473 - DNA, 719 bp, Cannabis indica
aaccttttattcgatcaaaatgataatccaacgttgtcccggtaggcgagagttatggttattctcattttatgagcttctaccattgtttcatgttttgtaaatttatcactaagtagtcaccgttagggaaaatttaaccattgtaagaccaacaatggagatcgaatatctcttgattaaagctcattatttaaaataatgtatttttaattaatcatttattttaatctatatattttaattaatgaaaattacttaatttaagttgatccaaaattaatttaaaaattaattttcaactttaatttaattttcgaaaatcattatataaaaatatataaaattcgaaaaaaattcaaaaaaaataataaatacttgaaaaatatctaatttaagttgtaaaataacaaaattttcaacttaaattatttttcaaaaaatttaattaaataacaaattaagtatcttgaactaatcacgttaatttaaaaagtattccattttaagttgatccaaaattaacaaatttttagcttaaaacaatatttaaagatatctgaataactaattttctagaaaacctcaacttaattattaatttcaaaaatattctaattcaagttgatccaaaattagttatgaataactaattttcaacttaaatatattttaatgaaatattaaataattaagtatctagaagaatctaattagtt

SEQ ID NO: 341474 - DNA, 1113 bp, Cannabis indica
tcacaacactaataagtgatacgctaaatcacttccaggggacttaaactagaaactaaaagttttcctatcgataaaaagcatggcaataccccaaataacataaaaacgagaaaaactagggttcctgaaaatctcccaaccggcagaccggttgcacaaccggaattccggttctgggaatttcagaaccccatctggaattccggatgcacaactggaattccggttcctcgcaggaaacaatcaaaaattcataactctttcaaatcaaatccaattcacacaaaaccttcaagacctgttctatataccccaaagaacaataccaaagcaacaaaacagcccagaacacacagatactaaaaatgccatgtgagctccaatctttgagttcaaaactcaaacttggctaaagctcacctacaagcatcaaaaatagaatcaaactacatattcatgcataataaagctgcagaaaccattctcaaactcatgcaacaaacacaccaactaatttcgaaatttctctttgaaaactaaagcttttgaaccaaaaactctaaactagattaaagccaatcaaacatgcaccaaaacagattcaatccacgcaatccaacatgcttaaacctctgaatacaacatataaacacagcagtaacaaacaactcaaaactagcatgcaacactcatctttttcatcaaaatttcaagaaactaaaagagcaagatgaagaaactttaccaacaattagagattgcaaaatattgcaaaaaagagcttgaatcaccaagaaaaattccacttccttgctgctcaaggagggccgaaaagagagggaaagagagagagctttttcacaatttttttctaactttttctaactttgcaaaatgaaaatgaaggttttaattacacacttcagccaatataaatcaaataacatttaatttcaaattgctaagtccactaaaggacaaaatatcattggggcaaaatgaccaatttgcccctccatactaaaacaacataaaggcactaaaggggtattttgggaaattttaaattcccggccaatcccgacatttccaatgtctaataaaccgtcc

SEQ ID NO: 341475 - DNA, 818 bp, Cannabis indica
aattaactgtttttctttgacaactcagcatacgttggtgacttgtccaactgtcacaactatataaacctcctctctccaactcgacatgacacgaaaagagaacaatgcctacaccagtctaagttagttgtgtccacgtttgagaaagagagagattctgtgtaaggaaagaaaccagaaagaacaaggaaacaccattgtctttgctgaattctcagctggttttttgagtggattgagggttgtaaatggagattgctcactcttgaagtgacttctctcagtgtgagatttcatttgtaattcttgtattcaacattggtgattaaagttgtactctttcctttctcagatattcaattcaattctatgacatttctgcttttgttcatcttcagttttttagctcaatgtttcattaagtttctggttcagtattaattcttgtgtcattgtcattgttgtccttaaatttgttgttatggtgatcttgatcaggtttttaatccgcaacataatatatattattcacataacaataatatatattaccacattttaatctacatattattatattaaaaacaatataagactcgctagcccttacactacaagaaagagagctttcttcatactactacaaatttgggctttagaggtggttttaaaggcctttcagcttcaattttggtgaaattcgctacccaccctgatccaaataacgatgtagagtctaaattacaaccgtcgctaaatcgtaccctatgtcatcagttcttttaaagtaaccgacgccataggatacatatggc

SEQ ID NO: 341476 - DNA, 539 bp, Cannabis indica
ttctttgtttttttatttgttttttcttttcaatattgaaacaaaggcccaataatgaatatcaatttatttggactttgtgagctcattccactttgatgatagttactccatttttttaacccatgagacaagttcaaaatgtacatttaatctttttacaaaaatacacaatattgagattaacacttataaaatgggaaactaaattaaattgataaaatattacaaaattaattaaaatttaatctaaaaaatactaaaattaatatttatgcaaaactaaataaaaccaaataaaagtcactaaaataaactaaaaatacttgagaacaaagctaatttaatgcccaaaaagatataaataactctattttcatagagttatcacaccccaaacttaaaactttgcttgtccccaagcaaaaagaaaataaaattagaggcaatatgacactaaaattggtgatctttacattttcttaaaggttggttaatgaacatagcttagagaaaaaaaaatataaagattgtccaat

SEQ ID NO: 341477 - DNA, 974 bp, Cannabis indica
gatgataccccagccgaggaggccgtcaagaaatcatgagttctgaagtaccttgcctttaaaacccgtgcaagaagagaatcaggattttgtagaatacgccaagcttgcttagctagcaaagcttgattgaagtggacatatgaacgaaatcccattcccccttccatttttgatgtacaaagaaacttccattttttccaatgagttcgtttcttatcatgagttgaaccccaccaaaactgagccatcatagcatctaactctttacaaaacttagctgataatttgaagcaactcatagcataagtaggtatcgattgaactacagctttgagcaatacttcttttcctccaatagagaaaagcttatcattccaagcatgtaacaatttccaaatacgatctttaatctcagagaataattgactcttattttgctcagaataagcaggtaggcccaagtatttttcatgacactcactaataggcatacctaatatttgagaaaaagagtttttcacatgaagaggtgtatttggagagaaagacataaccgatttatcttcattcaaaagttgtcctgaagcgcgatgataaatatccaaagccctcttgatggcaccacaagatctatcatttgcttgacagaatagcaaactatcgtcagcaaagagtagatgagaaaccgttggagcagatctagaaatggccaaccccttgagccgaccaacagcttcctcatattgcaaaagtcgagaaagcccctccgaacagattaaaaataaataaggcgagagaggatccccttgtctaagccctcgttgagggataacagaaccagtgacagagccattgattataaaggagaacgtgttagaatgcaaacaattcataacgagtgtgatccatctgatattaaatcccatcttacccattacagcagctaaataggaccattccacacgatcaaa

SEQ ID NO: 341478 - DNA, 1668 bp, Cannabis indica
taagcatgattttactatttattttatcaattttttaatgccaaataattcaaacctatacctagattgattcctataaatagatagtgatggtctcaaattatatgatgatgtactcaacccttttaatcaaattttgagccttcactcttctctctcatattcgaatccttcctctctctttctctcttcaattttcgaaccctatagtgatagagtacgtgcccacacatagcaagttggtactcaatcatagtgtgtaaaactgtgaagaatccaaatcaactgaaggagaattggactcagatcttggtgatactctactacagaaaggatacaagggttagagatctgagcggaaggattcatttaattctcctgcaaccaatgtaaggtttcttaaactttatatgtgtttaaattacattattttagaaattcatatttaggatgttaaataacatacatgatagtaaatctagatcctagtaaattatcaccaacaactggcctcaaagccatggtaatgatttactttcataaaataaggatttaaaatgatgtttgtgttgatttggatggtttcatgttggtttatgtgcatgtttgatgattgtatggaaatcgcaatttacgtcgataaattttttttgtttcattctgaaaatatttttcttggaaagtagacaaaaaaattaataaatttaggcttttacagaactcaatttggattttttatgaattagttataattttctgaatttggatgaaaatatctgaaaccgagcaacacacttgcgcgcgcgaatgggagactcactcagacaagaggccttcagacaaggccctgtccgaatttttcccctcctgactgaggtttgccccccaaacagactgcttgcagcccttctttcgcccaagttcagccttgtgtgcgcacagggagtatgcattgcatactccccttgtgcaatcttgtttttgtgatatcttttgattcaaaaatcattttcattgaaacaaaattcaaattttggtagaattttgtgcagaatatgaattttcaattacaaatctaattatcaggatataatttttatcaattttttaattaattaaaattagttttaaatattagtagcctttgaattttaaaatttaatttttccacaaactagccttatgattagttttgaaatttttgattattttaataataaaatcagatattattcattttattattaaaatttgaaatgatcttatttttatattaaaatattaataaaatttaaaaataatctaattaaagtttcaaatttgctaaccatacaagattttcaaaatttgttatttttgaaatatatattttattaaattaaattataagattagaaaaatgttagttttgacattttatcttattagatatttattttaattaaaatttaaatttttggcaaaatagcatgaaattttgagaagttttttaatattggtttgaatagaaattttaggttttttaaccataaaactttcaaacttaggatattttgttttatttaattattaaataaaattgataataccctaaccatcaaaatatcttatttttcaatttgtttatttttgttatatttatttattaaattataagattagaaatat

SEQ ID NO: 341479 - DNA, 738 bp, Cannabis indica
gagtgcatattctctgcttcaataatgaaaaccagcagagatattccagataactttggaatttggcggctcttatggcagttgcagctccctccaaagttcttaattttctgtggagagcttctaccaatagtctccctactcggttgaatctttccataaagcatgttccaattgctgtaatgtgttcgttctgccttgctacccctgagacgactctgcatgtgttggtgcggtgttcttttgctaaaagtttctggagcaaggttccaatctgtagtggcgcctgatgcaatgttattctcgagttggtttgaagcgggtttggtatcgtggaacacggccgaggctcttgaggctggtatggtctgttggtcagtttggactcatcgtaacgatttggtttggaactctaagcacgctgatgcgagtgaggtagtggccatggcaaagttaaattatgttgaatggtttaatgctagaaaagttaatgtcatagatgcaagcttaaaatggcaggcgacattactcgtggagcagtggacaggccccgatttcccttttatcaaagttaatgtggatggtgcacttttttctagccaagggcggtatggattgggcttcattgcaaggtctgctgggggttggtcttgggggccagaagtttatctggagaaggctctttgcaacctcatattgtcgaagccattggtatcaaggaagtgttgggttttatgc

SEQ ID NO: 341480 - DNA, 657 bp, Cannabis indica
cccactactgttggccccctaactctcacacaaggcccaaaagagagaaatttaacctttcattaaataattgttattacttgaataagcctaatattaattgggcctaaataaaactatcataggtgatattctattcgcaacgtagtccatttaaatttctagaatgaaataggcttctgctaacgcagattttcgttagccaaaattaataagccttaagtaataaatactttacagaaataaaataataaataactctaaatatttttacggggttttacagttaaatctgcatactccacgagtcttttttattaatgatatttgtcgagtacaaaatacaatatcaaaatgatagtatttctctctcaaattttccatcccattttctgtggaatctacccctatttataggagtataggttggcagttgttcttttgggatcaattcaaatgtaattgttcaagaaacgtaaacaatccccacattttatttaatcacatgtgggataatatctaatgactacatgactactctttgtttttatcttttagacagttattgctgacttgaaatttggtttcttgcttgacatgaattgtcctccttatccatcttagtaaggaaaaaatgctaagtgttggcaggtagtt

SEQ ID NO: 341481 - DNA, 349 bp, Cannabis indica
cctctatcgctacgcaacttcttgatctttctactaagttgattttcaatttcagccacaaatagctacaatatatcaagagcttcacttttatttttcattaaatacacaaaggtgaaataagaacaatcatcaataaaaataataaagtagtgtttaccattcctagtcaaagttctatcaagtttacaaatctcataatggattaaatctagaggctctattaatgctaaaaagtggccaacattagctcgctaggttggcgagatgattaataagtttaagtaaataatttagagggacacaaaaaaattatggtagttcactcttcatgtcgcgatggtaatag

SEQ ID NO: 341482 - DNA, 1030 bp, Cannabis indica
tcattgagtaaattctcaataattaccctaagtaagatcataatcttacttcattaccaacataattacatttttaataaaatatgtctatttaaatattatttatttttcgggatattacaatgcatatacacataacatatacatacattaagttattgatatcacacattatattcagttcttaccttctttccgaattcaagtgtgctagccaacccaaacggaaagtctcgtgctagatggatgccctaatcacattataaaatcgggtaaggtacatgaacaaaaccctaatcccgggaaatccaaaaccataaccctaggttctgttatactccctagaggttacccaaactctggaattagggaaacacccaaccacgacactgaaatggataaaaattgagaaaatgaagtgttcgggattcctgccaaaaccggttttagaggtcttgcaaaaccggctagccggtttgtatcagttctccccaaactcttcacatcttgctcaattttccaccaaatgctaccaaactttccagagtacctaaacaatgcatagacaatattttccaaccagtatttcacagaaaaacccaatgaatcaatttatgccattaaagtgcaaagctttgaactcaaagcttaaacttgcacaacacccattccaaccattaataccagctgctaggacctcaaaccaactcaaattaagtttagaattcaaaccctaagcattcccaacccttacagcccctatattacaaaatcataaactcaacctaaacttaaattcaagaacgaaggcaaagagatgctagggcttaccttggattgctttccccttgaattcctttttgagaacaccaagattcagcaaccaattctttggtttagggctggttcgaaagagagaagaaggaagagaggttatgctgatttttttgtattttctcttattttctctaaatgaatgaaggttaggaaaattaatttcccttgctgaatttcactttgctaggtgtca

SEQ ID NO: 341483 - DNA, 1358 bp, Cannabis indica
aaaatataaccgttaaaatataaccgtgaaaatataattgttaaaatatagccgttaaaatgtagccgtaaaaatatagccgttaaaagagagtggttaaaatatagaggttataatatagccgttaaaatatagtcgttaaatataaccgttaaaatatagctgctaaaatatagccattgtaatataactattaaaatatagccgttaaaatatagccgttataacatagccgttaaaatatagtcattaaaatagaaccgttaaaatatagtcgttataatatagccattacaatatagccgttaacagtcaaaatgtggttgctgaaataaaataagttcaataaaagataattcatttaataaaaatatagttgttacaattagataagaacaatacatagaaattacaaatttaaaataatacataacaattagataaaaatacataggaattacaaaatttaaaatattagtcttaatatgagctaccaaattttcatgatctttttttttgctcaggagtcatatttgacgtgtccaagaatagataatccatgtattttgccattacttgtttttattgtaccgccaccaatttctccaacgcatttgctttttgttgattaatatcattatatgtagcaagttgctcatcttgctatccctttctctttgccgccttttggccaatagggcgctcttcacaaacttcatgatcactgatgtctgcattgtatgatgaagtatatgcccctgatcttggcacctttgctctcttaacaccttctgattggtacattgcattccatttcgactcatcttttaacattctccaacagtctataattaagttaaaaatttgaattgttattttcagacttgtacatctcatgtgcattctcaataatttggtcatcagaccaaccactgtgatgtgtttgttgtactcgcttgtaacacccattgaaacgtgtcaccatttgattcatcttgtttcaatggtctttgcattgctttccagttcttcgttgatcatctttgtagtgggtgttgaagtaatttgcgatccaacctcaaaaatttgcagaagtttggtcagttcccacgacagcatccttagatgtattaagtcatgcacttatcagaagtatatttacttccttgttccattaagttttttttttttaggctttccttcttctttatgtagaactaacttttgtctaacccttctaacaccatgtgttgaaatgagttttaaagtaacgaattgtgttgtacgattcaacattctaaatctaatactttacttattaatgtttgaaaccatttcgggttggtttagaaaaggtg

SEQ ID NO: 341484 - DNA, 1002 bp, Cannabis indica
taggattacaatatagttaagttgaagttgaaagaaactttactttatgaacttgagcaaagtttctatggagggtgttgatttattcaatcaaagtgaggaatatatgagatattttgattgattaaataaagtgttacaatgagatgtcacaaattttaatgtagtgtgggaatgttatatatttgttatttaataaatatataataaagattaaaatgtggcatattatatattaatataagattaatatatattatgtgttgtaggttgtattatatcatgtatagtataataatacacataaaattgtaacatatgagagttacaaatctgaaaatagattgtaacctaaggatcacaattgataatatgtaagtaagtgagttattacatatggaaattataaaattaatgggataggtttctagctgtttgaagcagttacaatactcaatcatattatttaaatgggtattgggacattggagaaagatttgactcgaaaaggagttacaaaaactaaatattgagttttcaggaaacagttgttttatggttatttttcaaacacttggaaccaaatttttgaaaacgtcgaacgtaaataaattaattgagcatgtttctagttctcttgcctaacgttttaatcccattaaacaccaattaaagtgctggtaacagccatgtgatgaaaggatttgattttcaaatgtgatcctcaaacactataaattgaggtctttggttcacttgtagacatcaacaattttctatcttctaaacactaagctagaaaatattgagaggcttgtttattctcaaaagcatttccattttattccctaagtgtttgttatagggggaaataagttttttggacaaaggtgcttaaacctttttcaagcgtttggtgatcccccatagctaactttgagttcttcttcatcctctattttgttatggttttctgctctcttctcctctttattttatata

SEQ ID NO: 341485 - DNA, 368 bp, Cannabis indica
gtcggccacttgagaggttttttccaattaatatttttattattttaatgccaagtaattactagcctaaacctagtggttacctataaatagatagtgatggctcacacttaataagagattaaaaattagaaatttttgttttcagaaaaattgagtcattcactatccttctatagccgaccccctctctctctcttttcttcttctaaattttcgaaaaccttgagtgatagagtgagtcgcccacacacatcaagtggtatctcaatcatagtctagaagattctgaagaatccaaactgaaaataaggacattcagactcacatctggtgatactctacgacagaaaagatacgaagggtta

SEQ ID NO: 341486 - DNA, 508 bp, Cannabis indica
caaagctaggtccatagctttgaagaccaaggacgtaggtggcttagttctaccgaaccttgtaaaaattaagagtttgcaatttctatccctaaactccttacatttctagtttgttatttgtttatacttgtgattatctttgttattgcattaaacttaaatatttgcatgaattgtctttggggtttttaaatttctaaaattagcttaaatttccaattcacccccctcttggaaacatatcttgggctaacagttttatgttttgttctggttatattttttgtcaggttttgttttgtttgcacagaaaccagtttttttatttcaattcattttttttttattgcagtgactgtggagtgtgtcatcaaatttgctgaattttttattcgtggaaaaattgatgacattccagctaagatgtcttattgtgtagcagtatatagagatgatcttgctgtgagtttgtttattcatgctaggaggaaacaaattggtggtt

SEQ ID NO: 341487 - DNA, 748 bp, Cannabis indica
acattctcatagttccatctcttcttgacaataaaactggagctccccagggtgacacactaggccggataaaccctatgtcaagtaacccttgaagctgaatcttcaattccttaagctcagctggagccattctatacggagccttggaaaccggttccactccgggtgccaaatctataacaaaatcaatctcccgctgaggtggtaaacctggaagttcttcgggaaaaacatctaaaagttcccaaaccaccttgatgtcctctcgccgaatggtatcttgccgagaggtgtacgacaccacggctagaaaccctaaacagccgccatgcagtaactccctagctgacatggctgaaatcaccgagatccgagatccccgaaccgaaccaacaaatacaaatgattcttcactttccggttggaagatcaccatcttcctcttgcaatcaatactagatgagtatttagataggatatccattcctaaaataatatcgaaatctactaggctcatctctatcaagtcagcacttagctctctaccatctattctgatcgacatagacctaattcaacagcactgagtaaattgagttattaaccgagagctgaccttttacaactgaagggctggcttctgcatcagcctgagtaatggcgaacaccctagctggagtgggtctcgtcggagcccttggtgcctctaatctgagctggggacaatccctcttgtaatgtctgg

SEQ ID NO: 341488 - DNA, 1225 bp, Cannabis indica
ttcaccaactctagccagcatctttgtctaatattcaaatctctctgggtaaagaagtatttcagactcttttgatcagtgtatatctcacatttctcgccatataggtaatgccgccaaatctttagcgcaaaaaccactgctgcgagttctagatcgtgagtagggtacctctactcgtactcctttaactgccgagaagcataggctattacctttctagcttgcataagcacacagtcgagaccttgtctcgagacatcacaataaaccacaaacttttccttatctgaaggaagagttagtactggagcagtaatcaagcgttgctttaactctagaaaacttttctcacaccgatcagtccaaacaaacttcaggttctttcgggttagctccgtcaagggtacaacaatctttagaaaccctcaacaaaccgacggtaatacccagctagacctagaaaacttctaacttcagtagctaattttggtgttggccaatcccaaacagcttcaactttgactggatccaccatgatcccgtctttatctactatgtgccccaggaaagagacatgagataaccagaattcacactttttgaatttagcatatagcttatggtcccataaccgttgcaaaactgatctaagatgcaactcatgtccttcttctgatttagaatacaccatgatgtcatcgataaacacaatcacacatctatctaggtaatccttgaacacccgattcataagatccatgaatgccaccgaggcattggtgagtccaaaagacatcacaaggaattcataatgtccatatcgagtatggaacgcagttttcaggatatcttcctctcaaattcttagctgatgatagcctgagcgaagatcgatcttggagaagaccattttccccttcatttgatcaaatagatcatcaattcgaggtaagggatacatgttcttgatggtaagcttgttcaacttccggtaatcaatacacattcgcagagacccgtctttcttcttcacaaacaataccgaagaaccacaaggtgagtagctcagtctaatgaatcccaaattcagtaactcttacagtttttaattctttcaattctgctggagccattcgatacggtgcttttgatactgggtccactcccggaaccaactcaataacaaattcaatctcccaggtaggtgccaatcccggtaaat

SEQ ID NO: 341489 - DNA, 698 bp, Cannabis indica
taataagtacatgtacactccaatatttacaaaaatttaaacttaaaattaatttttaaaaataactactttaattaatttttaagtaatttttttttcactagtattttgtgctaatttcaattcttattttcgtaattttttaatcatctataactttttttctaataaatttatataatttttattttaattttttattataatatttaaaatataatttattttttatatgcatatttttttaagaatataaattggaaaaaaaaaataaaaaattttaatatatttatgtaaagtaaaaattattgaaatggggtgcacttataaattttaagggtacaaataaaattctcccaaaaaattttcttgagctattaaaattatttttgtatagcatgaactattaaaatttttagattcaaagaattttgtctaactttattatattttcctaacatgaagaacttaggattgttcatgtatcaaatcatacccaccacaactttgatataaaagatatttctaagattcatggtggtggcatcaaaaagtggtatatgggctcaaatgtcttaattagagagaaatttacatggtatactaacttttgttatttttttataaaaatactgtcagacggtattttactttttattatgtttttataagtttcatactatagtatactgtgttaa

SEQ ID NO: 341490 - DNA, 888 bp, Cannabis indica
caaggcaattggcagctttcctttttatttttgtttcctttattttgtctttgttttatttggaaagttgtctttcttttaatttccttttttctttgttgtaagttggctatataaagccttttaaaacactttgaaaaatcagatattttggaataaaattttgagaggttttcttcttcagttcttgagagaactattcaaacttatcaaagactattccttgtggcgttcaaccagacttatcaattggatttccaccaccatttgtggcgtcttccttcataccaaggttcatgcttaagtaagcattgggtcgcggttccacatcaaaattgcgagaattcttagaggctgtcataattggtatcaggtttcatcacaactgttggtgtggttcgtatcatttggtatcagagcttaggatcatcggctttggcctatatatctattgtgtttttcttttcaattgatttctataatcttgtttaactcgtgtttttttcctgtcaattcgtgtttcatctcttttgtttttcattgtgaaatcggaaaactattagaaccacattctattaattttcttgtctgaaacatcatgtcttttcttttcttttcttcataaaaaaaaatcaaaaattcaaaactcttaattttttggctgatttcttgtctccaaattttctgtcaaatagtttccctttttgttattgaaatttaaaaattaaaaaataaagtccaatttgttattggtgaattctagtttccctatttgtgtcacaaatctatttccttatttttgtttctcattggtttcccaaaattgtttcataaggcttgtctacttcgtttccttttttttctttgtgtcattagcaagtaaaaaaa

SEQ ID NO: 341491 - DNA, 1246 bp, Cannabis indica
acaatataaaatatactttaattataatttatagattatactttaatggttatacatacatattttataaaataatttgatttatatattgaatctcatatacataatgtaattaaatagtcacatagacttatacaattatataatatactttaattataatttataaattatactaaatagttatacacatacatactttatgaaataacttagaaaatatagttaaataatttattgtcatctatatagtgtattaaatgattatattgaaaaatactatgatcgcacatagtcgcacatggccacacatagtcgcatagactaatattacgatatattttgaaatatactacgtttgcacatagtcgcatgatcgcacatggtcgcatagaccaatattagagtatattttgaaatatactatggtcgcatatagtcgcacatggtcgcatatgatcgcatagaccaatatcaggatataatttgaaatatactatggtcacatatagtcgcacatggtcacatagaccaatatcagaataaagttttaaatatactatagtcgcacatggtcgcacagggtcacacagaccaatattagaataccgttttaaatatactatggtcgcacatggtcgcacagaccaatattagaatacagttttaaatatactatggtcgtacatagtcacacagggtcacaaaaacacatattaggatatactttgaaatatacttggtcgcacatggtcgtacagagtcacacaagatccataataagtactttaattagcataaattttataaataaatataaataaaagtttgcatatatcaaatacaagaaacattaaatatataatttagataactaaataataataaatcacacatgagttgtgcttatctgatggcacttgtggacatgtttgcgaattatgtcctaactgtccacatgttcaacaattatattgtttcttaagaaattcacctttggaagctatgcgattggttcttggtcttcctatagtcttgtcttcaggaggtgctatcacttgtattgcaagaatatcttcaggaatgtcagtccattgtgagtttggaggtacaggataaatagtttcagcatatgctaacaaccaatattataatgtgtagtactgtgaacacatagaatatatgagttccccagtattttggggtttttcctttcctgctgctgctattgcatggatacatggaa

SEQ ID NO: 341492 - DNA, 869 bp, Cannabis indica
tgtcgttcgcccttaagattcagtcccaaccgagaaaaatgacgtgtcgttttctgacccatttggctgtcgttcaggaaaaacgacagtcgttttattaaaacgacatgtcgtacgtataacgactcagcccccttcagcgcgaatgacgggtcattttgatcctgtgtcttgtcgttcatccaccaaacgacatgtcgtttttccaaaacgacatgtcgtacgatcagtaaaaaaaggaggaaaataggcgcgtgggggcgcgtgcaagggtgtttttcgggccatttttctaccatttccatgtttttttaattctctattattttttggtatgcacaatactaattgcatgaattttattcatatttggttaataattttagtattgtgacataaattttgtgatttatttcaacaattaatgcttattttcttgcctatcgtaagattaagcatgggaaattgattggtaatgaggaacacttaaatattaatttatttaagtattgtattttcctccaaagaacattaagattttttttaagtaataaattatcctatcgatgatggttgcttattaaagatgcgtaatacggtgaagaaaattattaaatattatgaatcacaatttatctatccttttcgatagtgaattaatgtattttgattataatatttaatagattgttcttacctgtgtatgagttccatcttgttaatttgtctgagaactctagcatgcataatgatcatttgttattttgtgaatcattaatttatgagaaaagagcacaaatggcacgattatgttataacatgcatttatggttattgctcttattctcattagctttaagcaatccaag

SEQ ID NO: 341493 - DNA, 839 bp, Cannabis indica
ccttctttgaatttaccgcaactattgtactctattcttctaatcaaatttctgaagtgtcgagaccttgaactctcttcaattcgtagcacttgcacacttcatcccgaagagtgtctcacatgcaatctttctcccgaagaatgtcaaactggcaatcttcctcccgaatagtgactcacatgcacttttcctcctgaaaagtgactcacgaacaagacttctcccaatgcttgattaacaatatccaaagtgttcaatctgcacaattttaacaagaaacaatacaaaataacacaataataataaaatactaagaacttgttggactcaagttcttcacacaataaagaatatactttctaactttaaaaagtaatttagaattgatacaccaagagatctaaccaaaaccagggacctaaggatgaatttatacactttagaatctctttaggctgtggtcaaacaactaagaaacgatcaggtcaataaatgaaaatcttcccaaaaaggaaagtcaaaatctgttcaaacagacagtcagtccgttcaaacaggtacagtgaacctggacagttttttaataaagtttccataaacaaataaggaaactttgactacattaatacctataattgtgcacggtttcttggtcaagaaattagatcaaaaggaataaaatataattaagaatttccttaaaaagaaacaaaagataaaatcaaatattctataaaaagaaaactcatatttatttcgtaataaatcaaaaagtataaaatttgtttttgaaagggttgagatgcaaaatgaccctaaatttggtaactaagtta

SEQ ID NO: 341494 - DNA, 1301 bp, Cannabis indica
tgtcttggctattctcatcgatgactgaaagtctcttacacgcatagtggggtgtaatacagcacgacagatctggaatgctcttgaaaaacactttacgttgcaggtttcttccaatatcttggagtttcaaaccaagttacagaagcttcaaaaaggatcaatgtctctcaatgatttgatcttcttgcatctgttggagaaattctaagtcccagggatcatattgctataatcttcaaaggtttacccagtgagtattacactttcatcatctcttctaacaatcgaatagaagactgatcttgatcaagattctgatctgagtgttaatcttgccttggttgatttcgatcaatcctctgaagtcaatattgcttaccagaactatccaaatcaaagcaacatgtttccacacctcgtggaggtggccatggatagacaaaatgtggagctttcacaggtacaattatgaattacactacaagaaatgtcacttttgccagcacatttttgtgctggaaaagtttagtattccgctggtaaaatgaaatttactttgatgtgttggcaaatcaacgttggtattagaactttttccagcacaaaatgaaaagcactggcaaaaatggtaaaagttagattttagccactgcaaatgtgcgctggtaaaactttgacatttttgccagcgcagtttgcgaaatgcgctggtaaaagtaagtaaaagggacatttcttatagtgttacctactagtactaatggtcgtggtgtttctggtgtcaacagaggtggtaggttccccacactagctaatcgtgttcagtgccagctttgccataagcttggacacacggttattgattgcttctacatgttcgataatagcttcacaggggtgggctcaacttcccccactgctcaagctaatcttgcccagacatctcaaactgatgacaccagttggtatccagacttgggtgcaacaaatcattgcataccaaatgtgcaaaatatggccacaagcactgaatatgaagggcaagatcaactctatgttggagatggttcaggtctatcaatcaaacacattggccaaacttttattaattccaattctcctcatccttgttctaaataatctcttgcatgtgcctaaaataacagaaaatttactaattgtgtctcggtttgcctgtgacaataatgtcttttttgaattccatgctaacaatttttttgaaaaagaccaggtcactcaagcctatccttcttactgggatacaccagagtgacctc

SEQ ID NO: 341495 - DNA, 757 bp, Cannabis indica
acttatatgtaattaaagtacaaaacttgatataagatatactgaccaagtgtgtcaccagtcctaaaacgctttcccttaggccaaccagcagagttaaaggtccaaccgttggtaccgccgacagtgtaggtggcggcacgagcaaactcagagtgaccaaccaacaccatcaacagcaccaaagctgctacggtcattgcactgactcttccctgagccattaataatatgttagtggcctagaagattttattagctaaagagagtactgttagtggaaaagagaaaggtacttagctaatattagagaagagtacttgtgtttatggtggtatgaacctaggaagtgaggccttttaaataagaaagagttggtcgtagttaaagttttgcagggattgggagggacccatgtgtttgaacgaaaatgacataaatattaattatatggtatggcccaaaatatagtgggatagtattttttgtcttgagcatgctttgctcttagccaccagagatctaacactagttcacactacacttagaacatctttaatggaagatttaaaatttgtgcttaatttggcaaaaaaaaattgagtttatattatatttgaaccattatttataattatgtttcaatacacaaaatgtaaaataaggaaaaaataattaatacaaaatttattattttttattcttttattatttaaataatggtaatatggtagataaagtaaataaaatttagtaa

SEQ ID NO: 341496 - DNA, 570 bp, Cannabis indica
ttatgaatgtgaaatcaggggttaaccattgctgtgtaaaatctcggtattgtgactaggattaccggcacctggtcaggagcacccggagatttggaatctctactattgtgggacatcaggtaagacagtggttagcacgtagagtatgcgcggtggcacttatgttgaaaatgatatatgtgagtaaatagtaaccaggattagggttattaccctaacgtgagcggttaatagcctagagttattaccctagtgatataagttgtataaatgctatgccatgctatgtgtatgaatatattgagatttaaggattatgtgttcaaggcataatcaggttggactcggtaatcgaaaccgagaggaaccattctaaggcctcattctatttagacgtgtgagcgcaacacgtaggtctacgctatgtagacataaataggcatgtgagctaacatataggtttgtgtgatacagacatttgacaatggcattactgattatatattgtgataaatatgtttatcattattttatactctcttgctgggcttggctcacgggtgctct

SEQ ID NO: 341497 - DNA, 394 bp, Cannabis indica
ctagaagtagttggctactcaattcagatttcgctggttgtactgattcaagtaaatcattatctggttacgtgtttatgtttgttggtgtgtcatagaggagtaacaaaaaactttgactgctacttttactatggaggccgagtttgtttcttgttttgaggctacatcacagtgtattgctaaagagtttcatttcaggccttagagttgttgattccatagcaaagccgttaaaagtattgtgtgacaattcagttgctgttttcatggctaagaacacaacaaaagtggaagtcaaagcaagcacatcgatattaagtacttagctattagagaacgtgttaaagaaaataaagtggtcattcaacacattagcactgaattgatgatt

SEQ ID NO: 341498 - DNA, 844 bp, Cannabis indica
aaccatttaaatgccaaaactaattgtttaataattaaaattaagagtaatttgcggcaaacactactagaaaattggattttagtgatacacattgagtaactctaaaagtgtatagtgacacttcaacgcgcgtcactaatgagggtgactggaaagacaatttttagtgacacttcacacgtgtcactgaaaccttttgcattcactttctgcgtgtcactataggcatatagagtcaggttttgtcaaactgaaaaagtaacagtcacacacatgaagtgtcactgtatcttttttttttcttttttattaatatttttggagatatagtgacacacaaaaagtgtcactatattaaatatttttctaaaaaaataatatttcatttgatttattaagaatttaaataagtataattatcaatttaaattacaaattatatatgtttcaaaaaaaaattacaaattatataaatacattcaaattttatataagtaatataaatacatctaaattaatagccaaaaaaaaatacacaaaaatgattatattataattagtagcattaatacagaataagtgattaaaaaaaatacaagtataattttaataaaatacataaacaaaatacaataaaaaaatatgatgacaaaccgtaaacaacatatacaaacagaaaaagcaaaaacattaaggtggcgtttggttggaggtaatgaaatagaatggaatggaaaggaaacaattttcattccattcctttgtttggttgcattttaaagtattggaatgacattctaatggaatgctctttccaccattttggtggaatggctattcc

SEQ ID NO: 341499 - DNA, 783 bp, Cannabis indica
aaaaccccaataagctctttagggggggtgaccaggtgacttatgaagcaccttgtcaccagcatgataggggcccagctgtgtactcccttgccctatcaaggccatatattaataaaacgatgtttatccatgcttcttgtgtatgcttctatatggtctttgtgatgcctgtttgttgcctttgttgggccattgcgtgccatttgtctatatgtttgcttgtgggttgtgtgagattggtccttggggacgctttgtgtttgcttgctcatgcttcttgtttgcactcaacatgtgcgagacatgtatcgtgcctaacctttgaacttgtgtgcctgcaggcgcgtttaggctgacttgctagctcggtgtgcgagtaagtgccgcacgtcccacctatttgggggtgtccaaataggtggcccgtgacaccgagcaatggctaacagtgattacaagaatcttgaattttatgggcgtcactggtaatgatagggtggcctgtgccacttttcaatttcaagaagacgctctggtctagtgggacagggtgtccatgattcatgatgtgacaactatgacctgggaaaaattccaagaactattcaatgctaagtattataatgtagcagtcagaagtgctataagaaaagaattcccccaactgactcagaaagaaaatatgagtgttactgagtacacaacgccatttgaccgtttggaaaggctggcctcgggaatcaggccaaccgacttcagtaagaaagagaaatacctgga

SEQ ID NO: 341500 - DNA, 772 bp, Cannabis indica
gaccggttcccaaccggaaatccggttctgggtcaccatccggtcgaccggttggtacaggtcccccagaaccggaattccggttctgtgctgggaacccaaaaatttcccccatgacctcaaatctcaaccaaactttatcaaactctccagtacacctatacaatgcataaacaaccatttccaaccaacaattcacagaacaaaccaacaatactcaacttgccattaaagaccaaagctttgaactctatgttcaaagttgcataaaactaacaccaagcatcaaaatcaacaaccagaacctttaatcaatcaatattgagcataaaaactgaaccctaaccatttctaaacctaacagcccctaaaacccaatttcacatattcaacctaaacaaaaagcttaaaaacaacaatcaaaggtctagggttttacctcacttgaaattgccttgaatccttgcttaatcccaaagaaaagagaagaaaattctggtcctagccccttggtttgtcccagccgaaagcaagagagagagagagttcaagaggattttgactttttcctttttaatttcctttatttcttccaaaatgaaatgagttaatcaacttaactctttctaacttaacatgctaggtgtcactatacaaggcagccacctaacccattattttaccaaatgacaaaattgccctttgacccaaaactagggtaattccaaagctaggggtaaaatggtcaattccataaccccgctcaatcccg

SEQ ID NO: 341501 - DNA, 530 bp, Cannabis indica
taacactatatatttaaattttacattaagatgatcttattattatgtatattagtaattaataattttatattatttattaaaataaaatacgtacgatataagagagaagtaaattaaattatacatacacaatattcaatctatatataatttcaaaataaaatgaaagagtgcaagttgtgttgtatacaaattgtaataagttggatctgacaaagctttttcttctcacgtaagttactacaatcacatgcatgcacttaattattaactaatatatatatatatatatatatatataatttataatactagttggttaatttggtacatacatctcaacacaattatataaatacatatacataattaattattaattaattagctaaactaattactaattataattgtgactaattataaattatgattcctatgtagtgactatataaaaaagtccgtggataaaagtattagtcacagaaattacaatttattgtgactaaatgtatttttagtcacaa

SEQ ID NO: 341502 - DNA, 735 bp, Cannabis indica
aaaaaatagtactaataaaaacctaacatgtatgctacgtattcgtgccaagccacctacgtagcaaaaaggcaatatgatgtatcattgtgggatacgacaaccaacacaaagggtggagatattgcgaccctacaactacaaagtgttatacatcaaggaatatggtctttgatgaggtatcatcatggtggtcattacaaaaggaagcattaccaaatattaaagaaataaaagacagtttgcagtagaaaatgggggagcaattgttgagttaccttcaactctagaaacggattaagaggaacaaaatgaagacaacgaagacacaactcgcagtccctgggaaataggggtgcatcaaagaacatgacatgatgatagccaaccagaactctggagatcaagaagagcgcgaaagccaactctgaaatacgctaatgctgttgtagctgaagaagaaaagttcagagaaccagagtcataagagtcatactaaaactccaagtggctaggagctatgaaagaaaaaataagtgcgctagcgaaaaatcagcttgggagttggtgccaaagccgaagggagtgaaatcaatttcgtgcaaatggatctacaaggtaaaaactcgtcctgacgactcaattgatagattaaaggcttggtgttgctcgaggattctctcaacattatgggctagattacgacgagaaatttagcccagtcgctaagattac

SEQ ID NO: 341503 - DNA, 603 bp, Cannabis indica
cctcccacccggatgccaagctacatttgacgtaaagcaccatccattaaaaactctcctgtacaagactcctagtttaggagccttgactctcgtctcgagaagacaacccaacccaattctttgaagagcaatgaatcgcttaactagtgattgcttctgttggttgtttatccctcggacgttccatcttaatatcttatccattggattgaggaggccctccccctcctccaatgttaccactttcatcatctgtttgcttgtccaaacttgctctctgtcctgggatttcagcttcacccaaatcacattgacttgtcgatgcttcagctagaacctgaaatgcattgaccattattgttggaaccccagctggtttctctttaaccttccacacttttctaactggtatgaaaccctctgaatccgcctctactggttttttaccctgttttttctctgttggcagtacaccagtgtccttcttatcccctgtaactttgatagcccattcctgcttcgatcctgttttccttctacactcagcagtggcatgtcccaaaccatagcagtgagcacatttaatgttgggttttatgc

SEQ ID NO: 341504 - DNA, 530 bp, Cannabis indica
ttaaagtaagggaagcaaaaatcacgactgttctggtatatgtcgatgattcattatcactagagatgatgacgcaaaaatttgtcaaacaaaggagaacctatcaatacgctttcaaatgaaggaacttggacaattgaaacacttcctcggattagaagttgaccgagctaaggaagacttatttctttgtgaacaaaagtatgctaaagatttgctgtaaagatttggaatgcttgagtgcaagcccatctcaacacctatggaagctaatgtcaagctatgtgctcatgctgggaatgacttgcaagactaagcaaggtatcgaaaacttgtaggtagcctaatctaccttacattgactcgaccaaatatttcttatgcagttggagtagtgagccgatatatgtaacaaccaaagaagtcacatttagaagtagtacgacgaatactgagatatgtcaaagataccattaactatggtctcttctataagaaaggtgatgaggttaagatcgttgactactgcg

SEQ ID NO: 341505 - DNA, 981 bp, Cannabis indica
tatacagggcagtcacttcttttcttgattcatgcaagatcctcaaggaaatcaatacaactgtcctaacaatggtgcctaagatgaaatgcccaaacattatcaaagattttaggccaataacttgttgtaatgttatttacaagattgcaaccaagctgttgtgttctagaatcaagtgtgttcttcctgagttggtttcaagctctcaaggggggttcatacaagggagattcatcgagcacaatattatgatctgtcaggacctagtaaggcactatggaaggaaatcgaacaagcctaactgcatgatcaagcttgacctccagaaagcctatgatacaattgaatgggattttatagaggagatgctaattggattatagttccccaattcattcatccaaactgtaatgaactttgtgagaacacccagattctctaaaatgtttaatggttctgtacatggattttttgatgcaaaaaggtgattaaggagacccaatgtcttctcaatttttttcctcagaatggaatacttgtcaagaatactgaaggaggttggtgacaagagtgtaatgccttaactgttaggcacgttacctaagataattaagaaaccctaatcccctaaaatgggattactaataagattagcgcggaaattaaactttaattacaaaaggattgaaaataaacttgtaataattttaactttataaaccaaaagttacatgtatcgggatcccaaaaacattttacaaaatactattgcaagtctatttccactagccgacctaagcggcaaaacagagttacaaaattcatcactgatagaccccaacccgcttggtctattgtggcccgaacatgtacatacaccgtttagctcccatactcatggctaatcagaaacagatttaccgtttcttgcacagtagagcacccgtgagccaagcccagcaagacagtataaaatat

SEQ ID NO: 341506 - DNA, 864 bp, Cannabis indica
attgggacccctgaactaggaccagaacttggtctcagaacatggatgaggatcgaggaaccgacccaagacccaaacctggacataagacccacatcgagacctaggatccgggactcgatgcttggacccgaccagtactcgatgtttggatcaaggacatagactagaacctaaacccaaactcgaactcaaactaagaccctgacacataccaagaccaagacacacactcgtgaaccaaaaccgaaacatgaattagaacgggaccaagatcttttaatgggaccgggaccgggacccagacccagcctcgaaccctacttgagactgaaacccggacctgaaccttgcctcacacccaaatcatgacccgaacccagactcgaatccaaactcgacccaaacccgtatcccgtgagttgaaactagaatcgaaactagaagcggataaggaccaaagaacaagacatgaccaggacattaacctagacccaaaactgtaaccggaccaagacccagacttggtcaaagacccaccctgggattcggtccaaaatctaaatcaaaacccgaaccgggactcaagacccgaacccagacctgaattcagaccagaacattgaacatgactcgggacccagaactgggatcgagacccagaactggaccccagtcttgatcctggacctagacctaaacctagaccctgacttgggacatgaattgaaacaagactgggacccgtgattgggatgcaaatcttgtcccgtgatcagagaactggggcttggacaagacccttagtcgatgtcttgattagggactcggagaaggacccgaagttggacaaggacctagacc

SEQ ID NO: 341507 - DNA, 719 bp, Cannabis indica
ttattgattatttgctatatgcagaataaaactgaccaaggctgtggatttcaaggacttgttgaagatgaaaggtcgactgctttaaaatcatttgataccaaagaaatagatcgattgttggcggcaataaattcaattgtgcagttattgttggagatgaacattgtttttaataaaatagctgatttgttgtcgaagatgaatattatgtttgctaaaatgttacaatgtataattatttattttgttatatattttttatttaaatgtttgtatatgtgaaagttcaataataaatatttttatgtagtattgagtattattgatcaataaatataatttaaattatagtaatattttttaaatttaattttaatttttatcaatattaacatgtaatgaaaaaaaaaaacaaaaaagcattacaggcggattggtccgctgctacaaataatgccagtttatgtgtttgacactattattagcactggaggtgtcagtccgcaactaatacccatttttagcgaccaagcattaccggcggattattatcggcggaccccgccgctattaacttttaccagcgaacttggagattattaccagcggaatcctccgcctctaataaccataaatgttgtagtgatttgtccctactcaatgtagatcatctatagaagatcattgattactaagattatgttggaaattatttt

SEQ ID NO: 341508 - DNA, 1281 bp, Cannabis indica
agaagtggatggatcaataccctaatgctgaagctgtctttacggtggaaggtttgtttgaccatactcctgtaattgtttcaatttatccagaaattcttagaggcaaaatgccttttaagtactttcgaatgtggtcctctcatccacgattttcggagattgttacaagagtttggaagtcctatgttactggcactaaaatgtttcaggtcacttacaagcttcgaatattaaaggccaaactaaataatctgaatagaagagagttttccaacattcaagaggcaactactcaagctaaagaggatttagttgagattcaaaagaaactccaggcagatccacttcaaaatgacctcattgaaaaagaaatgattacaaggaaaagatatggattcttgcttaaagggctgtcatccttcttacagcagaaatccaaggtcaattggatcaaggatggtgatgagaattctgctatcttccatgcaagtattcgagaacgaaggaagaaaaatagtatactttcaattgaagatcaacaaggaataagagaagaggatcagaacaaaattatagaagtctttctctcattttatcaccaattgcttggtagtaaaatggagaataggaagcaagtaattaacagtgtcatggaaaagggcctttggttacaaagcagtaggcagaatacttaatgaaagattttactaaggaagaagtcaagaaggtgttctttgagatcccaagaattaaagctccaggacctgacggttacttaagcttcttcttcaaggataactgggacatagttggtgatgaagttactgaagcagtgttatcatttctacattctgggaagatgttaagggaaattaatgcaactgtgctaacacttgtccctaaaagcaagtgtccaaacacagtaagagacttcaggccagttgcgtgatgtaatgtcatttacaaggctgcaacaaagttgatgtgctctcggctcaagactcttcttcctgatctggttgcacagaactaagggggctttgtctctggtcgtttcatagctcacaacattatgatatgccaggatctgattagacacaatggaaggaaggctgctcggccagggtgtatgattaagctggatttacagaaagcttacgacacacttgaatgagattttttggaagagattttgcaggcttttcaatttcttggggaatttattaaactggctcctcggttctcgttaatgtttaatggatctcttcatggattctt

SEQ ID NO: 341509 - DNA, 952 bp, Cannabis indica
ttatctcattttcaaggaaaaagcaaagtaaagacaaaaaaaatcacatttcactctaaattctctctctcttttttgaaatccctagaatcagctagggtttgattttattcttcaatctttcaagtttccagcagctctaagttttatccaagctgttgtcgatagaattttgcaacaccaaaaataaataataataataagaagaagaagacgaagaatatgatgaacaagtgcgagtattcaacctagaatggcgagtacttaaagtaggaacatgaatacttaataaaaactggaaatacaaagaacacaagggaatatagtggttcagtcagatcacggtcagcttagtccactattgtaaggatttcgtaggtctccatttcacggtggatcactcttttatatacaaagcaagtgcccgatcatttacaaggattgcattcattgccaatccgttcaaacatcgatttacaataattaagctaaaacgtaaacattaataaatgaagaacagtttctattcactaaatacagcaacgtatgtgacttctaatgtgcgagttggctgttcatattctggtgtaagctcgcgggcttaggatacacctaacttttagttaagtctaggatgtctgttttcttgtatagtcgcacttacggacatcgtttaacgagctgatagaacctagacatgcgagtttatattggtttatcaaggctgttgggtcatcgagaccagctcgctttagagagaatcgatctctatgttttcgcaggaggattgaaaggatactcgcatatatcgttgtatatgcgagttgagtccgttccttggtcccacataatgcaggcctcgcgaatgcgattagacttggtcatattctcatcatcccactgagtttagctcaggtgaggtttaaactcgaggagtctctcattgacatct

SEQ ID NO: 341510 - DNA, 583 bp, Cannabis indica
ataaaaaaaattattaaattttcaaatttagcaaaaaaaatgggtttttcttccattttaaaatggaatattcattctactaaaatagtagaaaagtcattctatctgaatgatattctaatcattttaatggcatatttacttagagagaataggaatcaatggtataatattgatttctatacaattgtttactaaatttaaaaaaaaaagtagtagggttcacacaaattagtgagaaaataaagaaaaaagttcttctaaaatagggaatatattttccttttctaatttattttattttcattttgattttattaattaaaaatgaaaaaataaatatgtcttttaaaaatttataaacaaaatataattacatgttttaataatggcaatttcgtcaaattaaagcattacaataatattttttagttatgtaaataaaataatatgattttagttttctttccgtatagtttagtaaacagctgagtaaaatattatttctgattattttctattttaaaccgattcattttttcattgattattctgattcaaattacagtttagtaaacgtgtc

SEQ ID NO: 341511 - DNA, 726 bp, Cannabis indica
atgaccttaagcattttgggaaacttgacttgtatgagattcgaagtattggaggtgatatcggggtcccagcttcctctgaagtcaatgagcgaacgacgccttttaagaagcgaaaatttgaagcgtctgcttctctttgctctagaccccacaaggttcctcgcaagtatcctgacgtggttcgtgattttccgtgggacaccaagtttaatggctctaatcctgaggtggagattgaagacccctcggaagatagctctagctccccgagctgctccggtatcttgaaaaatccgcttgtgggctcctttgttattgatgaatctgtttccagtgggtctgcttactcccacaaccctgtggaggaggatgtcgaatctcctccacaggagccatgagaggaatggcctggaactgtagagggttagggcagacctctacagttcgggaactgaagtccctgatccagtctcgtgctccggattttgtgtttctttctgagctcaaagtggatgctaatcctctggtacgtatcttaaagtctttacacttttactttaatatttgtgttccgtctgttggcaatgcgggtggtatcattttggcttggaagtcgggttttagttttgaatgtatctcttgctcgcttaatcatatttcgggtcttgtttactcggaccccccgtcttccccgtggctcctttcgtgtgtgtatggtcctcc

SEQ ID NO: 341512 - DNA, 947 bp, Cannabis indica
ccaaaagttaacagggaagatagccgccttaagccgcttcatctcaaaactctcagacaaaagccttccattctacaacttattaaggggaaaccgcaaattcaattgggacaaaaaatgccagctggccttggaggcattgaaaaaatacttaacaacgcccccgtcctttcaaagccagagcccggcgaaaccttactcctctacctttccttgtctaagtacaccacaagttcggtattggtaagggagcaagggaaggcgcagttaccgatctattacaccactaaaactttctcgggggcagagggaagatacctaataatcaaaaaattagcatgggccttagtcacatcagcaagaaaacttcggccgtacttccaatgccatacaatctctgtcatgacgtctttcccactaaagcgggtcttgtacaaaccagaggtatccgtaagactgatgaagtgggcggtagaattaagcgagtttgacatacagtacttacctcggacgactattaagggacaggcgttagcagattttcttgtcgagataaccccggagcctatcccgcccgagaaagaatccgccgaaaaggactggctactgaaggtagacggatcctcaaatgtcagaggaagcggagtgggaatagtgttgttgtcacccgatggagaaatgatagagcaatctataaagttaggtttctgagctaccaacagcgacggtgagtacgaggctctgtccacgggataaaattggtgaaggaaatgggagccgagagggtattagtccagtcagactctcagtttatagttcagcaagttaaaggagattttgaggctaaagaactaaaaatggccaggtacttatccgaagtaaagaaattgattgcaacttttgactatttccagattagccaaatcccccgtgaagcaaatatgcat

SEQ ID NO: 341513 - DNA, 613 bp, Cannabis indica
gtttgggaccaaatcctaaggtgggtttgtgtctaagtaggggtcttggtccggttacaattttgggtatgggtctaggtcctggtcctgttcctgggtcccaatccgcttctaatttcggttccactttaaagtcatagggtacggatttcgtgtcctgtttgggtctaagtttgggtttcggtcctgatttgggtctggggcgaggttcagctctatgtttcggtctcggttagggtctgaggttgagtcaagttccgggtttgggtttgggtcaagatcctggtaccattctaagatcccagtccgattccagttcaagtttcggttttggttcccgagtgtggttctgggtctgggtatgtgttcgggtcctggtttgagttcgagtttgggttgggattttggtgtaagtccataatcaagacaccgactatgagtcgagtcaaaccatccagtctcggatcccaggttccgaggtgggtcctaggtccatgttttggtctggggtcgggtcttggatcccgatccatgttctgaggcccaatggctggtcccaattttagggcccaattctagggtctgttgtcccccatctatgttcaggtcctag

SEQ ID NO: 341514 - DNA, 686 bp, Cannabis indica
gaccagatcccaatagcaaattttctacttttatcttttagttaaagtgtttagccaccttcttttgataaggtgccattcgtatttgagactcatcccggagttcgtcaatctgatccaacgcttcttgtaataaagccttgtttgttgttggatcataagtcgttctcctgtgggatgggaatagcgtttccaccggaccattgcttcccaaccctatgcaattgaaaatggcgagtggccggttgtggttcttggggttgtctgttaggcccataacactgttggcaattcttcaggccaattgcttttgcaggccagcaactttttctttaggcgacttttaagatcttattgacagcttctgcttgtccctttgtttgtggcctcgccaccgcggagaagcttttgacgactccgtgttggttacagatgtcggtaacttcttcgcagtaaaactgctttccgttgtttgagactattttgtgaggcaagtcatatcgacacactatatttttgataacaaagtctagtgttgttttagcagttatagtcttcattggctcaacctccgtccactttgtgaagtagtctactgctactatggcatactttacccctccctttcccgttggtagggacacaataagatctattccccagaccgcgaagggccaagaactagt

SEQ ID NO: 341515 - DNA, 964 bp, Cannabis indica
ggaaagaaagaaagcataccagaaagcaaccccgagccgggacaaacacctcagccaagtaacagtgaagataagccggcctagaaactacatggagacgggtcagcgacagatcagctatctggtgcaggaattgcccttgtcgcgcctggggggcaacacctgcatgctgcagtcaagtttgcatttaaagcatctaataatgaagtcgagtatgaagctctaattgctagcctaaaactagcccgggagatgaaagccgaacacaatgaaatctgcagtgattcacagctggtggtaaatcatgtatccagagaatacaaggctcagggagaaaagatgatagcatatctaagaaaaatacatgatctgcttgcacaattcaaaagctacagtcccagacagattccaaggcaagcaacaatgtaagtgacaaggtgaacttggttcctatccagttcctcaaagagcgtagcttcactggcacagaagaaattgaaatgattgatacttccccaaactggatgaaaccaatagcagcctacctcgagactgggaaactcctagataatcggaacgaagctcaaaaaatgagaaggaaggctgcacaatatatcatagtagagggacttatgtacagaagaggattctcaatgccatgtctcagatgtgttactaaagaagaagctgcacgactcctatctgatgtgcacggcggattctgtggaaatcatgccgccgggcaaagattatctaagaaaattctaaggcaaggttacttctggccaacgatgattgaagattcaaaagcatatgttaagaaatgtgacaaatgccagagatttccaaagatacctcgagctccatctaacgaatcaactcagatgcagagtccgtggacctttgccatttggggaattgacttgatcagataatatccaaaggcaaaggaggagtgtagtat

SEQ ID NO: 341516 - DNA, 927 bp, Cannabis indica
agatatttctagtttttgggtcaagcccaatactagaattctcgtgctaattaaagtggtttcatcaaccaatcataaggcactataaatagacccttggtatcatggatgtgggtgcacacaaacaagtgaagtcttagtgtgtgctaagttatctatacacaagtgtgtgagtccttaataagtgtataaagacaaagtgtcctaaaagtgtgagttatacacaagtgtttagtaaaggtatccaataataaaataaaagagtatgtatttagtgtattgtggtctagtaaaaagtgttcaagttttggtgtaattattttttcaataattaaagtaattatatttttcatgtgttgtggtgtccaacaagtggtattagagccggatcgagttcgttctgaaagagttctttgttgagtttcttagagtgaccgtgtgtggtttagtgtactacagagtttgcacgatgggtgaccttcaagtggtcggcggaattaagaaacttaaaattacaacacgtagttgatgcgcgtggaggcatatctccaaggccaagacttatgggagatcgttggaggcaatgaagtcacacaaccggaggacacatccgctttgaaaaaatggaagattaaagcgggcaaagccatgttttcgattcggaccacagtcgaagatgagatgttggagcacatcaggctggcgaagacaccgtaggaagcttgtgatacttttgcatcattattcaccaagaagaatgatacgagattgcagcttctgaagaatgagcttctctcaattaggcagggcgatatgatgatcaaccaatacttcaccaaggtaaaatctctttatcgcaaaatctctgcatttgactttagtgctggcatgtcagatgctagattagaagaattattattcatggat

SEQ ID NO: 341517 - DNA, 1323 bp, Cannabis indica
agtctatgagtaggatgcaatctgtgagtaagacaagcgtgccagcattactcccaaccgaatctgcgagagcacttgaatcggaagaacctgaccttctccaacagcttggtccgaaagtatgaggatccaatccaattgcggataaacgagttggaggacaagttcaggagatatcaagtgggggaattagggaaactatcttgatacgactctgacgaggagcttgagccatatcatctagacataatgaataccacttttccttcaggattcaaaaacccgcatgtctcatcatatgacggaaccactgattcggtctcgcatttgaataactttaacacaataatgcgagcgagtaatgtgacgaacaatttacgctgtattttttccccaccttgcttgttggagcagcgagtagctggtttaacaagtttactcatcattcaataacatcctgggagcagctgtccagggatttcaagaaacaattttaggcttctagggataggtgacccgaagcggcctcgataaccaatataaagcagtagcccggtgaaacacttaaggcgtacttaactcattttagcacagctgcggctagggttaggaacttggatgacagcacgcaatttacagcccttcaggcagggatctctaatgatccattgatcgcagggggcgagttgtgggatgacttacaagggcgtctactgagaagcatcactgagttcaacgacagggctcaagtgttcgttcagaaggaagaagcctgaaaggaaatgaatctattgaaaacaagctcgggaggcaaacccaacaatgtttcaacaagagctatttccacgagaattgataactcgggagcttctggtttgaagagaaaggacggagttaaggagccgtcgaaggatataaagaaacagaagaagcatgataggtatgtgccagtgtatactatttatatcgagcttaatgaaactcaggagaatatttacctcgcacataagcagaaggtggccttcgacaagcccgagcccatgaggaattcgaggtataagaggtatcctgacaagtattgtgaattctataaggatattgggcatatgaccgacgaatgttgccaattgaaagatgagatagaaagtctcatcgctttaggccattttaagcagtatgtgaaaagatagggccatggatacaaccagccttgtctgcccaataaccgaaaaaccaggggttacaacctattctcgttgagggagaggacatcttggttatttcggaagggccacatatcgcaggagaaagcaataatgccca

SEQ ID NO: 341518 - DNA, 1179 bp, Cannabis indica
atttttgtatatttacgaaataatctctatattaagatttatataccacaagataagagattatttggttttgtctttttttttgaaaaaaaaagagattatttggtttgaacaaataaataaaaagagatttttttgtaaaataaaaataagaaaagttgactattatacgagaaacaagatttaacttttcaaacatgccaaaaactccttacgggttatctccattaacgttctattatattaatgagccatttctttaataataacgagctttacattatttatggtccccttcatataactgctatactatatttgtataacatttatacaaaatattataattagaggtcatgatttggtatcaaaattcagaactggatgctagttatgtttttaatctgtcagatatatatttatatttatattaataaataaaatatttatttatatggccatgcatgcatatacaagaaaaacaacttgttttctttttgaaaaaaaatatactatacaaaaatatatatctattacatatgaaagaattgttgtacaaaaaataaaataataaagaaagaaataaaaaaacactggtattttgtcctttgatctcgtttttctttattattttttttacctttgtgaatgtttttttatcttttaacttttttatttttatttatttatttatttttcatttattattatttatttatttattttgttttaccttcgtattgttttaacaattttaaaaaccaacgtgtcaactataaggaattcatttttcagttctgctttaattgaatcctcaataataatgatcttttttcttttctttattattttaattttttatttttacgtaattgatattatttttttttttaattaatttttccttaaattgatcttttatattatgttatttttaagtctaattaggtattatttttctccccgaacctttgtacatataccaaatcatgcccctcgaacttttttagccgtatgtgttcttaagataaagtattgctatatatcaagttaccaattagacatgtttttctttttcttttttttgttcatgtttgcctgaataacattgacccatattccctcattgaactccttggctagccatgatgaatggatcattcttgctttctctcttac

SEQ ID NO: 341519 - DNA, 656 bp, Cannabis indica
tggcccaatgaacctagggcttaaatttcctctcttcctgaagtgtctaatacccttgactagagaaactcatagaaacacatgttcccccgcctgaaatgtaacatctctgtgctttggatcagcataacttttctgcctactttgagaagcaagcatccaagccttgatcttatctatagcttcatttgttttctgaactaattctggacccaagtacttcctttctccagttttgtccctatgaattggggaaaaacattttctaccatacaacatctcataaggagccatccctatcgtacttaggtagttgttgttgtaggagaattcaattaaaggcaagcacttgttctatgaaccctcaaagtccatgacacaggatcgcagtaaatgctctagtatcttaatagttctctctgattgcccatcagtttgagggtgaaaagctatactaaacttcagctttgtacccatagccttctgaagactcacccaaaattttgatgtaaactttagatccctgtctgaaacaatggatttaggagctccatggagatgaactatctcttttacatatagttcaacatactgatccactgtgtaggtaatctttactggcaaaaaatgacccataccgaatcatacattctcgt

SEQ ID NO: 341520 - DNA, 560 bp, Cannabis indica
aggtgatgcttgccatgcaaaaaaccatggaggcagcaggaatccacgtgcatcataaaaccatccctgctagacttggaggaacaccaggggaatcctcgccaagtgcccaaaagcaaaaatctagggaacctagccctataaggtatccctctgaagggaaccagcagaaaaatcctacttccactcctgggaaaaagaaaaaggtgcaggattcacgaaaggtccgctcagatttcccgaaagagaaaggtccgcagaggggcaaactacaaaaagggagtcttggccctcatgatcgagaggaccgaaaaagcgtttctgtgcaccaggaacaaggagggagaggaagaaggggccaaaaataccctcccgtcgatctgagacatcagattaacgggaaacacggtgacctccgggaccacctagaccagaagaaacacgtgcccgcggtctccacgggaacactaaacgaaggaatcatggctgagcttgccatactccagaaagacattgcttgagtctcccggagcaaaaaggtgatgactccgactctgact

SEQ ID NO: 341521 - DNA, 765 bp, Cannabis indica
cattcaacttgccaataaaaggatcaagatggtgttaatagaccatgggagctcagtaaatatcctttataaagaaactcgacaaaaaatgggactcgaaaaggccaaattaaggccttgtatggtgaaactttgtggattaactggagacagtattgccagtcttgcaataatcaagctcgcattaaccttagccgaggcacccctatctgccactattatgcaagacttcttagttgtcgacctgccattggcttacaacatatttttgggtcgtccaacactgatcggactaggggcagtcagttcgatcaagcacctatccttgaaattccaaacacaggaaggagtgggagtggtgcatggcgaccaaatgctggctcacaattgctatcgcattgatcagcaacataggaaagtcggacatcagtttatggcgatcttggcagaagagaatgagaagaaagatgaagatcttgacccttgagttcaagatgagagaaacctattgaaaccaattgaggaattggaagaggttattctcaacctacgaaatcccactaggtgtgtatacatcgagagaaccatgacaagcagctcaaatagcagctaataagttttttgaaggcgaacgaggatcaattttcctaaagccatggagatatgatagggatcgaccctaatattatctgccatcatttaaatgttgatccaaactacccaccgaagagacagaaaaggagacccttggattccgagaggcaa

SEQ ID NO: 341522 - DNA, 636 bp, Cannabis indica
ggaaactaggtttgctgaaatgtaagccagaatagaggagcaagatcttgagattcagagattgaggcagcagggtgctcctgcagtgctggtgctggaagttcctgtggaacctgcccctcttgctcaggccgagatagtggtagcggtgaacagaatggaacccttgtatgaaagggtccagaagcatgcacctccggtttatttgggaggtcctgatgtcatgaaagtcgagcagtggctaacggtgattacaaagattctgaactttatgggtgtcaccgggaatgacagggtggtgtgtgccaccttccagtttatggaagatgctttagtttggtgggacatggtgtctcagattcatgatgtcaccactatgacctgggaaaggttccaggaactcttcaacgcgaaaaactataatgaggtcgttagaagtgccaaaagaaaagagttcgcacacctgacccagcaggaaaacatgagcgtgactgagtataccacccagtttgagcagttggcgaggttggcctcgagaattgtgccaaccgactttagtaagaaggaaaaatatcttgatggactcaatgtgaagatcaagcatgaccttatgatcaccacagacgacaagaccat

SEQ ID NO: 341523 - DNA, 490 bp, Cannabis indica
tactaatcttacctcgattccgaattcaggtgtgctggtcaacctgagtggaacaatctgctcggtgaattacaggctcctaaatcacatcaatcacaacactgataagcgacacgctaagtcacttcccggggacttaaacttgaaactaaaagtttctctatcgataaagaacatggcaataccctaaataacacaaaaatgggaaaaactagggttcccaaatttgtcccaaccggaattccggttctgggaaaaattcctggaagccaaccggtagaccggttcctacaggcctccctgaaccggaattccggttcagtgcaggaatttttcaaaaattcatttctcaaccaattcaagcccaaaccttctaaaactctccagacatgctccaaatatcccaataacatttcaaaagcaacaaaacatcccagcatgtacaaaaacaaaaaccaccatgtgagctccaagtttgagcttcaaagct

SEQ ID NO: 341524 - DNA, 886 bp, Cannabis indica
tcatcggctatcatttcttagtggaattcgattttgttacatcaaaaggaatgataaacttgagaaataacaagacaaccaatgctcaacttttgagactgacaacatggtttgatcattactcttttgaaataaaataccttcgcggaaaagaaaatattttagccgaccttctatctagacctacgtctataaatatggtctcctcatatccactcaaaaccatccccattaatcagccacaacttttcccataccattgcatacatatatataatggcatcatcatcatcacaaaagaattgctcatttccttgctcatttcaccgagatgcaaagcttatcctttctaaatctaaaaagtcagcaaaagaaagggcctctcacagagctatttatactcacaaccaaattctttcaaacttggatcctattttcaacatgattttctaattaacccaaagtatccttttgccaatctggtccccttctaaactgcacttttcactccaaaatccataactcatcttttttggtatctaacatgcatctatacgatggttgtcgaagtccaaactatggctcttcacactgttatatagtatttactcaaacaagaaaaaaaaataaaccagcctaccaaatccaaatggatattttatcttggtacgctcctttagaggagtggaagaaatactttgggatgaatgggaaaaagttcgcaataataggcactctttgtttatccatcaagaccacatgtagccaacatgatggattactacattgtcttccttatcagtcttaatgcgaaattggacgagaacaagaaaatagtttgcaattctacctttgaactatatggctcccaagaagcacctttcag

SEQ ID NO: 341525 - DNA, 785 bp, Cannabis indica
cgagcaatggctaatgcagcttgtgaaattactggttacactccatcatgcatgattttggcattcaacataaacttccatccatactttttgtgacacaatgcagccatacacatttctaaaaatcctatctaccacgagcgcaccaaacatgtggagatagactatcaccttatccgagaaaaagtcaacaaaggcatcatcatattgaaccatatcacttccaagtccaacattgcagacatcctcaccaagccactcctcccagctcacttccacaatattttatccaagatgaatgtcaacaatctctaccatccatcttgagggggcctattagattaagtggttaggatctgttatgttagttgccacatattagggaagttagttattgttgttgtagttagtcttaaccgacttactacactataaatattctctgtaatgcctttgttcaattcaatcaatacaaaatcaattttctgtgctttatctcctattaattataggggaagaataaaagagaatgaatattgggacacatgaagacactacgattaaagtaatttgttttttgctttaatattcattttaggtattgtctagttgggccatctccaatgggactttaaaaacccaaatatgatgtaattttttcaccaaaagcctctaacccaacactaaaagtaaacctattttggtgggagtctacagtgtcccattaataatagtgggcattgtagacaactgcatttttacttttttttttgtactttttaata

SEQ ID NO: 341526 - DNA, 1425 bp, Cannabis indica
aaaaagaatatataactcttgatgactactagggtatcctcgaacttctcgtatgttgtatcattttagttgattagaaactcacaccgtagtcttccaaaccgatccaccacacacaaagaataatgtgggctattaagattgttgacatcacttctagccagggacagtgagtcaagataataaagcgattagataagagaaataatagaaataaaaaaataataagtaaagagaacaccagaatttctagaggttcagcccgtgagaatggtaatagcctactctctttttgtttgtactaacttgagagacaaaagaatgaagtatttgctggaacatattttaccatgatctagatttactaacaagtatgttggattatattctataatctaacaccctaaacatgaattcctaaaataatgaaataaacacatataaagtttagaaaatcttacattggtagctgcggaatgttatgactccttccgtccagatctctaactcttgttcttttctgtcgcagagtataacaaaagatctgaacgtagatccttcaggtgttggaattcttcacaatcttcaacactatgattgagtacttgccttgatatgagtgggcatgtactctatcactaatggctcgaaattcaatgaagaagaagagggagaagtatttcaaaatacaaagaaggaggtctcaatttctagttgtctaacaaagaaagaaaattaggttattaggtttatgagaatgagagtcatcttattccttttataatatttcctctagggtttaggatttaagttatatggaataaaaaaagataaaataatagcaaaacaatgcttatgtagccgaccatagttagtggaccccactagttaaaattttgctgttttatttaacaatttatcttttctttcactaatgacatatattctaatttcaatcctataaatgttaaaactatttatttaataattataattaattatcaaataaaattaccatttaacttatttatcaattagaccctacaaagtctcttaattaataaataaaccctaaaacttcttttcttcacaattaagcccttgcttagtgaaaattcataaataagacatagtctaatttaaaattctaattgattaattaaagccaattaactgagtctacaagccggtattatctcaactagtgcggggactatggggctatataatcaagcttccaataactagttctagaatttattaagaaaattctctatcttattaattcctcctgactccattatagattgggaattgcactcttaattattatagaacactctatatgttccaagatatagatacgctattaattatctattatttcaatccaaattgtcaatgatcctctatagatgatctaca

SEQ ID NO: 341527 - DNA, 916 bp, Cannabis indica
tcaggattcagcggtgtgagtgttgttgcacttcgatttctttgcataaactgaaccacaaagcaatagacaaaataagaaacaaaataaaatctaattaaaagcaaaaaaaattagtaataatattagcaataatttaagaattttcaatccccggggacgacgccaaaaacttgatacactatttttactacaagcatacagtgttgttatagcaaagttttaatactaaaaaggttgtcgaacccacagggattgattattagatttttactaattattatacttttttaattttatactttaattagataacacaaagtaaattataattaagaatcaaataataaagtaaatagaaaaataaatagacaagcaacgatttttaatcaaaaagtaagaacctagagcattaattttgctatttcaaaccatgaatctcaatttaccgattatcccaatttatcctataatttgtagtttcaagaatcctaatgtaacctaataacctctctcgagcgatgatagatttaacttaaattaactaacacgatatctctattcaatgttaatcaaataagcactcataaagcaatatgattctctttaaatgaaactcatagaattagttgaatctctcaatctcacatttttcctatgtcatgcaattcgaagtccgattttaaattacctctctcaagtgtaaaacctaaaatctctatcttaattaatggtgatcaagcattaagaagataataattaacacaaaattgcataaacaaataacaagaacaaatatgggaataatctaaaaacttaaattcataatctaaaatagttccatcaacactctagaatgagtttttagttcataatcacaaatataataaccacaataagcatgttcataattaaa

SEQ ID NO: 341528 - DNA, 971 bp, Cannabis indica
ccaaccgttggatctgtagatgcgatcgattgctatttgaccgtacgatgattgttcatcacaggtgtctcacacccgttctggcctataaaagccagccttctcagttcatttggttactttcaccatttgaccaaattttcttagagcttccatagagaggaaaaatttccgacaccattgattacctgcttcttttccttcgacgttgccagtcttccctttaccgacgatcaacaccaacccccagtcttcaaacttcatgtaagttctcaggacactttacactcgtttactgtttgtttgtattgcatgtttagagtttcttggttgaatgttgaacttctgggaaatgattttgcctgagtttgttgtgtaatgcataaaatctctcttttctgcacgttggttgtttctctttactgcactttcttttgggaatcacctttttctgtcgtaataacgcctttagggtctagagttgttcgtgctttctcgactttgtcttctttccccccctttctttttctttttcaatgtcactgccttttggatttttgcacccgatgcttgtcagggaacatcttttggggtttccttatttggcaagcctctttccagcacttaggagacccccactccctttttaaacattagggtttggttcggggcctaactgctggattttactttttcagaatcaatgtctgcttctgcatccggttcaaagtcttccaagaaggggcagttccactggccaccttagaggaggtcatgatgggtcccgtggcccaggaaaaatatacttcccgtgccaacggctgggaggcagacgagctccactccaccttaacttgtgcccaccagctcaagaagatcgtaacggtggcatgcatcaagccatcagcttccaggaccttccacccccttcctcgggatgaggagacgcccaatcataactacgaggggtt

SEQ ID NO: 341529 - DNA, 832 bp, Cannabis indica
cagcaatctcaggagatacccttacaactaagctcaagatcaacgtcgacagggctatcttcgaagctggaaatcgatttgaattagttgtaactggtttcatccaatgctccctaccattactaaaattaacattcagtaatggtattaaatcctttgattgagcattttttccatgtgtcaagattagtcttagccgaacgaatcacctctgaaacttttgtcgatttgttgctccaaagaacatcatttcgagccaaccaaatacgccacacaatcatagcagcttcctctgctactggtttcctatttttcaccaaaagatcacaaaaccagctattaaatcatgatttgatacatgtgaaatagacaaaagtctttaaatttaacaatctcaataattcaaagggaacttttaacggctaaaaaagttcaagggacatgatttgatacatgtcaaaattcgaagaaaaaaataattagcctataaaaaaaaggggttttttcattagtgtacaacaaaaacaattatattacaaaaaatgtgcaaaaaaacacaattttaaaaatgtacacatttgaaaatatatttacaaaaattcatacatatttttaattaaattataatagatatattaatgattcaactttctatatttagatttgtataactattttttatgactaattgatatggtattaatgagtaagcctactaattaacaaaatttatatattaataattaaaaaacataataagattctaattataaacaataatatttaaaatatacagatgtaatattttaaatataagataaaaaaataatta

SEQ ID NO: 341530 - DNA, 743 bp, Cannabis indica
taatatacccttggttacccaccactggcacaggagctggtggtaacccttgattaactggggcagcttgttgcctcaaacgttgcaactcttcctcttgacgaagtatgacacttcgcatttcatgaaacatctgctgccagtcagcaggaggattagcattaacagcccccgcattatcccccggattttgcggaggtggaggcggtgctggtggatcggtttgggtaaccccgggctctacttgctcgccctgtggtctagatgattgcggagggtccattactagtacccctgtaatcaacaaccccagcgagttaagcaccaataccacacttacgcacttattgccttaaaccctaactcatctatttacctcatacatatttacataaacaaatagcatttatagcatggcatcacataacacatacatactctagatgcttgcatactgcctaaaatggaaagcggtaaacagatgatcacacatacagtcaagtatttactctcaatacttactgcaccatgagtcgagcttatctctgacgacgaatgtacatgttcggccggtctacaggaagtttaaaaaccttggcgctctgataccaaattgtaacgccctaaataattaggcacgctacccaaaaaagcttatgaaaccctaatcccctaaccgggattactaattaaaatagcgcagaatttaaacttttatattaaacagactgaaaataaacttg

SEQ ID NO: 341531 - DNA, 611 bp, Cannabis indica
ttaggtagagcccaatacctaatgtctaagtgaaaatataattttaaataattagaaagtagccacaacatcttgaattatataaaattatatattaagtaaaattcatcttaatggacataacttgtaattaattatataggtttaataattttaccccacaagaattttattatatttttataattaattaggataatatattaacttaatttctcttaatttactccacgtggagttatgaggatttaatttaatagtgttatcacaaacattaattaagatagatttcattcctcattttcctaaattaaatatttcattaaatcaatcataaagttcatataattttattagatttaaaatttagtccacaggcaatttaagatttaataaagttttcatcttcatcatgtttctacattggtaaaacatgaattcttaacgcctcaattttcttttaacatctaaatttgtaatcctatttttacagctatttcatctacctcttaatacgctgaaatcactagtgaaatccctgagcttatgagtgacaacttcaaaatctggaaggatcaaattcttctccatcttgcttgcactgacatgga

SEQ ID NO: 341532 - DNA, 965 bp, Cannabis indica
attatatgacaatgtatagatcatagttatctaagacatcatgtaattatttgagaaattataaataacttacactctataagcaaagtttagcagtttgttaaacatgtgctattttttatttatatgcatgtaagtttaaaatttttacttttgtactgtaaatcatttgtaattttttcaaaattttatagattgtactaattttaggggtgacaacctaaaaattagtttttataaaaagagaatatcaaattaagtttattataaatataaggccttggaaatatagaatattccttgatgggtaagaatcaataaaaaaaacacaattaatttttgttataaagataatgatttgcaaatctgattctacattataaaaaattgaatggtttttaatcaatgaatatgggaagcaaattggaaaggcattattcattcatgtagtagtgttcacatggaccgaatatttggtatttcagataccattctatatattcaccaccaacctaaaaataattttaaatgattacctattaaccaacaaaaacattataagtattgaattcaatcactatttttaataatttatggagtctttattaattttatgatatacatttgattacaagctgagattgtcgataattattctattgttaacgaaataaattaactcatagtatggattctgatcacctttaatgataaatttaatatatcggttggtattacatataatataactcatctcgtgacctaaattgaccaatttatattaatttaaattgtacagatttttagtttttaaaaggcatttgttgtgtagaacaccattactctttttattggtggaattgaattgcagattatatatatttatgatttgtcatttaaattaattatttttaaataaaaatatatagatttatactaattaagccatgtaatattgtgctgag

SEQ ID NO: 341533 - DNA, 599 bp, Cannabis indica
gatattgtgaaattcctctctatatgtctactcctgtagggatactggattctttactttttggcaactacttctgcgttagtaaggaagtgacactagtagttaataaattgttggtacgatgccaacaaatgtatagaactttccatagactgaataagtatctttcctgcaacattaacattcagtctcactggtagagttagagacttcagattggtttttagtcttctctaaaagcactgccccacctctagagtaatcaacatctcatcagtagactttgtagcactaaggcaagtctagaaacctgatttggtgtagtctaagagtataaaataccacccttatcgactaacatgtagttcttctttttaattttaagatttacttaatttttttccaatgttcctttcatagattaatctaatacctactcattactccaactcaacagcaggtatctggtctaatgcatagcaaagcatatctgagacctctccttgttgattcgaaggaattctttccttggccgttatattttctagaatagatggcatttttccttagataaataaataaaatctatgtctagaagt

SEQ ID NO: 341534 - DNA, 541 bp, Cannabis indica
agacggaatgtgataggcattttaaggtgctgaaacagatggaccctgccattgctacatacgtcgagcaaatagggtttgaaaagtgggctcgtcttttttgtcgaggcgatcggtacaacataatgacaagcaacgctgccgaaagcttcaacaaggtgacaaaagaattcagaaaatatccagtaactattttggctgacgtcatcaggttcacacttcaaaattggtttgcttcttgtctcgaaaaggctagtaagtgcgctactcctttggctactacttttgaaaatgatttaaaggatcaacacaaagatggtatgttcaggagtgtcctttgtaatggtgcccaattattcaacgtcggtacgagtcctcaaggtgagagaggtggtgatgtgaacttagtggagagaacatgcacttgcggacttttccaaacgctcaaaatcccttgtccccatgcatgtaccgcaacagttagtcagaatgtgagcgtgtacacactttgctctccatattacactaaagaaacgtggaa

SEQ ID NO: 341535 - DNA, 672 bp, Cannabis indica
atttcctgtttgtcccaaatatagtcatccctgccagttagcactcgacccatcaaagattgatctggactgaagtgtttcccatatgttggtttcctgatggactcaacttgcaataaggacgcaatagtggatggaccaaaaggaactctatgacccctaacaaaggcactcacacaccctggatgaccctcagcaataacagttctatccagattggcatagaattcttgaactaatatgggatggggagcagacaagttagtgaccgtgttgacccatttcctaagttttaaaaactcatgcagttcaggaaaatcatctaatttgaccacttgttcgaaccaaagctcacgactgccaaaccaccgttgatagacagaggcgactgtaggaggtactgtaggatcatcagtcgactccacggatggaataaccatggcaacatgggttactgcaatgggtgtgatattctccatgatagagaggaaaatatttggatgatgcagagcttagggtttcggagaggaaagtgaagaagtgaaactgatcactttccgtaagccttaagtataggcaccctgacacaactgacccggcaaaaaaaatgatgatgatttttttaaaatttgatttttgccaaagaaaccgtacgcgcccaaattgaatatt

SEQ ID NO: 341536 - DNA, 1490 bp, Cannabis indica
cagcaagaacttcaaatcaaaatcagtagaaacactacctcaaatccaagctcaaaacccacaacttcaaagcttaatccaagccccaaatttcaagcaatttccaccaaatcaaatggaaaaatcaaagagggataaagagaaagagagggttcgggtaagggggtatcaaaaccagaaaatcaatttccttttccttaaaaaattgctttcttttattatatgtaaattaagggtcaaaatgaccatcttgcccctagggccaaataacacctccaaactcatacaagggcataaatgtcaattcacacacacataaatccaaataaatattcagattattcaccactaattaaaatgccaaatatttcaatccaaattgcatttcgggcccgaaccccgttcggcccgaaatacccggttgtgactataccgcgccaacctgtcagaacacacctgaaaaagacaacacatgcatactatataataatatagttccacaagcacgttaataaagtaagttcactattttacccttctcgggtcaaaattactaaaatgcccctggctcaccaacggggtcttaacatagcataactcatataaattctcatattttaaattatataataatataatttcctcaattatacataattatctagttagggttttgctaatccatttcttaattccgggtattacatacaccctccctctcggatcgaggacattgggggtgtctcggcggtaacccacttgccctaggttgagtcccaggatatctcttgttattacaagggatttcctgttccctagttctgggtttccttatgttcttatacctacgagaagcctctgacacatcattacgcacattctcctggttcgtaaatccttgggatctttgaggtacttatcgatgatgttctttgttattctattgttcatccactggaacatccctagttcccccaggttgctcaacctgggtgttttggggatttctttgatttgcttcatgcctcctagttcttgaacatcgaggtatgcctcgtggccttcttactccaggattaggttgattctatgtactatttccttgaggcccacttgttgttacaacctctctttccaactaagcgtttcatcagttagattcggctaagtgtttcctgagttattgattttccaattctattaatggtacatacctagttggatcatcagcatcctcacttctgggtacaaatcctacagtagtacttgtttcttcgttcctaccttttgggttttgattatttccaccatagtttcatcttcaacgtgttgttccagatgtatggtgtgacagtcagtagtcccgtgatccgtaaggggaaacatcgggtaagctgtgcaatcccacatcacctagggaaggtcaagtctgatgattctaagactgtgtaggtatgggattacacagttgaagagggcttaaaatggat

SEQ ID NO: 341537 - DNA, 730 bp, Cannabis indica
ctttgaactttcgttcattaggaaagcttgttgtaacccattccagcttggtgttggtttacatggcaccaactttatataattagacaacaaaatgttaactaacaaaattgataatcagttcctgaaacgtcttaaatttgtttttgttgctcaaattcataagcaccttccaagtctctttctacatgaaagaattattgtttcacttctactataaaacaatgtaactcatagaagacacactattattatgtaagtattcttttaattgttgcaaaatgttaatattccttttaataatatattagtttggtggcacaaccttacaatggtatagtaattcagggcgcacgcacaaccctacagtgactatactttagggggttatcttacttcgtcagttcttttggacaagctggttcgattttgttgtgctaatagttaacaacgtgaaaatttttggagtgtaattttaaggctcgtttggtacgttgtattaagtattgtattgtattatatatcatatttttatataatactatgttaaactatggctggaaagatatagtagaatcttcgaggataagataagctcagctgagatactttgggaaaaaattaaattgtggacagcgacttgggtctatagaactaaacattttgaggatctttctttcctagatctatgtcgagagtaaattacactgatgtaatagaattagtagag

SEQ ID NO: 341538 - DNA, 1231 bp, Cannabis indica
aattagaaatctcttttcatttgaagaaaaataaagagaaaaataagaaaataggaaaatcaaagaagaacctctcttccccttctctctctcttcgaaccagccataaaccaatggagattgttgctaattcttggtgttttcagcaagaaactcagagaaaatcaagccaaggtaagccctagcatcactatttcttagttcttgaattttaaggtttggttgaatatatgattttgaaaattaggggctgttagggtttagtttttgtgtagttcgaattgtagggtttatttgagttagatttagcttcttgcaactggttttggtgtatgggattggatttatgcaagtttgagtttagaaacctaaactttgatcttttatggcatgttttgattcagtggttttttttttggatttattggttggaatatgttgtatatccaccgtttaggtactccggaaagtttggtggcatttggatgagttttgagcaagttagaggttgtttgggaaaacctggtgcaaaccgggtaaccggtttgccaggacctgtaaaatcggttacccagttttggcagattccccgaataaatcgttttctcaattctcatccatttcagtgccgtagttgggtgtttccctgtctcttgagttagtgtaatccctagtgaatataacagagcctagagttataggttcgggtttcctagatcagggtttcaaacatgtgatttacccggtttcaatatgtgattagggcatccatccagcacgagattttccgttcagatcggccaagacacttgaagctggaaagaaggtaagaactgtatataatgtgtgatatcgatatgcgagtgtatgtatatgttaagtgtatatgcatgcttatgtgtttgttacactaccaacacttgtacagttatggtacagagtgcatcggtatagtgtgtattgttaaagagtacattctagtgatacaagcacaagtacgggaaagtacagggtgtttgtggtatatcactcagtggtactctgtggtatagtgaggtacgtagtgtatgtggtatagtggttgtaccctagtatggaacgttcttactcatctgttaagccttgtaaataggtgtatggacgcctagatacaagtcggtatagtatgatatgttatatggtttccttactgagtctgtcgactcacatttttgcttccatgtgtaggtaa

SEQ ID NO: 341539 - DNA, 528 bp, Cannabis indica
ttttcttcttcttcgaaccctaatctctctctttctctctatctcgtagctctctctctccttctcttttagccatcaactaacacccaactcctaatacacaaatggacgaccaatcctcatacctagaaaaccccaagacctgaaaacccccacccaattctctctcggcccctctcgcactcactctcttctctcgtctaatgatctctttgacgaaaaagggcaatgggccacaaggccccatcttcggtcatcaatcgttgaagacgttaggcgatgaatcccgcccttcctctctcggtattagtattttttttagttttgtatttttttagtttgatttagagaaaatacttgtgatggtgacaatggtggttgaaaatattttagatttagtaaatatgtagtggtggctatggttgtatagtggggataatggtggtggtgataagggtggtggtaatgatgggacagtgatggtgataatagtggttgaggtgtgaaaattgttgtggtgggatggtg

SEQ ID NO: 341540 - DNA, 656 bp, Cannabis indica
ggggcttctggttcgaagagaaatgacaaaattaaggaccgtcaaaggagagaaagaaacaaaagaagcatgacaaatacgtgtcagtgtatactatttataccgagcttaatgaaactcgggaaaatatttacctcgcacatgaacagaaggtagccttcggcaaacccgagcctatgaggaatttgaggagcaaaagagatcctaacaaatattgtaagttctataaggatattgggaatacgaccgacgaatgtcgccaactgaaagatgagatcaaaagtctcatcgctcgcggccattttaagcagtacatgaaaagacagggcaagggatacaaccagcccagtctacgcaataacccaaacaaccaggggttaaaacctattcctgtggaaggagaggatatcctggctatttcggaaggcccagaaattgcaagggaaagcaataacacccataaaagatatgtgaaagaaataaagaacgagcagtcagtcttcgctctagaaccttccaaaaaggtgaaaactgaggaacttctcattacattcacggaggaagatgagaaaacgtgagatatcctcacgtcgatccattggtgataaccattcagctcgccaataaaaggatcaagagagtgttaatagataatg

SEQ ID NO: 341541 - DNA, 432 bp, Cannabis indica
ttccttggtcctacataacgtgagccatatgaatgcgattagacttagtcatattcgcatcatctcgttgagtctggttcagacgaggtttatacctgacaggtctctcatcgacatctcagctttcctcgaggaaagtgagtacacatgtctttctaataggattccggtctcgagtttctaggtgagaaaaatctcactataacactcttgatcgaataaagcttctgtcttgatattattttctgtttttctgattttaaatattctctatcttatgattaattttcattttttggttaattacttgcattgaatttcttagtttaagttcttaaaaagtgcattacattactttagaatattcttaattaataatcaaataatctatatatataaaggagaagtttgaggcagtgacgtggcggtcta

SEQ ID NO: 341542 - DNA, 523 bp, Cannabis indica
gtaaaataatttccaacaggcttcaggttagtgcttccgctcatcttttatcatcatcttcttctttaatttagcaaagattcaatagatttatgatttaaggttttctatattaaagaactttttggaatatgtttagatttgtgatatatattttcttgagtgttttataaatcctaacaagtggtatcaaagccacttttgttgaattaattgaagatctgatatttttatgtataaaatgtagggattttaaaaactaagagtttttatttatttttgatcaattttgtcgatataatttttttggcttcaatatttttggattaaaattgttataccctaaattcggcggccaccccaatgaaggacacatgtcaggatgaagggaatatgaatgaatgtaattcctcttatggaataactcaataattacataagagtcacagaatatttttaactcgttgactgtaaggtcttaggcaaggaatcaatgtacaagctgacacttagtgtattagcg

SEQ ID NO: 341543 - DNA, 679 bp, Cannabis indica
gctaaaaatctattgaataaaaaacaggacaagttgaacaaggtttaaaaatagtgaaagaaggtgggaaggttgtgtcaatatctaagccagcagttggagcaatattttatggtttgagttcaagtggtattactttggagaaattggaaccttacttggagaatggtaaggtgaaggcagtgattgatcccaaaggcttatttccttttgccaatactatggaggcttttgcttatcttgagacttctacagccactggaaatgttgtcatttatcccattccatgaatggttgggtcttttttggctttaaagtctatattgagtgtggtgttactcgttacttatctgaataaaaacaacttgtaatcatgttgtaaattgtaattatgtgagtgtaaatttatggacgattattttatatatatatatatatttttaatttctagaattatagttgtgattatatatagagttaaaatatactaaatatcagtttaaatattaatatgatttgttttattattattttattattttattaaataaaaataaaaaattacccataaatttctcataaaccaagaatttcaaatatataggcacactttatatagaatagatatatatattctatataaaatgtgcctaaattttctctattactatcctatttt

SEQ ID NO: 341544 - DNA, 853 bp, Cannabis indica
caagaatttcaagaactcaacctgatcaaactgaaatctttaacaaaggatttctgggacattttctaataatctttataactaaattgcttattattacttatctttatttgatcttatttaaattcattaattatgagcaatttaaaggttgacattgacaaatttgatggttctggtgattacaggatttggaggagaaagattaagtcactcttggctcaacagaaactattgagagtacttaatgaccctatagaatggccagaagggactaccaagattcaacaagaagaatacttggaaactgcaactggtatcatgatattcaacttatcagatgccattatcagactaattgacaaggaagaaacccctgcccagatttggaagaaactggaagaacagtttcaacaaaaatccctaaccaacaagattttcttgaaggaaaggatttttgggtttaaaatgagttcatccaaatctcttgatcaaaatttggatgaattcttaaggatgcatattgaacttgcaaattctggggaaaatgaggcactaagtgatgaaaaccaggctataatcatcctaaattctctacctgaatcctacagagaagtcaagactgctattaagtatggaaggacatctataaccctagaggaggtgatttctgcactcaaatctaaagacttagagatgaggacagagaaaggtggacactcaaatggtgaagtcaacctgagtaggggcagaccaggtccaagaaaaccttggaataacagaggtagaagtcaaggcagaaattcaaacaaacaaggaggatttcaaagaggcagatcaaattctaacacta

SEQ ID NO: 341545 - DNA, 785 bp, Cannabis indica
aaaccaggaggacaacgaggcaaatcaaattcaaacacaaggaatcctgatgaaacaaatggttgttacaattgtggtaaacctgggcactttaaaagagattgttatttcttgaaaagaaataacaggcaaaaaccacatggacagggagattctaaacactcaaactctaagaataaacctgatatgcatgatgcaaatgtaactgatggatatgaaagtggtgaagtgtaccaagttggaccatccatcaaagatgaatggatccttgactctggttgcactttccacatgactaataataaaaattttatgtttgatttcaggaaatctaatggtggtagagttatacttggaaacaaccaaacctgtgacatacaaggatctggttctattagtttcaagatgtatgatggcatggtcaggacactaagtgaagttagatatgttcctaacctagcaaggaacctaatttcactaagtgttctagatgacctaggaattgtaagcaagatagaatctggtcaaatgaaaataagcagaggagccctaactattatgaaaggacacaaagaaggaggcctatactatctaaagggtacaccagtggtcccatgtaattacactgcacacagcaacagtgatgaatcaaatgccatgacttggcacagaaggctagggcatattagtgagaagggcttgcaactaatgagtgaacagaaactcctaggtaaggacaaggttagtaaacttgacttttgtgagtgttgtgtgcttggaaaaca

SEQ ID NO: 341546 - DNA, 562 bp, Cannabis indica
ttcttcctcttaagatttgcctcgtgaatttcttctcccaaggttaggttgattttaggtaccattctcctgcgctgccctttcacgctctgtctcggcattacgccaatttggttcctccaatcgatgcctaagatggcaatttttcaattccttgattggtatgtacctggttgggtcgtaggcgccatcctcatcaacttggttaggaagtgaccgattgttgtttacccaaagtccatcaagctagggaccccaataccaggttttcccagggcttgcattctattcatgcgatgactcaatagatccctgaggactcaatggttcttttccagggcgatgactaattccttcccgaggattgttatctttggcgtcatccattacttttatgtcaggaggctttttctaagctttttcacagaggctctcaatgaaaacaccaaactgttaacgtagatttttgttaactaaatttgaaccccacagtaatgatttcatgcagaaataataaaagccatagaaataaaatatgaacacaaggttttttatgtggttt

SEQ ID NO: 341547 - DNA, 763 bp, Cannabis indica
atcgaacaataaacaagcaaatatgccgaccaggagtactcaatagattaaagaaaggctatgttcaaagaaaagtcaaaactcaagaagtcgaaaattttcttgagttagggcaaaaaagttcatgaagcttagaataagaaagatgaaagacggacgttatgcagttcagaaacaagcattatggctgtaaacccgcatgaagacatgataaagaagaatcacatacgtttctaagcctagggtttcctaaacatttttctacagcataatagaaggaaatcagaaacttactcaagattcaaatgtctgggttcgagctacatctatccaataagcagcttgtacgaaggcacttcggcggctttgaagccaagaaattttattttcgctctgaagcttacttagtaaagaagggtgatgaaatgagtttatgtgccattgatgtgggtatttataggcaagtcacgaaaagaggtaattgtctcaaaggaacctcagacgccttagcttcccgccttaaaaacgaatatgcaaagtcaaaagtaatcgagtgaaactgtcagccgtggagagagaaaatcagatttcaaaatattaattgtcagagcatttattagctgaaaaccgaagggacgcccagtcagcctcacatcgagtctcagacagtcacgctcgacacgtgtccccatccaaatgcagaatcagctcggataaagtctacatgcaacttcgaaagtcccgtacagacttggggggcaaa

SEQ ID NO: 341548 - DNA, 830 bp, Cannabis indica
ttttttttttttttacttttagaaggtgaatcattattcaattaatgaagttctttaagtttttccaagcaaaaaaaaatgtttaaggttgaagtgaaagataaataatgtggtacacaacaagactttggatatatagtaacttattaatttactaaatcagttaagacacaataactcaactcaatctaaataagaatatgatgctgaatttagataagaatattacacctattaaaaagagatattttttataccaaaacaaaataaatatttcctctaatttatattattactattaatattactttgactattctaattttagtttatgttaattaggaaatctaatctagtttagatatcaaaataaaatctaaaattaatcagattcgcaggtgggtaataaatcccacaacacgttttgtaaggtaaattgtccacccataatttcttttttacaaaaaaggaaaatatagaaaaataggcaatatcaatttaaaaaaaaactgatgaaaataataatagttaaattctactttgacccctttgttttttgtataaataacatatttaattttatattttctagatatatattaaataatacttttaattaactttttgcaaaaatttttataggtattatgataaaattaattatgtttgttgttgtattaaaaatttgaaattaattatactaaaataaatagggtgattatgcaccctttaaaatagatgtattgatggaccctctccttgtttcggcatgtaaaaaaaacatttagtttaatttttttcatattcttgtacgttatagctatttaaga

SEQ ID NO: 341549 - DNA, 110 bp, Cannabis indica
tatagaaaagaaagggaaggctcagtttttctgaagagagaatttttctgaaagaaaagaatgttttcaacttgtgatttgactgaatcatcactttctatttataggca

SEQ ID NO: 341550 - DNA, 935 bp, Cannabis indica
tactaggtctgcgattaaagtcagttctaatcccagggactttaaagacgtagaaccacttcgatttccagtcccccatgttcgacaccattccttctactccattgatctcagaagtcgcccatttgctaaaacagtagaagccgttatgaagacctacgctttttatgtcgtagaaatagctgaactcttctactgagggagccctatgaacatactccatatacatcgcatagaaggctagggcagtgcgataactgtttggagttagttgaaaaggtgatacatcgtatcgcctgagaatagctgcgatgaaaggatggaaggggaccgataccccacatcggagaatgggtattgagactaccacatcctctgtgggaataatcgcaggattggtaaacgggagatgcgccctctgggacggtttaggtcgctgaaacgcaagtcgcagcagatttaacctcacaaaggtagtgaaatctgatttggtaaccctcgaaatcagatcttcacacgcgaagggctcgttcagctgagtgtcgtcaaccgagtctgtcccgctcccttccgcctcttcttcatcttcgcctgactcgcgagctggggccgtccaatcatcgtccatctcctcgacctcgatgtcaggagcatgcctcgagtgaataaggtagtcgcgggccgacaccgtggactcgctgtctcgaatgtcgatggtcccatgctcggcaagttcctgcaccattctttcgatgtctgcagaagacatcgggcctagctctattggtgcggcctcctcttctgaaatcgaggttgggagaaagctgtcttcctcctggtcaacttcgccatcgaatgcacggcctccagagccgagctgttggctatccgacaagtcgctcatctgaaagatagaagatcttttcagcgtgatg

SEQ ID NO: 341551 - DNA, 1115 bp, Cannabis indica
gcttatgcttccgcttactttaagcgggtccgcggaagaatggttcaagaaactggagccaggatccgtagactgctggaataagctacaaaccagctttcggagacagttcgtcgccgcgaggaaagttaacctggaggtcagcgccttgattaacatcaggcagctgcctacggaaacattgaagaatttcataaagaggttcaaggaagaagcctcaaagaccaagaaagtcgatgacggacaacagcttgctcttcttcaagcaggcatccgcatagggactccgttctagaatgagttacagcaagaaggagcctccaaccttcaagatttccaaaagatagtccaaaaatacattaacctagaagaggcccaaatagtggcctatgggggatactatcctaccgggatagcgagatatgtactcgaggctcagctcctaggaaccctaccaagagccgctccaccgatgagcggtatacaattctccgctactcctggatatagtcagggccaagccttggcccctgcatcttctcactttggaaatccctcagggatgagtggacaagccccgtcgcacttcgctctggccgcaagcttagcaggtccttctcaaggctctcagagcaagaggtcctcaaagggcagcaaccgggcggaggataagcggcagaaaagggggtacactccccagtataccaagtacacggagctaacggactcccaagagcgtgtgtatttcgctaccagacaaaatactcactaccggagaccgcctcctctatacagggatagctcctgcagggatcccaataaaagatgcgagtagcacaacgacattgggcacaacaccaatgaatgcaaaaacctcaaggacgagatcgaaaacttgatccgattggggcatctttacgaatggatcaagaatcggttgcctcacctcaatctggttcaagcttgccttaaggagcaccagggggtgtagccggagcattggccccagccagagatgcctagccaattcctggcctgccaccaagacccaaaggaagagtagccatgatctcaggaggacctcacatcggaggaactacccggaaggagctaaa

SEQ ID NO: 341552 - DNA, 523 bp, Cannabis indica
ttgtaggatttatatcagtcttagcaaccaccaaaactttaatcccatgatagaattttaggaagtgtttaactttataacttaaaaattattttcaatttttattaaaaacttaaaacaacttttacaaattaatatcagctatttggctaaattttttaaaaacaaatttttcaaaaacaagttaaaaaactaaaaaattaaaaaacatcagaatattattttctattttcaaaaacaatttttatttttttatctaacatattttttttgtacatattcattcacatacttggacatgagtccgggtacggggtttaggtcgtgatccagatcctaggttttggattcgggtcctggggtccagggtctggagttcaagtcaaagttcgggtccgagaataggttcatgtcgtggtatggtgtataatattaaagtattttttagtacaaaaaattctaaaaatagtatttcaaaaacattagtcaaacattgttaaatttttaaaattgaaaaaaaaaa

SEQ ID NO: 341553 - DNA, 1045 bp, Cannabis indica
ttgttgctaaaagtagaatcagaattgataaaatttctgagagtaagcctagacgtcttcgcctagtcacatgaggatatggtcggaattgatccttcaatcatttcgcacgtcctaaatattgatccaaacttccgaccagcttaagaaaaacgagggctattggataaagagcgagcattagccctaaaagaagaagtagaaacgctaagcaacaacaatttcataattgaagctttctaccaagcttgggtggtaaatctcgtactagtacccaagccgaacaagaaatggcgagtgtgtattgatttcacagacctcaacaaagcatgccccaaagactattttccgctcccaagaatcgatcaacttgtggatgcaacagcagtgcatgaaatattaagcttcatggatgcttattcggggtacaatcagatcaaaatgcatccaccagaccaagaacatacaagttttcgaacagatatgggtctcaacataccaaagattggtaaacaaaatgtttaaagaccagattgggcagaacatggaagtgtatgttgaggacatgctcgttaaatctaggaaggctagggggcacatagacgatctggacgaatgcttcatgttcctcaggaagaagaacatgaacttaaatcccttaaagtgttcctttggagtcagctcgggaaagtttctgggcttcattgtcaaagcccgtggaattgaagccaatctggagaagattcaagccctcctggatatgaagtctccaactaaaactaaggaaatgtgtcccattcttcaacatcctgcgaggaaacaagcaattcgagtggaatgaagagtgtgaaaaagccttccaagagctaaaagcacaactcgcaaaacctcccgtattcttaaaagctctgcacagagaagaacttggaatatacttagctatcaaggagcatgttgtgagtgctgtgctgatcagagaagaaaacagcatacaacacccggtctattgcatcaataaaagactcattgaggccgaaggccggta

SEQ ID NO: 341554 - DNA, 818 bp, Cannabis indica
aacctctggctttttagtgagatccattttcagaatggatcatttctttcctgccaagatgtcccttccgagttcaaaagttcatccttccaaactcataatacccagatgctccaaccattttccatttattcctatagacttcaagcctcaaccggagccgaaaacaatggattccaaggctgatgagcttcccaccaattcaaaccaggggaaccccatagcctgccatgggcaatcctcataagtgatcatagatcttgcgggcgatttaaaaggtccaccccaggctgataatgaattccagaggaagattggcatggttgcagatgaatctgggaaggaatttagcgtggtttctaccaaagaatccggcaaacccaagacccaaatctgtgccagaagatctttgcgccaacctttttttggtagtgaggaatttcctgagactgggaaaaaggtctcaacttcaggaaacgggatcttctgatgatgagtcgaatgaggtctgtgcaaagatcaaggctctctacatgtagccggtctttctcaagctatgtgcagacagcctttctcgagttcatcagcttcccctctcatccttagtttaggaagatgacttaatggtttgcccctagtggcatttttgtaaagacaaagttgtaacatgttttaggtttttccttatcttaaatgccttgtactgttttcatttgaacttaatacaattgtgtttgcttaccttttttattcacaatgtaaacaactatattttgatcaaatatgtagtacttttgggtttctccattgctcgtaat

SEQ ID NO: 341555 - DNA, 483 bp, Cannabis indica
catcaaaatctccttcaacaagctgccattttttccagcaacttgtgcttcgaaccaggcgctaaaagagacaaacgtatcagtagaaatactgatgcttgatctgatccagcaagaattggcatacggacaatacaccagtacgtgaatgatagtctcagctgcaacattgcagaaggggcaaagattgtcgaccggtacatgcttgatttggagttggacttttgtagggagacaaccagtgatagccttccagccgaagtggagaagggacttctattttttagtaatctttccaaagagcagagttttgttggccattgttctttgattgttgtagaaatctgtaggcacttttgacagaataaatacctgatttttccagcaaccaactccaacaatcctcacgactagcctgactaagggggatgcccaaaattaaagctttatccctatcatcgaacagatcattaattatctcag

SEQ ID NO: 341556 - DNA, 564 bp, Cannabis indica
tacctcataaaaccgattataatgttttttaaaaggtgaggatcaatttgaaaaaatactgaggcataaatatgaaaagaaccaactccataacaaaataaataacacaaataataacacacaataactaaaaatataactggttataggaataaaacctaataactcaaaccagttataattaaaatataactggttctgtaacataataaatacatataaataacataaaataactcaaaccaattataattaaaataaaactggttctataacagtgttataatgaataaaaataaataacacgaaagaagtcaaacttgatataactaaaatagaaccggttatataacataatggatacaaacaagtaatatgcaataactcaaaccgattacaattaaaaagaaagaagaaatcagttcctaaaacaatgaaatataaattaaataaaaaactagtttcatactaaaatacttcataacacataatacctcataaaaccggttataattttttttaaaaaaaaagtggggatcaaatgtctcggatataataaaaata

SEQ ID NO: 341557 - DNA, 833 bp, Cannabis indica
aagggctagagatcttgaacggaagagtcattatattctactacaaccaatgtaaggttttcttaaacacttatgtgtttatttcattattttagagatattcatatttaggatgttaatcaacatacttattagtaaatttagatccaggtaaaatattcccaacaattggccttagagccatggcaatatttactttcatgaaatatggatttaaaacgatgaatattgtttgtgtgttgatttggatatgttcatgttagtttatgtgttacttgatgattgaatgtgttttatgaaattttttcatgaaaataattttattttcgttctgaaaatattttaattggattccttgtgaaaaattaagcaatttttatttttatggaactcaatttcgatgaaaaacgaaggagatatggtcgtttgaagttttgggtgcacatggtgtcgtcgcttgacaccacacgcaccaggtgcacgcaaaaattcagacaaggtgcttgtccgtgtgtgtctaaagcctagcgccttgtctaaaggcccacccaacaagcaccatttttccgcacacgaaaactgcaatgcagcctcatgcgcgcgcggacgaggctgttagcaacctcctgtgcgcgcagatgaggctgcacacagcctctgtgtgcacctctgggcagccagcacacctaaacccgaatttttgggatttgttatagtgagatttctctcacctagaaactcgagaccggactcctatttaaaggacacgtgtattcagatttccaatgaaagctgaaatgtctgtaagagacttctcgaagtttagacctcgc

SEQ ID NO: 341558 - DNA, 545 bp, Cannabis indica
tgttatggagatcatatatgatttaaattgggaattcagtaatctattatcaacaatagaagaacctttgtgaaaccaattgtctcaactgaattaaagttataagaaaatataattacaatggcataaagaagctcaaacactttatattgtggaatcaaatgatttaaaacataatatcaatatagatggaaacgaagaatattcataattgctaaacctgttattaaaccatttaaacaaaaaaaaatctcagctgaaagtacaataatactgaaagcatggtgagaagagaaaaaaaattaataaaaactaaccaagtcaaatgatatgttgttgtgtatcaaagaaggacaaaaatgaccctgcaatggtaaagaaaggcataaccataagcaaggctggaacatttccatgctagaaatcctgtaaagaaattagaccaactaattactttgaataaatagaaaaaaagtgaatgctgtagttaaaaacatcaagaaaaaagtttaagagagcaaccttaaaataaataaaaaatacaa

SEQ ID NO: 341559 - DNA, 594 bp, Cannabis indica
gatgttaatgaaacatacatggtagtaaatctagatcctggcaaaatatttccaacactgctaccactgcatactgcaccccacctttacctttaggtaactgtccgattaggtcaattccctagatggcaaaggcccacggactatgcatctgtgtcagattgttgtgcggagctcctggtatctttgaaaatctctagcatttgtcgcacttcttgacataggctctcgaatcttcaatcaccgttggccagaagtagccttgccttagtattttctttgataagctctgtccgactgtatgatttccacaaaacccgtcatgaacttcatataaaagtcgtgcagcttcatctggtgtgacatatctgagtaatggcatctagaatcctcttctttacatgatcccttctactatgatgtaccgtgctacctttcttctcattttccgagcttcatttcggtcatctgggagttccccagagttgagataggctgttattagcgtcatccagttttgtaacgtccccgcttcaagcctccattgggcccttacacccacggactgaatggctcttatacacgagtacgtca

SEQ ID NO: 341560 - DNA, 1327 bp, Cannabis indica
tgtaacatacatgtaatcataattcacttcaaaattctaaattgataactaatcagattgtaatgggttttatttagggcataaaacccaacatgtttgtacactcagccatgtagtctgcaaaggcgtggccctttatggccattgttggttgatatttgatgttgaattggccaagttcaatggcccacttgagtagtcggccagatgctttaggtttttataaaacctattgcaatggttgatcagtgtacacctttattgggtttgcatagaagtatggcctcaactttttggatgccaagagcaagctgtaggtcagcttctccatgagtgggtactgacttttagcgtcggttactctcttgttgatgtagtatacagggtgttgtacaccgtcttcttctcttgttaggactacactcacaacatgttctatgattactaggtacacacctagctcttcattgtctaggggttttgacaacacatgttttttcagctcctacaatgcttttgcacattcctctgtccatcaaatttttgttgcctctgagattgttgaagaagggtacacacttgcctgtagacttggatacaaatctaagtgcagtaatgcatcctgtaaagctttgtacttccttgatggtcttggacaatttcatgtccaaagggcttggatcttgtctgggtttgcttctattaccctagcattaaatatgaagccagggaattttcttgaccctactccaaaagagcatttgagggagtggagcttcatgttgtacttgcggaggaccctgaagcatttatctaggtcttccacacgcccctagcctttttagacatgacaagtatgtcgtccacatacacctccatgttgcggccaataagatatttgaacattttgttcacaagcctctagtatgtggcccctacgttttctagcccgaaaggcatgcatttgtagcagtacgtatatgcctaagtctgtcacgaggcttgtatgttcctaatctggcggatgcatctttatctggttgtaaccttaccacacgtccatgaaactcaaaatttcatgactagttatggcgtccactagctggtcaatttttggaagtgggaagcaatcctttggatatgcttttttaaggttagtgaagtcattgcacactctccacttttttttgggtttgggcactagcacagggttggatacccaaagtggatagaatgcttcatttatgaagtcatgggctcgttgcctctcggcgtcatatttaagcgcttgagtgcattctttgtccaacaacctcctcttctgttg

SEQ ID NO: 341561 - DNA, 804 bp, Cannabis indica
tattttatgtctggtaatagtagaatgctaacgtttagcctatagaatcacatagatatatatggtatagttacttggtttagcggggtaatgtggatagacatttggtatgttgggagtatccggggttatgtttttggaccatattacccctagagtttaagtttacttcttggagaataaataggacaaattgataattttgtcttagttttgcctttagtgaggtgagtggattttgtagtaaatcctttgattaattaattaatattaagctaaaataattaaaccattacattacgcaagaaaatcaaatccaaaacaaattaaccattctctctctctctcttggggttcggccaagaaaaatgtaacgccctgtccaacaagaacgccacgtgtgtgtgttttataaaattcttattttacatactatataattatacaaaataagtgtgggtaattaaattttgataattaaaattcaacatattaaactattcaacaaaagataagtgattttaactacggggtcccctgttttcaaaatattcataaacttgtttaatagtgcttttacaacataaactttgtaatcccaaaatattttcaaaatagagcatcttgtttactgggccgtgccactgcggctgatatgtacatcgctgctacgaccacagactcatggcttctcaacctttgccttccctttacctgcaccataaagcacccgtgagtcacggagactcagtaagaaaagtgaaataaataataactgataataaccatcaacttaaatatcat

SEQ ID NO: 341562 - DNA, 1002 bp, Cannabis indica
taggttgggtccgagtcccaagttccaatcccattctgagtttggattaagttctgggtctaagtccttggttctgatccttgtctgggttcgagtttgggtcggggtccgggtctaactttggatctaattctaggtgtgggtgtttgagttagggtccgagtttgtgtccaggtttgtgtccaggtctggaccccgatctgggtctaagttcaggtcctagtcaaagttcgggtcccgagtgcgggtcctagtttgggtctgggttaggatctcggtctagatcgaggtccagcatttccatcccagtatgggtcttggtccgagtccaggttcgtatccggatccctatctatgtccaagtctatgtttgggatcgggtcccagatttaggtctaggtccgtgtctcagttctagtatgggtacacgactgtgcccgggcccgagttccaccctcagtttgtgttttaggctaggtcagtgttcggtcctaggtctggttcaggtcctggtcacgagcctagtcttgttctacggtcctggttcggcgattcttattcaggttctagttttgggtcccaggtctaggtttgggttcgggtttggttcttcgtctcggttctggtcctattctgagtcccagatatggacaccgactactggtttgttccaggccctgttacccgaatcccgagtcaagatctggatcactatcacggttctcggtcttgtactagttcaggtcccaggtcccatttctgagttttggttcgtgatcgagactggggtgcggttctaggtctcgaccttggttctatgtgcctagtctggttccatgtttgggtctgagttcaagttcaagttcgggtcccgaatccaggtttggcttgggatccgggtccggcacccaatttgggtctaggtctgattttgagttcgggtccctgtccggttacagtgctagatctatgtccaattttagttatgattccaagtccaag

SEQ ID NO: 341563 - DNA, 759 bp, Cannabis indica
atcgtaatctgaccatatttagtattctcttatcacattttaatttgtgatcgtatacagtgagcgagataaaacaaaatcaatttaaataattttgtactaatattaaaaatattctaacattctccaacttggtcagcatttagatttaccaattaaactcaacgttcctcattacataataaacatctgaatcatagcgataggtcctcattatgtgttgaataatatatctttcatgtattacgatataattcattatataagtgtactttatgtggcagtgtacttaagcgaataaaccataacccttatgtttattctgctcttttgaaatttcctaaaatataaaattaagatgtgcataaatgtaagaaatcatcaaaataagaattttattaataattttagttgtacaatcaaaaactgcataagtggtaactaaatctcatatttactttctgatccttaaatttgtattgtgacatgtctttagtcaaggatatgtgatcttctaatttagtattgcattccttagtcaatgatatgcgatcttctaatttagtattgcattcttaatgaccaataaggcttctttagtgttaaatacttaatgttgatatgctagatttgaccaacttatattcttagccataaatactgtagctaaatatatcgcaaaaattttgtcaatggcttataaatgtaattctgaactctaggcctagtatgaaactctacaatacaccatatgagatg

SEQ ID NO: 341564 - DNA, 571 bp, Cannabis indica
ataggaatataggttggcagttacttattttggaactgattcaaatacaactgctcataaaatgtggataatccccacgtttcatttaatcacatatgggataatatctaataactactcaactgctctttagttttatcctttagactgttattgctaacatgaaagattacatctcttttaatatgagtttttctcaacttagcatttcgtaggttacatctcgagtggatgaatatctctttcttatctgtatatctcgaggcatgcatatgtctcgttaatctcaacttaatagttattatctttgtctcgcttttgactatataatcaacaagttttgaatattatctatcaaacctctatgtaataataacgtgttatttaatatgtaattattgatataatattattatacccttagagttgattcatattccttttgttagacacgtgtcagcttctggagtacaatcgaattttggttataacacatgtattgcacttaacatcacttaattaaacttaattaaaaaacatcaattatatgtgcattgcgcgtaacatcaac

SEQ ID NO: 341565 - DNA, 716 bp, Cannabis indica
aatcctattctcgtcccaaaacgcaatggaacttggagaacttgtattgatttctctgatctgaataaggcgtgccaaaatgattgctttctactgccaaggattgacgagttggtggatgcaactgttgagcacgagcttacgtcattcatggattcatactctgaatataactagataaaaatgcatgtcccagattagtaacatacaagcttcgtaaccaacatgagactttattgttataaggtcatgccatttaagttcaagaatgcttgggcaacatgtcaatgactagtgaatgaaatgtttgcaaattaaattgggcataacatggatgtttatgtcgatgatatgttggtgaaatcagtaatgggtggaagtcatactacagatctcgcagagtgctttgaaagattaaagaagtacaatatgaagcttaacttgaaaaagtgttcctttagagtttcctcaggaaagttccttggattcataattaacgcgaggggcattgaagcaaagcctgagaaaatcaaggctttgatagatatgccaccacccacctagcctagcaagtccaagccttaataggttggatgttgcacttaacagattcatttcgaagtcaattgataagtgtctaccatttttcaatgtattgcaaggcaacaagaaattcgaatggacagaggaatacgaggaggcctttaagagcatta

SEQ ID NO: 341566 - DNA, 906 bp, Cannabis indica
tattgcaagtaagttaccaattagacacatttttctttttttttttttctgtttatgtttgcctaaatcacaattgacccatattccctcattgttatcgtttctaatgtattcaacatcgtcttcctcaaggttacgatcaattcccactacttgttcatgaattggttgcccaacaattaagtcatcataacataaatcaacattcctctcatcctcttcattctctaagaacctcctctctagtgtcaataaaacaatatatcatttatcattagcctaataagaaatgtaaaaaacttgtattgcttggctagccatgatgaatggatcattcttgcttcctctcttacttaactcaaccaaagtaaaacgaagctcgtcagtttttactccaatattattgtcaacccaagaacatttaaaaagtagaacttggaatgcaaaataattgagttctcataattctttgtcatggtacctaaaacaaggtttctatcttttgcacttgcaaaatgcacggtttctacgatgatacgtatgccactattttgaacctctcgagcatcatctcttgactttgtatggaaacgtttaccccttacaatgtatgcttcatgctttgctacagaaaagttggtctaagggcaatacgacttaacacatcggatactccatgattcggttcgtttaactttgctagaatggtattccttagatgcttttgggctcttcagatatgtagcactgaaccatagatgcttctggccgatagtggttatgctcataacttttaagtaccttcatatttctttcaaatggatacatacatctcgcccaaaccggcccacacaaccttacttctctaattagatgaaccataaaatgtatcatgatgtcaaaaaa

SEQ ID NO: 341567 - DNA, 835 bp, Cannabis indica
gtgtaatacatgctgatggtttgattctcttgtctgagattcatcaaaccttttctcagattataaatgtgaggaccatttctttggtggaaacgaatcttaaggtctgtccaaatcgcagctgcagattcatcatacaacaaactagaggaaatttctttagacacagaattaaggatccaagatataactatgttattattcctaatccatgcattataaagattgaattcagtaagaggaggtttagggatagaaccgtctaggaatcctagcttgttcttgactgaaattgctagttgcatcgcacggctccatgaaatataattgtcttgtcccgttagtggctgagaaacaagaatgtttccaggattatcaccatgatgtaggtagtatggatccgaggggtcttcaagtggatttcttgatccttgcagctggatactatggctaccttgatcgacaatttgctgtgggtttctggtaacaatgggagtaggatctcctgtttcagtccttgcttcttgatcattgttagacataacagagacagggaagaagaacgaaagatcttggaagaggaagagaagacgaagggagaatcgtcagagaaaagagaactggatcaccagccttggatgagcgccaccattgccgaagaagaagacacgacttaggcaggaaagcggaagcgattaaggtcagaagtgggaaagcatactctcccgctctgataccataacacgaaacagagagaagatggaaaaactttaattactgaatgaagaaaatacaatctgcttaaatacaattgaagaagaacaccaatatatat

SEQ ID NO: 341568 - DNA, 897 bp, Cannabis indica
tatatatataatcatgtgtattgtagttgttatagaataacatgtaaatttttaaaaaatttcaaataatttacacggctaaaaaaagtttaaaatattttcttatacacgtaattattttctttatatgcgtgataaataaatatttgaactttatttttaacattgtaaagtgctaaaaaaattgtaaaacattattggtcttaaataagtacaacaattatgaaaaaaaatttaaactaaatatcttttctcaatgcaaaaacaaataaaagtatactgaaatgacaatttaaagagatgtattttagatttttattaaataaattgggggtactataaataataagcattgttattgggtaccagtggtgcctagcacccttaagacgtgtcgccttacgattggctagctatactccctaaaagctattatattatactatatgggacccgatactaaattaaaccaataacgatattgacacgtaggagccaggagggcactcatgccttttagcatttctcataaataataattgagattctcttaatgtataatttgtatttaatagcaaccattctattagtctgcatttgtatggtcatggtttaattacactttaatagaagggttttaactttacactgattactaaaaaatattattttttcaatataaatactaatagtataaaataataaaattttatatataattattacctcatatttaaatacaagttatattttaaaatacttaaaagtatattaatgtatattctttggagattttaatatgcttaatttccctttctccattaagttaataaattttctctcgattttttctcgcagccaaaaaaaaaagggattttttaaaattaattacataaa

SEQ ID NO: 341569 - DNA, 738 bp, Cannabis indica
aaattgagaaaatgaaaggcccggggaaccctaccaaaaccgactagccgatttttgtggccctgcaaaccggctagccggtttgcaccaggtttcccaaaaccattcattccttgctcaactctccaccaaatgcaatgaaaccttccagagctcctatacaatgcataaacaatataatccagccagtatttcacagaacaaaccaataaatctcaagttgccattaaagctcaaagctttgaactcaaagctcaaaattgcattaaactcaaaccaatcaacaaaaccagctgctaggaacttaaatcaactcaaatgaaccctaaaatttgaaccctaaacaactctaaccctaacagcccctgaaactcaatttcacaagttcaaactaaagaaaacttcaaaaacatgctctagggttctagggttttaccttagcttcaagagtgcttgattccctagttgaattccagaaaaatgatgaagaaaagaggtgatctcctctgattgcttcagccgaaagaaagaaagagagaaaactctctctaaatttgattttaatcaaatggaaaaaggattttaattaatcctttgctgcccaaaaatatggctaggtgtcaaccttaaaattagccacctagtctcccctttaaaccaaatgactataatgcccttacacataaaactaggatataccaaaagctaggggtaaaatggtcaaattccataaccccg

SEQ ID NO: 341570 - DNA, 1064 bp, Cannabis indica
ttcttatatacaactgacatttgcaaaaacacggtttttcatgatcttatgagtccctattctgagattgaccaacctgttgtcaccaatactgatccatctccactggtttttcctactaacagttggcctcccagtcaacattctgttttgcatacaggtcagacttctgaacaacatgctactcctgctattgctcccagcacctctcaacctactggtgtttcccagaacagcccctggaactacagattcaaggcacagctaatgtttcagatattcctactaatcgggctcttcttggtgtgcatattcctgcatcagacaacactgttgtcacacctgctgttccaacaagcacatatgctattcaaacatgcacctcaggttctcatcagcacaatgctcatcctatgaagaccagatctaagtttggcattcacaagccaaaggccctcttagtcaccagggaaccatcatctcttcaagaagcccttagtcaacttgtttggaataaagccatgagtgatgaggttttggctttggtgagaaacaaaacttacactcttgtcagattaccaccatggagaaaggctattgggtgcaaatgggtgtacaagaagaaagaaaatccagatggtttcgtcctcaaacacaaggctcagcttgttgctaagggtttccatcaagagtatgggtttgatttcactgagaccttcagtccagttgtcaaactggttactattagggttgttttgaccttggccttgtcaaaaggttagcttatccgacaattagatgtcaataatgccttctgtaggaaatttaaattgtgtttttacaattatgccctacaccaacaaaacaacactaatcaatttccaaggtcaatttcgaccttttactattgcactgtcttttcaaagtcagtaccccaaaacagcttcgttttgtatttgaacaaaaccaaagaagggttcgagaaccttctcattcactccctgtctctttgttttgctcgaaaccctagcagagagtttctcgaaagctagaccttaatcaac

SEQ ID NO: 341571 - DNA, 1367 bp, Cannabis indica
aggaaaggtcccgagtaggttttcagtactacggtaatctctctcctcagttagcggcagacatggttaaggcaggtattgagtttgtggttggcaaactcaataatttgatgcttcaatctaatttgttaaaaagaatcaaaagtgctcaaatggaagattctgaatttgaaaactcgagaagagattttagctgctgaagctaaagatatctgagtgtcagaataggatgttactttacaaggctcatgtttgaattccatgcagtgttgagctcagaaaagagatactagatgaagtgcacacaactccatattcactacatccttgtaccaccaagacataccaaaacttgaaaccctattattggtggtgtggtataaagaaggatgtggtagattaagtatatagatgcttgacttgtcaacaaatcaaggctgaacatcaaagacctacagggttattacaacctttaacacatcccgagtggaaatagagggatgtcactatggattttgtagttggcttacctagaaccatgggtgtgtatggttcaatttaggtaattgtggatcaatttactaaatcagctcactttccactagtgaagacaacatatacagtagatcggtatgcaaaattgtatgtagaggaaaaaattatgtctccatggggctctaaaatctgttgtttcatatagagatttgaagtttacttctaagttttgggaaagtctccaaagggccatgagtacaaaactgaagttcaatacaactttccacccccagacagatgatgagtcctaaaggataattcagatactagaggatatgttgcgggcttgtgtgatggatttcgaaggtttgtgaagtaagtatataactttgatagaattttcctacaataatagttatcatagtaccatacactactacaatttagtcttttagttacacgcacaaatgtgggggtcactaaaaagttagaagtgatttttagtgacacacaaaattagactctaaacttttagtgttagacacttgtgatgtgggtcactaaaaatatgaagtgtcactatagggtaaaatctaaaattttctaatttttattaatttaaaaaacattgtcatatagtgacacaccaagtgtgactgggttaatgtatccctacacacgtggcgcgtcactatatcataaacttatttttttaaaaaaaatacaattataattatacttttaataataaaaaataaaaaatattaaaagaaataaaataaagcttacaactattttgcatttattgaacaatattggaaaaagtaaaataattaagggaaaaaaaattaattattatataaaaacattag

SEQ ID NO: 341572 - DNA, 1609 bp, Cannabis indica
gttgtataatgttgttcaaaaaattctacttttaattagaaaaatagtaattatttatttttataataaataaataatttttcaaattaattaaatagggaaaaggaaaaaattattaagacaagatttgttgagacaagaacaaaagacacaatctttgtccaaaatgagacaaggtaggcacctatgtccctatggggtttcttttttgagttaattaattaatcagttatttcaattagataaatatttaaatttaaaaagtgattaaagatatttcaaagtggttgaaatattctctcaaatatgagagattttctcataaatatcagtaatcgaattcaattatgaatattcattaacttaaataattaaatataatttaattaatgaaatttaaatactataaatagaagcttaatttgaaaaattgagagatgcttttcacaacataattttcaaaattagcatacctattgtactgttattttcataacagtgagaaaaagaaaatagttttctctctcaaatagttcctactcatgtgttgagaattaatcaagaacaaattatacactttatcctagtagcccgcaatttcttgtgtgtggttgattgatttggaagacactagtatgagttaatttgcatcatcctcatcatctggaataaatgataaaatatatgagaagtttcaaggataccttaatagtcatcaagaggtaaatgctcttaacttatattttatgtttgatttaatgtatacgttatacccgaaattcagttgccatttcaatagaggacacgtgtcaagttaaggggaatatggatcgatgaaatcacttttaatggaataactcattaattgcgtaagtaacagagtatacttgtaactcgctgactataaagtcttatgcgaggtaaagatatacaaatgttgcctcgtgtattaatgagaaacaatacgtcattggatcataaagtgagacatcaatttcattacacctgggaagacgaaagcgatgcatatcgactgtgaagacacttagcgtataatgtacaaactaagtaaatcagttgggtggactcaagacctaataagagaggcgcctatctcgctataggaaggagcactcctgttactttcaccaatcaacttcaaacatctttcagtaagacttatagtcttgacgagtcagaagctgacattagaatgatggttgctgaagtactctttttgtcataaagaactgtgacagtcaaaatgaagtgttatgccttcaagcaaagaaacaacgaggcgtacattatcaatcttgaaaagataggggaaacattccagcttgctatcaaggtcattgatgttgagttcctgtcgagacatcccagaacactgtgatttaaaacgtgttaaaatacacgatcattttgacccagtaaaagtggataactcacagctgtgtgatttttaaatattaaccgcatttatactacgtgatatgtaatgaaatcccacgatttcaggggataaaaattgtaaagattatgatcaactcagtaattaactgcttactatgtaattataaatagaggcaagttagattaaaaa

SEQ ID NO: 341573 - DNA, 785 bp, Cannabis indica
aattgtgcatggaattccgaagagaaggctttccatgagttgaactttccaagggccaattagaaatacaattgctggacggcttccgaaagggtagctggaaagattctacaatacacatcccctcgtatcccttgcaaatccatttgcattttgaaatacttgaggtgggaaagaggatcttctcttcctatgtacattttccatgttggcattttaaacttgtggggcaacgccaaaagattgatctcacgagagaagggagttccacgtgctcggtccagcttaagatcattctttctctgtccggccatgccttggaacatatttttaagctcgtctagctgtgcctgcacagcttgactaacctgctcggcattttggtcaatttgtatcacattagtatctttttgagcgagaatttgagcacgagctccggcctgtacgatcgtcgtgacaatctgatcgtccactcctctccttctttttcagattgctccttacgtcatgagttgtccccaacctatcgaatacggaagcgcttggctgtctcagcaattgatttgcttggttgacaagtgaaatggcaccgttaacctggttggaactatcaggtatgagctctcctaatgatttactagagacaaggtctgcccgcctaccgctaggcccacaagcagaacttgtgaccggggatttggcgactgaccatttatagtctgggaagcatttatcgctggatcttcgtccgtctctacccagggggatgacattcggaggttgct

SEQ ID NO: 341574 - DNA, 846 bp, Cannabis indica
aaaatttttgaagaagctccattatcgatcatggttctgcccaccattttatttgctatctggacttccacgaccggcgggtcgttgtggtgaaatctaattttgacagcgtcttcatcgttgaaagttatggttggctctcctgctcgtggaactttaggcttcctttcttccatggcaaggatgacttcttcttgctcgtgctgtgctgtccgggaatagcacagcattgtgtgggcctccaatgatgacttgtaagtgtccatctactggtggaggtagcagatcttggttgttctgaccttggttggtcttgacatacttctgcaagtgcagattgtttttctttattagaaatttaatttcccgcttcagattgtaacatttgttagtgtagtatccgtagtctacgtggaaccaacaaaacttcgtcatgtcccttttgttggtatctttcttcatgggcccgggcttcttttacgggattaacgactgagttgccatatatacactctctatatcttcagtcaaaatagtgaatgcagtgtatttggcatgatcacgggtagtctgtccagatttatcagtgaactttcctttcttcccgttttcttgcttgtggttgttgcttgaacgcttaccacttgagattgaattattggaatagttgggaagttgggcggatgacccagtggaaggagccttcgacttccccgactttcgttcaccttttgctcgttgaatggcttcttcaagcttgatgaagccttcggctcggtcaaggaaatcactcattgagtctaccagcacgttcttccttatatctttccaaagttcaccgaggac

SEQ ID NO: 341575 - DNA, 867 bp, Cannabis indica
caggtgtgacaagggaaattcccgcacgaaatagatgatctgtagccgacccatttacgtgcaatttccaggtaggtctgtcttcattgttgtttagtagggactcttgtactggctccgagttgtcccttatgctgctttcttctttgccagtgcactcaactacaaagtctgctaaggcctatcctttgactgttgttcgaggttgaaatattatttcgtactaaccaaactctaccgcccatttaagtaactgtccaaaagcgtcgggtttttgcaatacttggtgtaatggttggtcggtgtatacccgaacagcatgagcttggaaataaggccttaacttccttgttgttaagattaggcagttagtaagcttttctatcggaggataccatccctcaacttcaacgagtcttttgctgatgtagtagactggatgttggacgttgttctcttctcttatcagcgcggcatttacagtgtattttgtaacagccaagtatattcctaattcttctctatctaggggttttgaaagtacgaaaggctttgcaagttgtctttttaattcttgaaaggcatttttgcactcctaagtctattcaaaacctcgaaggatgtttaagaaaggaacacacttgtctattgacttcgaaacaaatctactgagtgcggctattcgaccaattaagctttggacttccttagtttttattggcaatttcatatagaggagggcttgtattttctctagattggtttcgataccccgagcattaataataaaaccaagaaacgtacctgagctaactccaaaggagcactttaagggtttgagtttcatgttttattttttgaggattt

SEQ ID NO: 341576 - DNA, 825 bp, Cannabis indica
tcatgggttcgtcatgtccgaatatgggggcatagacgaggccgtgaggattctgcgggacttgtctgctgaaaggagggcgttccagaaggaggcccagcaaagggaggcccttgcggaggcgaagcaccgagaggagctgaaggcggagggtgaggctacagccagggccaagcgcgagctttgggaagccagggaggctatggacgaaatgtctgctaagttaaagtccttggaggagttgcatcaggtggacttgcagtcgacggccaatctgactgtggaggtgaaggagctaagggattttaacgaccaggccttgaaaaaggccaaaagagatgagctcctgaccccagttgtctgtaagcattacgtcaagcgctttgatgatggcgtctacatggcctggcagtcgaatggctagagcatcaagcttgatttttatcccaaacctgagaaagtcctcgctaagttccgggagaagaagaaaaggcttgacgctttactcaaagaacgtcggggccctcgtcttcctccccatattgattaggccgaccaattcaaccagttcacaactattattattttttcttttctttgcatttatagtctcttttctttcctttcagacaatttaaattattatcttctaaggggagacagttattatggcccgtccccaggcccttaatattttttaggacctgcttttgggtcaggatatcttttacatttaaatatatattttcgcttagatatatattctggttgattttgtctttacttttggcctgttttacatttgtccgtgtggtatgccttagt

SEQ ID NO: 341577 - DNA, 553 bp, Cannabis indica
atataaatcctcaatcttagaaatctcctacttgtatttgcttactttaggtaacttaaacttagagttagattagtagtggcggtctaagctagaatagttactcatgtatatttggtataaatttaagtctttgactttaaattttaaattccaaatagaaattttaaattttattttcctagaatacattggacaatatagtatgactttcacaagttgtttaatatccatattctatcaatggattcatactgtatgtttatgtatggaatatgagtttagtattccgcgaccaagatacacttggaccattctatgaactctctgttataactaaacctttttcatcaaaagaccacaaccacattttagtatctatggcattttcatcttgttcatagtggtttgacaagatcatttttagcgaagagtaaatatgtctatatccccttgaaagtaagttcatctatattcgaatagggatgtacattcaagggtggatatgagttatcgttgtattcttaatgcgatcactctaaattttacctta

SEQ ID NO: 341578 - DNA, 511 bp, Cannabis indica
tcaagttgaaggggaacacaccaaaaaataaattttctttcctcaaaaattccttcttttatctaatataaatcaataggtcaaaagaccattttgcccctaaggctaaaaatcaagctcacatatgcacaagggcaatttagtcaatctcatcacaaatattctcaaattaatttcagattaatcacatataaataaaatgccaataaatcatcccaaaattgtatttcggccccgagcccggttcggcccggaatacccggttatgactataccgcgccaacttgtcagaacacacctgaaaaagacagcacaggcacactatataataatatagtcccataagcacgtaaatatattaatatcaacattttacccttctcgggtcataattactaaaatgcccctggctcaccaacggggttctaaccatgttataaatcatattaattcacatatactgaattatataataatataattcctcaattattcataattatctaattag

SEQ ID NO: 341579 - DNA, 603 bp, Cannabis indica
gatcgtttccctttcatcactatcaaagaacttttgatgattcttaagcttatgttcgtggacttgtattcacaacccttaactttaagcgcacctaaagatatgaggtttcgtcttaaatccaaaatgtgtcttacgttcgtcagcactttgattccaccatcatactatttgatgacaatctttttgatttcaatgaccctgcatgaattatcattttccattagaactttacttctatcaactgatttataatcaatgattttcgacttgaacacatgtgataagtgcatttggagtcaagaattcactccatgatcattgaggattctaagatggaaaaaaaatcctccatatgttgagcagtcatcactatcctccgtgatcgcacctgaatattttttgtggtgatgatgcatgtcgtcattcctatctccattgtgaggtttgttgaagtaagtgttgaagccttgctgcaaaatctttgcaagtgtctagaacttccacagtgatggtgtttactctttgagcttcctttcttgggtgatctccctcttgccaaatacacttcttttttcttggattccttttccaatttttatt

SEQ ID NO: 341580 - DNA, 1027 bp, Cannabis indica
cctgacacctcgcggagaggctttatgttatgcgagcttccgggagcaccttgcactccgggtgcctcctccgggacctatgcccatggtgcttccgcgtggcatacaaagacttagcaaatatttacaagttatctgatctacgtgtccctgttcgattggtccacgtatattgggtgaaatcaggggcaacatttaaatattgttatataattcaaaattagtaattgaaatcaaatagatattaaaaaccaagtaaactttaagaatgaatttgtaattttaatatttgataaatattattataataatgatagccaaaaaaatacatcacattataaatttattaatattatatattcaaatatttgaaaccaggtatattatattaaataaataattttagatatcaaattctattaccaaagaatttcaaaaaaaaaatattacaatttttttaaaataatcaatcaattatgaaattattaaaaataattgtaataatatgtacatatgttaattaaagaataaattcgttattaaaaaaatgagagaataaaagataaaattatgtcaaaaaaaaaaaaagaatatgacactaaaaaattatatactaataaatataaatggagctatataaaatattatgtcaaaaattaatatgatataataatataatttttcttttttaaaggaataatatagatttttaatttatgcaagagaaaaaaataattaagtaataaactaagtttgaatgagaattatgtatattgtggatattttaagtttttttaaaagatgttcttttaaaattattaaaaggctaattagtaatttttcccctaaactttgacatgtactaaatcgtgccccctgaacttttttggccgttaaaaattcccctcgaactattgagattgttaaacttaaggacttttgtctaattttagtaaaaaattctaacatggatgaaagtttaaggggcatgatttagtacatatcaaagtttgaggggcatgatttg

SEQ ID NO: 341581 - DNA, 807 bp, Cannabis indica
tattttggaaacccaaaccgtacattttttttaaaaaaatagtatatgaagtaatttcccttaaaaatattgggtaatatttatttataaattacatacatattatatattaccctaataataataaggaaaattactttatatatatttttaaatttgcaatttgagttgctttagtagttgctccggtaatttctatatgaattgttatatgaattttaattacaatttagattactctgttaattgctatgtgagttgctatgtgaattttcataaaaatataataaaataaaaaaattattttaaagtgtaaaagtaaaaaaaaaaaatcctaataataagtattatataataataataataataagggatattggcggctaaaccacctgaacattaaggtttgtaatacttaaccacaaaaactgaaattttggcggctaaactacctaaaccctggttccgttttgctctgcacacctccgtccaaaaatcacagttaagtgccacggtggactgtccacagaataatggctcttatacacgagtaagtcactctggctgcttcatagactgatgactgaccctacaaaccaacacaagtgtttccagcgtgctttgtcctcactcacacacttcctgggaaaacttctcaggaggtcacccatccttaaattaccccaggctaagcacgcttaactgtggagttctttcgagatgggccaccgaaaaacaagatgcacattgttgatataggtagtaccaatcaattcatttaagccctcttcaactgtgtagtcccat

SEQ ID NO: 341582 - DNA, 576 bp, Cannabis indica
tgacgagaaaccattctacgtcaaaagtataaagcgagacatcaacctccttacatatgaagaaaagtagacgagacatgttgactgctaaaagacttagcgtataatatacattatacaagctaagtataacaattgaatgaacttgaacagcgaatagtgagacatccatctcgctataggagggcatactcatggttccttcactaatcagcttcaaacatctttcaatgagattcactgctccgtcgagttagctctcgcagatagaaactgacattcaaatgatgttgactggtgaagttcatcttgtcaccaagaactgcgattgtttgatggagtgttatgtcttcaatcgcaattacgacgagatttaaattatcaaccttagaaagacatgggaaaagcttcagcttgctgccactgttattattgctatgttctcaatgagatgtcccagcacgatacatttcgcaatgtatttaatgcacgtatggattgacccgataaaagcggaccaatcacagttgtgtgaatttcaaataataactgcatttattttacgtgggacataat

SEQ ID NO: 341583 - DNA, 815 bp, Cannabis indica
gacgagaaggaacgagaatcaaacgcttttcatctgggtagatgctcgaagagagaacgaccactattcggttgttgtgaaaaattcaacacgcaccctcgttcacaagtaataaacttacaggaacaaggtcaatcccacaagaactgtacttaattaccaaacaattaattaaattcttaattctatttggtgacaataaaaataagaaaaaaaattatctatgttaaaaagcaacaaagaaaacaaataattaaagtaaaattaacaataacatgaacatgagttcatgattactcaggattcatatcaatctactattgatcatatttatgatatgaattaggtctttatagtaaacaacatgtttgataaagagaaattaattacatatcggtccatgtcatatataatattttttatatgcagcacattcacttagatgtcatactatatcagtaatttgaattgagattacttatacacaataataggcatcagtgaaccgcattagtaactgttgattaaagattcctaatcttgaatatattattgattgttttattaatggctaagtaatcttaatttttcatataatacaactcacaatctcacgtgtgagtagaaatttttttgatatttatatataaattattcaatatcaaatattaataatccgacattcattcacgtgcatcaaaataatcaactcttatttataaattaaaatatcgttatccgtttttcaaaatataaaccataataggtagtagttttgggggagagagagggagttacggagagaaaaggaaaaa

SEQ ID NO: 341584 - DNA, 1219 bp, Cannabis indica
tataataataaaattttttaattatttaagcatataaaatcaaaattcccttaaataattgttattcattgaatatgcccaatactaattgggcctaaatataactatcaaggtgatatttttattttagcaacctagtctctttaaagaaaaaaaaaacataaatgggcttcctacatgcatctaagctcaaaagtaaacatgtaagctgacacatgttaaatgatttggatgagccctatcatgttactaggtttaccacagatgaaagaaattacaaaatttaccttttataaattatttatatgatctattgacaattgacaattgaactacgattaaaatccgatcattggatctgtctacaagttaatcataacaatttagatcaaataaataataagtttgtaaaagaaaattaaataaataattaagtaaacattcaaacatataacaatatctagaaagttggttaagatatttctattttaaaataaaatatttaaaaaatatcttaactaggatttaaatttaagttgttagaaaatatttgaaaaatatttaaaatcatacaaaccctaaaatatcttaaattcaaattaaaaatttaaatatccaactaattttcaaatattcagtttatttaaataatttaaattaattaaatatctcataagataatatagcataatatcttaatttaaaaaattgaatatttttaatattatatttcaaatcttctaatttaataaattaaatttaacataataaacaatttgaaaataggatattttgatggttatgatattataaattttatttaaataaaataaataaaataaaatatcccaaattagaaaattttatggtaagaaaccctaaaatatccattcaaaccaaaattaacaatttttcaaaaaatttcatgttattgtgacctaaaatataaatttgtaattaagataaataaccaataagataaaatatcaaaactaacatttttctaatcttataatttaaattacaaaaatatattttaaaataataaattttttaaaaacttatatggtaaccattttgaaattttaactagattatctttaagttttattaatattttaatgtcaaaataagatcatttcaaattttattaataaaataagtaatatctgatcttattttttttttttgaatgaaaagtagaaaacttcattaaaat

SEQ ID NO: 341585 - DNA, 513 bp, Cannabis indica
tctctttctctctcgctcggtgccacatccacacacgcagaccacccacccatggcagaccacccacggccgaccggactacgtgacccacggccgaccgcccccctcaacatatcacccacaccgaccgcccccctcaatttttttaatgattttttcaattttttcctttaatttttggtgcttaaattcatgaaatagaataatatgttgtaattttgtgtgaaatctgttaattaaggttagatttaagaagattaggaagagatttgtcgaaaatgaaatttttttaatcgggtccgatggggctcgatgcccgtccgatggtcgggtccgatgggggcatggctggaggttgaagatgacaactcgatgggcccgatggcctgatataggggtccgatggcccagtccgatggggccagattccttgggcccgatggcctgatataggggtccgatggccctgtccgatggggccggattccttgggcccgatgggcccgacgggtc

SEQ ID NO: 341586 - DNA, 1238 bp, Cannabis indica
tgtttaaacaacatacttgtgagtagatctaagatcctggtaaaataaagtccaacacacctacctctaatgaactccaagttttttccctccaagccaaaaaacctcgatcccctttctccttctcccgatatcaggatgaacttattattggttaattgctaacattttcattgattgacagaaatggtcgaggattaatgctgcaagatttgcatctcgaacacagtagaggttctcgaacaatgccaaaatcacagtagaggattaatgctacagaaatggtcattgtagtatagtggtaagtattcccgcctgttacgcgggtgacctgggttcgatccccagcaacagcgataaaaacttattgtgaaaattaatatatgcatgtatacgaagtcaaacaagtaataaagtggtaaataagatcgtctccacagggattacaaacaaaatatgatgtaaaactaattaattacatttaaagtaaaagaaaaaaaaaacatgagagtgattgagcaataattcaaatttaaaaggactgtaaataaatgctactgttactaggaaattacttgcaagaagtgtaatatggtaaaaagtggcttgaataactaatcccccctagtcaggttttttccagttgctatagcattacttcaacatttttgcacagagataataggattttcttgtatttatgagaattttccaaaactcacaatatcagctctaccacctagatcaatatattcttataccaaaccaaattgcagaacaacatttaaacatcaattctaaagttgtgcaaggtaaataaaatattcttactccatttactagaaaaacttaaatctaggaatttatttgcttcatccaagttaaaactactagatctagcccttccggaaccaaatctagcttagtaaattgttactcatggccaagaaataacaatcaaagaaaataaaaagctcacttgaatgaacaagggtaaatatgctaaaatatgcttaaaaattaatcataccaaacataggggttgatagtcattcaaagcctcaagaaatttagctcatgttcaaatcagaaaataaaatccaaaatcgaaattgttcatccatggctgctgcaattttttacaattcaacaagtttctaatatttaaagaaaagaaaagaaagtaaaagaaaggtaaaagaaaatcaaacaaatagagcttgtgtccttctcttttt

SEQ ID NO: 341587 - DNA, 846 bp, Cannabis indica
taaataatatgctttagtcacaagtaacattttgttgtgaaattatattgtgactaaaaggttgccactaaagatagttttttttttttatagtaatgaggctacgtctacttcgtgtttttatatctcacgagatggtaattacagcaatagactaagtgttagaagcttcaaattttagagagaaagtctagagtgacaagctctaaccgtgttggtagttttctgaatgtaaaaaatgagctaaggagctctccttttataggtgaaggatacccagaaaaataggggaagaatataaataagatgtttttgaccgttgacgatcatctaatggtgaaattagctcttggtggtgatggtcattttttggagcttggcgggtcctgctgcgtgtaactcggaacttatttttataactctattgggagtgaattttgatgatgatagatttggaattacgtctagagtgtgagacatgacttgataaagcattgaattagctttgaaatgcaagttgaattgtgtcaatcagatgaaaattgagtgagttatgtttattttactgaaggcagttcataacccagtgcccaagttaacatcccaatgcccatgttgacatatgatatcaacctggacattggctaagtgtagaaacgtccaagggatgtactttaagattcctaagtaatatttttatatcacttacactattacaaaaaggggtttttacgtcggtcaacgcgtctagtcaaacttgttgaccgacgcaaaaagcaacccacacttttttgctttagttatccaccaacgtaaataattattaattagcatcgattatctatt

SEQ ID NO: 341588 - DNA, 902 bp, Cannabis indica
attccaagcctttagttttgatccacaagtatgcagcagccgagacagtacataaattgaatccccatgttgtttatcctcccaagtttcagttatgattcttttgcaatcttcattgtccgcccaagcttgttcaaaatgaaagcgcgatccccatctcttgttgaaggactgcccattgccaacttgatgagcttgaagtaagagtggccgatgatccgaattccaccaatttagaagggagactttattcattttgaatttgtctttccaatccgaattacatagaatcctatcgagtttttcatacaccagatttgccgctctaccattgcaccaagtaaatcctcctccttcagccactaattcccttagatgacagtccgaaatggtgttgcgaaaattcctcattagatatactggtttcgggcctcctccttttttttcttttttatcaactatctcattgaaatcacctccacaaacccaaggaccttgaaacattggctttaaccttttcaagagcttccaacattccattcttccacccggatccggactaccatagaaacccgtaaaccgccaagtgaaccccaagtcattttccacaagagcgtcgatatgagaggctgtaaaagactttatctgaaccgagtaatcattcgaccaaaggagagctaaaccaccgcttttacctttagcatccaccgtgaaacaccccacaaaacccagttgaatgcggataaactccattcgagcactgttaagacgagtttcaaacaagaatatcatcccgggatgataatctttaacatgggattttaaggaatttagagtccaagggttcccaagtccttggacattccaaaataaggctaacatggctctcggcgacccagttc

SEQ ID NO: 341589 - DNA, 926 bp, Cannabis indica
agtcctagtctgggtctaggaccgggttcaggagtgggttcgagcacgagttccgggctgggttttggtcgagtttcaggtcccggtccaggtccaggtccttgtcacggtcccggtcttgttcaagggtcctggtcacgttctggttcaagtttcggttttgagtcctaggtctgggtctgggtccaggccttggtccagcttcgggtccttgtcaaagtcccaaataaggacatctactatgggtcttgtccaaccccaggttctttgattttgggacaagatctggatcccaaccacgggtccgagtctggtttcgattcatgtcctaggtcccggtttgggtttgggtctagatctaggaccaagactagtgttcagttctgggtcacgatcccagttctaggtctcgagtcatgttcaatgtttgggtctgagttcaggtctgggttcgggtcccaagtcctggtttgggtttggattcaggttttggacccaatcctagggtgggtctgtgtccgagttcgggtcctggtccgataatagttttgggtctgggtccaggtcttagtcctggtcctattcttgggtccccatccgattctagttttggttcctgtttcaagtcacggggtacgggttggggttgagttttggtccgagtctgggtttgggtcctgatttgggtctggggcgtggttgaggttcgagtttcagtctcagttaggatccgaaggtgggtccagttccgggttcggccctaggtccaggtcccggtcctgttccaagatcccaatccagttccagttcaagatattgttttggttcccgagtgtgggtctgggacttggtatgtgtccaagtccttgtttgagttcgagtttgggttcgggttctggtctaagtcctagatctatacaccgact

SEQ ID NO: 341590 - DNA, 950 bp, Cannabis indica
attatgtcaaaatcagataattgcaattcaattagattggcggtgaactcacaaccgtcaatcaaaaaaaacaaggaccgaacccaccttgtggatactatcagatctcccgagggtaacagggttcaaaaccccgaagcataaatatcacatgccttatgtactttctatcactctactcgatacatatgaatgagtagctcccgaatcaaataacacagtacatgcacaaccattaatagataactgacctgtcacaactgacggactagcatcagcgtctgcctaagttatagtaaaaagtcgccccgggttctgagcaacattcttcttaggctcttctctcttggcttggagaaaatctcttataaagtggcccaccaggccacattggaaacatgccttggctcgacactcaccaggatgatgtttcttgcattaaggacactctggatatgatcggaatgaggacccgcgaccttgacgaccacctctatttccccgaaactttctatttccccctaaagcttcggaagcctccaccttctgtttgtgctcagggttgccactgtcggtccccttactgacattaacactagcaggaggatttgatgccatgacgggatcctttgcagcctgctctttcattacttgctgctcggcctcctcagcaattaaggccaagtctaccactctcttatatagagtgtcatgtgatgtggtaatcttcaagtcccgattaattgtagcatttagtcctcgaacatatttctacattctggtgaaatctgtaggcactagatcaccggcaaatttagataaccgatcgaattttagagtatagtcggccacagacattttcccctgagtcaacttcacaaaatcttcttggtgtgaagtccttactgcaacgttataaaactttcttcaaaaagtttcttgaactcttc

SEQ ID NO: 341591 - DNA, 1164 bp, Cannabis indica
ttagaaagttcatatttagggtgctaatcaacatacttgtgagtagatctaagatcctggtaaaataattcaaacaataatgactgataagataaccaaaaaagatacaatggttcaaatttgcaagggtgttagttaacatggataattcatatgagcctcaaagagtgattgagtttttgaatgaacatggtcaattaatagagcagttagttgaatatgaatggatgttggttgaatgcaaatcttgtcgtgggtatggccatttaatggtagattgcaggaagaagaaggagactacaggtgttactaagaaggagttcaagccagtacaacaaacagctgttactgcaggggtaaaaccaatattgaattagttcctagtgcagatcaacaatagagaaaggagataacaagcaagggggatactcagataattaatacagagaatgctacagcccatggtgaagttggagttgccaaggatgactggcaaacaccaaagggactaattcctttaacattttgcgagctcaacaagggagtgagaaaatggaggcttcaattggttactttgccaatggatagttgcaacatattgagctggaacataaagggcctcaatagtaataacaagcaatatgctctgattgacttgtgtcgtataaggaaaatcgggttaggggctatgtaaagaccgcttagtttaaatttggaaattagcagataattaaggtttaattatgaaaattatttattaatattaaattaattatttatgatggtttatttgaattcagaatacattttatatgtcatatatagaaatttcatatttgtgcatgttcaatgtccagcaacattggaacgcggtgtatggctcagtagaatcacagtttagtattttagtatagcggggcagtttagttagacattgggaatgttggaaatggtcggaaatttagagttttcccaaaatacccttagtatcctttaagttagttttgtgtgggcaagggcattttggtctttttgccccttttgtgttttgtctttatgtgagtttagtaaataaaatttattcagattttctagttatatttggctgaaggtattttaataaaaccaattttattattctcattttacaaaaattaagaaaag

SEQ ID NO: 341592 - DNA, 908 bp, Cannabis indica
cacgcacaaaaaaattgtgcacgcgagagtcatgttaaatttttatgaagcaagcttcggcttctgttagggaaggctaaatgtaataccctatggtttatgaaaccggattagcaatcctaactagattaattatgtattaatgagaaattatatttttataaaaatttaatatgtaaaactatactgataaaatgcattttaagaccccgttggtgtattaggggcattttcgtaattttgactcgagaagggtaaaattgtaattttaatgatatatcgtgcttatggactatattattatatagtacgtttattctgtctatctacaagggttttctgacaagtcaacgtggtatagtcacaaccaggtattttgggccgaactgggttcggggtccaaaatacctttttgggatttaattttggcattacttgataaatgtgaaaacctcaaaattttgtgttatgtgtaggtatattgtttgacaaattcgccctcacttttatatatgtggacttatttgactatatgggtactttggtcttatggccacatattactttatttttcaacaaaatcaaattttgtaaattgagaaacattttctgattttcttaaccccatagtcgacccccttgctattcctttcttacttgctcttcattttcaatcaattttaaaaattaagcttgaattggagtggttttggtgagaataattgctagaagtttgaggaaattgtggtaatactcttgatgtcgctcaattagttacactgcggtcgcggtagtaaacgggctatatatctattccacagggaggcaaattaccactaaagattagtttagtaagtagaaaatgatagaaatgtgaataaattaaaaataataaaatggtgagtgaa

SEQ ID NO: 341593 - DNA, 676 bp, Cannabis indica
ttgaatgtaaatggtataacactaatccattaagaaagaagacaatcactgaaaataatataaccagtataaatacacgtggatattggtatcaagatgaaccgtacatccttgctaaccaggccaagcaagttttctatcttgaagatccactcagaggtcgcgattggaaggttgttgaagatattagccatcgacaaatttgggacattaatgacaatgaagatgagacagatgttgatgttgttagtgattctaactcttcaaattttgtgttgacggttgatcttggagagttgattatgcaatcgaatgaacctccagtaattgttgaatcgtccgatcagttagtggattctgagatagagaataatgaacttgatgaaaattatgttgctgaagaagtagatgatttactagttgaacatgtggaggatgaaaatgaaaacttggtgaatgatggaaatgatagtgattcgtcagtgtaacttttattttctaaacatttgttacttaaactttttacaattaaatgactttttaatttctttcgtattaacatttgtgtcaactttcaattatgtgtttcacattttgtgaatttttacatttttttttttttcatcttcaaagtaaagtaaaatgtcagctactctagcgacataccacggtgggg

SEQ ID NO: 341594 - DNA, 532 bp, Cannabis indica
tgcttttctggaatttaggttctatttgaattggatgctgttgtagtttgatttacgggttttaattgagttttttaaggttctcttcggctggttttgttggtttggtgagtggttgagcaagtttgagtttcaaaactaaaacttggctcaataatggttctttgtgtttctctgtgtaattgctgttgtttttgcttagaatttgttgaggggtgattttacaggttttatcccaaaattgatactctgacgtggcatcacgagaatggtgacatgtggactccacttggagtatttgttcggaacgatatgccgagcaggatgcctcgctggcacatccagtatggaatactcaacgagccgtgccgaatgatcaacacttagcgaattcagtttaacgcatcataggtcaccagctcaatccctacaactcagggatcaacttacgtggatgtggcacacacacgatcccactatcggtgtattcagcctcaatcccacgatccttgcattcagcattgatcacacg

SEQ ID NO: 341595 - DNA, 538 bp, Cannabis indica
catatacacttaacatatacacatatttgcatattcatattacacattatacacagttcttaccttctttccagattcaagtgagttggccgacctgaacgaaaagtctcgcgctagatggatgccctaatcacatattaaaactgggtaaatcacatgtccgaaaccctaatctgggaaactcaaatctacaactcaagggtctattattatcactagggactacactagcctaggaaacaataaaaaccccaactaaggcactgaaatgggcaacgattgagaaaatgagttgttcggggaatatgtcaaaaccagttaaccggttttacaaaacctggcaaaccgattaactagtttgcactaggtttcaccaaacaaccaacaacttgttcaaaactcgaccaattgccaccaaactttgcagagtacctaaacaggctataaacaacatattccaaccaatacaacccagaaaaactcactgaatcaaaacatgcccttaaagacctcagcttgagtttcaaagctcaaactt

SEQ ID NO: 341596 - DNA, 1063 bp, Cannabis indica
aaatacctattctctaattcttttaagaactgaattggattttaaacaaactgaccttcagctttattgcaccaaaaccttcttctacaagtttggcaacaatattagcaacctcagtgggtgttccactggaatcaacaagaccacaaattttcacatttgatgatcttttaggtatagcttcaatattttgagcatggagtaaacttaaaagatcgagaccttgtcttgcagctaaggcattgagaatagccatttccaaaccacatctaacacttgggaagagagatgatggctgcacaaaattcaaaatagaagaatttatgtgagcatatatttagctcctcttctttcaatattattaatcaagcatatgatgatacattacaaaaataattcaatctaccaggattcccaagtgggtccatatccaagaggaaaatgaacccttaagcagaggaaggaaacaactaatttcagtctctttcattttgtgaagaagaaacctcagttgttcttccacttctagcaagtttgcattgctgacattaaatggagaaacctgtttacaagacaaataaatgattagatgatcgagactctcgatttcctctagttatatcttcttatacttttgtgcgggaggttgacgtgcaacagtagtaggaataaacaatgagccaaagataaatgacatgatgaagaaaagttggacagagaaatgtaacaagatcaagcaagcatcactacaagactaaatttttcagcaacactgtagaacatacaattcacttgagaagctaactgacatcaaatagactctgtttggcttaacttattatttagcttttagaattaaaaaaatccttctagggtgtttggataaaaaatcaaaagtcctttttaatttaagtctttatggaagaagctaaaatttttagcttctctcaaaaagatttttgagaagctatttttaaattaaaataatttacataattcctaatttactcacaaaagattttttttaaatgatatccaagcactttgaaaaaaacttttcatt

SEQ ID NO: 341597 - DNA, 477 bp, Cannabis indica
taaaataatttccaacaggacattcttttgattctgtaaccatccatagaatgatggctcgtacgaagaaaactacgcgtctggctgacgcttctgatccccaggtggctcggcttgccactctgcccgacgccgaacaggattggcggtcccaatggaggaggaccgtgagggccacgctgaagtccaggagattgaggagctagacgaggcgcgtccgggcagccctcccgctgctgagggagaggaagagattgtaccccctaactatggggggtaaaatgaggttgggcaactagttgatgctggcggggacgtccttgttgcgggcattgattacgtcaccgaagagtttgctaaggcagttcctcataggaggcagggtgccttgggcgccaggtgggtaggtcctccgtccgagattttggaggcacgcctccgcactctcgaccaggacggatacctgggcgagatgga

SEQ ID NO: 341598 - DNA, 558 bp, Cannabis indica
aaaaaaaattaaaattgggaggccttaggcattataattttataaatatgttattattactatactatttatatgaaaacaaaatgacatttatacccttttgtaaccaaaaactaaataaattaaagtacttgtataatatgtttgtcaatatactattcatttctcaaattaccaattcttaatacatacagttgtaatttttattcaattatacctaactaaactttactcttataaatttgaataaaaagatttagacttgatgagaatgagaatataaaattcaaattaaatttgaatgacaaggactttgtgtttccaatttctcactttttaaattaatgttaatctcatcaaacgcatgagttttatattcctttcaagtctactcattccaacgaaaaaaattgtattgtatacccattgggaaatttgaaaaactatccataaaaatctctaaaattatttccttaaatatatacctattaaaattgcccatatatgactccatttgatttttccccataatatccctcccatttgaaaaacaaaatc

SEQ ID NO: 341599 - DNA, 589 bp, Cannabis indica
acataaacaatcactgaaatagtaaaattgaatgaaattagataaaagtccttaaatccaacaatcttaatagttcagggggcatttttaatgattttaaaagttcagggacatgatttggtacatgttaaagttcagggggcaaagtcctaattagcatttttacatttttatgaaaactttttccaatatagttgtattatttagttttatataccgcacataaaaaaaattctctagtaagttagtaggggtatttattcaatctaattcgcactatttgctcatatttcctccgatccgcatgaagtgcgaattttatattttggaaccaatttaatctgcacactagctcaaatttaattcgcaaaagtacagattaaatcgattattttggattagttacttttcaatattgtattatttaatttttatttaaaaaaaatatattatttttttttcttataactaacaacaaaataaaataaattattgttggtttatgtcttttatcttatatactaggtgaatgtacgtgccgagccacgtattgctagtttcatttaagattttggtctttttaagattt

SEQ ID NO: 341600 - DNA, 1184 bp, Cannabis indica
actgaaaattaatataccgacagtagtaataaaattatataccacaaaaaattataataatactaaattaataatcagaaagtgtatatcatgttaacaaaattatgtatactactattaaaatatgtatatatacaaaaaataaatatcatattaaataaatgatataagacaacaaaaattatatactatacaataaaatatatatacttgctataaaaaataaaataaaataatatagtattattaaataaaattgtatatgctatattaacaaaattatatacaaccataaaataattatgccatacttacaaaattatatatcacatttgtatataataaaataaaaattaaacatgcatgatctaaaataaaatgatatactatataataaagcttatataccatataataaaaaatatatactttaaaattgaactaaatataataacaataaataaaaataaaaattttaggatgctaataaaattatatatcatgtcaacaaaagtacaataaaaaacagaacttaaatactatttttaaaaaaataatatatcgtataataaaaaatacatatatcattcaccaaaacatatatacaaccaataataataaaaaaaatatatattactaatatatatatatatactatactaactaaattatataccataattgaaatatatatcatgataataaaattatataccaccattgtatataataaaatagaaactaattaaatattggattaattacacaaaaacactttaattatattttatttatggatatatgatgacttaattaatttaggtatatgcccaatatcattttactttttttttttatggataaaaactttaatgaaagcaaaagacaactaatagccacaagagggggcgtacatcccttaacgagacccgaggcctcggccttatgcactctcgcccaaccgggaaagcacatcattttacttaaattgatatgcggtacatttaaattggtatgaaaactgctttgttgttgggaattattttacctaggatcttagatctactcacaagtatgttgtttaacacctaaactatgaacttctaaacgataaataaacacatataagttaagaaaccttacattgatgcagcgaattaatgtctccttccactcagatctct

SEQ ID NO: 341601 - DNA, 815 bp, Cannabis indica
gcctcgctattcacctttagcgacatatggtttctcgttaatacactaagttccagtttgtacattgattcctcgcctaagactttacagtcagcgggtaacaaatgtactctgatacttacgtaattaatgagttattccgtaaaagatattccaccgattcacattccctttaccttgacacgtgtcctccagccaaatttcgggtataacaattgccccttaaaaagttcttttttatagtaaaaagagctttttaataatttcggagggcatttttgccaaaatcctttcttatcaatgaacttcatgtataaaagtgcggctcaagctgttcatgtttcataaacctctggcttctttagtgaaatccattttcagaatggattatttccttcctcccaaaatgtctcttctgagttcagaggttcgtccttccagacacataatacccaaatgcaccaaccattttccatttgtccctacagacttcaagcctcaactggagtaaaaaacgatggatttcagggctgaggagcttccgaccaatccagactaggggaaccccgtagcctgccatggccgatcctcacaagtgatcccaaactagggtataaatcttgtgagcgatctcaaaggtcctcctcaggctgatgaagaattccaaaggaagattggcatggtctgaggtggatctgggaaggaagttggcgtggtttcatcagagaattcagtcaacccaagaccctaacctgtgccaggagatctttgcgtcaacctctctctagtgtagagaaatttcctaaggctgggaa

SEQ ID NO: 341602 - DNA, 531 bp, Cannabis indica
ttttagaattcatattaggctgttaataaaacatacatggtagtaaatctagatcctggtaaaatatttccaacaattaatgcttcgaaattcaattttctctcaccacgtttgacggttacacttgattgcttttgatttccaatattcgcttttgggggaaccgaggcacctgaggtttctgaaatgattacccctttttgctgttttgcctataaataccaccgagaatttgttcacaaactcattttcaacaaccttctttgttaagcaagttcagagcaaaaagaggggtttttagcttcaagtctgttgagaagctttcacaagaactattcgttcagcgttatgtaaactaaatacagacgtcaatccttgagtaagttcttgatttcttttactttttctttgcacatttactttctgaatgcgatcttaaccttgcagtcgaagatatgtagaaaaccctaggtctagaaactctgcgattttcctttgtaacgattcatgcgacttcaccattcataatgc

SEQ ID NO: 341603 - DNA, 1018 bp, Cannabis indica
aaaaaaataataaagtaactagtatatattttatacctttgacacataaaaacgagagagagaaaaaaaagttaaatattttatttttccgtaatttattctataactaggtaatgtaattgctttttatgtggctattttaacttgtttttgaaattataattgttgatcgaagttttcgacaatcagttaaatgagataataataagagttttggaataattaatgcatgtagtttttacgtgattcaggcattaataagtcgtagtccacgagtctcttgtattaatgagagttcttatacagagaatgttcttggtgagttctctctctctcttgttttttcgaccgattgatcccccttcccattttattcaagggtatttatagagttttgtaaggataactaaaaagtgataacttgtctttgagtgttagtaatgtatgtgcacaagttcccaagagatataaaatagggcatacatgacctatgccgtaggtattatagggattatgtgagagtaatctttacccttccttgattgatgtgattcttcatgatggagccgtcactagcccctttaattatcgtgtaattaccgtaaacgaggcttacggtatctgtcatgtcctcttatgggcgttctaagacgttttccccatgctgcattaaatgcgaagtaactgttcgaacaggttctccttctcccgaagatgctttgttgtattctagctcccagagagaagaggcatgctctatgtgcctctccggggactcactccctgaagtgcacttgcccgtctatatgtaacttagctaattttttgagagaggtgttcttgtgatccacgtgtcatacgcagccgcgaccacgtattttgagaaaaattcgtggcaacaataataaaaaacaattagtaatttaaacaatataattctaatataatattaatgaaatgttagtattaataatttcatttactaaatatttaaaataagatttttttttaaaaaaaa

SEQ ID NO: 341604 - DNA, 604 bp, Cannabis indica
aatagagtattcttaaatagaggttctactgtatatacaccctacgctacattaactttttttaaatggataatttgcaagaaggccattattcttttatgttttattttattttataattaaaattttttagttataaaaatatgcttgtaaaattttaaaattttaaaaaataaatttgtttagcaaaaagttaaaaaacaactaaaaattaacaataaaaaattagtcttataacacttataaataaactagaaaataatttaaaaaaataacattatgataactataaataaactataaacaaccaaaaataataatttattactgaagaaatattttataaataaaaaagtcgaagagaaaaaaaaacattccgtattgacgtatttatgtaattttttttttctaaatttgtgatatattttttaaaattttttccttcttaaaatacatcacttattaaaatctctccttcaattttttaatatatgttacgaaaattctgtttattacgcaagtgtacgtatcaagtagtatctcacgcaagtgaggtcgaaccacagggaattggagtaagtactactaaactatacttatgatt

SEQ ID NO: 341605 - DNA, 666 bp, Cannabis indica
ctctctctctctctctctatcgacatactaatttttttttctttctattttttgcaagtctagtcgtcttctttgtcgtgcacgtgagctccaaccatcttttgatttctatctattgtatatattaatgtatatatttactatatattgatctaatctaaaatgtgttgaggttaattttgatggtgagatctggttttgatcgagtgatctagttccagtctagatttgtatctttttttattttgtgtcagaaaaaacgtgacaggaatagtgtataaaatatgattttgtactattactgtcagttcaaaacggacgccaactttgaggtatcgacgctaaaattattgaagtggttgggaaaagcatctaccaaagcttcattcttaaaaattctatccaatttagaaagaaaaaaaattcattattagactaggtaaaaaaggaacctatagaagagaactcatcaacaagacccaacgagaactacaattgagcatcatgttgcgaaatatctaacacacaactatacgtattgtttttacaagtaatactaagtgtttacccaaattttaatgacggtgacatgtcaaaagtagcaccgcgtggcacaaaaataccgagactaaattaacgaaaaaggtgtaaagtcatgactgttga

SEQ ID NO: 341606 - DNA, 770 bp, Cannabis indica
cttaattacttaccaaattttctagtttttcttagtaaaaaaatttgatgttgattagtgttacacccaaaattcggctactatctcaataaaggacacgtgtcaggataaaggaaatgtgaatcgatgtaattactttttatagaataactcattaattatgtaagtatcagagtatttttgtaccccgctgactgtaaggtcttaggcgaggaatcaatgtacaaacttgcacttagtatattagcgagaaatcatatgtcacttattgcgaatagcaagacatcgaggacagaacacattggaaggtgaaagcaacatatatatatatatatatatatcaattacgaaagcccttagagtacaaactaagtgcaacgaccgtttcggctcaaaactgagtaagcgaggtgcccatctcgctatgggaagactacctataagcttcatccagtgagcattaccgaggcctacaatcctggtaagccagaagataacattcaaatgagcctcaaagaactctttaagaatcgcaatcgacatcagacatgcattgtcgacctcagaagggagaagggccccagcttgctattgggatcactgtaaccaagtttctgtcgagacatctccagatacaacaattaaatatgtgtttaatacacgattgttttgacccagtaaaagcagaaaaatcacatctatacaattttcaaatcataaaccgcatttatactacatgatatgtaatcaaatcccatgattttaaggat

SEQ ID NO: 341607 - DNA, 720 bp, Cannabis indica
ttttctctcttctaatttcgaaattctatagtgttcttcacataaaattcgagcctttttatgattgagtgcatgcccacccatagcaagttagtcctcaatcatagtatgtaagactatgaagaatccaaacagctgaaggagtattgggctcagatcttgattatactctgcgacagaaaggatacaagggttagagatctgagtggaaggagtcatttaattatactgcaaccaatgtaaggttttctcatactttatatgtgtttaagtttcatcattttagagattcgtatttaggatgttaaaaacatacttgttagtaaatctaggtcctggtaaaatataatccaacagaacactccatcacgagctcaaaagtgacttcctggcaggaaaagaatgagaatctaagcaaccaaagcttggagagcccataatcttttctcaaaaaggagatcctaccaaagacagtttcccgaacaacgaccacctggtcgttaccgcataaatcaagaatatgactgcagcaagatacatggtggacaaaggagcctccttcaacattcttttcaaaatcaacacatgaaaagatgaggttccaactcgctaacttggcatcctataattaagtgatgcatggcctctttggccaaggcatcgcacccatcgagtatatcaaattacccctctctgttggagaaaatctaaccaccagaa

SEQ ID NO: 341608 - DNA, 1474 bp, Cannabis indica
atcagcgataaggtatacttacaccttggataagtttaagccttttcaaggcattggcaaagtttaccagtatcggatgtatggagtagtttattggaaggaccgatattgatcttagataagatatcataaatttaccgttatatctttctaagtcaatatcaatagttgatctttaggctatggatctcaatcctgacatggttaggttcgatctcaagagtgttatttgtgttctttgatttgttagttaagcctaccttttggtctgggtgatacgtacattttgattagattgctgcccaaacatggcctgtagagaattcattatttgagatgtattctccatatcttcatgcgtcttacgaagaacttcatctatgattacaagcatgaaacatttggccttgttattggatcgaatccaagtatcatatctatactgaacattttccggggcattggcactgggctcctcaggatgctcctcagttaggacaaatttatgattctctcttgcattatactaagtggggattagggatagttgtgtaatgaaattgaggttcttagaatgtaaaaagcttatggtatagttaagcctaaatgacattttcatctaccctgacctaagcctaacattataacctgttaaagtccttctgatttcaaagcatttattgttaacattagtgaagaaggttaaatgatgtgagcatattgaaaaattagtttgtggatttgtttggattaagttgagcatatatggtggagtccaaatattggagtcatttgtaagtcatattatttatttccctattaaactttaagactaaactttgagacagttgggctgaaaatttggttaaaatttgcaattgagatttcatgggaaagacgatgtagtgtatatggcaatggtggcttactttaagtgttcggtgtttattttttttgttcatttaacttggtctttactcaagggagaataaatgttaagttaggaggaattttttagttttatttttatgcatttttagagtccattttaatacgtgttttagtagtttttatttatttttgttgaagtttacgcttattttctttttgtttcaatgagagaaaatatgctaaataatatgaattttatggatttatcatgaattttggagttgtaagatacaattggtgaaaatgctaagttttgaatgtttaacacgctccgtttgcgattgaaaatagagtttgaagcttcaagcaaatttttgactatgattcattcacttctaggaaaaactttctgaatgaaagttctagatctctcttttagctttccaaaacatcttgaatcttccaattctaagttatatcgagagagttatggccaaaatattatccattgttgtagcagcaaatcaaaaaaacaagagagttgtgactctctttccaatgtcgtggctcttgcaaaaaaaaa

SEQ ID NO: 341609 - DNA, 523 bp, Cannabis indica
ccaccggtgttggaacggtctctgaaactcgtgcctctaaatcttgcgtatctctaatggacgtgattgacatgttctgaggtgtacggagtacatcttccccatcatcaggtctgtaatcattgggaagaatgaactcataccccgaagagacggggtccagttgtggctctgcctctgcgttgggccttctcggttctcccacgagtgtaaatagggtcttcaagtaacccataatctctgtttgccctttcagaaaaattagtctggccttactttaaagcaagttattccctctcaacactctctaatcttgccaatatgacaaaagatattggttcccgaggctgtgaagtgttgggaatagatgttgattgtagcatagatgcaaaatggggcatcaacatagaaggtggaacaaaatgggcccatgatggtagagagtgtggtagtgtatcctctctgaagattccatgtaaagcccgcttagttaatttggaaattagcagttatttatgttaat

SEQ ID NO: 341610 - DNA, 604 bp, Cannabis indica
tttgacaaacggttggcatgggtgtgatctactcgtcgaggtggtcgttttgatatacactacgcctattttcggtgacgtttccagtacaccgatttgttaatgtgcatcgcttaggtgaggcttcagaaccccaaattttaaatatagtcatattatttgtcattggactcggttttgaatgtaaaatgcaatgatgataatgatttaaccatttgatggtataggtgagagtaatatgtaagattgggctaaaacaattggagcttgggacttgagagcttaagatcgtcttttggaaaaattttaatgactcgggagagttagggactcaacttgattattggacttgatttttatatgcgttgtataacattagacatattcaaaatttttatgatttacaaaattgtttaaaaaattgaaaacttaatctgcatatttttctggactgttctgaggcactgagtgccaaatatatttttgtgtgcaaatatttatgcaggttatgatttttgggtttatttagaatacagttgttgtgtcgccgaatatttttttagaaaataataaggaatatgttcttttgttatgcttattattt

SEQ ID NO: 341611 - DNA, 1563 bp, Cannabis indica
acttgcttctttacgacctaaaccgactcagaggcgcaccttccttttacaaatcctgcgattattcccacagaggatgtggtaatctcaatacccattctccgatgtggggtatcagtccctttccatccctttatcgcggctatcctcaaacgatatgatgtatcacctttccagctaactcccaatagttatcgcaccaccctggctttttacgcgatgtatatggagtacgttcatagggctccctcggtagaagagttcagctacttctacgatataaaaagcgtaggccttcacaatggtttctactgctttagcaaatgggcgacttctgaaattaatggggtagaaggaatggtatctaatatgggagattggaaatcaaagtggttctacatcttcaaagtcccagggattagaactgattttaatcgtagacctagtacgtcgcatgttttctaacttagacattttttgaattattttgagatctcatgctaactcgctcttttttgttttcgcagatagaccagctcgacctgcactcgacgcaactcgcagagagacagctgaagttctcgggagccttccggtacaagatcgcgactggcgattattgtgtacgactgctaagctgcgagaacacaagctgattccagagaacgcaagtcttcaaagagagccagtatacaaggaaccatctgagaaacaacaagagcggatagacaaacgcctctccaagcaaacctctcgaccaacctcaggtaacatatcccacgttataaactagtgccttgaaatttattcatacttatcttttatttgtcctcgcagagatgactttcttgaagtccgcgcccgtcctcaaccgcaagccaaaaagtggaacagcgacgacatcgcccgtcactacccagaagaggaagagcgacgttataactactcctgccacggattcctccaagaagctggctaagatcgcgcaagacaaagggaagaaagttatgatcgagccaactatccgagcctgcgattttctagctatgcaggagaagttcgtgggcgaggagttcatatccaaggcggagaggatcccttctaaagagcttgttctgcgctctgtggagttggcttcgcagtcgatgactctgttcgtgaaaactgttgccgctggttctaaggaagctgaactgctgaagaggcataatgcccagctctaggagagcataaagaaactaaaacaagacgcggctgataaggacagggagcttgatgaccttcgcaagtctaaggagcaggtcgagctcgaggccaagaattctcagatgaagatcgaggagatgtctcgcgacttagaggtcgagaaggagaatgggaagaaacagtatgaccaggcagtttctaactatatttacaccactctttccaaaattccagattttgacttctcaatcctcggggcagaagccgctgaaatggctgaggcttttcgcgccatgtcgcccacacaaactcaaggcgtggaggaatcttccgcgaggctgaggctacggatgctga

SEQ ID NO: 341612 - DNA, 1013 bp, Cannabis indica
aaaaagttcatgaagcttagaacaagcaagatgaaagacagacgttatgcaattcagaaataagcattatggctgtaaacccacatgaagacatgataaagaagaatcgcagaggtttctaagcctagggtttcctaagcatttttctacagcacagtagaaattgcattcaaatgtaaacatgcaaagataagcataaaggaaatcaaaaacttactcaagattcaagtgtctgggtttgagcaatgtctatcgaaccagcagttgtacgaaggcacttcggcgaccgaaaagccaagaaattttcgtttcgctctgaagcttacttagcaaagaaggctcatgaaatgaggttatgtgccaatgctgtgggtatttatagggaagtcacaaaaagaggtaattgtctcaaagaaacctcagacgcctcagcttcccaccttaaaaacgaatatgggaaatcaaaagtaatcgagtacaaccgtcagctgtggagagagaaaattggattttgaaatattaattgtcagagcattgattagccgaaaaccgaagggacgcccagtcagcttcacatcgagtctcgaagggtcacgctcgacacgtgtccctatccaaaggtagaatcagcttggatgaagtctacacgcaacttcggaagtcccatacagacttggggggcaaattttatcccaatatttgcactatgacatggcatcctaagaatggtgacacgtggagtccacttggaacacctgctcgggaagaaaggccgagcaggatccctcgctggcatgcccagagcaagatattcagcgatccgtgtagagcaacaaacacttaggaaattcagctttcgcatcatgagtcatcagctcaatccctataactcagggatcaatttatgtggatacggcatacacacgatcccactatcagtgtattcggcctcaatcccacgatccttgcattcagcattgatcccccgatctttctatttatacgcattgtaa

SEQ ID NO: 341613 - DNA, 1167 bp, Cannabis indica
attttgtgtaaaaaaaaattattatgtaaccatatgttgtaaatggaattttcaactttgttttaaactcgggatcccaacctatatggttatataattataaaatgataagattaactttgtcttagcaaattttcaaatacgggtgttacaagcacccctctggcggtggtggccttaatggtacacctagtagttgtctggccagtggctatagtttggccaattgctccatggccagcagtctgagcggtggtggccgcgccgctgtttcccaggcctgggggctgttctccattatttccggcaagattgcttgcttatggaataatctgggcactatccatcttttcgtcagatcgctcttgagatcttcgggttaacaccatttttttttggtgaaaaacttcaagattttggtcaaagctctcaatgaaatcaccaaaatgttgactggatttttaaccaaccgacgcagagtcataataaatgagatttaaaccaaaatcacagtaataaatgcagttaatgacactagaatttccaataaatgtaaagaaatgacaccaaaatttaaagaggttcggccctggatgtcggttatagcctactccccttgtgttttattgatatgagttgcaaagtcaagaacatgctctttaatgcaaagaatgataaagtatttatttttctaagtgttcaaaattgtggatcctcctcctaggtcatggatgaccccttacataggggagaggtcggtgcttctcgcttcaggagacgcgaccaacaaggagctacctcaaccgtctccttgatttttggaggtaattgaagtctaatttttatgataatatctcgctattttcgtggattaacaattgtctttcagcctttcatgggattggaatagtcactgacgacgaaggtctcctatgggtgtgacacggtcgttgaccacctttgggaatgaagcccatacttgggggcaacagaaaacgaattccgacgataaaaattcatggaatcactcccatttgaatctccatgcataaataaagagattcatgtcggttttaggcaattaaaacacgtaaaaattggactttaattttaataaaaagtttctagtccgtatgagttcttaaaaaaataaattttcagatttca

SEQ ID NO: 341614 - DNA, 573 bp, Cannabis indica
caatggtcgagtcactaccacctctagcataaccagaggtaggagaagtagtggctccaccaacatcctgagtccctcggggcacatcatgaacaaccgttaaagtgttggaatatgttttaccaggatctagattcactaacaagtatgtttttaacatcctaatatgaatttctaaaaaaacgaaaaaaaaaacacaaaaaggatgagaaaccttacagtggttgcagcgaagttaaatgactccttccgctcagatttctaacacttgtatcctttctgtcacatagtatcaccaagatctgagcccgattctccatcttgttgtttggattcttcacagtcttacatactatgattgagaactcacgtgttatgtgtgggcatgcactcaatcactaatggctgaatttcttttttgtgaagaacactacaaattttgaaaaataagagaagaaaagaagaagaagcagtctcaaaaacctagagagaaagaaagctaggacgttttcttgcctttgaagcattagttggaaaatgagactttcttttccttttatactacttctctta

SEQ ID NO: 341615 - DNA, 777 bp, Cannabis indica
acctttttccttgccctgaacttcccgaagatggaaaagttcttttcttctgttcaaaggtagaacccccactctctttttcaggaccagacatagggagaatagtgatcccaccaacaccagaagactctcgggtttcttgcaaaaatttaactgctccttcagctcgaagagccttatcaaccatttctgcataagttgtggtatcatttgttgtaataaccaggtcatgcctgatcttggcattcagcccagccaaatacttttctttcttgctgaagtctgttggtacgattccggaggctaacttggccaagcgatcaaacttggttgtatattcagtcactgacataccctcgccttgtaccaactcaacaaattccttccgctttgcactgcggaccgcctcattgtaatatttggcattgaataattcccggaactcttcccaggtcattctggtcacatccctggtgagggataccatctcccaccaaatcagggcatcctcttgaaattgaaacgtggcacatgccactctatcatttccgaccactcccataaaattcagtattctctcaataacggtcaaccactgctcggcttttaacatcagggcctcccagaaatactggaggcgcttgctttctgaatctctcatataaaggctccatgcggttaccagcaacatgttgctcagctggcaccgcaggggctgcaggaaccgcagcaggcggttgcgggggaggctcaacaggagcatcccgttgcctaagt

SEQ ID NO: 341616 - DNA, 653 bp, Cannabis indica
agttcctggtaaaataacttccaacaggtttctcatactttatatgtgtttaattttataatcattttagaagttcatatttagggtgttaatcaacatacttgtgagtagatctgagatcctggtaaaataatttccaacagtgagaacccaccaggaagataatgctagtcgctacaagaatttcttgtaagaaatctccaaaggcaaatgttgattcttgcgagatgcggcctggccagaacctcccagtgtgtcctttattcctttggcaaggcctttgtttttacccaaagtcacgattgcttttgaactaggttacttggactttgaaataatgcctcccaagcaacgtacatcaaagactccccaggaccccagagtcacctttgaagctgagttaatagaatcgaaggtgtgatctatcttaggttacacatgtgatatattgaagacctgtggaattgaacttgggtgatcatgccaagtcaggtcagtgcgagagggtgagttcaattgtttccccctgcgcatttttcaagcagtaccccaggggccaatggtgagactagtaccagtggctcgactggcatgggcgcctggagccttgaacatatcagtgcaggggccatactccctcttcgagactactt

SEQ ID NO: 341617 - DNA, 567 bp, Cannabis indica
taagaaactaattttttgcccaaaactcagatctggccattttcgaccctaaatttaacatctactcatagataacaaacattaattatacaatttattcttttgacaacattaccgatgggactgtagttgatggagaagtcgttgggtccgtggtggtcattgggtctgtgggtccttcggtggtcatggggagaaaggaccaatgttgtgggcggtaagttgtgggtttgagtccttagagtgagttcagagagcaagagaaataagggaggaatagagagggttaggtgtttgaaatggaaagggtagaattgagttttataaaatattaacctattttactaatgtagattaacttagatttagaaaaataatttcaatttagtacatgcatataaatttaaatttctcttttggctaattaagatttttcctctcgaattttgacatgtaccaaatcatgccccttgaatttttaaggtcgttaaaaatgcccctgaactattgagattgttgaatttaaggattgttgtccaattttagtaaaaaaattctaacatggat

SEQ ID NO: 341618 - DNA, 1432 bp, Cannabis indica
tatataaaggaaattttttcaagtttgaaatcttccaagtttctaaaattttctattgcaccaagttgtaattaaaatcgcaatcaaaatattatagataataaccgcgagtacccgtgtaccgcaaaaatactatacatatccctgcgaggatatgaaagtcgttcaaaataaacataaatgtaaattcatctaagtacaaggtgcgagtacccttgtactgcgtaaacaaacaaacaaaaaagataaaatctaacacaagcaaataagggaaaggttaagacgtcggagcagaaggagcagacccatcagggactttactgacggcttcattctcgacttcttcagcccccgcaacctcagcgtcctcgagaagattccctccaccaccttgagtttgtgtgggcgacatggcacgaaaagcttcagccatttcagcagcttctgcttcgaggatggaaaagtcgaagtgtggaatcttagagagagtggtgtagatgtagtccgagaccgcctggtcatactgcctttttccattctccttctcgacctccaaatcgcgagacatctcctcgatcttcgtctgagcgttcttagcctcgagctcgacttgctccttggccttgcaaagttcctcgagctccttgtccttagaagtcgcatcttgtttcagcttcttaatgtcttcctgaagctgaacgttgtgtctcttcgcgatttcaacctccgtggatccagtaaaaaaagccctcgagaacatagcaatgaactgcgaagctaactctgcggagcaaggcagcagctcctcagcaagagtcttgtcaatcttcgactggaactcatcacttacaaacttctcttgaagagacaatatgttgcgggctcgaaccgctgggtcaatcacgaccttcttccccttctcttgaatgcccttagctggcctcttggaagaatccgcgacaggagtaaccaccacatcgctcttcctcttctgaggaacgacacgggaagttgccgctgttccagatttcaacttgcggttaagagtgggtgcagacttcaagaaagtcatttctgcaattacagcaaaaaaataatgattaatgctaataaggtgaagttctaacgcactattttatgtatgcgataaactacctgatgatggtcgagaagtttgcttagagaggcgtttatcaattcgctcttgttgcttttcagaaggttccttgtatactggctctctccaaagacttgcgttctctgggatcagcttgtgttctcgcaacttggcagtcgtacacaataatcgccagtcgcgatcttgtacaggaaggctcccgagaacttcagctgtctctctgcgagtcgcgtcgagtgcaggtcgagctggtctatctgcgaaaacaaaaaagagcgagttagcatgaaatct

SEQ ID NO: 341619 - DNA, 649 bp, Cannabis indica
agggaccagtttctagttagaattttgccactttttcaaccacttactcttctttcaataatgccatattttccaattcaatcatataaatgtacaaaactatttatttaataattataattaattactaaataaaattatcatttatgtaatttattaattagcccatacaaagtctcttaattattaaattgaccccaaaacctctttcctcaaaattaagcccttgcttagtgaaaattcataaataagacatagtttaattttagaattataattgattaattgaaatcaattaactgagtctgcaagcactattatctcaactagtgaggggaccatgggcctatataaccgagctttcaataaatagatcaagaattcaccaagtgttataaaataatataaaatagatgaacaagagaagagactccattgttataaagtattgatgatttaaaatgataaccgtgatggaaacggtactttagaagagactctcaagagaagttagacataacacatttgattaatatttataacaccaagtaaattctctaacttattaattctgccttactccactatagatttgaaatttaataacactctcaattatatagaacgctctatatgtaccacgatatag

SEQ ID NO: 341620 - DNA, 524 bp, Cannabis indica
ggcataaaacccaacaatttttggcttcctttcctcaacagcaagaacaacttcttcttgctcatgctgtaatgtttgggcatacctttctcgggctatgcctgaatctctagctatgtgcggacctccaataatgacttacagatgtccatctacttgtggtggtagtaaatcttgattattatcggcccttttattttgatcgaccttgacatatttttgcacgtgcgaattattctttcttatcagaaattcaatttcccgcttcaaattgttgcattcgctggtgtcatggccataattcccatgaaaacggcagaactttgtcatgtctcacttgcttacgtcttctttcatgggtgtgggcttcttgtacggagctaatgactgagtagaaatgtagatagtttctaaatcttctctcaagacagagaaagcagtaaactttgtaggattttccctggggtcctcttcggtttttccgacgaactttcccttttttccattgccttgcctattgttat

SEQ ID NO: 341621 - DNA, 606 bp, Cannabis indica
tccataggatttgatcttaagcttaagggttataaaaagggtaaaatggtcatttggtgtgataagtaaattttgtgttttatttgatggctgaaataaaattaacaggattaagttatttatttaggtttttaactaattatgctattagaatctgttcttaagtttggtttaaagcttgtataggtttgagtttgctgaatataagggctgcttaacttcgaaatgagttgaatgaagttttatgagttctagatcagttgggaatacaattttgagtaaatggatgagttgtggtgttttgatgcattggttatgttgtgtttatgatattatattgatttggaacagttggacaggtttggtttagttttggttcgagtttggaggagaaaactcttggttgcaatcctgccagaacggtcgaacggttggttctggtgtagcagaaccggttgaccagtttgctgacaggggaaaatttttcagtttttgttagggccgattacaaagctcggggtgatttccgtgtctgttatagattgtttggaagttttaaaacctattttggagctaatagaagttaatgttcactggttatgggaa

SEQ ID NO: 341622 - DNA, 450 bp, Cannabis indica
attctaaaaattaaaaaatgatttcctaataaacaagttgtaagaaacttaagagtttcaaatacattcctaagcatgctttttaattaaataataaaaaaatatgttcatttatcaaatcctaaaaaaaattgggcagagttttccttctttttatgacatttcccaatttcataagtacctaacatacaacaaaaacaatacaacaaattgggaaacaagacataataatcataatatatagcatgtatatattaattcttcgttcaccacagtatagtatatctcagaacctacttcactacaaatgaatatctaatatattcaaactcctctaatattttgataattagtaaaaataaataagcaaataacgtacctctaaaaagttattaatgatcaccgaaattttactttgttttccaataacgaaccagaacctaaaatatt

SEQ ID NO: 341623 - DNA, 890 bp, Cannabis indica
aagttcatatttagggtgttcaacaacatacttgtgagtagatctaagatcctgataaaataatttccaacaccaaacacccatttcggagcttcgaaagtcaacctgggtgcagggctaaggacccatcccaagtcgactgctattattcaggactactcaactctggaatatttctttcttaccacgtgtcaaacattgatgaccatgtcaccagcgccagtttctgggtaaaaaaatagcaaaaacaaaaataaaaaaaaatgtaatttgtggtgtaaatacttaagtttaactctcagttgtagataaatacctaagtttaagttttgacggtaataacctaagttatatttctagaattttttgtagatacctgaccgctaagtgttaagtcattatccacatgtcacttttgaattagtatatttaaaataatttttaaataaaaaattaaaaaaattttagacctagactagtcagagattttcacgtagccattgatttacacatcacgactaagtacctacgaaagtatcaaaaatataacttaggtactattaccgtcaaaaattaaacttaattatttatctgcaactgagagttaaacttaagtatttatgttacaaattaatcaaaaaaaaaataaatagcattttaatatttttctaacaaacaaataacataataaaacaatatttaaaattattttaatgaatatgttatacccgaaattcggctaccatttcaatagaagacacgtgtcaaggtaggaagaatatggatcaatgcgtgtaacagtaattatattaaatgcagacgtgatggggtttatttataacttgatgactataaggtcttatgcaagataaagatatacaaattgttgc

SEQ ID NO: 341624 - DNA, 934 bp, Cannabis indica
tttaatttattatataagataatgtttttttataatatttcaaattaaaaggataagggtatcatttaatttaaaatatgtccaatattaaaatatctgattttataactaaatgatatataaatattaaaaaaattaacaaaatttttaaaatctaaccaaaaataaaaataaaataatcaatttttaaatttaaacctcaaaatatcataaaattaataataatctattaaaaattaaatattattaatttaaaattgatatttaattttaaatatattaaaaataatattttattttgaaattagggtttgaaaattgcaaaattcgaaatttggggaaaaatcccacaataatcgcaaaattgggtgaaatcatgcaagttgcacacgaggaggctccgcgcagcctcctccgcgcgcgggagtgggcatcatcaggggtcattggcggtaaaactcggcagcagcagggtctggacacgaaacttgctgcctccaacgtgcgtgtcccctgtctgaacgagtgttgtccaaccacgtgcgcgcgcgaatcctccttgtccaaggggcgtgcgaatggggtaccctcgacaccatatgcacccgatttttcaaacaaccataactttctcgtttttaatcagaatcgagttccgtaaaaatcgtagttgcttaatttttcataaggaatcgaaataaaatattttcagaacagaaataaaattattttcatgaaaaaattataaatcacatacattcatcaaataatcacataaaccaacatgaacacatctaaatcaacatacaaataatattcatcattttaaatctatatttcatgaaagtaaatcattaccatggctctgaggccagttgttgagaatattttaccaggatctagatttactaacaagtatgttgaattaacatcc

SEQ ID NO: 341625 - DNA, 744 bp, Cannabis indica
aagcaaagcttatgatcgcattgaatggggtttcttgaaagctatgatgctccgtatgggtttccatccgtggtgagttgagcttatgatggccacagtgatgcatgtggagtataaagtagtccatggtggtaggagtatgggtcctattattcctagtcgcggtattagacaaggtgatccattgtcaccttatctattccttctttgtgctgaaggtttttcttctttgatcaagcagttcgaaagaaatggcgagttgaagggctgtaaagtagccaatggagctccaactatctcacatatgctattcgctgatgatagctacatttactgtcgtgctactgaggaagaagctcacaatgtccttagattgcttaatctgtttgaagctgcttcgggtcaaagggtaaactatgctaaatcttctatcttttttagcgctaatactccgatggatttgcgagatagattgtgtaaccggttggggatggttgctgctgatgaaaatagtttttacctgggtcttccttgcactatgggtcggaaaaagacagccattcttggcttcctgaaggaaaagatggagaagagaatactgagttgggagggtaagtttctttctaaagctggccgtgaagtccttttaaaaacggtagcacaagcactcccaagctatgccatgtctgtgttccttattccacttgaaacttgtagtgcgcttgagaaacttatggctaagta

SEQ ID NO: 341626 - DNA, 712 bp, Cannabis indica
ctttaattctttgcgggtggttcctccaatatggggtcctccggagatcatggctactctcccgttgggtctgggcggcagaccggggatgtgctgggcatcgccggcgggagcaactggagccaatactcctgctgcaccccctggtgttccctgtggcacaacccctgtcgcctggcccggattgaggtgaggcagccgattcttgatccactcatagaggtggcccaatcggataggttttcaatctcgtccttgagattcttgcattcgttggtgctatgcccaatgtcgttgtggtactcgcatcttttgtttggatccctccgggagctgtccttgtataagggaggtggtctccggtagtgcgtattttgcctagtagcaaagtacacacgctcttgggagtccgtcagctccgtgtactgggtgtactggggagtgtacccccttttttggcgtttctcctccgtccgggtgctgcctttggaggatcgtttactccttgagccctgggaagggcctgccaggctagcggttggagcggagtgcgagggagcttgtccatttatccctgaggggtttccaaaatgggatgatgcggtgccaaggcctggccctgactatatccgggagtagcagagaactgtatgccgctcattggtggagccgcggtcgggacagtacccgagggcggtgctccgggcatgta

SEQ ID NO: 341627 - DNA, 711 bp, Cannabis indica
tggagggattatttgagggttcgaactacagttgacatcgaaaagccgctcaaacgccggatgaaattgtacaaggaaaatggtgaatggatttgggctatgtttcaatatgaacatctcccaaccttttgttttatttgtggaatcataggccattctgaacggttttgtgctaaacgctttgatcaagatattgatcaaattgttaagccatatggtattggcatgaaggcgcagatgagaagaaggaattatcagattggttcacaatggttgcggtctggaacggagcaacaggtggtggtggagccgcatgatgatcggcgattgggggaagaagagttacctgattcagcgactaagatcatggaggttgattcctcatttcagggtaatggtatcaattctggtggtgataataatggaaagaatcatagcattaaaagtggtgctgtatctagccaaagaatatggaaagaaaatcccatgcaatcagctagtaatgttaacgtggaggatgatggggatgatgtttccaaaattatcctagactcaaaaaggaggcgcatggaaggtgggaatattggtgatactgatgatgtggcagatggtgcgtgtgtggtgttggtgaatgaaatgtatgttggtgatgggccaaaaaacatgtcaaaggtgggtcttggttcccaagcccacccatcattatgagtc

SEQ ID NO: 341628 - DNA, 440 bp, Cannabis indica
gtttaatggaacaacacttatcccaatgggaaaagtgagactcccagtcacattgtgcccggacacaccccaaagcactttcaaatactgcacatttgtggtggtggactgcccaacagcttacaatgcaatcctcggccgaccggccctggtagattttggtgcagtcacgtcaattaggcacttgtgcctgaaatttcctactcaagaggccggaataggaatcgtgagggggaaccaaggggaggccatgcagtgttacaacgtggctgcccaactacccgtcctaatggtccgtgaaattattgagccagaaatggcgaaagaagatgagttggatccccgtgtgggatccgaaaatttgtagaacccatggaggatgtcgaggaagtgtcagtgtgcgacctcgaccccaccaaagtcctccggctaggaaaaag

SEQ ID NO: 341629 - DNA, 815 bp, Cannabis indica
agtgtgagtatgaccagcatgggaggactgaaaaaataccaacataaaaaatccataaaatgtagtaaaaaatatgaaaacactagtaaaaaaattttaaaaaaaaaatcaatcaaggaaaaaaaacaacacctcaataagaatgtccaacttcttgttcatctcagcaaaagatttcataagaatcccttgctggctaacaacaacagagatattttttttaattcctcaaattcaagtcgggagacattctcatgtgcagatgatgaagaagcacccatgtaacgtcccgtccaacagggacgccacgtgtgtgtgttttaataaaattcgtaatttatatagaatatagttatactaaaagtgtggttaattaaattttgataattaaaaattagacatataaactatatgataaaagataagtggtattaaccacggggtccccctgttttcaaaatttcacaaactagtttaatagtatttttacaacataaactttgtattcccaaaatacattcaaaatagagcatcctgcttacttggccatgccactgcggctgatatgtacattgctgctacgacctcgcactcatggcagctcaactttagccttccctttacctgcaccataaagcacctgtgagtcacaaagactcagcaagaaaagtgaacaaaacaacaatcggtaataatcatcaattcaatctcatatcagcacgcttacacagttacacaatatcataaacacacaatcctggtaccttataaagtacccatttaccactcgtcaaccacgagctgtatatgtcact

SEQ ID NO: 341630 - DNA, 559 bp, Cannabis indica
tttttttttttttttttgggtgagaaattaagatattattaattaatggaaaagatgatgtacaacaataggggtaccaaaccgaattagtatcactccagaagcatatttaactaaaccatgtacggttaaatttgtaatgcagcgaacatgattaagagaaaatttagaaaaagaggataattgatattagtacattaaattaatatactttgagagtttctatcccattaaaagggataagaccaatttaaactagtctctcacaaaaatcaatataaatatatattaaaaagtgttattgtcaatcttctattataattttttagttaatcatcgttaggggtgtacgccggtcggtttggtcgagttataacatatttttacaaactcaatataaatattggattgtaaatatttaattgtaacctgcctaattaaaaattaaaaaaagttcaacctgtctaataattttatcggtttagtcggattaacccgtccaaaccgttctttattttttttataattattattattaatttctagtatttaaataatt

SEQ ID NO: 341631 - DNA, 561 bp, Cannabis indica
tttaaataaaaaataacaaaattcataatgtcctatttctatttgaaatatcatgattaaaattatcttattttaaatttcaaataaggtcaatttattaaaaaattaaaataatttaaaaatatcaaatatctgaccttaaatttaacaataagataaaataatcaaatttttaaaataagataattaattaagcaaaaagatagatttttacctattttcaaatacaaatttcactaatatcttaaattaatttaattctaataattagatttgaaatatgaaaaataaaaatctaaatacaaaattacacaaaaaaatcaaaattaattccatggaaaaacatgaaaaattgaaaaaattgtatttggtgcggattgcataccatcagcgcgcgcaggagaaggtttctgggcgaggaatgtcgcacaaggatgctgcgtgcagcatctccgcgtgcgtaggagaggctgctcagacagcctgggcgagaaacttcggacacgccctgtctgaaccatgggtgacacccgtgtgcacgtgcatccgcgcgcgtatggg

SEQ ID NO: 341632 - DNA, 1505 bp, Cannabis indica
tattgcaagttttggaaaaagcttgctagtttttttttgaaatctgttaactctgccaggattgttgagtcattcctggatcattgctgtatcaactgggacatgctagtgaaaattaatcaccgaaatctattttccaaatctgaaattatcaccactttaatcacttgtattaggcaaaacaaatattaaaaagtgtaaaaatatttacatcacaccatatataatatatattaatattttatgtattatcataaattttgataaataatatgtttcaagttaatgatgataatgatacttttcttttaatctttatttatttatatattattagcaataggctaaagaatgtttattgaacttttttattttttttataattttctttaatatataaaaaatgtgtattgtatgcttgtttttggtgcggtgataatgatgtgaaaaataaagaagtattggtgcacttgggataaacttctcttgcgtaaaaaagatggtgatatgagttcaaggactttagattatttaattaggctctcttggccaaacaagcatctcgtctctacaatgttgctgattcttttggtcgtgtgttgaaggacctatacttctagagaagatcttttgtcgagattaggaaatctaagagaggctcttttatttgaaaaaatattttataggagaaagaactttttgactctagagtaggttggcgtgtggggaacgtaaagaacatcgctatttattctaacaactagattccctttgttccacctttaattttcagctcttgttcgaattgatgggtctagcaaggttttggtgttaagagatacttcaggtgattgggataatgtgttagttcgatcaattttttttgcctcataaagttgaagctatcatttccattctttggtcttcaatggatgtgcctgataaaataatatagaattttgagaattcaggttggtatttcgtcgtctagtggtttgtttggttggtggaaaaaattaggaattattacataaaaaatataaattggcattttatttacaaaaatacctttataaggtgtgaccaacatttatacattttatgtgattttaaatatcaaaatatctcttacactataacttacacaatcagacgatggttgcagggtggttgctgcgtggttgtgcggtggttgcatcagacgatggtagcagggtggttggccgaaggttgcatcagacgaatgtttctaggtagttggccaaaggttgcatcatacgaaataactgttagcaaaatatttatgtaattgtaatgcaactgttataaaacattaaaaatcaaaacagtatgtctacgcacgtaactctatctacatgtctctttattagtaatttagaagacaacgaaaatacaccaggataaatattttactatagtattgatgtaattttttttagattatacttgagttggattgtttaggaactccagttcaacttttt

SEQ ID NO: 341633 - DNA, 1215 bp, Cannabis indica
gaatgtgttttggggaaggcttgtagattgaagttcaacaaggcagaacgcaccatcacagaaaggttagcttatgtccattttgacctttgggggccatctaggattccaaccaaaggtggagcacacaaattttttgagtattattgatgattacaacaggattccaacacaaatttttttgagtattgttgaaaagtaaagatgaggttctaggaacctttgaaacatggaagaggctactagaaaaccagtttgggaacaaaattaaggtcttaagaactgacaatgaccttgagtactgcgcaaatgagtttaagggattgtgtgccacaatgggaataaagagacatagaactgtgatcaaaacccctcaacaaaatggtattgctgagaggataaatagaacattgattgagagggttaggtgcatgttactaggagctagtttggacagaccttttggggagaagcttttaaaacaacttgttatctaatcaatagatcgccatctgtgctaaacaacttcaagaccccacaagagttatggacaggtaaacctccaaacttagatcacttgaaagtgtttggatgtattgtatttgtgcatgttagacaagataagttgtaacctagagcattgagatgcatgtttctaggataccgtgaaggggttaagggatatagagtgtggtgtttagaacttggattcaagaagtgtttcattagtagagatgtggttttcaaggaagatgaaatggccatgaaaactaagagcacttctaaagacagtgaagctggtttagatgagaatttccaaattgaggtggagcatgttgctcctacaacaccaactaatgctattccagatggaactgaggcaaaagaaagggaagacaatgtagatcagtaagaactaagcagttatcaaatagttagagatagagaaaagcccctgatcgttttggttatgctgaattcattgcatatgcacttatgattgcataagaggttggcagttcagaacccactagctttcaagaagctatgagaagtaaagatgctgctgcatggctgcaggctatccaagaagagatgcagtctcttaggaagaatagaacctggattgttgtgaagaaaccagagttctatggctagtaggttgtaaatggcttttcaagcataaagaaggttcatggtgttggaaattatttt

SEQ ID NO: 341634 - DNA, 651 bp, Cannabis indica
tttggttcctagggtacaaaatcactcccaaaaatgagaagcccaattctttttgcactttggcccactaggtttagtccccttccttccagcacagccagctggtgtattttgagtgactgggacgaatttgctgatgtggataagtaaaactcgtgtttccacgtcactgctagaatgttgaattcgctttagcattacttcagcaatctgccccaatttcagcttgtgttccacttcttccttgcttcatttttcaacaacaaacaagcacaattaattggaaaaacacacctaacaataccaatttttacaagacttaaaagttagcttactaaatagaaaatgaaactaaaacttactaaagttaagtaagcaaacacatttttactactcttctcacaatacttttagtttaaaagcataaaaaataactctataccatagagttatcacatgttctcacgtgatacaccccatgctgcccagactcaacttgtcactgaaagcttacaggcttacttatctgcacatagggggtaaataaggggtgagctgcaaagccaagtaagcaaaaaacaaaatactacgtaccaacattcacactgttggaagttattttaccaggaacttagatctactcacaagtat

SEQ ID NO: 341635 - DNA, 764 bp, Cannabis indica
atcgaccactacattggccttcccggggtgataaagaatctcacaatcgtaatcctttactaactccaaccgacgcctctgtctcatattcaaatctttctgagtaaagaagtatttgagacttttgtggtcggtataaatttcacacatttctccataaaggtaatgccgccaaatcttcaaagaaaatactactgcggccaattctaagtcatgtgtcgggtatcgctgttcataatccttcaactgacgggaggcataagcgataacccagtctgcttgcatcagtacacaacctagaccctgtctggatgcatcacaatacaccacgaacttttccttgtcagtaggcaaagctagcactggagctgtaatcaatctctatttcagctcctgaaaactagcttcgcatttatctgaccatataaagcgctgattcttttttgtaagcacggttaagggtgttgagattttagagaacccttctacgaactgacgataataaccagctagacccaagaaacttctaatttctgtcactgttttcggtctaggccaatccctgacggattctatttttcctggatccaccttgatcccatccttgctaacaatgtgcccaaagaaagacacctgcgatagccaaaattcacatttcttgaatttggcataaagcttgtgttcccgaagccgttgcagaaccatttgaagatgtaccccatgctcctcttctcattgagagtacacgaggatgtcgtcgataa

SEQ ID NO: 341636 - DNA, 740 bp, Cannabis indica
atgcatttttatatgtcatatagagaaatttcatattttcgcatgttcggtgctcggcaaccttagaacgcggtgtttggatattaaaatcacatcctagtattttagtatagcggggcggtattgttagacattgggaatgtcgggattagtcgagattgtagaatttcctaaattacctttcagtgacctgaagtggctattagtatggaagggcaaaattgtcattttgccaagccttagtttgtctttttgggggattatgctaagtttttaatttgaattttatttaaatatttggtgattattttaaataaaataaactttttctttaattcattttatgaaaaatcaaagatagaaaaaaattgaatttctgctcatactctctctttctctcttctggcccctagagcagctagggttgggtgtttttctgtgaaattaaagctggtttctcaaggttttggtggtctcaaactttaggtaaggttttaagcaacttccctttagtttcttgattttaaagaaatggaatcatgcatgctcttgatgttttgcttgttgttcttgtgattgttgttggattatgttttcagtagttaaattatggttgtaaatgttgatttgagcaggttttgtcagctagttagtgggatgagcaagctttgggtttttgaaatcaagcttgactcatcaatggtggtttttgtatttgtgcatgaagctgtgttttgttg

SEQ ID NO: 341637 - DNA, 844 bp, Cannabis indica
tatccactcactcttatcctttaaggaatgaaccaggtgagtcatctacttctgtgtctcccattcctccacacgtgtccaatcatccacctgctactatagtaactcactcaaattcttctctcaactccaatccaacacctgctactatagatattaccatccctgctattaccatcactactccaccaagtgtgtcaaattctgatcctgttccaaccaccaattctcaccgcatgaccacaagagccaaagctggtattcacaaaccaaagatttatctctcagaaaaaataccaaccaccttcaaaactgccctacagtatgagaaatggagacaagccatgtcagatgagattcttgctcttgtgagaaacaaaacatatactttggttccattacctgctggaagagaacctattggatgcaaatgggtgcttcgcattaaagaaaacagtgatggctctctcaacaggtacaaagccaggttagtagcaaaaggttttcaccaacaacctggttttgactacactgagacatttagtccagttattaaacctgtaacaatccgagttgttctcactctagcaatatccaagggatggcaaataaggcaactagatgtcaataatgcatttttaaatggggatttgactgaagaagtatacatgacacagccacttggctttgaagatccaacacaacctcaccttgtttgcaagttgcacaaagctctctatggtttaaaacaggcacctagggcgtggtttgacaaactacataactgcctcatctccttcggttttgtctcatcaaagtcagatcactcattgttcatccatca

SEQ ID NO: 341638 - DNA, 543 bp, Cannabis indica
cttcaacttacacacttttgttcattgtttggtaggacaaacctcttgggttgttccatatacacctcctcatcgaggtcaccatttaggaatgccatttttacatccatttggtgaacatacaagttgtgtaatgaagccaatgcaaacaaaacccttatggtagttgttctagcaacatgagcataagtttcaagataattaataccctccatttgcataaaacctttagctattaacctagctttaaatgtttgtatagagcgatcagtgtgatatttcttgctaagtatctatttacacccaattgctttgcattcttgtggatgatccacaatatcataggtgtcattggagagaattgggtccatctcatcattaaccgcttctctcgaaaatgcagtatctctagattgcatggagtattaaaggaattttccttattacttcttctctagtcccttctaccacgtagaaagaaattagttgcgaatctatttcatccttatttagatttttttgttttctcaccctttgacctct

SEQ ID NO: 341639 - DNA, 567 bp, Cannabis indica
ttcacaaacttctggctttttgggatagatccatcttgataatagattgtctctttcttgctaaaatgtcccatctgagttcagaggttcatcctcccgaattcatatcaccaggatgcaccaaccatttttcttctccattcattctcaaggacttctaacctcaattggaaccggaaatgatggattccaaggctgaggagctttcgactaatccaaaccaggggaaccccttagatcgctatgggcgatcttcacaagtgattcttgtgggtaggtattatcccttatgaatggtggtttgagtcggattctttatatattttttgttgctctattgaccctttttctttgtctccactggaatagacatatgtcttgtgagcgatcttaaaggtcctcctcaagctgacaaggaatctcggaagaaagttggcgtggtttcgggtgagtccaagagggaatttggtgtggcttctatcagagaatctagccaacccaagacccaaacctataccacaagacctttgcgccaacctctttctggtatcgaggaatttcctaagg

SEQ ID NO: 341640 - DNA, 2558 bp, Cannabis indica
tccttcttgaactgatagggaaggggcacatacaaatcccagcagagggcatgtatcaacccgttcccaaaagagaaggtcggtacgtgacgaggcaagttctagctcgggacgtataagaactcatagtcgatctatgcgaggaggggataggacttgtcgtagtactgatcgagagagtacagggacaactagcactgaaaattactcaaggatgaggtttgtaagtaactatgatccagaatggccggatcttcgtaatcaactaaattggaagaagcctgacttacgctaacaactcgatcaaaagcaagaggatcctatccaattgcgaatcatcgagttggaggacaagttcaggagataccaagatggggaattcgggaaactgtctggttacgactcggatgaggagctcgagcctttccacccagacattatgagcgttgaattcccccaggtatttaaaaacccccacgtctcgtcatacaatgggactacagattcggtcactcacctcaacaattttaacacgataatgcgagtgaacaatgtaacgaataacttacggtgtattttattccctacctcgctagttgaggcagcgagcagctggttcaacaaatttatccatcattcaatcacctcttgggaacagttgtctaaagacttcaagaaacagttccaggccgcaagagacaggcgacctgaagcgtcttctcttactaacataaagcagcagccaggcgagacacttaaggcctacttaagtcattttagtacagctgttgcaagggttagaaagttgaacgatagtatccagcttattgcccttcaagcagggatcacgactgatctctcaactgctggaggcaagttgtgggatgacttgcaggatcacccagtgaaaaacatcagcgagttcaatgagagggctcaggtgtttgttcgaaaagaggaaggaaggaaagagatgaagttgttaaagactggctcgagaagtaaacccagcactacctcgacaagtaccgtctcaacaaaggctaacaatccaggaggctctaagaggaaagatgactctaaggaatcagccaaagacaagaatagaagaagcacgacaagtacctgccaattacactatttatatcgagcttaatgaaattcgggaaaatatctatctcgcacatgagcacagggttgcattccgtaaacctgagcccatgaggcatgtgagacataaaagagatgcaacaaaattttgtaaaattcacaaggacattgggcatacgacagaagaatgtcttcagttgaaagacgagatagaaagccttatctcgcgaggttacttcttgcaatatgtgaaacaacaaggcgatggatagaaccatccaaatctgcctaataacccaagcaaccagggattacaacctcctcctcttgaaggagatgacattttggttatctcaggagggccacatcttgctagagaaagtaacatggtccaaaagagatatgtaaaggaagttaagaacaaacagtcagtttttgctccaaaatcttcaaagaaagctaagactgaggaacctccaattgtgttctcgaaggaggatgcaaagcatgtgagataccctcatgtcgaccaactagtgattacaatccagctcgccaacgaaaggataaaaagggtgctggtggataacgggagttcagtaaatatcctttataaggatacattgaagaaaatggcactggaaaaagcaaaattaaaactttaattgagctccctttaactgtgggcgaagcgcctttatccaccaccataatgtaagactacctaggtgtcaacctcccattagcctacaacatattgctgggtcgaccagtgttaattggactaggggcaattagctcaattaagcacatatccttgaagtttcaaacaccgtcaggtgtaggagtggtgtgaggttaccaactgctagctcgtgaatgctaccgcatagagctgcagagtagaaaagctggtcatcaggtaatggcagtcacgactgaagaaggggagaagcaggatgaggatcttaatcctagaattcaagatgaacgaaactagctaaaatcaatcgaagaattggaagaggttattttagatccaagaaattccacaaaatgtgtattcattgggaagaacctggatgaacagctaaaatagcaactaataagttttttgagggcaaaccaggatcaattcgccagaagccactcagatatgatagggattgaccgtaagattatctgtcaccacttgaatgtcgacccaaattacccagccaagagacaaaagagacgtcccttggatgctaagagacaaggggcactcaagcaaaaactggataagttattagttaacgactttatacgcgaggcattttatccctcgtggatatccaatcctgttctcgtcccaaaaccaaatggaacttggaaaacttatatcaactttttagatttaaataaggcgtgtccaaaggattactttccactaccaaggatcaaccagt

SEQ ID NO: 341641 - DNA, 1059 bp, Cannabis indica
aaaattcaactccaggggttgcttgacatagggttttcacgacctagtgtgttaccctggggagctcctgtagtgtttgtcaagaagaaagatgggtctttgcggatgtgcattgactaccgagaattgaataaactgacaatcaagaataaacatccttcacctaggatcgacgatcttttcgatcaacttcagggtaagacggttttttcaaagattgatctccgatcgggctatcatcagttgagaatctgagaggagaacattctaaagacagatttccgcactaggtatggatattatgaatttctagttatgtcatttggactaaccaatctcctgcagcttttatggacctgatgaatagagtattcaaggatttcctcaatatttcctcaatatttgtgttactgaatttatcgacgacatccttgtgtattctcaatccaaaaaggaacatgagtaacatctccaaatggttttacaatggcttcgagaatataagttgtatgacaaattcaagaagtacaaattctagctatctcaggtgtcctttcttgggcacattgttagcaaagacgggatcaaagttgatttggggaagatagaatccatcagggattgctgcatcttatcaacgtaagttgcttgcgtgagatcaagaaatttgttctttcagtttttaataacttgaataccaagaacattatttgttacacccaaattctttatatgaatttgagttcttactcatcctttcatgtctgacaatattctaatattatttctaatgaataagatatcatctacataaaatactaagaataccactaggggtggataggatccaattaatctaattggaccgaatcggtccaatctaatccaattacaataaattggatatccaattacaattgaatttgattggatgtcaaaagttggcttctaattagattgaattggttgttggatgtgaatctaagaatctaattaaaaactgatccaatctaattacatttaacatagattaaaaaattatttatatttatttatgta

SEQ ID NO: 341642 - DNA, 755 bp, Cannabis indica
gttgtgtcttttgtagatgaacctaggtgagtcttgggagcctgagcatcgaatcgactaggagctgctttaacttctacacaaagtccaccctcgtctttgcgctaatcctccttcaagagaaggatactcttctgattccgtacccagccatagaatgatggctcgtacgaagaaaactacgcgtttggctgacgcttctgatccccaggtggctcggcttgccactctgcccgacgtcaaacaggatttggtagtcccaatggaggaggaccgtgagggggatgctgaagtccaagagattgaggagctggacgaggcgcgtccgtggagccctcccgctgctgagggagaggaagagattgaaccccctaactatggggagtataatgagcctaggcaaccagttgatgctgacggggacgttctggttgcgggcgttgattacgccattgaggagcttgctaaggcggttcctcataggaggcagggtgccttgggtgccagatgggtgagtcctccgtccaagatttcggaggcacgcctctgcactatcgaccaggacggatacttgggcgagctagactgctacattcccgcacacgacaatcgcgctacagaccctgataaggggatgtctgcctggtcgggggctcacagccagcaagaggcacagagcccttgcacaagtacttctgggatgtggcggacttctttggcctctgcccggctcaaattactcccaagggcattaa

SEQ ID NO: 341643 - DNA, 1118 bp, Cannabis indica
aatcattgtcagagtggagattcaccagaccaccattaccttgcttctctatctctgtattgccatctaaactcatatcgaaaccttaaatcacaagttttctcaaaaaattgaaactcaatatgcaaccctaaattacaaatagagtggtggatttgggtggggtttctttgcaactagagcaattgcatgggagagtggtgtgagttgtggcgtgggttgcgatgtaggctacaattttggcttcaatacagtgtgagatgtaagatacgctgcaattatcgtctctcacaactaaaagtaagtgaattgcacggtgggccacaattctcatttctctgcaatcaaaatggtgtgaatttgtgattatcaacattctagcacccaaaaaaagataaattacagagggacatggaacaaattagctttgatgattgaaagcttcaaaaaaaaatggctaaggaatacaatgaaaagaagaggagggttgttctcttcgtatataaaaaactgctacttttagtgacaatttttttagttgcaacataatttttttgtgactaaatgtaacttttagtcacaacaaaatgttactagtgactaaaatatagtatttagttacaagctgtcaataatttaattttagtcacaacaagtattgtgattaaaaatattagtcacaaaaatacatttagtcacaacaaattgtaatttttgtgactaatatttttagtcacggatattttagtcacaacataaaaatgataatttataattagtcacaatttatttacttttagtcacaaactttgttgtgactaaaagtaaaaaaaatttgtagtgtcttgtcggtggtcttcctcttctggtggtgttctatcctcctatgtaatcgcaagagagttcaaaacaaatattaggggagaggtttaacaactaaagcatacaatgaagatggaaatttaattttagaataagataaaaaaaaaagaaaaagaaaatataaagctgaaaataaaaaatatatcccgtaaaagtggaaaacaaatttaataaaatagtagaatattgaacaattctctaataaaaaattatgtgaacttttattaaaaaataat

SEQ ID NO: 341644 - DNA, 781 bp, Cannabis indica
ggattaatagtttgattggaaaccgaaattacatttattaataaaataggaatgattgttgagggtgacgaataacctttaactagtttctattatcataaactcaattttaatttgtttattttatttttatttctgctattttaatctcaatctcaaaacaactttttctaactcttgtcattaatttttgcataattaaataaacatagtcctcgtgagtttgactcgtacttacttttatgctgaaataattaaaagtatcggaaaaaaatatagtaaatttgatacggcgtacgacacacctcattaatagtttcttcattttctcgaatgttgttcaatgttggttagatggttgcttggtaaataaattattatttttgtttccaattagctctattagtgctcgattaggttcgattgttgtttgttcaattttcgtttgatggttatttatcgattttctcgatttttgttcgatgaattttggcagtttttaatatttgaatatctttagggtaaatactattttggaccctgtattttgtaaaagttaccaattggaccctctgttttgttaaatgacaaaatagaccctgtattttctaaaatagttcaaataagactgtgaactgttttttttgttaaaataaagtttaataataatccgatccaaatgtgttttatgacaaaactgtttatattttctgcagctgttcgtgttaggaattatcttcaagttagttatattaaaaaaaaaattgtcgaaaattaagtt

SEQ ID NO: 341645 - DNA, 712 bp, Cannabis indica
tccatccgaacagctccaagttttaccctagcgtcgtcagcgtccttcttggccaagtccacctccgccgtcatggtgttggacagagccgtgttcctggaggcagcagacttagcccgggagtatgtgtaggccaacttcagagcggcctgcacaaagaaaaaactttagtatttgagccgtgtaaagaagattaaaggaaagtgttacgaaagacttacccaggtgaattccttcaaaactccgcccattagcagctccagagaagagtcattgtcaacaccagccagttgctcactaacctcaggaaccaatcggttcatatagtgggcgagcatctctttgcccttcttggcctctggaagcaccggcaaaggtggagtaggggctcgcatatgctctggtccattcttggtcagctcagacccactcctcggttgttcaggcctgtttgaactccctcctcgaggctccttagccttggcaacttttagagtagaagggtttgcaaccactagctcctcggaaagatcaatgacctcccaaatagacgccttttccttagaagaggacccctcaccgcctttagacttcttggctgcaggagatgcattggagcttctaccgattctcttccttagagcgtcaagcatcttttgagacatgtctgcacggaataaaaacacatggttagagaaaacagacatcagaa

SEQ ID NO: 341646 - DNA, 789 bp, Cannabis indica
attagtgtgctaatctatttgtcaaggaaatagttcaaacttgtgatgcatcaaaagtattatctcaggttgagatttaagtttatatctaaatgctgatagagtctgtaacaagcatgtgtgatagattttgagagttcctaaaataagtttcgtctgctgaatgagttttcatataataacagttattagagtactgttaatgggatactaatgtagtttaaagatccaaagtgtagagatattaaattccaagttgggtattttatttttcttcaggtggttcaaatgggaggaactcgaaaatcgagaagaaaggaaagttaagtcccaagttaatcgacccatttgagtttctggaaaaaagggtaggtcgggtagcttattagctagccatactccctgctttatttggagtttccaacatgtacttcaatgttttagaagtatgaggcagaagtgatccatatacgaagtcacgagaatattgaacttcaaatagacttatcatatgaggaacaatcggtacagattttctgaacagaaaagagaatgtgttgtggaacaaagactatatcgctagttatagtgctgtgaatgaacaacaagatttaaaggtgatttgagagttaaagtcgcagttgcgggaactatatctcgagttatttgaataaattttgaggacgaaatttctataaagagaggatagttgtaatatcccaaaaaaatatattgatattttaattggacatattttgttaaatatgtaattaagtgggcattagagta

SEQ ID NO: 341647 - DNA, 556 bp, Cannabis indica
atttttttttccttttctaaagctttctagaagatagaaggatacaacagatttgaataaaaaaaaatgagttgtttggatgttgcttcgcaatatgtattgttcagtaattgttcgaataaagtttttgtcctttgcctcaaaaaaaaattagcatgtcacttcacctcttttaagaattttcaattatatatacaaaactaattaggatttttgtccctcgaacttttttaggtctttaaaactttcttcaaaactattgacaatgttagattcaaggatttttgtctaattttgtttaattttactaacgcaacgattgtccatgtactaaattgtgccctaaacatgatctcctacatgaaattctatattttggtattttgaatctgcataacttttctacctactttgagaagcaagcatcctggtcttgattttcgctatcgcctcattggtccgctgaactgattccagacttaggtattttttttctccagtttcatcccagtgaattggagatctacattttctgccattcaacatcttataggga

SEQ ID NO: 341648 - DNA, 600 bp, Cannabis indica
agagcacccgtgagccaagcccagcaagacagtataaatatcaataatcacaactatacattataatcatgctattacacttattgtctatttagcatagacatgcgtgttacgctcacacgcctatatatgtctatgtggcatagacctatgtgttacgctcacacctctaattacaataaggccttagaacagttcatctcagttctagttaccaagtccaaccagattatgccttgaacgcataatccttaatctcaatatatatagcatgacatatcatttacacactaacaattactacattaataactctaggccattaaaccgctcactttaggataataaccctaatctcaatttctaattactcacaaatataatattcagcataagcgccaccgcgcataactctacgtgccaactactgtcttacctgatgtctcgcaaatgtggagattctaaatctgtgacagtcagtagtcccgtgatccgtaaggggaaataccgggtaagctgtgcaatccctcaccgcctggggaaggtcaaatgggatgattcagagactgtgtaggtatgggactacacagttgaagagag

SEQ ID NO: 341649 - DNA, 1666 bp, Cannabis indica
aaacgtcgagctgcacttccactcatcaaagatgtcttaaaccctaagtgcggtcttgaaaatattttgatcactgtttgacctacgtgccttgtgggttcgcaggctaagtcctaataatggacgcccaacgaaacgttcaaaggcaggatgaaatggttgagaccggaggtggtcggggtggtagaaatccccaaaacccccgtggacgcggtagaggccgcggtcgtgtcccgagaggtggacaggagaacccaccttaggccccggttgattgggaacaaaggtttgctgagatgcaaactagaattgagcaacaagaagaagagatccgacgactcaggcaacgggacgctcctgttgagcttcccccgcaaccgcctgttgtggttcctgcaacccctgcggtgccagctgagcaatatgttgctggtaaccgtatggaacctttatatgagagatttaggaaacagacacctccagtgtttctgggaggccctgatgttttaaaagctgaacagtggttgactgttatagaaagaatattgaattttatgggggtggttggaaatgatagagtggcatgtgccacgtttcaatttcaagaggatgccctgatttggtgggagatggtatccctcaccagagatgttaccagaatgacctgggaggaattccgggatttattcaatgccaaatattataatgaggcggttcgcagtgcaaagcggaaggaatttgttgagttggtacaaggtgagggtatgtcagtgactgaatatacaaccaagtttgatcgcttggccaagctagcctccagaattgtaccaacagactttagcaagaaggaaaagtatttggctgggctgaatgccaagatcaggcatgacctagttattacgacaaatgataccacaacttatgcagaaatggttgacaaggctcttcgagctgaaggagcagttaagtttttacaagaaacccgagagcctcctagtgtcggtggggccactactatccctgtttcgggtccaggaaaggaaagtggagattccacttttgagcaaaagaaaagaacttttccaaccttgggaagttcaggtcaaagtaaaaggttttgaggaaaccagaacaaaggaggacgtcagacttactcctatcctgagtgcccgcgttgcaagaagcatcaccccgggacttgtaaccggagagcttgttttcagtgtggttcagtgggacatcttacgaaagactgtcctcagctaaagaaagaggaaccaaagcctgaggtcaaacctgtgcctgcacctgctcgtgtatttgctataactcaggctgatgctgctgccagcccttcagtagttacaggtcagcttctaatcaacggttttgtttatactgttttatttgattcgggtgctactcgatcttatgtgtcatcaagactccttgatcagtttgatagacctagtgatattcttgagacggggtttggaaccctgttgcctactggagaattaattatttcaagaaagtgggttagatctgtgttaattagaattgaagatagagaattgaatgctgatcttgtagagttaccattggccaaatttgataatatacttggtatggactttttgtccaaatactctgctagcattgattg

SEQ ID NO: 341650 - DNA, 665 bp, Cannabis indica
tttctcatcgaagcacaaggcaatagtttgtacgtttttatattttttatatcgcataaaactattcagtcagccgagttgtaaacatactctgttaattatgcctttaatgagttattccattgcaagtgtaactattattacgtgtttaagctctttcttcttcctagcctcgcatgtgtctttctctaatgtgctcgccaaatttcgagtataacaccttcaattttgctggagccattcgatatggtgctcgccaaattttgggtatcacaccttcaattactctactcgatacataagaatgagtagctcctaaatcaaacaatatagtacaggaatagccatttatagataactgacctgtcaccactaatagactagcatctgcatcagcctgagtcatagtaaaaagtcatctcaggttctgagtagtattcttttttgactcctctttcctggcctgaggaaaatctttgatgaagtggcccactatgccacactggaatcaactgttggcccgacattcaccctgatggtgtttcttgcattttagacactcaggataagattagaatgaagatctacggccctgacgaccacctctgcttccccaaaactttttattaccccctgatgttccgaaagcatcagccttccgtttg

SEQ ID NO: 341651 - DNA, 1112 bp, Cannabis indica
tacattctccaaaggaagatctttactttctgagggaccttaaaattccacaacccattccactagtgagattgattacaagaagaggagcctaacctttcacccaagacatcaagagccaccgcatacccacttttcacagtataagcaccagtagaactataatgccaacaccatcgatcagcaccaacaccaacatctacatccatctgcaagaagtgttgagacaaagcctggagattccaacccccgcctacatcaatcaattcatgaaccatcacattggccgaaggaacaattgtaatagggcgaaaagtcctcgaccgaggaatccaagggtcacgaaacacatcaatagaatgaccatccccgaccaccttccgcatccccatccgtaacaactctaacccccaaaccaaacttgaccacaaatgagatgaatcttggcgatccttagcctccaatattgacattttcgggaaatacttatgcttcaatacccgaccaggcaacgaatccggcgaatggaacaaccgccacacttgcttagcgaccatagcttgattaaacaggaccaagtccttaaagcctaatccccctttcactttcggctgacaaacatcatcccatttcacccacgcaattttcttcttatcaccctttgtaccccaccaaaactgaagaatgattgaacgcagcttatcacacgtcgcaacaagcaattgaaacatactcataaggtaattcggaactgcctgcaaaaccgccttaataagaatctcacggccccccgctgaaaagaaactctgcttccaaccacgcacacgtttctggaccttgtcacaaatactagcaaacgtgcgcttcttattcttaccaataactgtcggcaaccccagatacttgtcgtgagtggccactgaactcaagcctaatatacccaatacactagtacgatctgctggttgaacattcgggctgaatgtgattgcagatttatcaaaattgacttgttgcccgaaagccctctcataacactgaagaatccgacgaatagactccgcctccctaccattagctctaccaaatatcaagctatcatcagcaaaaaa

SEQ ID NO: 341652 - DNA, 1363 bp, Cannabis indica
tatatatatcatgtttatattaattaaaacccttttcatcctataaaaatataatattattttaatttaaaattcaaattaaatatcacataacttaataactgaattatatccttttattttatagtatcttttaattcaaatacattatactataatatatttaatttaaataattaaaaagataattatcatttattttaatttatcttatttaataaaataatcaaaataaattaattagacttttatatgtcaccccacacgtgtgggctatattttaaagcccaaattaatttctcaatttgccacaaagatttattatttattttaaaataaataataatatattaattctcattaattttttatttcactaggattaaaataaattattttatactaaaataatattttttttctatttgaatattatttaaaaataatattatatttagctagttaatatagttttatcaaataaaactaaatagttaaatatcacgttaatttaattattcaattcataattgatatatttattcaaaaaataacaattataaaaaaaaaatactattttttccaataataattatttcttatagaaattaattctttctcaatttattcttcaaattaaatattcccctatacagtgttgtataggggtgatctgtggactataaacttatatttcgaagcttcaataaactttagattattcttgaaatcttctatagaataatttagtctattaattctattattgctccactataaatatgaaattgtactctttgataatatataattatatttacaaaatttttacttgtagtccattgatataatcaatataagtagtttgctctccaattattaattcataattagagttggtcaaaattaccgtttaaccttctgattatctcttgaattctttatttaccattaatttaatgttaatagttaatctataatctaattatatatttagatccaattgttagcactcacagaattaacactataagagaactaatattcaatcctctcagaaaccttaaattctattattgtataacatgttcccagccactcatgttattaagctcccaaaaaagaagttgcaagaatcatcttctcggagaaactttaacgagtgaatcaaagaactcaatgaacacaaacatgacttcatgtatactcaggattcaaatagatctactaatgatcatcgttgtgatatgaataaaactttcatgataaatgacatattgatgaaagatgttattacatacatttaccatatgcctatctacatatgtaattcaaatcaaaatcacacgcactagagtatagt

SEQ ID NO: 341653 - DNA, 951 bp, Cannabis indica
tttttcaaaaattcactactaatgcaattcaacccctattcataccaaaacctccagacctgctatttagaccctaatgaacataaccaaagcaagaaaaccaagcttcatgcacaaatacaaaaattgccattaaagctccaagctttgagttcaaaactcaagcttggttaaaccccaatacatgcatcaaaacctacttgaatctactcaaatatgcataatataacctctaaaaacaacagcaatcgactacaacaagcacaacaacagatttcatcatttcaccattaaaatcaagattttgagtcaaaattccaaactttgaacaaaagcaactaacatgcatcaaaacctatcctatttcactccattaaacacatttgaactacaaaaacaacacataattacagcagcaacaacaacaaaaaagctaagcatgcaaaatatcatttttgtcttaaaacttaagaaaatatcaagaacaagttaccaaaagtcttactcagaatttgagcttactaaaaccttgagaatcagcttgaaacacagaaaaatcccaattccttgctgctcaaagagggccgaaagagagagagagagagagcacttgagagagaaatgcaaactttgtctaattttttattttttaataaaatgaggaagtaaatggtttttccttactaaacaatcatcataacacttaattaaaaccattttaaactctccttaataaaatccacaaaagacaaaactcatgaaggcaaaatgactattttccccttccaacactaaaaggattaaaagacactaaagggtattttcagaaaactctaaattcccgactaatcccgacattccaaatgtcaaaataaactgcccaaatatactaaaatactaaattgtgattctactgagccatacaccgcgttccatgttgccgggcaccga

SEQ ID NO: 341654 - DNA, 518 bp, Cannabis indica
atttgacgtcctacatgccagcatgtaagagtggagcattaaaaactaatgaaaatgatatgatccttgtattcgtaaagaaggtgacctcgatctgaattttagtatattttcaagtgttaagtcaaatacaaacctttagataaccatacgaagtcatgtaaactagcaaaagcatcatctaagaagcaaccaaagtgacgtacttgtgtataagagccattattctgtgggtgtaaggacctaatggaggtttgaggcaaggatgttacaaatggtatacttcctggtaagttagagtaagtgtttatagttgataacattctcttatgatgacagctggttggccacaatatgtatgggaccctatgagatgttttatgagtgccaaatttacttggagtgaggtaccacctataaagtcggcaagaagtaagagaattatcaaaaatagtagaaaaaatatgacagagtatgtccgccgctctagcagatggagaatgatgaggatttaaaaa

SEQ ID NO: 341655 - DNA, 1103 bp, Cannabis indica
ggcataaaacccaacaggtataactccagaataaattccacctgtccagcgagacgcgggaatctagaagttatatgtggatggtgcattaacaaacagggttcgggtgcaggggtaatattaatatcaccagaaggctaagtttcactatgctttgaggttccaatttgacgtatcaaacaacgaggctgaatatgaagccttgatcgccagcttaaagatagctgaggcgttaaaattcaaaaacctcatctgtcgtagtgatttgcagctaattgtgaaccaggtcctcggggaatatcaggacaaaggcttaaaatggcgaggtagttagagaaagttcaaaagaacttggaaaggttcgattactttaaaattgaacaaattctaagagaacataactccaacgccgacgctttagcagaactggcctcacaaaatgacttggatgaattgaacttagttccggtagagatgctgagcgagccaagtatatgtgaaacggaagatgtcgagatgatgaatgactctcctacatggatgactcttattatcaattacttactcgacggataacttccaaatgacaaaaacgaggcgcgaaaactattgtattgagtgcctcgttacacaataattgaaggcaaactatataggagagggtactcgatgccccttctttggtgtgttctccctgcagaagcaaatgaaatgattagagagattcatgaaggcttttgtggggatcatgcgggttggcaaagcctgtctaaaaagatcattagacaaggatattactggccaagaatcaataaggacacccacgagtttgtcaagaaatgtgataaatgtcaaaggttctcacacatacctcgcatgccgccaacaaaactaagaatgatgatctctccctacccatttgctatattggtaatcgacttaattggggtattacccactgggcgaggaggagctaagtatgcagtagtagcagtcaatttcttcactaaatggatggaggccaagcccctcgtttccataacctgcaagaaagtccttgactttgtcgtcaagaacattatctgtaggtttggaattcccat

SEQ ID NO: 341656 - DNA, 1139 bp, Cannabis indica
ctaactctccgccaggtaatagggttccaaaccctgattcataactatcatacggtctatccaatttactaaagattctggcagccacacaaaaacatccttgacctaagcactcacccggaggatgcctcttactaatgagacactccggtaggaataacgggtctcaacactaccctgacgaccgccttgattctggttccctcggaacctcttgttctgccccgagccaccggatgcagtggatgatttcctcctctagtccatggccgaaccactacctcccctgctgaaacctgatgcaggaggggtaggagccccgccacatactggagtcctaactgattccaacatacatctaactgcgccctcagctcacagtgctttctccaccatctcagcataggtgatcttgtcgtcggtagtgatcataaggtcatacttgatcttcacattaagtccatcaagatatttttctttcttactgaaatcggttggcacaattcccgaggccaacctcgccaaccgttcaaactgcgtagtgtactccgtcacactcataaaattccatattctcgtaattactgatagccactgctcggcttccatgacgtctgaacctcccaaaaaaaccggaggtaactgttcgcggaacctttcatgtaacaccctaactaacatgcattcaaacctgtttaaatctacttaaatatgcataactaagcttctgtaaacaatagaaaacaaccaccacaaacacagcaaccaaattcttcactttactataaaaaccaagtttttgagctaaaattcaaaactttgaacaacacaactagcatgcatcataaccatctctattctactcaattaaacaagattaaacctctgaaattatatcacaaacacagcagcaacaacacttcaagtaagcatgcaattcatcatcatttttcttcaaaattcaagaaaacaaacaagaacaagttcaagaaccttaccaacaattgaaccacacttagaatggttgaaaagtgattgaaatgctaagaaaaactcccagccctagcagctcacaccaagccgagagagagagagagagagagctttgagtgaaaatgcaattttttgatctttctttg

SEQ ID NO: 341657 - DNA, 685 bp, Cannabis indica
tgaggtgctcgaggtagcaagtgaggtcttagcaactgaggtaagaagagtgggcatctgtgtacagggtgtatgtttatgcatacaactcggtttggtttgctatttaatttgattatgtgttgtgatgatttccttacataattagcatcgttagcatgagaatagtgttagggtcttactgcttgtgtgagcataacacttgcaggttataactttatcatgggtgagtacaacttatggtaaatgattgccctgttggatgccaagtgtgagaataacacaaggcagggcaggttacctcatgtctgatcaacatgagtgtatagttgattatcgtatgtgagtataatgtgcggtatgagacttgatttatgcatgtgagaacaacatgcattgtgaatatatttttatggaatgtgaattattgttgattaatattaagagtaacttatgtcaagtatctagttaggagggttatgtcctacatagctcttcttactgggcgttagctcacgggtactctgtgtgcaggtaagggtaaggctaagcagtgagattgaagagctcgaggcgtggactgcatgttaggggctggcgcagtattttacttttaatgtttttaaatgttaaacattgtggatccgttattttgatttaactagttcttatttaagtttacagt

SEQ ID NO: 341658 - DNA, 537 bp, Cannabis indica
ttaatcaacatacttgtgagttgttctaagatcctggtaaaatatttccaacactactaagtccctattcgaacatctggtcagatagggacttttagctctcgtcttatttgtagtagtctttgtcgagcaggcttgtctagccaagtgtttgcttttccgcatggcatgcttttagatctttgatcttctctctctataaatgtcttatctcctcttctttgatatctcttttttgtacttgtcattgataagtttcaatcgttttaagcttttagaaactttttgattctcatgttagtttgtaatctttttggtattttgattcacataacagttttagaatgcataatgtgtgatttcttgatggaaaagattcaattttggccttctttgtgattcttgactctttgagtcataaagaacacaaggaacatatttgagttttgataaaaacacacatttggattcaaaactaaccttggctggccttggaggtcttgcttgagacctgaccggtcctaggacttaatcatg

SEQ ID NO: 341659 - DNA, 1882 bp, Cannabis indica
cacaatcttccacactatgattgagtacttgactttatatgagtgggcatgtactcttcactagggtttgaaaataatgaagaagaaggagaggggattcgaaattgctatagaaggaagctctcaatttctagttgtctaacaaagaatgaaaactaagttatgggagattgatgagaatgaaagccatcttattccttatatagtatttcatctaaaggttaggtttaaattatatagattaaaaaaaagataataaatggttaaaaaataccttaagtggccagtcactattgtggatcccaccagtattaattttaccattttattttataattcatcttttcttttcacaattgccatattttaactttaaaactgttttaattgtcaaatctctttatttaataattaaaattaattatcaaataaaaatggcatttaacttatttattaattaaaccatacaaagtctctcaattagcaaataaaccctaaaacatcttttcttcacaattaagctcttccttagtgtaaattcacaaataagacagtttaatttagaattatatataattgattaattaaaaccaattaactgagtctacaagcagtattatctcaactagtgtagggactattggcctatataagtaagcttccaataagcaattctagaatttaccaagtaaaaattctctaacttattaattcctcctgactccattatagattcagaattgtactcttaattatatagaattctctatatgttctaagatatagatacgatattaattatttataatccaaataatcaaagatcctctatagataagaacaaaattatcgttctacccctcaatgtattttatccttaaaacccttagcttcctataaatgatatatttcagtaaactaatgtaattactgaaataaaagctcttccatttatctctattaagccatgcatgaagaaatcatcatttcacttctatgtcaagatagaagctataaatttcgtatttatgattaccgctcccactgaattgtacaatcatattcccaaaatgtaagtattggatcgatccaattggtcatctttaacaaataactctcagaacataaataacatagttgagatcaaagctaaccatttcaagattaagatcttttgatctaagatcaactaagtgatattgacttagaaagatagtgagtttatgatatctttaccaagttcaatataggtccagtctgatgtatacttcatgcatccagtactagcatactttaccaataccctggaaaggacataacacttatctaaggtgtaagtaaactttatcgctgattatcacatcagtgtaaatccagtgtactgatgaatcatgggacataatttttcaaacatataatcacaattaccttccactgtgatgacatcactgtaattgtgaacaaaaatatattctggatttatcaaaaattatatattaaaccataatcatgaaaaatacatgttaacttaaataacttctaattttctatttataacaaataagattatattgaaataggttttatttaaggcataaaatcccaacaaactcccacttgcactaacataaaattaaaagtgcatttcaaccaatctattctcttgatattcatatcaagtgtagcgtgtttgaataaacccaaataacaagaactttaaggttgtggtaagcaacaactttctccactgttaatgcagatttttgttaaccaaaatttgagcctaatagtgataatctcacacagaaaaataaaagtaggaaagagtatgaacacaaaggattttttacgttgttttgcagttaaaactctgcatagtcca

SEQ ID NO: 341660 - DNA, 793 bp, Cannabis indica
taaggtaaaatctagagtgatcgtattaagaatttcacgataacgcatatccacccctgaatgtacatccatatatgcgaaaatagatgatcttacttttgagtggatagaggcatgatgactctttacagagaatgatcttgtcaaaactactatgaacaagatgcaaatgccatagatatatagaatgtggttgtgttcttttaatgacttaggtctagttacaataaagagtttttagaataatccaagtggatcctggtcacaaaataataaactcaaattctatatataaacatataatttggatccattgacagaaaatggatattaataacttgtgaaaatcatactgtattgtccagtgtattttaggaaactaaaatttaaaatttctatttggagtctaaaatttaaagtcaaagacttaaatttataccaaatatacaatgagtgattattctctcttggaccaccactactaatctaactctaagtctaagttgcttaaagtaaacatataaaagtaggagattctataagatcgaggatatatatcatttcgggatagaatgtcgggaatatattcatctgcgccattcaatttcataagagaaattagaatgacatcataaatagatgatttataaaccattcatccaatgatatactatttaagcaaattcgaaagaaaagctaagatgaaaaattaaaggataattttgattaaaataagaatccaacgatgtcccgtttaggcgagaatcaaagttattcttatttatgaatctct

SEQ ID NO: 341661 - DNA, 671 bp, Cannabis indica
ggctggtttgtaatttgtaaaaccagttgttgaacatcggtgttttgtgttactgttccagtgtcaatgaattgttgtggatttagttgcattgcatgctgttcaattcttgtgatgcaaagtggagagtcgctcactccaagctgcttctttcttagttcaatgtaaaacaatagtgagttgtcacttatgatcttcattggtaatgaaccggggttagctggtagttcatttcaattggtgtgttgcagttgatctcattctttaccaattcaaccaattctttcagagaacattttgttggtattagcagtccagtcattgtgtagtcttggtagttattgtcatctgtccaatatcctccatattgaataacacacatgattgtttccattcctgaataaattacaacatatcattagtttattttttttaattaaaaaactagtttcgtatgcatctttatataaaaaaaaacagttttttttgttgtagtgttattatttagttatggtaactgtttttttttattttcatattttgtttttttaattatgttcagtagttgtataaagtatatgtaatgaccgcatttataatatggattagtataggcaattagcactaattattggtatttttataattatttatgaatttatttaattgtg

SEQ ID NO: 341662 - DNA, 516 bp, Cannabis indica
caatggtcagccgtccaatcctcagttacgagttccacttgtgggccaagaggtaggcgggtagaccttgttcgggaattcattaggaggagccatacctgacggatccaaccagaataatggagttattctgcctgtcaaccaagcaaatcaatcgctaaggcaaccaggctcttctgtgtttgataggctgggaacgacccatgaccgagctgaaggcttcatcaagctcgaagaagccattcaacgagcagaaggtgagaaaaagtcaggaaaaacgaaggctccttccactagaacatccgcccaacttccaactattccaacaattcgagtggcaagcgttcaagcaacaaccacaagcaaggaaacgggaagaaagggaagtttacagataaatccgaacagactccccgtgatcatgccaaacaccctgcattcactattataattgaagatatagagagtgtgtatatggtaactcagtcgttaattccgtacaagaagcccgggccc

SEQ ID NO: 341663 - DNA, 686 bp, Cannabis indica
aattcactattacaaaaatctcattccatgtccattaaagttggacatgataagtctttcccgttgtggtagtcctccaaataaaaaggtctttgcaaatatcatttatgggaagttgttctctcgatgtttaccaatcccagaaggagtcttgaggaatgattgtcgagtctgaaagggagttcccaaataactatcatgtccattatgggttcagtcttcagcatagctagcccttccttagaaaggagttccagctggctaattattcctcctagaatggtagatcctgatagttgactacagcagactttatcatatctggaagcgtcttcagcgagtacccttagtccatgagtctggacgctcgttcatgttcccgaagggcctagtacttaagctgatgtggagacttcgctcgaagaggagttggttaagttagttacttctaacataaaatttaatatctcaaatagataaaaaaatttaagtgcaagtaaagtaaaagtattaaaagttatgtcacaattaactctagtaataatgacactttatagtattaatattgaggggaagcatgaccacttgaggctagctcaagtggctataggaaagtgcatcttgggttcgagttccaaatttaatattgtataatatatacacgcttaaataaaaaaaaaattgag

SEQ ID NO: 341664 - DNA, 937 bp, Cannabis indica
tggtaggttgcccctgcattcttgaggccaaatggcataactgtataacaaaatatgccttttggtgtcctaaaagcagtgagctcttcgtcctcgtgtgccattttgatttggttgtacccagaaaatccatccatgaatgataaggcatcaaaaccagtggtagcatctatcaatatcgcagtgatggggagtgggaattcatcttttgggcaagccgattaagatctcgataatccacgcatatgcagagttgcccatttttcttcatcactatgacgatgtttgcaagccaagtaggatactaaacttctcgaataaactggcagtctcttaacttgtcaatttctgcctcgactttgggaagtaattctggtcgaatccttctttgagattgtttaacaggggtagcatcttttgatactgccaacctgtgcacagtaacctttcggttcaaacccggcatgtctcggtataaccaagcaaatacgtatttgttctcgcgaaggacttgtatgtactgtggtaactcttcttcagataataaagcaatgacaaacacaggctttggatcatcctcagtcccaaggttgatctctattaagtcatccacagttgcttgtcctccatcttcgaattcctgaggtgctggttgaaagatgtctataaaatcttctgaagggtttgagcttgagccttcatcttctatggtcaagcttttttcaaaagagaggtaattgacttgagcaaaattttctccatcttcttgtgtttcatgccccttaatagtaattctcaaatatttcttctgtttttgcacccactgtttttgctttttggttccttttgaccgtggagcacttgggaaaacaagcctttcgaatgctgacactcgtggggtggatatgcttgcttcaagtctatcaaataccgacac

SEQ ID NO: 341665 - DNA, 725 bp, Cannabis indica
gcctcagcttgagtcagggcaaacactcgggcaggagtgggtgtatcatccttcttttgccctagccgtagaagctgtggacaatttctcttcatgtgacccaccaccccacagtggaaacaggccctgacctgacactcgccctggtggcgccttttacatctaggacattcaggaaaagtctgccagtttttgttcccaccaggacggaaaccttggttaccttggaaccttttgtttgggcctgcagttgataattcactgggtcttttcttgcggtcaccgggattagtaccccttccagaaccagcaccttatgtttgcttccatgaatctcttctggcaatattttctttcgtatttgagcttttgcaccctcagaaactagggccggttcaactatttgggcataaggtcgagcaacccccggttatttagatgcaacaatcacatcatgagcaatatgttaatccaaccctcgaatgaactttgctttcatagtagcttcagtagccacctcatctgaagcaaactttgccagtcgatcaaacatagtggcatactctgtcacagtcatgctgccctgagtcaatcgtataaactcttctacctttgccgcccgaatagactcattacaatacttctcataaaacaaggctcggaaagcttcccaggtcatgttattcagatcatgaccctgagatacaatctcccaccaaatacgg

SEQ ID NO: 341666 - DNA, 617 bp, Cannabis indica
ttgtaacaagctgggcatgattaacatctatgctccaacttgagggggagtgttagatattagatgtatattagctgtaaaagaattagatatttagtagatatttagtctcctagctttgtatataaatatgtattattctatgaaatcgatacacataattcgaatcactattttctacaacagccaatccttcactgacttttgtgcgaaccatagtatcatcaaaagtttctccgcagtggcacataatagtcaagttgaagcagtcaacaagaccttgaaggatacactaaagaaaaaactcgaagatgccaaaggaaattggtcgggagaacttcctgaaattctatggtcatatcacacaactgacaaaatggcaaccgggcagactccatttgctatggcatatggatataaagctatgctgcctgtagaactcgagccaccatccccacaggagattgactacaaccaagataccaatcacgtactcctggccgaatcacttgatgaaatcaaagagaagcgaaccacagcaaacttaaagttgatagccatcaacaaaaagtagctctgtatttcaacaaacaagtgaaggctcagaaattcttcgt

SEQ ID NO: 341667 - DNA, 775 bp, Cannabis indica
tacttgtgagtagatctaagatcttggtaaaataatttccaacaagaatgtgttgcaccaaaatcaattagaactgtcaataaagtgccagcaacagaaagctgacctgtcatagtagaagggtcggcatcagcctcggcctgagtcagggcgaacacccaagcaggagctggtttatcatccttcttttattctagtcgcagcagctgtgggcaattcctcttcaagtgatccactaccccacactgaaaacaagctctggcttgacactcgacctggtggcgcctcttacacctcggacattcaggaaaagtctgccagtttttgttcctactacgacggaaaccttgattacttagaatcttttattagagtctgcagctggtggttcattaggctttttcttgtgatcactagggtcattacccctaccagaaccagcacccgatgtctacttccaagaatctcttctcataatatttttctttcatatctgatcccctgcaacgagggccaactcaactatctgtgcataagtccgaacaaccccaggttgtttggcaaccactatcatatcccgagtaatgtgttcatccaatccctgaataaattttgctattctagtagcctcagtagccacttcatccgaagcaaattttgccagtcgatcaaacttggtggcatattctgtcacaatcatattgccttgagtcaatcgaataaactcctctgcttttgctgcccggatagactcattatagtatttctcgtaaaa

SEQ ID NO: 341668 - DNA, 556 bp, Cannabis indica
aattgccaaaaaaagacctaacatgtttcctttagagggatattgtatgggactaggctccctggacttattcttctgagttcttggtgaggactcttccggtgttttctcgagtcctacagggatggctttagggtgtatgtggatccctgctgtctccatggctttttgcatggcgaccatcacctcttgcatccttttgttttgttctttttgggcggtgatctcagcttcatgatcagcagccttttgtcttaagagcagtaattctgtgtaactgccttcgtcgtaggcgtcgtactcatcaacgttttcttcgtattcgtcattgttggcctcctctcgctcctcggaatccacgttaactcttgaggccacttcctcatctttagggttttgagtgtcttgaggaggacggggctgacgtgtgttgcgagtctccaccattgatgtttagcttacaaggttgttgtctacttgcagatgcgtccttcagctctcaatgaaagcaccgaaatgttgaccgaggttttcggcaaccaatttaataatatat

SEQ ID NO: 341669 - DNA, 750 bp, Cannabis indica
aatatttacataaaattaatttataatttaatctgaaattaaataataaaaaatattaacttataaaaacatttaaactgtcctaaaaaaaacaaaaacaaaaccctaagagtgtagcaccagagtcggggagagagaaaaagtggcggctggaggttcttctccgacgatgacggcacgacccatcagcttctggtgagaccatcttctccgaccacggcaaccagctagcagcgacagtacgttcgaggttcattttctccgaccacggccagcgacggtacatacccatcgccccatttttctcagcctgctccctctctccccggcgctgatggctcgtcccgtggatattcagtctacccaactcatatattcagtctcaccttcttctgtctccctctatctaaatcttccatctttctccatttcatttttttttttgatgagtttctccatctccatttcatttagttttatatatcacaccttttaacgactcttatgggttctcttttattattttcataaattaaggtgccgtttggtaacacttttgttttctaattttttaatcacaaaataaaagtaaaatttttgtttttaaaaattttgcttttgaaaaacaaaaatgcgttctgtaaccacttttgtttttcaattttaaaaacagaaatcaagtatgttctgtaaagtttattttcattttttattttttgattttatttacgtcgggtctaggttcgaggt

SEQ ID NO: 341670 - DNA, 722 bp, Cannabis indica
ttttttttttttttttatgcatttatctttacttttaatgcctcgtatcatatgtttgaattgaatatgtctatttattgcgttttatttcacaatctaaatatttatattctgatccaacttattgatactttaggaagcattcccattgttcctatttttcctttgatatgtttaagtagttattaatctactatgtatatgttgagcagttataatatgcgtgaagttttaatctgtgagcagtttgattttgtcctattatatgcgagcagtttacaacctgccatatttaaagatatttttttagagcaaacttaaaaaatactttgaataactcacctctgaaactattttgtatatcttttgattgctcatatgaatagttagatcatatattcatattttagctttagcattatttttcaaggtattcttgtgcctcgttataatacatgccagattaatgttgttttataagttgatctcatttacaattgctattttgatttttcctttctaaagaataagtttttcaattttttgactttatattgtccatagacaattttaattaactatcctttcctttgtgggaaaaaatttaattttctgggtttgcaacataatatgtaattctagatgaattccagttattatgcacatatatgcccctaagtaatttgaaaaaagataatctttgttagttattttcatccata

SEQ ID NO: 341671 - DNA, 659 bp, Cannabis indica
catactgcagtatactgtgttaagtttcaatagtgttctactagtgttttttagttgttctactgttgttttgagttgttctgctttgtgtttcactggtgttttataaaaatacagtatttttgaaaaaaaattcgtgtaacaatatttttgtaaaaattcactcaaattctagtaatttgtaagttttttttttatatctactaattaaaaatactcacatactatattttattaaaatatacccacttgtaagagtaagttgcccaatatactatcattctctacttaaatctagcatataatttacattaatctaaggagtctaatgagaacatcatctataaaagtgggtatacaatgtaatttcttcatttttcacgtataattaattaagataaatactgttttgaaccttatattttgtagaagttactgatcaaatgctttgttttatcaaataataaatcagactctatattttctaaaaatagtacataatatatcttgaactcaatttttgtcaactttttattaatataaccaacctaagtaagtttttagcatgaatgaatccaaaaatatatataatcatcagtggcggaccgagaatttaaagtgagggggggcgtaaataaatttaaaaagaaaatataaag

SEQ ID NO: 341672 - DNA, 950 bp, Cannabis indica
ttctagagaaaatgtttttcaattccttgacttttatattgtccatagacaattttatacacatatatatgcccctcaagtaattttaaagaagataaactttttaattacttgaacaaactttaatctttattaatagtaagaatttacatattacagagataaatacaacatttacattttgactttactggtaataaggtcgcaaatgttcactattctagtagttctttattaacgagctgttaagccgagttaatttataaaccctggttcctactactgcttcaataacatagggacctttccagtttgggcaaaacactccagcagacggatctcgtgtgtttgcaaatactcgtcttaacaccaaatctgcaccattaaagagtcttttcttaacacttttgttaaagtatctcgtgattgctgcattagttatttctgactcattacgtctttcttcaagtaagtccaagtacaggttcagaagctcttggttttctacttgattataaaactcacgcctatgggttggaatattaacttctactggtagcattgtctccaagccaaatgctaacgagaatggagtgtgtcccaatcgttgttttctctgttgttctgtgagcccaaagtacttgtggtagttcatctacccatcttccttttgcagcatccaacttcttcttaatagtatcttttaaggtttgttaatagcttctacttgtccgtttgcttgtggtcttgataatgatgagaagcttttgataattttattcctttcacagaattcagtaaacagttcgccatcaaactgcattagttatttctgacgagaagcttgtggtcttaactaagtatttttctaaaattaattttaaaataatccaatgaaaaataaatttcatatattttaaaattaattatgttgctaattcaattttaat

SEQ ID NO: 341673 - DNA, 748 bp, Cannabis indica
agctattatatctctaaaattaaacatatattgcttgtcatcatctgttggcccgtcaccaagttcttcatctgaatctgaatcaaaatcaatattgttcaaactttcacaatttcctagctatttcattttccatgtcctcttcgaaaaattcatcatcccaattccacttgcgaataaagttgtgaagtacacaacatgctaatacaatccaaccatattttttgatgattgatagaaaaagggaaagtccatacattaaaaataattaaaatatcatatcaattaattaaaatatcatattaattaattaaaataatttgaatttatttttggtatgtaattacacagtgtaattacacccaattctcatgggggtatgagaattggagagagtaattgaggcctcccaattacctctaattacacagttactatgtaattacgtggccacacaaacacgttaaactgtgtaattacctccaattacatccaattccaattcccaggtggctttccaaacgcgcccttagagttacatgtatagcaattataaatgttaagaaagtttctttgtaaatatttttttctttagtaatttgcatcataaatacctaagtgtactattgattgtataatttatatttttataattttaataaatgtctaactttaagtgtcaagttaattaatttcatgcgatttttaattaatacatatcattaaattttttatttaaaaattaatt

SEQ ID NO: 341674 - DNA, 1371 bp, Cannabis indica
tatcgtggggggacaaccaggaatctcaagctcaacaatagcccccatcggccaacctttggccagccagccacctacaggtgcacctctggccggtcgggggaatgatctccctcctagaggaatctgggagcaagaaactcaaaggacaatcttcaatcagttaggtctggtaacgagtggaaacaccctaaacaataacttgagaagtgagactgatcacttcaggtatctagatccacctaactcgatcaacgggtgcgatctacctcctgtcaacacaccatctacattaaccaaccggggcatcacgggcggccaggccctgcccagcacagggctggccagccatggacagctacctaacataggcttggccagccaggatcaacatccttacctgggagtggtcggccaaggccagcaacacatcacagggctgaccgaactcaaccatacactctcccagagtatggacgtccagaccctgacgtattcaagcttgcagcccatccaaagagggccagttagtcaagtctctacagtaacgaatccatctatgcaagcatagttggaccaaataagggacatgatcaagggcctagctggtacaaaaccttcagaccttgagctagaccgtcaaggggaccaccattctcaacatacataaatgccttgcccttgcccaagttcaagatgttagtatggaagatgtatactgggcaggaagacccactagcgcacatcaagtacttcgagatgcagctcgatctctagaagattactagtgatgtgcgatgttgcatattcccagcaactttgtcagaaacagctcaaaaatggtacttcaagcttgccccaggaagattcaattcctcgaatgagttttcctgagaattctacactcagttctcatcctcaaggcttataccatcgcaactagaagaccttgtcaaagtcaaacaacgacaaggagaacctttgaaggattacatccaaaggttcatggccgaggccaccaaggtgaaaggccttacagaagaaggacgatatacgaccatactgggaggcatcttccattgagtgacttttggaaagatatccagaggatcttaactacaacatgaaggagttcctcaacagagctgatgactttatcaaactagaagaagctgtccgacaagcccaaacagggcaagttgacaataggcagtcacagggcattctacaacctaatgactttccaagcgcacaggaaagtaccagtaactctgctcaaacctccagtgccaagaacactaggaccaacctcaacaacaacaactctagaagaaacagtagtaaaaacgagaagtttaacacttctcccat

SEQ ID NO: 341675 - DNA, 877 bp, Cannabis indica
taagttggtcagatgggtgacacgtgcttggtttacgtatcattcttgatctgatatgactgaatgaaaaagtgaagatttcgactgtctctttggtatctggggcatttaatattttgtcttaaaatttgaacatccctaggacggtcgttgtccctcgcgtaagtgatctacttttggaaaaattttaacagtcgcgagtctgccgatctcagagtgtctacttcaactggcccatgtcattgtttcttattcccctctgtgtagtccttcaagaaaattagcttccattttctcctaaccctggagaagtccaccccagcagctggcccatccaactcttcaacatcttgagattctgtatcacccagggcaatcacaatggcgtccgtaggagtaaaaggaaactcatctacgttgggttcccaatctttcgaatacacatcatcctcatcaaaatcatctctcggcaatgatgggtgtatcgtctgtaatggatgtgtcggcgatgattgatgcattgaccgtgatagttgtgtcggctccaaaggctgtttctgtaacaaacttatcacggtcgcaatttgatccatgataagattcttcatctctttcagacttctcttgaagtcagccttcatctcagtctgtgcagtcagaatcgcaagttgttgcgcttcgaccttctccaatctctttgccaacaatagatagccggagtcattagctgcaacagaggtcgggggcacagtggcagaggttggaggcacagtggcagatgtggaggggtctgatgcttctttgggtgaggatggtggaataatttttacactttgaacataatctgccacccgttttgcttgggtctcgaatacgg

SEQ ID NO: 341676 - DNA, 525 bp, Cannabis indica
cttaaaacgaaattaaaccataccttaagctttccctcttcaaagatttgctatcctgctactaccagagcttagatcgctaagttttggattgaaaattgaagaaaatagatataaggggagaaggttttatcgaaggaggaagaacgagggtttcgttcgtcgttcgttctgttctgtttcactgataacttaatatatatatataagttaacttacgttaacttatatataaataatattataataatataataataataataataataatataattatatattaataataataatataataatattaataaaaaatttattattaataattatcttattatttcttagccactaagaaatctctatttctaaagtatttggccaacttcgagtaccctaaaataccccaatatttctaaaatcaacttaccccaataatctcaacaatatttctaactaaaactgttgtgacatttttggcctccaatcgggtctcgagggtcgccaaacttgaaaatatt

SEQ ID NO: 341677 - DNA, 568 bp, Cannabis indica
tttataactggcccaaatcgggacttgatttttttataacaaattagaggttattcttgaatagagtattcttaaatagaggttctactgtatatactttttttttctacatacaattttgaacaaaattaaatatttctttttacatataatctttttctttctttcaaagttgttatttttttaatttgtaacaataatttattttattttgttgttagttatgtgaaaatatatatttttaaataaatattaaataatttaatattgaaaaataatcaatttaaaataacaaatctaatccacagttttgtgaattggatttgagctttgtgtggattggattagatccaaaatataaactccgcacttacactatgtttgatagagtggagaagaggaggtagggagggggataaagggattgatgaatttccttgtttggcaagagggagaaaggaaggaagaggattggtgggggagaccatttccctccaaatatacaatttctaatccctcaaaaaattggggaattgaagaaagacaaaaaaaaaaaactaatctaaaa

SEQ ID NO: 341678 - DNA, 569 bp, Cannabis indica
ttctgtaatagcctaatcctcgtcaatttataaaccaattctatcgaaacaatttcttaatcttgtgcttactaggaattcttgtaaacgcttgtttggggtcgatttattaatgactctttgtaagacaaatgaagacacgatctgaaattatttgaaactataaagccatcatattttgccttattttataaaaataccattttaaatgcataatttgaaaagataaaagaatacttgaaatacaataaagagatttagaaatcaaaatgcaatagaaaaagattcttcatttgtaaaacaaaatatgataagtaaatgtttttaaataatacattttcactgtgtttagatttatcaactgcttaaataaaacaaggcaccatcaacattctagatcgtttgcccgtccgtagccgctcacagtatacatatcagaactcactctgttcactatacgtacttccatgtctattacctgtaggaggaaagtaaggggttgaggtaaaaactcagtaagaaaatatttatcatacaataccatataatatcatgttgggttttatgcc

SEQ ID NO: 341679 - DNA, 1117 bp, Cannabis indica
tatgaagtttggggtgatttggacaggttctggtagcgtttcggtgagtgcgtaaacttggaaaatcacgtttttacccctaaaaagctgatcatctggttttggaaccggtaaacctgttttggccaaccggtttaccatttcgggcagcctcgggaactcgataatcgtatttttaccataacttttcactatcgggcgtctgttttggacgttctatataccgtttcgaagcttgcgacaagctctaccatatggtgtatgttttagagccaaaatataaattctattttagtgtatttgaactacgaggtttggaaggaaaccctaggttttcctttgcaaccgttaggcagtgttttgggataaacacttattagtttattattgttatgacttagggcccgggatcatcgatcgtaatctaagtaggtcagccaatatacctgaatcagaacttgaggtaagaaaagtatattgtactgtatagtacgttgtacgtaatacaattaatattattatgaattgattaatattgagatatagttaatattgttatataatgaaaagattgattagttgagtattgataatgtgatgatattatgcatgtgatatatgggctcacctaattaggtgatgcgatatacctggcgacataccgagcgtaagtacgggcatcggtgacatatgataagtatcgggcgtaggtacaagcttgtctgattaggcgattactcatggtgacgtgtagattgttgggaatattttaccaggatctagttttactaacaagtatattgattaacaccctaaatatgaatatctctaaaacaatgaaattaaacacataagagtttagaaaaccttacattgattgcagcagaatataatgacttttttcgctcaagatctatagcccttgattcctttccgtcgcagggcattattaagatttgagcctggatctctttctctcatttgggtttggttaccagcgtcttactcactatgattgagtacttgacttgctatgtgtgggcatgacactctttcactaagggttcgaatggtgaaaaacaatgaaggaggctgaaatcactattgaatgaactct

SEQ ID NO: 341680 - DNA, 626 bp, Cannabis indica
ttttatgaattagttatgatttggaaaatagacgaaaaatataaaactgcccctaatcccgtacggagcctctcgccacgaccatagatacctggtcgtggcgactgaataagtgaaatccttgattctgtaaagtagttttaccgtgaccaaggtttgatcttgctgcgggggtaattagtctcgaccaaagaggagctcgttgcgacgagcttcaagaaatccacaagccttttttcttcgattttcaactcttcttctcttcgttagttaacaaaattttcactataaaaatcttgggaactagaaatcaaacaaaacaagcgtaaaattgtccaaaaaataacaacaaagaagacaaattgctctaagaagtaatccgacaaataagctaaaaatagcctaataattgctttcatgtagcagtagcgtgaaaataaatatacgtatttttgtaaaaagaaaattaaaatccgtaaaaatattaaaaaaatatttgcaaatccatattttttaaaaactgtttgttaaaaatttatgttaatctcccaaaataaaagggaaatttacatggtatactaatttttgccatttttttacaaaaatactgtcatgcggtatttttt

SEQ ID NO: 341681 - DNA, 509 bp, Cannabis indica
atgcctcattttcaccaaaattttctaattcaatatgtatccttagaaattcatctatgttttcatcaagagtcttgctagtactcatcttgtaaccaaagattctttctttaagaaagatcttgttaatcaaagatttcttttgaaactgatcttcaagctttttctatatttttggtggagtatcttctttgtcaactaacttgataatagaatcagataagttaaaaatgattaatccagtagcagtttcaagtaattcttcttgtgttgatttagaagtattttctgaccattctataggttcaataagaaccctaagtaatttgttttgagcaagaagagctctaatcttcttcctccaaatcctataatcccctaatcaatcaaacttgtcaacatccactctaatattactcatgttaatcaaattgaacaagataataaaagtaagaatgtaacaagatatattttagactagagttttcttgtttattaatttcttgata

SEQ ID NO: 341682 - DNA, 392 bp, Cannabis indica
aatggtgcacattaaaattctattatattagaattcttacaagtcaattaatactaatagatatgaactagtatttttttaagatattcatctcatatattaattattactcacataaattatatctctacaaaagtaaagatttgaatgttttaaagacatttaaatcttaagtagagataatgcatgataagaagttttttgaatacgttctttaagttttaattttatagcgtactaaaattaactttaggttttgattactatgttggtttttgcaccattttttttatggtttccatgtcttttatggcttttgtgccatttttagggatcacccttaattttttaaggtacatttgtggtatgttctgttggattattattttacc

SEQ ID NO: 341683 - DNA, 1194 bp, Cannabis indica
tctatagttaaaaatgacaagtcgtttctctgcaaatggtctactaattttactctcaaaatacataaaaaacggtcttctatttttacagactcgacctaccgtttttcatgatgttttcacatagtctcgttatgtcgtgttcctttaatatttagagtattttcatgctatttatcgaaagggaaatttctagttttagtttatgacttggtaaaggttttaacaagttgtttaccgttttgtgtaattttaacaaagggccttcattcagcgtgtgaatttccactcaaaaatgtgtacaaactaatacaaaaatggatttcccgacgtttttaaatagtcgtttaaagtattcccatcagtttctataaccgtcgcctatacgaccgtcgtaaaacgggcaaaataggcgacggttcaaaattgtcgctaatgtgagtttcccgatggtttaaaacaatcgcccataactgggtttagggtgtcccacattaatggcagaaaaatctttattaacctccatttttttcctacaatagttttataatttcagctaaattaaaatgaaacaagtaattaattttgttacaataacagtaactttaaaacacattaaattaatgcaataaataaaatatataataaataaaaaagtatataaataaataaacgtatttataccaagctcagagagagatggagacggacgggaggtggtggtggtccaacgtatgagacagagatgagagagacaccgacgggatgtggtggaggtccaatgtatgcgatggagagtaaagggagaccgacgagaagaggggtgggtggagatcgatggatgagagagacgagaagaaagggagatcgagagagagggaagaagatggcaagagaggagggcaatggtgcggaggcatggggagggttttcgagagttaagattttcattttagggtgtgggaaacggagaagaaataggtaggcatgtgggaaatagaaaaaattaggtgggcacgtgggaaatgtggcgagaagtaggtgtcgattttttaatggactcttataggcgatggtttaaaactgtcgctcgtactgtaggcgacggttttaaattgtcgcctatactttacccgacggtttacaaccgtcggctataagggtccattaaataattgcattttattaaaaaat

SEQ ID NO: 341684 - DNA, 1045 bp, Cannabis indica
ttttgtgatttttgcttggcgacgattgaaaatgtgatggatggctattagagtcacatgggtaagtttagaaccttattcttagtggtacaaacataagagataagaatgttgggtttaggcagggtgatagttctggatcattttacccctacgcctataggttacttaaagtgtaagtaaggccattttgggtattttagctagagggaggtggctggtttttagcttgacagctggcaacttattatttcagcctaagtttgttggtttttggaattaaccaattaagaaacaattagaaattcttaccctctctccctctttttttgaaccaagaaggagccaagaacctagggttcttctcttttgcttcgattaattcttactggaattcagagtgttacttagtagttttggaaggattttatcaaggtaaaccctagaactctagccttaatgttgtttaagctttaagtttggttttatcatgtaatttctgagaattagtggctgtttaggtttaacattattctagtgttatttctcaggttgctttgaatagaattaggttgcttgttgctggtaaggttgatttgagaggagaatgaccaagtttgagtttgaaaattcaaacttgattcattaatggcacttttagtttgagtgttcttcttgctattactgcttggaaactattattggatgttagtaaaggtgttctggaaagtttgacagagtttggggaagaattggttgaattttgaactgatttgggatttctagtatgaacaagttaaccggttctacaggtactctagaatcggttaatcgtttcacaggcaggatcccaaaaaatcgaatttatcgacttgggccattcttagagccttagttttgatgtttcctcaataattatggtattgtcttgttagttatcgataaagaaattgttagttgtaagtttaggtccccagatcgagttttaacaagttatttacccatttacgtgaatgtgacatatggcatccatccagcacgtgat

SEQ ID NO: 341685 - DNA, 618 bp, Cannabis indica
tctaccacatctcttttcattccatacaaccaatagtggggctttcaatcctgatgcattttggtggttcccggatacagtgaataaggtgtggtgtgggcttcatcaaggatttctttcttaagttcatcaacgttaggaacacaaactcgagctttgaacaataacaattcattattccagattgaaaagtctctaggccgaccaaccatcaccttatcttgaatcttgactagctcgggatcttctaactgcgcctttctgattctctctagcaaatcagattggagtgttaagttatgcaattttccaactacaaactcaattcctgcattaaccatctccgaagctagttgaggagatatcacaatagtagtgaaaacctgcccgggacctcttctactcagtgcatcagccaccacattggctttcccgtggtgatacagaatctcaccgtcgtaatctttaaccaattccagccacctactctgcctcatgtttaaatctttctgggtgaaaaagtacatgagacttttatgatcagtgtaaatcttgcatttttcaccataaagatagtgtcgccacatttttagagcaaataccacaacaacaagctct

SEQ ID NO: 341686 - DNA, 961 bp, Cannabis indica
cactccagccgcgagtcatgactatgggattccctccgaggcggaggaatacacagtgcctctcggcattatgttgactccgattcgtggagatgaggagaggcagaatcttcggataaccaagcacaaccatgcccttgatgaatacacccgggggcatgccgaagtggaggccttgaagagggtcctacgggaggagcagcaaaacgtcctcaatgcggaggacttctggaatctgtgggacctgaatattgatccgctgacggagtggtttaatcgcttcctggttcccaccttggctccttttgccgcggagatgaccagcgagtatgtctcccgcatgactcaattcccacccaaacggtatgctgcttgtgcatccttgaactccctctaccaagttcaagacatcagcaatgccatggccgctgtaagcacttgattcatttctttcctcaatattttgtctatggcatttgatatcactcttttctcattttttagatttctgcggaaaccagccgactctcaaggaccatcgtcaatcatggcttcgtcctgtccgaattcaggggcatagacgaggtcgtgaggaggctgagcgaaaggaggccctcgctaaggcgaagctcgaggaggaggccaaacagagggaagcctagggagaggcgatgcttcacgaccagttggtagtcgttgtagacgtctactcttttggcccccacaacctttgctaatcttagccctgctatcaatgcttcatactcggcctcgttatttgaagtcaagaagtcaaaccgtggagttgcttggagtcaaagtccactcggagatataatcgcaacccccgctccggatccatttttgttggagggtccgtctacaaatactttccatgccgggatcgacggtgttggcacgttcacggttgctttggcttcattacactcggtgatgaagt

SEQ ID NO: 341687 - DNA, 654 bp, Cannabis indica
taagaaagagaagttactttgttttgtataatttcctagtatttttcaacagtacataatagtcatacaattggcttcatcttatacagaaacaaacaaaaaaaattaatctaaaacaagcaacaatttttcactggtttatatatttattatgataatattgatgttaaaattcttacttgctattgcattacattagttgattttttctggtatttattaaaacttatactctccattatccacagagtgaggattaatgatccactaaagggttaaggaaatagtaatcatagggtgaaacgttacttacctatcaggtttgaacaagaggtaacagttgataaaccactaaaaatatgtaaagaggttcttgtcaacttttgaaaatgtaaatatatattagacaaagtaagaacttgacatgatagaagaataagaagtataggaagcttgtcaatggtacttatattttataaaatagaatgcccacaacttcaaatacgcttgggattattgaagcatgaaaagtatagggtttgctgcgagagatatagggttgaggattgttttatttttattttattattttattatatataatatatttattattttattaaataaaataaaaaattactcatgaatttctca

SEQ ID NO: 341688 - DNA, 657 bp, Cannabis indica
gttagggaatttacttggtaaattctagatctgcttattggaaagtcggttatataggcccatggtccccatactggttgagacaaacttcttgtaagactgagttaattgattttaattaatcaattataattctaaaattagactatgtatagtttatgaatttttcactaagttatggcttgattgtgaagaaatataatgattttagggtttatttattaattaatagactttgtggagtctaattaataaataatataaatgataattttaagtattaaaaaaatagttttggtatttataggattgaaatggcaaaatgtggtatatgtgaaaaatagataaatggttgagaaaaatggcaaaaatctaactagtgatgggtcggccattaggttctatttttgctattattttatcattttttattctatataattcaatcctaaccgtaagtgaattagtataaaaagaaaagaatggtctcataatccaactaatgactcttgacccaatttttatcttatcagacaactagagagtttgagacttcttcttcttcttttctctcttctaattcgaatcctattgtgttcttcaccattaaaaattcaagctttagtgattgagtgtatgcccactcatagcaagtta

SEQ ID NO: 341689 - DNA, 637 bp, Cannabis indica
aggtgagtaaaggaaaaaacaacaaaaaaaaaacaaagatcgacatcccatcgatatcaatcgacataatgtcgataacaacaacagccgaaagaatgacacgtatcattgacaatgtgtcgacatattatcgacattatgtcgacaacattaccacacatgcatgtgtaagtcttcatcgatatataatcgacacaccatggacatcatatcgacatatactctcaatggaattcgcatgtcagacacgtgtacaatggtaattattccattcctatatcgataagctatcgacatagtatcgacattcactcgacaaatacacgttgcatgcgttttatttttttacggttacacatttaatgttaataaattttacctacgttcccaacaacccttcccaactgccacgttgcatgtcagacacgtgtcctgtcgataagctatcgacataacgttgacatagcatcgacaaataagtatgccgtgtcattaaattggcatgttgtcgacataatattgacatagtatcgatattctgtcgacaaatacaccatttcatgcgtttcacctgtgcagttacacatttaatgaccattaaattttcttacattcccaacatgtatactgctctata

SEQ ID NO: 341690 - DNA, 1141 bp, Cannabis indica
ggtaaaataattccaacaccatcccccaagaagcataaagacgtgcagagcctaaccggaaaggttgctgccctgagccgttttatctctcagtctacaaacaagtgcattcccttcttcaacattttgaagaagtgccaaaagtttgaatggtctgacgagtgcgaggaggcattcaaaaaattgaaagaacacatggccaagcctccaatcctgtcaaaacccgttctcgaagaggacctattcctttagttggccgtctccgagcatgcggtcagcgctgccttagtccgggaagaagagaaaactcaacatcccgtgtactacgtcagcaagcgcatgataggagcagagacgcggtaccccatcatacttttttgcctcctaatggcctccaggaaattgagaccttatttccaagcgcacccaatcaaagtgttgaccaatcaccctctccggcaagtcctgcaaaagcctgaggcgtccagaaggctccttaaattggcgatggatgttaagtcaatttgacttgcactacataccccgtatctccataaagggacaagcgttggcggacttcatcaccgagtgtaatgaagccgaggcaaccgcgaacgcgccagtactgtcagtccccacatggaaggtatttgtggacggagcctccaatgaaaatggatccggagcgggggttgcgacgatatccccaagcagacttcgactccaggcagccctacggttctacttctcaacttcaaacaacgaagccgaatatgaagccttgatagcaggactgagattagcaaaggctgtgggggccaaaagagtagaagtctacagcgactcccaactggtcgtgaacaagatatcgggcgagtatcaaacgcgcggcaagcgaattgccgcatatgtaacaatagtccgagaactgctccacgagttcacgaactataaagtagaatgaatccccagggaaaagaacgctcactcggactgcctggctaagttagcctcagccagtgaaattgaaggactgggggtagtacccgtggaacacttggcagagccaagcatcaaaataaaagaggccatagtaacggttgggcaagaacccaactggatggtccccatcatagaatac

SEQ ID NO: 341691 - DNA, 548 bp, Cannabis indica
cctcatctccaggactggagtcagcacaatgttgggaggagcaggatgctcttccatgggggagaccccaccgtcaagaccatgggcaggagtgtcagctctccgaggccgcttgggctcgtcctgggcaaccattttgcccttgcgcttgcgaatcagagcaatttcaagctcttcttcaccttcttcagcttcctcaggaagagcccggagctctcccgcaccttctgcaacttcctcagaaagccccattgcttttcttgaccttctcccggcagcacctcctcgtcatccactaaatcaatagtgtcggggggagcgctggaagaaatctttagagcaggggctattggggaagaagtaaaggccggaggagcctcgggagtgtgaaccccggcaagctgatccaagatggcgtccatggagatacctgctcaacaaaaataagcaagtgtcagaacatccgtgagaaaccacttacacaagatatggcaaataagctactcctacccggacttcctaattcggccctagcaaagtcctgaact

SEQ ID NO: 341692 - DNA, 497 bp, Cannabis indica
aatatttgatgcaaaccaactcttcttctgccaaacaaattcattccgagggcgccaaatagcccaactcaccacagccacttcctccatttcaccttcgcgccctctgccgaagatccccaacagccagttgctcaatgttgtagccccagtcccgacgtcgatcatgttgcgactccaagaagctttaggaaactcacactccaccaacgtatgttgaacggtttttacatgagcgttacacggcggacagtcagcattgacgggaacatgacgtttttggagctgaaaataagttggaagcacacccgaagcagccctccataagaagttactgatcttaggaggtatttgtaacgaccaaaagcgcttccaaaaatcattattggcatcacggcaccatgcacctttagattcttgcaagaatttataagcactttaaccgaataattcccacaaatctcaagtctccaactccatgttgggttttatgccct

SEQ ID NO: 341693 - DNA, 782 bp, Cannabis indica
aaactctaattatttaccattagacttatcgggatattacaaccatcccctccttaaaaaatttcgtcctcgaaatttatttaaacaattcaggatattaaccccatatttatgattctaactctcaaattgctgcttctatctcgctgtttttctatagcaccttcttaattagtgggattgtctcatttcatagtacttcctttttctagcccaaaacctagacaggatgtttttcccatataataatttgtctgaagttcaacatcgtcacagttctaaatatgggtcgagtttgatacatattttctcaacatggagacatgaaacacattatatactccggacaacgcatgagttaaggctagctaataggctacctatcctatttaatccagtggacatgtatctaatatttttctcgtaccacacttattaaggtaccaaacaagtggcacatttaattatcacttttaaataaaaacctcatcagggaagagattattctaagataatctaacctttatcaaatatgctcatagtatgtttctaatattccattgatcttctcaggttacccacctttcaagaataaaacatcatactatttttgctttaacctccatggttctcaatgacattctttaatttttaacatcataatcacatatatcaaccttggaatttcacaagattagactattcctttgtatgaattctgtatcctcatttattgtataaattttctacactaatatccaacatattaactctgtatgtcc

SEQ ID NO: 341694 - DNA, 1525 bp, Cannabis indica
aacttactagtagatcaagaagcaaaaactaaatgaaccaccaattattggatagaacaaaaagatctagggtgacctaaatagcagtcaagttgagaataagtaatggcgaccttatcttgagtgttcaaaatacaaaaaggtgccatttgggctaatgtagagccaaatcttgttattgtggggtagtgggtcatctaaaaagaacctatccacagttaagaagtacggatgttaaaaaaaagtgtactggtcctgcccaagtgtcagttatgattcaaggggacgcgaatatcgctccttcggtcgacttaagttagaatttatgggcaatttatattggtattaaacatcgtactctcaattagggtaacatcaaaatctcttaatggattgtgtctgtatgttatttagtggtagttcatctgacagggtagacagattagagaaataacaatatgagttaaatttgctagtattcccaagtggaatataggacatgagtagttaatggaggcatcaatataattgattcaaataataaaatattttgtttaggtatgatctagaattagcaagagtgggacaatttacgagtattgtctggaatcctaggtgaattgaaggcagcaattgtgtaataattttgagattatgtaggcgtggaactacctatgttaacaagaattatcttgttttggtacctcaccatgagggaactccatggttgagtgtcctcaacttagggtgatttcatttaggaagtttccccatgaagcatgcgagttagagcaaagcacgttagaaacactaggatttgtccgtgggggccagtcgtcagtctaggaagcagctggagtgatgcactcgtgtataagagccatcatttcatgagaataagggcctagtggaagcttgaactggggacgttaccgaggtaatgtataaaagaatgttaggaagagtagtgatatcactaaggtaaagaagattaccggaattacttaaggtgatacggtaatgatagagagtagttcataattgactagatagtcaatatggtatgtaaggagaccattaaaattttgggaaaagattactttattaagcaattatagaaaggcacactcacccagaatgggaaaaagtttatgaattgagatgcaatttattggacatgtatttgagtgattggtgaatattagatcacaaagtaggttgtttactaaacaaaaaattatataatttagtgtaaaataaattttagagtggttaaccaagtatgaagatagtgatgattgcaaggaagcaatgatagcgtatgaaccaaggagtgaaaccttagtagtaatgatggaaaaagaacacgagagtctcagaagttgatgaatcagcatcatcaatgggagattcactataagttagttcggtagttcgtaccaagggtttgtcaataaacaaaaaataatatatagacttgaggtatgtacatttctggatgtgtttgaaaagattatcaagattt

SEQ ID NO: 341695 - DNA, 1217 bp, Cannabis indica
gcaagtaaatgacgttaaatgacgttttttttctgtgagttttactgctgtgttgtagcattcccgcgagtctgactggactcctcgcacagatcctactccaccgggagtagggaacttcatggtgagatgatagatggacgtcacgatcttcatctcctttaggataggtcgaccaattacagcattgtatgccgattattggtcaattactgcaaagtcagccatcgatttagctactacgggtgcggttattacgacatctagaattagttacctgagggttttccgtgcgagtagctggtactcggggaggacgtcaagtcattttttttccatccacctcggcctgcagagcgcatagctggtcttggattgcagtgtactgatcggtggtcagttggataataccttcggacaccaccgctggagtaaaaggtggaaaatgtcccgttgtggctgccggtgtagatgtttccccggtgtgagggccagtagtttaagggaataggttgagaggtcttacattataccgacctattctgccgttgatgacatctacgggaggcaatttgcttcctgacagtggaacgttcatcattccgatactgatggatttgttgttaacaccccgtttgcttggtttccagccattatgattctctctctaaattagcaggaaaatacttctcgtttcccacagatggcgccaaatgttgttgtaggaatttcacaacaccaaaaataaataataacaacaacaacaataataataataataataataatatgatgaacaagtgcgagtattcaacctagaacggcgagtactcgaactgggaacacaaatacttaatgaaaactggaaatataaagaacacaagggaatatagtggtttagtcagatcacggtctgcttagtccactgttacaaagattctgtaggtctcccatttcacggtggatcactcctttatatacaaagcaagtgtccgattatttacacaaggattgcattcattgtcaatccgttcgtacattgatttacaataattaagctaaaaaatgtaaacattaataaatgaagaacaatttctattcactaaatacagaacgtatgcgacttctaatgtgcgagttggctgttcatattcttgcataagctcgtgggcttagaatacacctaacatttagttgagtctaagatgtctgcgttc

SEQ ID NO: 341696 - DNA, 907 bp, Cannabis indica
aaccgacaaagtatgaattatggtgttccttctaattctaggcatacttctatgttcctttcaagtgttcattaaaacgttatgtgagaaatatgattgttctccatttcccatacatcccgtccttgccttagttgcattcttagataaaaaaaatgacgtggaatggaatcgaaaatgaaaagggttcttagttttttgggatttgtaacatttcatttctctctctctgtctcgaaagatgatcattgtctggggcttttaattgaacactaaaattgcactctagccatccctttcattgtatttttttggataagaaatgtagcttatttaactatgaacaatgaagggttgtgtgctgttttatgtttcagactgatattacctttgaagtggatgtgatcaaattccataaatattgactaaaactaagcttttataactttatttatttatttttttcatgtaacaaacactctggattgtttttgagtgcttaattcgatagtttagcaaacatcgtattaaatttaaaataattctgtctactattgtcctttgcaatctacccaattctgcatggaaaacagatttgtagggtattttcagcatggacaccaataattggagacctatccaaggtggggaacccacgatggacaccacagattggagaactcaattgcagcacgattcgagacaacgtattgtcaacaagatgtaagtgtcttttggaattagagaggccgtgttaatagaaattattaatttgttccttaaacaattaaagatttaattggattgttgacataaattgaaaatataagtaaaaatcttgttttggttaaaaaagttttaatcctaaaaaaaatttaaaaacagaaaacatgattggcaatcttca

SEQ ID NO: 341697 - DNA, 796 bp, Cannabis indica
ttgtaagagctttaagagagaaaaacacttcgttctttctctcgagttaatacaatttaaggggagtaggctattaccacactcacgaggccgaacctctttaaaatctggtgttatttattactttattatttttgctctattttaattacattcttaatcacttattaattaactcactgtcgttggctaaaagtgaggccaataaattggtgctttgattgagagcaaaaacccaagttttctttttgtcttaagttttaacatgcatacaggatggtggtgcaaactcatggaggcctggctgatcagatcagggcgacccgataatgatagatcccaacgtgcagacccctgggaatacgagaggacgaccagggacaaaccccaaacaggccaatacacagccatctactgtgggccatggtgtgacttcccgtttggcagggatcacaccaggcgtgcaagagactgggaacaccagtttatcagccgatcagtccactccgaacactgaagtcccgtccaccactaatgttcagaggacagttggagatgatactgagatccaaaacctccgaacagcccttggactcatgcaaggtcaaaataatgctttgcaccatgatcaggaggatttccgtgctactataaaccttgtgttcgatgagcagagatgtcagtttatagaattgagggacagggagatggaaactttaaggtgttgagattatttgaaatttacattttgttttatattagtgcaagtgggagtttattgggttttatgccctaa

SEQ ID NO: 341698 - DNA, 572 bp, Cannabis indica
acctttgggcgtggtccgcctagaaagccattcacttaagagtaaatgttcttatgtttcgtacttgatatggtcatccgatctggtactttaactggtagtattttcttaagtgttccccgttccaataccttggtactagaatgagttgcattttttcatcatacttacccagtttgtatgctcctgattctagaacttcgaccacttgatatgacccttcccaatttggtctgagcacacctgccatactgtctttggtgttttgaaatactcttcttaggacaatatctcccacaaataatttccgtgctctctcttatttgttaaaataccgagctaccttttgctgatgggctatcagtttcaagtttgctgcggttcgtttttcttcaacttcatcaagcaattctgcgaggagtgcgtgattggcctcctggttatatgttagtcttctgtgggacaacagtttgagttctacgggcagcatagcttcatatccatatgtcatggcaaatggagtcagtctggtcgctgttttctcggttttgcgatatgaccataaaacttca

SEQ ID NO: 341699 - DNA, 570 bp, Cannabis indica
aagttaaaggaaggggagcgtcaagagtgtgagctccggcaagttcggccaaaatggcatccaaggaattacctactacaacaaaaaaaagaggcaagtgttagaatatccatggaaacagtaaacacttgaatagagcaatcaagctagtcctaccctgactctctaattcgaccctagcaaagttctgaatcttaacgctggtagcatcgtccctgagatagctgtccgaaggctggaaccaactggaaaaaatgtagtccgaagggtccaagggaacgagctccggaggaccagaacccatccgggaccgacctaggaaatctcctaagttggaaaaataataattcttcatatggtctccccactgggtcgagggcatcctaaatctatggagacgctcatcaaaccctacgggcctaacactggcacattcgccaacggaaggaacataatttctagctaaaggagacttactggagccgaaagtactggcatcaggagcctgttaggttttatgcgctaaataaaactctatttcaaagtaatctattttattcaacatcaata

SEQ ID NO: 341700 - DNA, 269 bp, Cannabis indica
cagagcattatcaagatctaaaaatggatctccttctctccttcttgttgatcggattcttcacaatcttacatactatgattgaggacaaccttgatgtgtgtggacacttactcaatcaataatgggtgaatattatttggtaaagaaatactaagtgtttcgaattgaagaagaaggaagaaggaagaggtctcatcagaaagctaggttattagctttggaggcattagtttggatgaagataccatagctttccttttatacta

SEQ ID NO: 341701 - DNA, 513 bp, Cannabis indica
aaatacccctttagtgttatttgtgttattttagtgtggaggagcaaaatggtcattttgccccaatgatattttgacctttagtggacattttgtgatgaaattatatgtttattaatgttaagtgttggatgaataaaagagttaaatttgtattttgtctctcatttcaaaagttagaaaaattagaaaggaaaagcaaaaatctctttttctctcgttcttctcttttcggttttgagcagctgggattgggggatttctttgtgtgttttctttctatatttatcaaagttcttgtggtctcaactcttggtaagtctcttgctttttgttcttgaaaattttgaagaaaagtggataggttgcatgctagtttttgatgttattgctgctgttagttgttgttcttgtttttgtgtttaaaatgctgaattaaatgtgattagataggttgaaatgcatgctagttatccttgttctagtttgagaatttttagttcaaaagctatg

SEQ ID NO: 341702 - DNA, 730 bp, Cannabis indica
ataattttttttcttttattaaaatttaaaatattatacataaaaaaaataacaaacttctacaatattccacccacccttctcggggtggagaccaatatcatcctttcaaattgacaccgacgacaagcattgcccttttagatcatcgtcgacaagattttacccccaccatcaccttcctcacacgcgaggcttgcatcaacaactctgatctttgtcgttaacctacagaaagaaagagaacttgagaaccaaaaagaagaaaaaaaaatatgtagtcgggattgagatttttgagagaaatgaagccttttgtttatttttttcttcttattttccaagaaattaaccgagatatatgaagagaatatgcggtagagaaagaaagatatgggtagtggtgggtggtgagttttggtggtcaatagagtggatcagggttgggtaggttgagttgggagtgaggaagaagaagaatgaggatgaggaggaggaggaggaggaaaaaatagttgattaattagtttttaaataatttatttatgagtaaatatcattttgaatcttatattctataaagttatagactggactctctattttgttaaatactaattcagatcctattttttttaaaaggttaaataccatcttagatcctgtgttttgcaaaagttacagattggatcttctgttttgttaaatgacaaaatggaccatgtatttt

SEQ ID NO: 341703 - DNA, 819 bp, Cannabis indica
gaaaaaaaatcaatatgaagttgaatcccaagaaatcttcattcgagatttcatcaaggaaattccttggtttttagttaacacgagaggaatggaggctaaccttgagaagataaacgcactgctcgacatgccttcaccaaaaaattcaaaggaagttcaaacgctaatcgaaagaatggcagccttaaacaaattcatctcaaagtctactgataaatgtctccaattctttaatgttttgccaggtaataagaaatttgaatgaactgaggagtgtgagcacgccttccaagaaatcaagaaacacctatccacaccatttataatggcaacaccaataactagcgaggtgttatatatctatctagtcgtctcgaagaattccataagtgcagttttagtacaagagaagggaaaaatctagcaacgatttactatataagtaaacaattactgatggcagaattgatatattccccacttaaaaaactcacaattattttggtgcacgcctcgagaaagatgcgatcttattttttagtacatccaatcagagtgttgacaaaccagccattgcgacaggtattatcaaaacttgatgcatcgggaagattgataaagtggtcaattgaattagggtagtttgaaattacataccatcctcaagccgctattaaaggtcaagcattagcagatttcctagaagaaggaataagctttaatgaagcactcaaagaagaaacagattatgttagtttttatgccctaaataaaactccatttcaatgtagtctattttattcaacatcaataaag

SEQ ID NO: 341704 - DNA, 1234 bp, Cannabis indica
ttttgcaaagcttgtcaaatgggcaaaaaaaattaaatattaaaaaattaatatttcctactttcccacttctttgtttaatttttttattctctctacagtcttaaaataaatgaaactattaatagaaaaaaaaatattatatatggcattattgttaaagaagtgaaacacacgtaaaaaaaaactatttttataaaaactattttttttattaaaaccattttaaagattaaaaagaaaaaaaatatttatctataaaaattttcaatttatttttgcctagtgcttattatgcttgttatgcattaatatacacgttaatatacattaatatatatttttttttcaatttatctttgcctactgatttttccaatttatctttgcctactgatttttccaataataacatataaagtttctgtctcctaattaagaaaacatattaatatacatgtaagtgattcttaattttacaatgataaatttatgattaatgacctcacaatttaataaaagggtaaatactattttggaccccgtgttttgtaaaagttactaattggaccctctcttactaaaagggtaaaagttactaaaagggtaaatacatgtaactgattttttatcataataaaatttactaataatctgatctaaatatgttatgaaaaaactatttatattttctttatctgttcatgttagggattgtttgtaagttggttatattaaaaaaaattaaaaattaagctcagggtcttatttttaccattttagaaaatacatggtccattttgtcatttaacaaaatagatggtcaaatcggtaacttttacaaaacacagggtccaaaatggtatttatcttccataaagtaataaggtagtaatttgaattagtttctaaaaataatttataatttttccatgctattagttgtaattattatttctaattttgtaagagataaatataatttttttagaaaatattattggtaacttgctataaaaggttaatagattattatattattaattttttttagtacccatcaataggtattacctattaaaaagtgttccacatatatatatatatacgaatatctataatatatttagtttcaaaagaataagtttatacatacatgatagggtatcttattaaaaaaatacacagatggactatttatttattttgacatttaaaaaaatatattaaaaaa

SEQ ID NO: 341705 - DNA, 581 bp, Cannabis indica
gattacattgatagcagtaatagtatacatagagttatactgattactgataaatgtatgttggctgaaatactgaccgatgctgtcacatccatatggctagagtatgactagcatattgagtataggctgacattatggtcgatagtattgtcgtatgaacattctagactcagtaccgtgtgggacatggggattagggtaatgatcgggtgtatgagcgccaggttataacccgggttattaatatgttatatgttatgcttttcgtactgagtctgttgactcatagtgctatttctatggttaggtaagggcaaggctaaagctgagtagccgtgagagcgagtaggtgaagattttacatgttggggcggttaggcctggagcttacgatcttaggagacatcatggcttttcctgacagttgctaggcgataaaacttttggatttatgtaaagtaaactttgaaaaaagtatttgtaaacgagatcccggaattttttatatgtaataccttaagtttctaattaaataagaaaattttaattattcacgattttcagtaacctcgttgatt

SEQ ID NO: 341706 - DNA, 1070 bp, Cannabis indica
ctaggtctgagtttgggtctgggcctatttttcggtccttgtctgtgtctgggtcttggtctgggtctgggtctatgttcgagttgtggtacgggaatgggttctggtccaagtctcgggtcacgggtcccaggtcccagttcctggcgcaagtctgggtccgcgttcgggcctaggtcctggtattgatcccagtctgggtcctggtctgtgttcggttccgtgtattgatccggttttggatcaaggtccaattcctgttccatggtccttattctggttcttattcctatttcgggtcttggggtccgagtttgggtttgtgtcctagtctagaaattgttccaggtttggcgggtcttggtacgatttcaagatctagacaccaactacgggtcgggtcaaagccccaggtcgtgggtcaagattcggatcccaatcttgggtcccagtctcatttccattcggatcctgggtcccagtctatgtccgtgtccgagaacggggttgggtctttggtctcagtcctagtcctgagtcttgattctggttctaattttgagtttgggtccccaatctaggtcttggtcctgggtgcaggtctgagtctcccatcctggtccaggtcctaggttcgggtctaggtccaagtccgtgtctcggttcgagttcgtgttccgagtcccgatctgagttttgattcagatctgcatcctgattcgggtccgcgtcccgatccgggtctgggtctgggtcctagtcagattctagttcttagattcaaacccagactcggaccctggtctggggtacgggtccgggtctgggccagggtcttggtctgactccgggtctgggtttgactccagatatgggtcctagatccaaacactgactacgggtcaggtccaagccctggtctagatttggatcacagtctcgagtcctagtctagttccacttggggtcccaagtcctggtctgggtcctaggtcaaggtccgggtccaagttaatatattgggtctcagtcccagttctgatgcccgtgtcccgggtctaggtctgagt

SEQ ID NO: 341707 - DNA, 574 bp, Cannabis indica
tgattcttctcttcacttcttctttagtctgacaggtcacttgtgtttctttcgggtcctctaaattccacagcagcccattcctcaattcccatacctgatatacaagcgcagccataatagcatacaaaaaccccttcttgaatcgactgatcttcgaacgctcaatccatcttaaaattgcattcaaatcaattgtctctatcctccaatccagccacatttttatctgcattaaacattgtagagaaaaagaacgggagaagaacatatgagactttgtctctggttgctgcatgtagaacaagcagtagtcttctgcaattatgttgaattgcatcagcctttcccttattgaagtctgtactggattgcagtctagaaaacatagctatgtcgaggtatattttgtctattccattctccatggctccaatttactttcctttgaggaggataaagtaaattgtagccattagagatcttgtattgtgtgctaatgaactgctgtacatcaatttctttctgatttgatctttaacacatatcagtttttccaataccaacttgcttg

SEQ ID NO: 341708 - DNA, 1079 bp, Cannabis indica
atcacctactccaaatggctagtaacttccaggaagttgagaattatggagctattatagattaggaaactcaagtgagtgagtttgatcttgaatagtttgactccagcttctctgcccttcacatcaatttatgtcatgaacaagtttacttttgacttccacgagttaatcaataaccttcaaacatttgagaatttaataagaggaccacagaaaggaggaaacaaagctcctacttcaggcactgctaatggtatagccaaggctgaggcaaacattgcctctacttcgaaatctagtaaaaagaagaagtgggagaatagcaagaagcctcttaaaggtgttaacacagctaataataataaaaaggttgctgatttaaaggcaaagcaaaaaggaaagtgcttctattgcaatgaaaagggcagctggaaaccctagtgtcctatgtttttggcaaagaaacaaggtatttctatctatgctataaactcatgtgttttagagaattattatcctctttggctattaattctggatctactaaccatgtttatttttttcttatttcagctccagctgcttaaacttgaattgctatcctagcgagttaagttagatggttggacaggagggtggagattgcccaagattgaagatggagctcgaaatcttctttaatttttgaattaattgttttagtttatgaataatttagtttcaatcattagtttgggattttattcactatttcatatttatgcagacaattcattatgaaattttgagattattaataaaattttctctttgagaaattttcattatgaattgcctttatgaaattaatcttcatattttctttaacttttatgtcaataccaattatatttatatgtttatcatgtttgtatgtgtttgtgttttattattgatgcaaaacctatggtatattaatctctacaaagagataataccacataaacccttagaatttaaattcaatgttatgataatgttaatcttaagcaatattagatttgttaataaaagtatcttttgatctgataggggtg

SEQ ID NO: 341709 - DNA, 1470 bp, Cannabis indica
ctttggttgatagtaacaaagtaacaattatttgtaatgttatttgatagtagacaagactattgaattgaatattgtacataattgtttatatacacgtgctttaatctataatagccctacttctctacgaattttgtgaccaaaaataaatgtagtattaattattggaagctgtttctcacaaatttattgttcttggataactaaccatatctaaagttaaataattattaacaactaaaagtaattttattattattattattattattattaattaaggcacgtggttcacaactctatttcatagcctaaaaaattattggtatagcagtttagcttcattaatctttttcattaagcatagtttaattataaaaaggttgttaattagttcttccattccataaatcaaaattaatgaaacttttttttaccataatttctttaaatttcttatcaaaaataaaaaatatatatataattaggtatattctttatttctattttgtttaatataatttaattaatttttaatagtgtgctagtttggtaatgaaaaaaaaatgctataataacactaaatggtaattaatattaggcattgggtaattaatgtttaaaagacaaaaagtaattaattagtattaaaatgataagattaacatgctgtagttaggtatttggattatttaaggtacgtaattattattatttttttatcaaggtacgtaattattaatatattattattattattattattagtatttttaataaactgtacctaaatttgtacgaacgttgcgatcaagaacaactcatattgtagattaaaaaaaaacgttaggtttaggagttgagttgtatagataaacattattaggtaattctctatagtacaccttgagaaaattttagcataaaaaaataattaaattttctttttatgattatatatattgtaaatatttaatttgaataatttacagtgtttaaaataaattttaaatattttgttgtttgaaattttattttaattactctaaattattcaaaatttttaaaaaatttaaaaatattgttaataagcataatgtatactattatgaaagaaaaaaaaataatagaatataaaactctattagatgctaaaataaataagaagcatactagattggccctgaaattgggcaggtcttaaaaaaaataaaaattattgatcctttattaaaaatatatatagtttatttgaaaaaatattaaaaaaaaacatgtatattttagaaaaaaaaaatattgttgttgggatattaactgaatgggtcctaaacgcaaatgtgacttgaaagtatacgaaaactgctatcttggaaggtatactatagatttttttccgaaaaatttacacaaagtactatatttagtaaaaagaaattatacttttacgttcatatatatatatat

SEQ ID NO: 341710 - DNA, 404 bp, Cannabis indica
atatttagtgtaattaagtttttatgccatatattatcaaaacttatctttattttctcatatttttgtaaattgccctatattgttaaaatcaaattttagttatgtttggtaaaaatgaggaagagtaggatggatggagagtctagaaaggataaggagtaggagagatgtagaggatatttgttctcttttatgttatttggtttaggagcatacaaggaacttaagtcttgtttaatttttgtaatctttttatttagtttagtaatcattcatgggtaatactcattaagaagtgttccatatatatatatatatatatatatatcatttttcctacccacacacacgcactaattaataatactaataataatgatgataacaacaacaacaacaac

SEQ ID NO: 341711 - DNA, 560 bp, Cannabis indica
aaaaaataaaaaataaaagcttatttggccaaaattaatataattcggtttgtctaaattaaataatatttttataaattctttgtcagttacgtacccaatgatattaagaccacatttttccattttttttattttttatttttataatgaaaaccacattcttcttagttgaatttcctatctgaaaacagaatgtgttgttcccgtttttttagaataaaaatcttgttttggcctaaaatttatttaatcagaaaataaagactagataaattataacagaaactatatatatttacgtaagatatttataaattgtaacagaagtaccttttaatttagttgaaattaatttttttaatgttcttgttatatagtagttttcaaaaagaaaaaaaaagttaaaactatatttttaataaattttatttttgtatgtacaaaaaactgggtttctaacgaggacgcctataccgaggacatgtcatctttattgcttttttcgcaccagcgggaaaaattcgcgctttttttttttgaaagaaaatgcatttatg

SEQ ID NO: 341712 - DNA, 510 bp, Cannabis indica
agaaagtttttgacgccaatagaactttcgaaaaagaacaaaatctgaacgagttaaggttgatacaacttgaagctcaatttagcaaaactggtgtatggccggctccaccacgagggttccccgaaggatgccgtcgttgcaaactaggcatctttaacggtaaaccggtgaagcctggaacattatgcaagtattgcaagtctcacccataagccaaacaattttaataatttgttatgttatggcttgtagtgagttttatttaatgtttgtttgtttttttttttttttatgaatgttatttttaatgttattttatgttatttttaatgatattttaatgttattttatgttttatttatggattttttcatttgcatcgatatattgtcgacatagtgtcgacaagttctaaacaataggttggttgcttttacatcgacatgctatcgacaaacagtcgacaatttctaaataatagtgtaacaccctaactaccttaggcg

SEQ ID NO: 341713 - DNA, 856 bp, Cannabis indica
ccaatatgacctaattagaatcttccactactaatgtgtaaaaaggttttattttattttttaaaaaaagagcacgaatctctgtctatggattcgaatcatatttaccaaacaatgcatgataaaaataggtaagaggttatagggtgtgataaaaataagtcatcttgcttacattgctaattattaattagatactaattaatatattattcaaaagttagatgagtaaacaacaaatcatgctcatataatttttttatggttttgatgccttttatagcttttgagctttttatagtttttgtattggtatcatttattatgacttatctctacttatttaggataactttgtgatatagtcaataagtaagggcgtcgtttgacacagtttttggaaaagctaaaagctgcttttcaaaaaagctgtgacaaaaaggtatttggtaaacagttaaaaaacagcttattgaagaatttatgaaaaagctacagctaaaagctaaagctggtacaacccaacttttaaaaaaagctgttttgattaaaagactttataataaattaattttactaaaaatttatttgattatttactatatattataaaaaataaaaatatttttaaatgaaaacatacttaaaaataattaatatttaaatttctaattttttattttattttaaaaaatattttatatttatatttttattatttaacaaacaataatcaatttatgtttcttataaactacaattttatcttttacaagttgataaaaataataattaaaaaatattaaaatattatttttattctaaatgtatataaatttatactatataaaaaaat

SEQ ID NO: 341714 - DNA, 904 bp, Cannabis indica
catatatataatttcggtgctttacccctataaaataaaaatttggtgtgtaaaatatatataaaaaaataacatgtaactgacttttaatttaaattctatttttagtgttttaaataattataatagaaactatcataaaaaaagttaattaggatttttttttttcttccaaactttaacatataccaaatcatgtctcctcaactttttgggcggttaaaaattcccactgaactattgagattgttagatttaaggatttttgtccaattttagtaaaaaaaattactaatatgtatgaaagttcaggggacatgatttagtatatatcaaagttcgagggacatggtttgatagatattaaagtttgaggagcatagtttagtacataaacaattactgaaacagtaaaattgaataaaattagacaaaagtccttaaatctaacaatctcaatagtttaggaggaatttttaacggctaaaaaagttcaggggacatgatttgatacatgtcaaagttcgaaggaaaaaaaaatcctaattaacctaaaaaaaattgggtgattccatatttcccttaaagggatgcactgatgtaccatttacttgttttggcatcctgaagaatttttttagttcaatttttttcatattcgtatacgttataattatttaacatatcttacaaaattttgaaaaattcataataatttataatatagaaaacagtgttcaaatagtgtatttcacacgcgtataaaataaaatagtcatgcgtgcaacacactgtttgaaccttgttttcgacgtattaaatttttctgaatttcttaaaattttgcaggatgtataaataattataacgtacatgaccatgagaaaaaatttgactaaaaaat

SEQ ID NO: 341715 - DNA, 741 bp, Cannabis indica
tcacctcaaattcaacaactaaatatcgaaactagtaccatagctaccaaagaacaattctataaagtcagaatctccataattattctaattcacgaaagccctatataaaactaatcgttccaagcttaaaacgaaattaaatcataccttaagctttccctctttaaagatttactatcccactactaccaaagcttagatcgctaggtttcgggttgaaaataataaaaaagataaaagagagggtttcgttgaactgagagaggtggatttcgttcgttctttctgtttatgtttttaaaacatataacttatatataaatgtatcgttttataataataataatatgatattataataatataataataatattataaaaattttattattgatagttatcttattatttcttagacactaaagaatctatatttttagggtatttgatcaactttgagtactctaaaatatctcggtatttctaaaattatcatatcccaataatccaatcaatatttctaactaagatcattgtgacattctttgcctccaatcggatctccagaatcgccgaacttaaaaatatttttatttcataaattattcatattatatccacatatttcaaataaatctctgtaattaacaaattacgtttatttatccacttatcgagtcttcagggtcgccgaacttgaaattttttttattccacatatagctcatattacatt

SEQ ID NO: 341716 - DNA, 607 bp, Cannabis indica
tgttaattaagagactttggttagtctaattaataaatatattaaaagacattattatttaataattaatttatagttattaaataattgaaattggtatttaaatggttacattggaaaattggcatgtttgagaaaacgagatatagaaatgataaaacagcaaaattgcagaaatggggcccattatcttatacctaggtcggccacttaagtaggcttttatcatttattttttcattattttaatgtcaaataaatgtaacctaaccctaggtgtcatcgtataaataggtagtgatggcttcaggaaaaagatgatgtatcttattccttcagaaaaaaaaacgagtgccttcttccttaacctagtcgccaccctctcttactcttcttcactattgaaaccgaacccttgagtgatagagtgagtgcccacacacatcaagtggtacctcaatcatagtgtcgaagattgtgaagaattcagattcaagagaaggacattcgggctatgatcttggtgatactctccgacagaaagggtaaaaaggttagagatcttagtggaaggagacattaaattccactgcaaccactgtaaggt

SEQ ID NO: 341717 - DNA, 901 bp, Cannabis indica
gggcataaaacccaacaccagttgctcacaaacctcaggaaccagccggttcatgtagtgagccatcacctccttgcccttcttggcctcaggcagcacgggcatgggcggagttggtgcgagcacctgccaaggaatccttctgaccagctcggacccagatgttgggggcccagacggctgaaagctaacacaaggacctggaaaagaagagtcgcagaagtttaaaaccctagggtttcctacaatgttctttctacagcaaagttacattcaaagcacaagcatgcaaaggaaaacataaagggattcaggaacttactcaaagattcaagtgtccgggttcaagcaagccagaaatcgtctgtaaacttttcaacaactttgaagccagaaagctctctctttttgctcaggagtttgcttaacaaagaagggtgatgaaatcaagcaatgtgcaagtactccaagtatttataggcagaagggtaactgtacataaaggaaccctagatgcctcgacttctcgcctagaaagcgaatatgagaaatcaaaataatcgagtgcaaccgtcagccgtggagagagaaattcggattttcaaaatattaattgtcagagcattaattagccgtgaagggatgcccagtcagcttcacatcgagtctcaaacggtcatgctcgacacgtgtcccctttcaaaggcagaaccatctcggaataagtctatacgcaacctcggaggtcccgtacagacttgggggcaaatgttatcccaaaattggcactctgacgtggcatcacgagaatggtgacacatggcatctacttaaagcacctggtcggatcaacatgccgagcaggatgcctcgctggcatgtccataatggaatactcaac

SEQ ID NO: 341718 - DNA, 682 bp, Cannabis indica
tccccatgccaagcctcacccccattttatttcttctcctacagttttcccacaactataataaaaaaaatcctcacccacaccatgctcatatttgagatcggtaccacgccgatatcgttccagagcttttcgccgggaagtcgagatttgaaggtcaatgaaccggatctgggttggtttttgtagtcgatgaccggagcctaaccaccttgcgaaaccaaagggacccattgtcggatttggagttggtttcagtcattgatgaccggagccatggatttgatgctatcatctgttaattgatagaatcataaccaaagcttatttatcttgaaagttaacagtatggagaccagatgaataaaaagaaagcatatgaaaatgcaagtaatcctggttgagctaaatatatgtataagcattacctccagttgcctatagggaattgtagtgtactttgctccaaaaactcagccaaacttttgagaagacgcaaaacaagacatccataatccaatccaaacatgaacaagaaaatcccatttttcgttttgagcattttgatatgtgggaaatggttgatgaaacactgaggtttcatgtaccaaaccagtaagtgatgtactgtattaggttttttaattaattagatgtttttttcctggaacattgataaatt

SEQ ID NO: 341719 - DNA, 1319 bp, Cannabis indica
ggaagagcaggtgactctgctcaaaaggaggaagaaacttctggcccagtccaggctcgttgaacatgcaatttgcattagggagcccagttcacctgctcggccatattttcccgtgctaggaaagggaaggccgtcctggcggaggcgagagacttatcaggtgatggtggactgtcgagtcttgttcggacaatcgctttgtaggatatttcaacttatttttaaaatctttgactatcatgctttatgcttctgatgccgtttttcctctaaccatgctattgttgtttcgtacagacatgtctcagaagatgctcgatgccctgaagaagagagttgggggaagctcaagctcgtctccttcggccatgaaatataagggcggtgaggcgaccccttccaaggaaaaggcaccagttggagaggttatcgaccttttcgaggagctaactgttgtggatccttctactctaaaagttacaaagtccaaggattctcgaggaggaagctcggacaggcctgagcaatcaaagggcggttctgagctggccaagagcggatctaagcaggtgcgggctcctagttcacctttgccggtgcttccagaggccaagaaaggtagagagatgcttgctcataacatgaaccggttggttcctgaggtaagtgagcagctggccggtgctgataacgagtctttcctggagttgctgatgggaggagtcttgaaggaatttaccagggtaagcctttgttgagagtttcctttaattcttctttatttggttcagaccttaaagttttttctctgtgtaggctggtctgaagttggcttacacatactcccgagctaagtctgctgcttcccaaaacgcggctttgtccaacaccatgagggcggaggtggacttggccaagaaagatgctaatgacgccagggtggaacttggagctattcggatggagctgggcgaagtcaacaagaagctttttactgctcagaagaaaataaccgagttgactaaggatctcgaggcttctgaccaacttgaagagaccatcgacaccttatctgcaaaagtgaatagccttcaagatgaaagggcggcccttcgagctatcttccgtcggttggaagaggagaagaagtctaaggagaaggagcttacggctgaggtggggaggctggaagagaaagttcatgccttagagacagccggtctcgagctcttttatgattttcggaaggctaaccctcaggcaaattttgattacttgggtgaagccaaagacatgtttctcgagtactacgcttc

SEQ ID NO: 341720 - DNA, 687 bp, Cannabis indica
aacaccgtacatcatgatcaggatgaaatccgtgctgcgttaaatctcgcgttcgaagagcagaggcgcgtgtttaccgaatggagggataaagagatggaagcgttgagggctcatcatgcaaagattgacaatcatagttggcaagacattgtgctgatacggagagcctatcaatctttcgggcaaaaaccccccgaatgttattcccccaggtgaaacagacgaaatttcagcggtgaatacctctcagactataaatggtcagccgctaaatctccggtcacaggttccgcctgtgggccaagtagtaggtgggcagaccttgtctagtaattcatcgggagaagtcatgcctggcaattccaaccaggttaatggtgccgatatgcacattaaccaactaaccaatcactgagacaggcaggcacttctgtattcaaaaggttgggaatgactcatgatctcagaaacgatctgaataggaggagaggagtagaggatcagcttgacacgccgatcgtgcagcccggaacccgtgctctaattcccgctcagaaagatactgacgtaactcaagtcggccaaaatgtcaaacaggttagtccaactgtgcaggcgcagttggacgaactaaagaatatgttccaaggcatggccagtcagaggaacaatgatcttgagttg

SEQ ID NO: 341721 - DNA, 592 bp, Cannabis indica
tttttttatcttaaatgacttatactttttcattcgaacttaatatatttgtgtttgctcgcattttcattcacaatgtaaacaattatattttgatcaaatgcagagtacttttggtctttccattgctcgtaattttcctatttaagtagttagtaatctacaatgtgtgcggacagtttattatctaccagacttttgattttcgagcagttatccattctacctcgcactgatagttataatctgtcttaagcaaacttgaatatacttttaatgattttatcactttgtacattttgattgcttatatgaatagttagattctctatccacataataggtttaagtacttttaccaagacattttgatgtctcgtttaatactttcctatcttgggcgaacagttaatattcagctttgtacgcaagttatgagttacatctcatttataacttttgattttcctttctcgtcagacatgtttaaataaaaaagttatggtggtttgatccccttctcgtctgaaaggtttgaccaaaaactttaaaaaaaaaaattaaagtggtgggtttgaattatatcatgtat

SEQ ID NO: 341722 - DNA, 545 bp, Cannabis indica
gcgggatatgtgcccggagcccatccctcggacactgtgccagcagcagctccaccgatgagcgacatacagttctctgccactcccggatatagccaaggccagaccatggcccctgcatcgtccaactttgggaatccctcagggataaatggacaaaccccctcggattctgctccgacagccagcgtagccggtccttcccagggctcgacgagtaaaaggtcctccaaaggcagcactcggacggaggaaaaatgatagaaaagggggtatactccccaatatacccagtacacggagttaatgaactcccaagagcatgtgtactttgctactaggcaaaatacgcactatcggagaccacctcgtttgtacaaagacagctcccggagggatcccaacaagagatgcgagtaccataacgacattgggcgcaacaccaatgaatgcaaaaatctcaaagacgagatcgaaaacttaattcgcttgggacacctctacgagtggatcaagaatcggttacctcacctcaacccaggtca

SEQ ID NO: 341723 - DNA, 563 bp, Cannabis indica
caattcaccagccagcagtattcaataactgaaggatacaaatggttcacctcggatggcatcaaaaccaattggagtaatgaggtacgggctcgtttgaacactcctaaacattgttttatcttgtggttggctatgcacaatagattgaaaataaaggataggctcctcgaaatcgggttacaacttgaagagggctactgtctatgtaacacaggtattgagtcaagtgagcacttgtttttccagtgtcatttgtctcgagattgtctgcatgagattaaaatgtggctcggctggtctgctgtaagcaacagtctcccacagctcattcggtggataggcagggtaaaaaccagcaagttcaaaaaacttgtgcaggctgtagcgtgtgctgctctggtttacaaggtgtggacagcaaggaacttggtgatttggagaaaggaggagtgtacattcaagagaattttcgaggaaataaagcaatgcatcaaactaacagttactatgttcatgcctaagaaaacaaagaaagaagatagaatatggttccaaagttt

SEQ ID NO: 341724 - DNA, 547 bp, Cannabis indica
gatagaatatggttccaaagtttgtaaaaagatgtaattagtcatcattttttggcctctattgaggtgcctttagattgtacaaattggtttagagcaatacaaattcactgattcatcaaaaaaaatatttatgttatttttgagaaaaaaaaaaacagagagcattcgaacccaaaatacttaactaataatacttttaacaagatctgtccacggtaaccatctaacaaaataatgtggtagtcatctgtggcctgccattaatgctggagagaatttccagtgccagcaagagagagatagtgacaatgggaagagagatcgagagagagaactagattatggtatgacagagtttgtgcaaaggtggtgatgatgatgagatgggcgaggagatctggtgtagttggtggttttgcggtggttgcggtggtcgacggaggttgtggactttgtggttgtgtggtggttacggtgtatcatctaggactttaatctctgtcggtttacgacagttatttttatttttaattattattgtatt

SEQ ID NO: 341725 - DNA, 278 bp, Cannabis indica
aaaagtgtgaaagtaaaaaaaacatattttagtaaaggttaaaagacattaattaagattttttagagcaaaagaaatataataagtgtgcatttttctttataataaaataaaattttgtgagtgagtcaaagtcttaaaaaaagatataaaaatattcacttattatatttttatatatataaatataaaaaaaaattaagtgtggaaaaaaaaaaatagagaaagaaaattcgaaaagaaaaaagataaatagagagaagagaaagaaaaaaaaa

SEQ ID NO: 341726 - DNA, 504 bp, Cannabis indica
gttttgtctagaaatgaaatatatagaaaagtataataaaatcaaaacttcacatcatagcgttggtgtgttcttcattttgtcttcactaatacaaatatgctatataaatcttaatttcttactaatcaataaagaaggaatctctcaaaataacaacatacagtaaaaattacaaagttaagaaaaagtgcatcatcaataaactaaaactatatatatttgatcatcttacttcaatggaaacaggctatactttaagtcattgtttccgggttatgggcacagtgtaatggttagtattatttagtaaactaattactaattagactgattgataaaagaggattctcttctcttctggcgtgggtgaggtcgttcgtgagtgagatctagtggtgtggtgtggaatggaggcacggcagtggctggctggctgctatgttttttagggttatgaaatatgaagtgtaaatgattttttactttttagggttttttatt

SEQ ID NO: 341727 - DNA, 408 bp, Cannabis indica
ataaaaaccaggctgcctatttagaaagctcctataaaaaccagactgcctattattttgttggcatctttaccaaaatcatatgagacattagtgactatacttttggttggaaagactactttaactgtagatgaggtatcaactgctcttttaaggacagatagtatcaagcaaccaagtggtatatatgtctcatactgatcaagctcttgtgacaaggtcagaatcaagtcgtggtataggagtacatcgagaggaagatataatgacagaaaagacaatcgcactcattcacgcttttcgagggaagtggagtgctactattgtcacaaaaaggacaaattaggcggaattgtgaagagttgaccaagcatcttgaagcaatgaggaatcaagaatgcaaag

SEQ ID NO: 341728 - DNA, 1647 bp, Cannabis indica
tgttctggacttaaaaagaattcatacattatatatgtaatcatgaaataaatcatgtgaaccatgcaacataaaatgttatttctgatctttattaataagtaaatatgattatattgaaatgagttttatttagggcataaaacccaacagtaagaacaatctatttaatattataatcaaatacattaatattataatcaaaatgatagataaattgtgattcataatatctaataaattttcttcaccatattaagcatcattatcaagcaattattatcgataggataattaattacttataaggatcttaatgtggttttggtggaagatacaatatttaaataaataattattcaaatgttcctcattaccaaatattttttcatgcttaatcttatgataggtaagaaaaataagcactaaaaaaatcacaaaaaaattgtgccataatactaaaattaataaccaaaatatgaataaaattcatgaattagtatcgtgcatacaaataaatgatagagaactaaaaataaaataaaatggtaaaaaagagcccaaaattgagctatgcacgcgcccccgcgcgcttgttttttttaactattcgtatgagatgtcgttttggaaaaatgacatgttgtttggtggaagaacgccatgcaatagagtcgtaaatgacccgtcgttcgtgctgcaaggggggttgaaccaagtgcgaaccacatatcgtttttgcccaacaaaggcaaaacaacatgtcatttttttccgtccctgtcacccaaaaaaattccccacgagtccgcgagtctacaactcggatcgacgcgacccgtttcgtgacccaatcagatagaccatctccaaccataaaatctaatgcgtttgagggattttattccattttcaaccctctatcactatccaaaccaatacccatttaattcaaaaaaatatatatataaaataaaagtcaaagtactataaacccgaaatgagtttgcctccattaataaactcaacaaaaaacttggattctcacaataaaactatacaataatcatccgaagaacaagataaactaattctaaaacatttaatctcatattacccattaacatattaattcgaaaaaaattagatttaaaatgggttaagttcaaatattatgaagctctaaaatcaaatatattagctctgataccaattgttaaatatcacagattatgagcattaaatcacatatattatacactattcatcattactcataattataaatccaagatcaatattttatttagagcatccaaaaagataaacacacacatacctcatattgatgatccatctatgtgagccattttgattctaagaatctcaaataatgatcaacataaacacaagattagagtaatattagagagaagcacaatgtgtagctatcccctcttttcttcttattaccattaacccaaaccttattcacttaagacatatatacatatatatgtcacactcttctaaccctaaggggttatacactaattgggcttaagtggtttaataatggtatactataattttatgagtcaattatagtttttaaaggtgctctcatgtgcctctaacataatatat

SEQ ID NO: 341729 - DNA, 919 bp, Cannabis indica
aggaagatgaaatggccatgaaaccaagaccacttgcaaagacagtaaacctggtttagatgagaatgtctagattgaggtggagcatgttgctcctacaacaacaactaatgttgttccaaatggaactgaggcaacagaaagggaagacaatgaagatcagtaggaactcatcagctatcaattacctagagatagaaagagaagacagagaaaagcccctgatcattttgttatgctgaattcattgcatatgcacttatgattgcataagaggttgacagttcaaaacccactagctttgaagaagctatgagaagtaaagatgttgcagcatggctgcaagccatccaagaagagatgcagtctcttaggaagaatagaacctagattgttgtgaagaaactagagttctacaagctggtagaatgtaaatggcttttcaagcataaagaaggtgcagggaatgagcctaccagattcaaggcaaggttagttgccaaggggttcactcagaaagaaggcatcgattacaatgagattttctctccagtggtgaagcaagctttaatcagagccatgatggcaaaggcagtaagcatggacctagagattgaacagatggatgtaagaatatctttcttgcatggggaattggaagaggaaatctatatgcaacaacctgagagctttgacaatgggaatccatatgaggtatgcctactcaaaaagtctctttatggcctcaagcagccacctaagcaatggaatttaaggtttgacacttacatgctgaatattggattcactaaaagtaagtatgattcatgtgggtatttcaataatcaaacctatttgctactctatgttgatgatataatgatctttagtaaagaaaagtcagagattgacaagctga

SEQ ID NO: 341730 - DNA, 916 bp, Cannabis indica
tatgtatgaggctactttttaggtaaaaaactgggtaatttcataaaaaatgacctgtaaattggcataaccgcatactgtataagaaatacttgaataggcactgtttcatgctttgaatactcgcgggtattcggacgaacacttcgaatactcgcatattgacaaaatttacttacttctgattattggctagatcttttaggattttatatgctgtgaattaagtcgcgagagcattaaccgagtttccaaatggtgggtgtgtcacagtattctaatggtcatatacgcggttatatgccccttgagatactgtgatacacccagccatttgcgacatgcgttaatactcaaacgagcgtactccttggctggtagatattctcggaacggtgggagtacctcagtaacttcagggtcatgcttgagaacgcatgccccttgagtcactgagtttctcccagccgtttctggaggtatatcgcttggcccaggatgcgtgacttattcgcatttttagtattatctctactcgcatattgatggggtggtcagcattcgcaaggatgctgaccattctatcaagtgcgactttatagttttaatgcgggtgagatcacttattttgctttcacacattcaccacgctgaaaagatcttctatctttcagatgagcgacctgtcggatagtcaactgctcggctcgggaggccacgcattcgatggtgacgaggaccaggaggaagatagttttctcccagcttcgatttcagaagaggagatcgcacctactgtaggtatagagctaggtccgatgtcttctgcggacatcgagagaatggtgcaggagctcgctgaacctgggaccatcgatattcgagacagcgagtctacggtgtcagcccgcgacta

SEQ ID NO: 341731 - DNA, 826 bp, Cannabis indica
atttgtgataatgttgattaattccatgatctgatcttcaattaacatttacattttataatcaaatactacaatgctattgctagctattttctcttcatataatcaaagttctcttattttcatagccgttgctctgtttcacattcaaacacgtgaatgcacatgtaatgaggtagtattttatttctttattttgaatttatgtaaaccatgcaccactagcacagtctaccacaattaaattaacatataattatcattattttacactgctatccataaaccaaaacaaactcataataaacaatgttcaatggaccacatgatctgcttttagagcagtatgttacaatgtactacactaactgagcactgtatactcttccctgcaattcttttgtgagtttctgaagatctgatatggctgaattggttggaggagctcttctctctgctttgcttaatccattggtggaaaagttagcttgatgaaggacttcttcaaaggaaaagaagccattctcaagcttctcaaggagttcaaaactttgctgtcgtcggctgatctgctgctcattgatgccgaggagaagctcatcaaagaccatagagtgagaaaatggcttgatgatctcaaggacgccgtttatgacgcagacgacttggtttacaagattgacactgaagcatggcgaaaccaactggaactggaagttggtggtcctcatgaatctcataccagctgcttttgtagtagtaaggtactaataaatccacccatagtttatataatatgttatgtatattttctcaaagaaattgt

SEQ ID NO: 341732 - DNA, 849 bp, Cannabis indica
ctttacatcgcaggaaagttattgactcggccgcatgttccatgtgctctaacgcttgggaatccataggccacatgctttattcacttgcccacatgccaaatcgacatggaaaaactcgggtttctcaatagatttcaggaaagcacaagtcatgcaagatggtgattttagttttcacctctccactgtacactcacaacatgattttgagcttattgtttgcaccatgtgggcgatatggtcgcatcgaaataaagtgctacatggaggagtgtttaaagaagggaagattacaacaagatttgcccaagactacctaggaaagtatcatgcttctacaagacaagcccttacaacccctgctgtaactagtgtttcacctactgctgtacacaccagtaaaaaactagcaagcaaggacattccatggcagccccctgatgcatcaggcttgaagctcaatgttgatgcagccatcaatgctacctcaaaaactttgggagtaggtgccattgtacaagatcataatggccttgtcgttgctgccatctcaaagcctgtccaagggtgcttccgttccgatgaaatggaagttaaagcctgtccaagggtgcttcggttccgatgaaatggaagttaaagcactatttcatagtctcaattgggtactccagcagcagctacaaatcacacatattgagacggatgcgctaagagtttttaatgctttaattcatacatctacagatttatcgtgtttttcagatttaatcatagatgttcgttgtcttttgtccttttttcctgaagctactatttctcatgtgatgagaaatgctaatcatg

SEQ ID NO: 341733 - DNA, 617 bp, Cannabis indica
agtaaggaaaaaacttgttaaaatttaccctaaacagaagaacattttaaatgcttgaattatggggtcattttaaccaaatttaacgttaaaccaattttcgtattcacgtctatatagtataaatttcttgtgactagtggagaaaaatattctaagatgggtgcgagacacatgtcacaaagggtgagattgttagtgcttgaaaattactttttctctcaatgtgtccgatgggaaagtgatgcacaacattcttggctttgtacctattaaatttcatgattttttgagatatgtagggtgagattttaagagaacactaaagactataagagtacagaaaaacttgtttaaatttaccctggacagaagaatattttcaatttctgaattagggggccattttaacaaaatttaacgcgaaatcaatcttcatattcacgttttagtagtacgaattcatcgtgactagtggaaaaaaatattctgagatggatctagtccacatttcacaaagaagtaacactatcagaaatgcgagatttttactattttaattaaaatgattgttagtgcttgaaaaatatttttttctctcaatgtgtccaatagaa

SEQ ID NO: 341734 - DNA, 632 bp, Cannabis indica
aatatgagtgattttagaccaatgatttgtgtaatgtcctacataaaattatctcaatagttctcgtctgccgtttacaactatggctggatgatatatacactcatctcaaagcgattttatcagtgggcaacgtattactgataatggtatggttgcatatgagttattgcataatttactggatgttaattctgggaagaggttttactcggtgatgaagttggatatgagcaaagcgtatgatagagttgagtggaattttttggagtcaataatgttgaaacttggctttgtgggttcatgggttagttttcttataaagtgtgttcgtggtagactactcttttaatataaatggaaatgttaaaggtaaagttattcctactagaggattacatcaaggcgatcctctttcaacttacctatttcttttttgtgcggaagacttttcttctcttctatgtcaggcaaaaaatactgacaacatttttggctataaagttgcttgaactactccatcaatctcccatctattctttgcaaatgacaacattctcttttgtcatgcaacctttcgagctttttattctttgctagacgtctttatttttattctttgctagacgtct

SEQ ID NO: 341735 - DNA, 700 bp, Cannabis indica
actgttggttctgtgtctggttctgatttcgttgctgatagaacccactgttccttcggttacctccttggttgaacccatagttgttgttgttgttctgagaatagtttccaatggcttttgcttgatccattggcaaatcatccacatctgcctgacactcagaaaagtgatggggacctccacatatctcacaaaccacttgagcttgtttggcttgcactgcgatcagctttgttagggcctcaacctgagctgtcagctttgtaatggcatccacctctagcacaccagctaccttcttagtttgactcctttcagttggccactgctgattgtttagagccatctcctccaacagatcataagcctcatttgcactctttctcataaatgctccaccagctgctgcatctataagagttctagtgttaccaaccaacccgttgtaaaagttgtgaaccagcatccacttctctataccatgatgagggcactttctgatcagatccttaaacctctcccaagactcatggagagattcattatcttgttgacagaagttgttgatttctcctcgcagcttggcagactttgctggaggaaagaactttgacaaaaatttcgttgccaaatcattccaggtggcaatagagttgggtggcagggaattcaaccagctcttggctcgttctctgag

SEQ ID NO: 341736 - DNA, 1132 bp, Cannabis indica
aaattctgaatgagtctcatacaactccttatcatgttcatatggggacaacaaagatgtatcaagatcttaaggccatgttctggtcacttggaatgaacaacactaacgtagaatatgttgctaagtgtttaacttgtcaacaagttaaagctgaacaccaaaggcctgctggtttgttgcagccattaaacctcccaaaatggaaataggaagacattgccatggacttcgtggttgaaatgcctaggactacgggacagtacgactctgtgtgggttatagttgaaaggtttacaaagtcagcgcactttttgcctgtacggacaaaattttctattgatttgtatgcagagctatatgttagagaaatagtttgtcttcatggtgtcccaaagtccattatttctgatagggatccaaagttcgcatcgaggttctggtaaagcttacatcaagccatgggtactcaactgaaattcagcacaacattccagcctcagacagatggacagtccgaaagaaccattcagatcttagaggacatgctatgggcatgtgtgttagactttaaagggtcatgggtaaagtacctttccctgatcgagttctcgtacaacaataactatcaggcaacaatcgggatggctccttatgaattactatatggaagaaaatatagatcacctattcactgagacgaagtaggtgagagaaagttcttgggtcccaaagctattcagagaacaagtgagtcagttgataaaatcagaacacaaatgctcgctgctcagagcagacagaagatgtgagagcaacacgtaggtctatgctaaatagatagtatatgcgatggcatcaatatttatttacattgagaatatattgtatattattgtttatactatcttgctgggctgggatcacaggtgctctactgtgaagaaaagggtaaatcagtctgtgatcagccatgagtttgagggcttagcggtagattgcacatatttaggccacactagaccatgcaggtcgggtctaccggctgctgcattttgtattctcaattttgtcacttaggtcgacatgtaaaaatttacttgtaatattttgtgaaaatttttatgggatc

SEQ ID NO: 341737 - DNA, 553 bp, Cannabis indica
aaatatctggttagatttttaaatttttaaaaaaaagaataaaataatcaaaattttaaaaataagataaccaattaaggaaaatatcacattttatccattttcaagttcaaaaactactaatatctaaaactaattaaaataaaattaattaattttattctgataattagaattgaaatttgaaaataaaaatagtagatacaaaattacacaaaaaatttgaaattaatttcataaaaaatcatgaaaaaatgaaaaaaaaaaaaaaaacaaaaatttttttagtacattgagtgcggatgggtatgcaatgcataccattcgtgcgcacaagcataggggggctgggcctcgaaaccttggccaaggaggctgcttgcagcttgttacacacgcggacagagcttcagacacgaccctgaccgtgttccttcggacaaggtgttgttcgaatgcacgtgctgaccgagtgacactcggttccgcgcgcgcacgtgggtgtcaccacccctaagatatttttcgatttttcaaaaaatcatactaattc

SEQ ID NO: 341738 - DNA, 481 bp, Cannabis indica
ataaaatatagttcattttattaaaagtctactttaatggtatgctaaattataatgcgaaaatcttacctaattaaaagtgatccaaatttgtatcacaatataacttgatacaaaatttaatttacaataaatgttatacttttatatttattattatgctacttttaatattttattattaaattttaactaacacactcttttgcattaaataacttgcattattattattattattattattttattattaaattttatatttaactttacattattattattttatattttttaataaattattaagtaagtattaaataacattaatttatgggaaattaccccatatactatttttttcttttttcttttttaaatttacggtttgggtttctaaagtggttgcagcgctagttgcaataagagtttctgtacgattttttgttgcaatttaagttgcagtactagttgcaat

SEQ ID NO: 341739 - DNA, 927 bp, Cannabis indica
acaaagcagcttacgaaggtacagtgggcccagtgccgagcccagacaactggccaaacaaaggaagtaatcctatactacctccacatgaaaacaacctccccggaaggccaaagaagaaaagaaacttgagtgctaatgagccaccccctgctaatgcaatcaagcttagtaaaaaaggacagcttaatcattgtggtaattgtggacaagttggacacagtagaaggacatgcaagaatgaagccgaacatacggtatttataatctttgttctaagtgtttttgataatttaataatgtaaaatgatattaaactataagttatatttgtataggttgagaagaaaaagggagggcgcccgcctgtcaaaaacccaactaaagaaacaatcaacaggaagaaaagaaaagaaagacaaaaagctagggaaagtgctgctcaaggacctcaactgtagcttcttaaaagattatgaattgtgcaaacttatttgatgtataaccctaaattatgtagcattttgatcgtttggggtagttttttgtaaagttttcaaggagattatgatagtcataacatactatgagacacaagttattttttgtaaagcttttcaggagctaatacgctgatatgtgttagatcaagatgtatatccctgaatcatgtaatattttgatcattcggggtagttttttgtgtaacattcaaggagattaagatagtcaacatgttgcttttttgtaaaacttttcaggacctaatatgtattagaataattatactttggcaatatgtttttccaagacaggttacaagttaattacactttacatgttgttctaatatgtattagaatcatgatgtaaaatttatttatcttatgatggatgatatgatatagaaaataaaacagataattt

SEQ ID NO: 341740 - DNA, 933 bp, Cannabis indica
ataagtggtgagaatttttttttagaataggttaaggctcaactttgggtatactagggtaaaatgttcgggtaggctcaaaaggctcaatcgatccaaagaaaacttgcctaaatcattttccaaacaaaaatcatcaaggatttcgcttcaagaaagtatgtcaaacaaattctatttcatgtacagtcaatcattccacaaaccaaatagaacagaagtgatatgcgtcaaaaacaaatgttttatatctacatgaacaacctcctaacacacatccaccttaattcaaacagttgcaaatcaagcacacagttatgttttaatccattgcacaagtgaataacagtggttcaatcaatcttccaacttagctatcaacacatgacactaaaaaaaactaattaacgaaaacaaataaactgaaaaaattaagtctctccccccaaactaaagatgcacattgtccccaatgtgtgaaaataaaccaggatgagagaaacttacctgagccccttagaaggggtttggcggcggtggctgatcataggggttgaagcggggtggcatggcaaagtaattaggatcgtccacaccgacattcatcctcgtgacaagtgtgttcaattgggccacctgctgctcatcgaaaacactccgttgggccatgtaattctgcatgtgcatgttttgctgaatcagataattcagctgatcgtgagtgtactgcatggctgggtcaagaggcccagcaagacgtggtggttcaatgtcttcatgctcctcttgttctcttgcaggaggatctctctgagctggcggttgaccatgagggtgaggaggtttgagtcgaataacagtggataagttaatactgcgttgtggcgctaccttggtatcataagagtactgtggtactccatgtttctcaca

SEQ ID NO: 341741 - DNA, 972 bp, Cannabis indica
ctttcttcatgggcccgagcttcctgtacggaattaacgactgagttgccatatacacactctctatatcttcagttagaatagtgaatgcagtgtgtttggcatgatcacggggagtctgtccggatttatcggtgaactttcccctcttcccgtttccttgcttgtggttgttgcttgaacgcttgccacttgaattgttagaatagttgggaagttgggctgatgttccagtggaaggagccttcgttttgcccagctttttcttaccttctgctcgttgaatggcttcttcgagcttgatgaagccttcggctcggtcaaggaaatcactcattgagtctactggcctgttcttcttatatctttccatagttccccaaggacttcaatggccccccagtatcgcggataactttccatcctcagttacccgtgaaactttggtcgcttccgtcatgaatctgctgatgtacgcctggagtggctcgcctagtcgttgctttactttgactaaatctctcagatgcaatgggagcagacgtgaagaagagaatttcggatggaattcagaagaaaaggtttttcgtgaactaaactttccaggagccaacttgaaataccatttctgtgcggcttccgatagagtggcggggaagattcttcagcatacgtccccccgtactccttgtaaatccattttcctctcaaagtacttgagatgggaaagaggatcttctcttccagtatacatcttccacgttggcatttttaacttgtgaggcagtggcaggagattgatctctggtgagaagggagttctgcgagcacggtctaactcaagattgttacgctgtttggccatgccatgaaacatatttttcaactcgtcaagctgggcctgtacggctgggctgacctgctcgacattctggtcgacttggaatacgtcaacgtctttctgagcgggga

SEQ ID NO: 341742 - DNA, 586 bp, Cannabis indica
accgagccttgtatctctcaattaaaccatcaaaacaagtttttaccttgtagagccatttgcacaaaatgagtttcacttccttcggctttggcaccaactcccaagtctgattctttgctagcacccttatttcttctttcatagctcctagccacttgaagtttttgtatgcctcgtcataggactctagctctctaaacttttcttctttagctacagtagcattagcatatttcagatttggcttttgcgctcttgttgatctctgaagttctggttgaaaattatcatgtccttctcttttatgcacccatgtttgccatggattatgaggtgtctcagccttggtgttttcttcttcatctgtatcttgagttagaggtaactcaacaattttctcccccattttcttctgcagttcgtcttctatttctttagaatctggtaatgcttccttttgtgatgaccaccatgatgaatgcctcatcaaaagaccaaattccttgaatgtataacaacactttccagttgtagggtcgcaacatctccaccctttccgttggctgtcgtatcccacaaagat

SEQ ID NO: 341743 - DNA, 838 bp, Cannabis indica
gacattggatgatattggattggattggatcggttatctattggatcggatgtctcatccaatatccgatccgatccaattggatttttaaaatttgcatccgatccaatccaattatatgattggatatccgattctattgaatcggttgggattggatcggtcggttggaattggattggatgactttctgcacacccctaaattacacactacaaaaaaaaaattatttttagtcagaaaaaaacttatcactaaaagtaaaaaaagttgtgattaattataaattatcattcttatgttgtgactaaaaagttcgtggctaaatgtattagtcacaaaattttactttgttatgactaaatgtacttttaattacaatacttgtgactaaaattaaattagtgacaatttgtaaatctaaatactatgttttagtcacaaataattttttattgtgattaaaagtcatatttaataaaaaaaaaaaattatgataaaaggttgtcactatttttcgttgtgatatatatatacatatatacgaaagaagtttaaatgtcaaatatgtagcattatggttatatttttttaaccattagattattatttaattatgataattaatttaaaaattaaataaaataaataataaatatatattatatataaattattttgtaatttattactgaacaaagatattttaataatgttattttttgctattaaattattaaaatatttataacaaaattttttataatttaaaattataacacataatttttcaatttaaaattttgttacacatataatcttataatttaaaattatt

SEQ ID NO: 341744 - DNA, 347 bp, Cannabis indica
tacttggtaaattctaggtctgcttattggaagctcgattatataggctcatggtccccatactagttgagacaaaatgcttgtaagactcagctaattgattttaattaatcaattataattctaaaattagactatatctagtttatgaattttcactaagcaagggcttaagtgaagaaagagcatctagggttaatttgttaattaagagactttgataagtctaattaataaatatattaaatgacaatactatttaataattaatttttagttattaaagcccctatgcatggcttttaccatttattttttcataattttaatgccatacaattctaacc

SEQ ID NO: 341745 - DNA, 511 bp, Cannabis indica
atagacctttttgtattttttttttagcttactatatctatcattaacattcaacaatatctatcctacgtattacatcaatattattctaaaatatctatcctaaggattgtcaaaatatatatataaaaaatattcttataaaattaggttaaagaaagcataccttataccaaaaatcatgtactttacttccgataaagttacttccgataaaatcctaacaaccaagtttaagagaaacgaaaaattaaataattttatcctaattctacaaaaatttcggcaacatcatgactataattgagcgtttttacaaaattcaaacatattaatagcaacaaaatacaattcaaaacaatataaaataatcacaacaacatttagcaatataaaaatttaccacccatccgactgcagtacatatattcacaaaacttaatttactatcgataaatatttaagatattcaaactcatctaacagaacctacttcactacggatgaatat

SEQ ID NO: 341746 - DNA, 790 bp, Cannabis indica
caatactaaaaagatttttaataatgtcaaataagtgatgtattattatattttatcacatttcctagaataagtgctattcaaactgctataattttttttaaaacaaatttaacataattatgtcaaacttaatacaaaatataaggagtcgaattttacagacatttaataaaataatgtgttatttacactagtggcgcgtttattaaactgtaattggaatcagaataatcaatgggagaaatgtatcggtttaaaataaaaaataatcgaaaacaataatttattatgatgtttactaaactgtccggaaagaaaaccagaatcatattattttgtttacataattaggaaaggtaatcggaatgctttaatttgacaaaattgccattattaaaacatgtaattattttttgtttatagatttttaatgggtatatttgtcttttttatttttaattaataaaattaaaattataataaattaagtaaggaaaaggaaaggcattccctataaaaatggggggagaacctttccctttgttttctccctaatttgtgtgggtcccactagtttccccctttccaaaatttagtaaacaattgtatgggaatcaataccataccattcattcctattctctttaagtaaacatgccatagatgttaacttttggttaaactttatatttttaagaaagaatttttaaatttatacttgttgaccgaggttttcggcaaacaataaaatattataaaattactgagctgtaagaaagtgagagaa

SEQ ID NO: 341747 - DNA, 681 bp, Cannabis indica
taggatgttaatgaaacatacatgctagtaaatctagatcctggtaaaatatttccaatagatagggctagatttctgagtcccgaggcataagagcgctttctacaactcaaggataggccattcatagaagataggggaatggaaattggtgaccttagacaccctagaatgatcattccttctgtatttgagcccattagagagcaagtaatcaataggggttggacaaaatttgtggatattattgaacgaaataaccaaactctagctttagaattctttgcccattggccaaaaagagaggatgcaaaagtaaaagttaggggggttaaagtgtcggtttccacagcagctatccatgccgtatatgacttaccaaccttcacttgggaagaacaaccattgaaaaagcttattcaagaaaagaggttgaattatgatgaaatagctgaaactttaggttgcccaagcctcaggtttcatgaatacgatggagaaccttactagttgtttaggtgtgaattaaacccggtggccaaggcatggctatatttcgtaactgctaggttggtacccaataaccactattctgatgctcaaatagacaggttgaaattcgtctatgccatcatgaagggcttcaacctaaatgtgggggatataattagacagagtttt

SEQ ID NO: 341748 - DNA, 536 bp, Cannabis indica
tacattggatcgggtaaaccctaagtcaagcatcccttgaagctgtaactttagttccttaagttatgctggagccatcctatatggagcttttgaaacaggttcaactccaggtgccaaataaattacgaaatctatttctcattgtggcggtaatcctggcaactccttgggaaatacatcgagaaattctctaaaaactctgactaccttaggcccaaatgtttcaggtctgctggagtcaatcacaattgctaaaaatcctacacatccattgtgcagtaaatctctagccctagacactgaaataatctggatcttagacccctaaactgatccgacataaacgaatggatcctcaccctctggttggaaagttaccatttttcgcttgcaatctatgctggccgatgcttggacagaaaatccatcccaagtataatgtcaaactctgttaattccaactctataaggtcagcactcaattccctatcttcgatcctaagtggcatagacctaatgtgcctattggagat

SEQ ID NO: 341749 - DNA, 794 bp, Cannabis indica
aaaaactttagagtctgaggtaaataaaaaggattaaaagaaactgtcaagaaagacttacccttataaattccctcaagactcctcccatcaacaactccagagaagattcgttgtcagcaccagccagctgctcactcacttcaggaacccaccggttcatgtaatgggcgagcatctccttgccttttttcgcctctggatgcactggcaaaggttgtgtaggagcccgcatctactcaaacccgctcttaggcagctcagatctgcccttcgactgctcaggcctgtccgagctgcctcgcaaagaatctttgtacttagcaactttcagagtagaagggtctgtgacagctagctcctcagaaaggtcaataacctccccgaccggtgccttttcctttgaaggggttgtctcaccgcccctagatttcttggtcgggggagatgagcttgagtttccaccaactctcttcttcagagcatggagcatcttctgagacatgtctgtatggaacaaaaagaacatggttagaggaaaaaggcattagaagcataaagcatgataatcaggaagtttaaaaacatgacagaatagcctgcgagaagattgtccgagcaagactcgaaagtccatcatcacttgacaagtctcttatctccgccataatagttttcccttttcccagtacgggagagggtgatcgagccggtaaactgggctccctaatgcgaataggatgttaaatgggcttgggctgcgccggaagtttcttcctccttttgagcagagt

SEQ ID NO: 341750 - DNA, 596 bp, Cannabis indica
ttcgaaattcgaaattagggttcctaaaaaaaaacgaaattagggtttgggtttagggttgtttttcggaaaccctatttggagtgaaaaatttttctcaccgcccacataggaggactgccaagccgccgcactgcaaaacccaaaattccaacgtccaaattcaccacgcgtggccccacgcgccaccgtttgccgctgtccagaatcccacgcgccggcgcgtgacggagcgtctggcatcgtctccggtgacggtcgacgcccgtcacactcctgcccctttctcgtcctccttgcatcggtttccggcgattcttggccgtttgtggtttgatacttttgccttctttgtgtttgggtatctattctttgagtttgctctcttccttttccctttcaattgtttttttggtttcgagattatggcaaagataaaatcagattcgaaatcaatcgttgtttctgatgtggttcccgtgatgtctaaaatcacggaccataaattgattggtttgaattatttggaatggagtaagactattcgattgtatctgaggagtattgacaaagatgatcacttgactgatgatcct

SEQ ID NO: 341751 - DNA, 544 bp, Cannabis indica
tctttcactgcagttgcttgaaacttgggaaaatctgcttccaggagagttaaagcttaaagttggcaatggcgaattagtatcggtcaaagctagaggaaaagcccgcatcaagtttcaacaaagatttttaattttagaaaatgttttatttattccaaactttagtagaaacttgattagtgtctcatgtttgcaaacacaatcttatatattgaatttttcgagtacaaattgttcaatttctcgtaatggatttcaaatatgtgttgctataatggaacaagggctttatgttttaagaccgaatactcaaatctcactaaatagtgaacttttcaatgtagctagacctagaaacctcaaaagaaaagagattgataatgatgatcaaacttatctatggcatttacgtttaggtcatataggctttgatagactcaataggctaaccaaagacggtccattgaaaaatgtcatcttaggtgaactgccagaatgcgactcctgcctagaaggaaaaatgactaaatgttctttctct

SEQ ID NO: 341752 - DNA, 843 bp, Cannabis indica
ttttttttttttttttgtatatagctcctccttttgctaacttttgaagttgcaaataaaattataatttaccctgaccacggggactatatgtaatagtacatagggtattttaccattttttgctgaagatttattttgatagactttttaggggctgattgcgtcattgaaacatctagttccaacggccagtgtttcgatctttctcactagtctcaatgatttctcaatcgacctagggatggctccttgattctaccctttcattcccgaagttgtgatgcttcttcccatcattcaaacttttacttggaaaaaatcactcgcttagagttaacccagagatgatttcctttcacaaaaaggagtcttcgcgatttcacgcatcttctttaggctttagtttttttacaaggctgattctgggagcttgcccatgactgctttaaactcctaagcatttttcttgtcttagtctatctcagcctaatgttttagccaaccatgcaactcgatcgactaaactcataggaaattctcagagatttgtaagaaggaatttaggcgtatttttctttttttcaagaattttggccaaatgcggatcctatctctggattcacgcctacatttagcttttgaggaaagaattcaagcacgtttccctcggaaagacttagttgaaaatgtttcctgcttttggttgcatgtgaccaattttggcaaacggacaaagaggttacagctaacatcaatcgggcataccttgtatcatacccccaaaatgagctgggaattttggtcttaaaatctcaatcatttgcttgagtcaatctgtgt

SEQ ID NO: 341753 - DNA, 546 bp, Cannabis indica
aaaaaagagaaatggggtctgctcgtcgaaggggcatatatgaacacttttaccggcgcattgaattgcgccggtaaaagtggtcatataaccctaaacccaaacgcaccgtttcgttaatgcgccggtaaaagtaatcccacctaccaccactttccacgcgggatttttttcctccaaaatttcacgtgggcagtcaagattcccaccaaaatttgctaacttttaccggcgcaattttgcgccggcaaaagccttacagaagtggacatgtgttcgcgtcatttggcgtttcattgctgatctttttccggcgcatgtcatttgcgccggtaaaagttattgctgatccaatatgaagttcagcatttcatttatgctgataacttttgccggcgcaattgaccaattgcgccggtttaactaggctttcttgtagtgtgcgccttggccatgagtctcaacacgagatgacacgggtagtcattcgtgggctagtttgcatacgcgcatgggacggatgcaccatgctagaaagggacagag

SEQ ID NO: 341754 - DNA, 1086 bp, Cannabis indica
agagatgctctgaccttgtggatagttgttttaatgtgaaaaatgagtcgagctctccttttataggtgaagggggcccacaataataagaaaaataaaattagatatttttgaacgtagatgatgatctaacattaaatattagctctaggtcatgatggctattttttggagcttggcaggacccactgcaggttacacacaacttatttttgtaacactcttggggtgaaatttgatgttgatagcttcagaattacgatttacgtgtgagacattacttgataaagcattgaattagctttgaaattcaagttgaattgcatcaatcaaatcaatattgggtgagttatgattgttttactgaaggtagttcatgacccaacgcccatgttgacatccaacgcctaggatgacatcccaccacccaggttgacatatgacgtcaatctagacgttgggtaggtgaaaaaacatccaagggatgtactttaatatgcctaagtgatattttgatattacttagtttgtttctctgttttggcgaagctagtcaccagttctcgaacatgttacagttctatagaaatgagagacttgaaactcttcatttttgagtgagtttcctatgatggaaatgagaaatacaaagttgtgaatttgacttctccaactttatggatctttgttattgtgaaaaactagacgaatggtcgaaagggaataagaatcgaataagcagaacccaacgcactacgccgtttgtcaacttgggcactgggtaccccattcacaagctcctaggatctcgttttgatactgctaaggtttttgagcatgaggatgaggtctcctaccccatttttgaccattctggattcaatagttgaatcagagttggtatttgagcaattgaacgtagtgtccaagttgattgtcaacctaggtgtttgtgacagtcagtagtcccgtgatccgtaaggggaaacaacgggtaagctgtgcaatcccacaccgcctggggaaggtcaagtgggatgattctgagactgtgtaggtatgggactacacagttgaagagggctt

SEQ ID NO: 341755 - DNA, 529 bp, Cannabis indica
gggaatccgataatgattgataaacacactaaggatcgaacccgagttcaattcgctcgagtccttgtggaaatggaaattactgataatcctgatcgaactttttggtttgttaatgaatatgggcagttggttgagcaggaaatagagtatgaatggttgccggtgaagtgcaaacattgtggtggttttgggcacattatggctgaatgtaagaaggtagaaaagccaaaagaagctctcaaagagaatgtttctcagcaacaagcagaaggtgcgactactgaagctttaacagtagttaaacctgctgctgaagaaaatttggcagcagccattgttcaggaagtctgtaatgaagatcaaagcaacaaaggtttatctgaaggacatcttaaaggggcggcagaccgtacagagaaggaaattgttgggggttggaaagctaccaaaagcagaaataccaagggctcgggctcaacaagaaaagtcttggactctaacgagaaggttcttaggaattcttttg

SEQ ID NO: 341756 - DNA, 615 bp, Cannabis indica
aaaatatccacatagcaactcacatcaaatccactaaaatcgtaattaaccatacgatatgcacgtaattttcccctagtatatataaaggagggttttgaaagaggctatgaggcatcatatataagctatctttcctattctttattttctccattttcttatttattaaattttttattaatttatttaaataaattattaaatcattcattaataggatattaatataatgtcttttcatttttgataactcacatcctaaataactacctataaataaaaaaaatatcatcaaatcattcataaatatgattaatatagtggcttttcatttttataactcacaccctaaatagttctctataaataatgaaaacaatgtcttttatgtatttcatataatttccttttgataatattatttttcttcatattcatcattctctaagggaaatttcaatttttgaccctaataaaataccccatttcaaaatatataccctccactaatttatacaaattaattccactattactcatttgtacccaaaatacccctcaaatttaattttcctattcacactctctttccgtctttccctctctctctct

SEQ ID NO: 341757 - DNA, 609 bp, Cannabis indica
acaatatattcccaatatttcacagaaaaactcaaagaaactcaacttgccattaatgatcaaagctttgagttcaaaactcaagcttgcacaaaaccaacaacacacactaaaactagctgctaggagttaaaatcaactcaaatgaaccctaaaattcgaaccctagacctacctaaatctaacagccactataattcaaaatcataagttcaaactaaactttaaagcttccaaaatatgaaactatggttctaggtttaccttcgattgatcctcttgaatcccttgctgcaaacaccaaaaatctacaacaaaacccccttgttttggcttcttcgaagagaaagagaggaaaggaaagagagggtcttttcttgattatttccaactttttctctaagtaattaagggttaagaaaaagcattttctagctgaaatctttcttgctaggtgccaaataacaaggcagccacctaatccatactttgcaaaaagactaaattgcccctttgattttaaccccgctcaatcccgaaactttattttctgtaaaatatttcccactaagaaataaggttctaaacttacccatgtgatcaaactag

SEQ ID NO: 341758 - DNA, 791 bp, Cannabis indica
ttttgtcacacaagtgatcatcgattgttactttccggtccttgatttttttggaaaaatctttttcctcagaaagttttatcgttgtatgcttcttttgctctattttttggtaattgttgtggagttttcgttttgtagactctaattttgtttcatagtcaacactttgctgttttatgcatattataattataaagtaagaacatcaatgcaataaattataagttttatgtgtttgtttactaagtgtaaatgtatatacctcttcggatttgttttgcttaggcaaataatcagaaagcttaggagtgtagagttcttgttcgtaatttttgtcactcaatctaccatcaacttcgatcatattttctttttcatcttcataatatatcttgaaatgttgatctaatacacactgattatacgctattaaatattcttcgtcaaatggaggagttggaagtcttatgatgtcattgtcatcactctcctcaattccattaaatatggaacataagttatgtatcatattttcatccatctaaaatccaaattaaattaatatattaataagcaaaacaaagaaataataattaatgataattaataaggaaaaatataaataccatttgcaaattttttaatggacgaagataaattgttactgtaggtcgaagaagagagattaagagtaagagagagtaattaattttgagtgtgaaaatgagattgaaaacgttatgtaattacttatatatatatatataaactttaaagttatactatta

SEQ ID NO: 341759 - DNA, 439 bp, Cannabis indica
attttgaatttttttcaccggcgcggaaaaagaaaaaaaattcttcgtctattctgtcccaaaaaagggggaatgactattcgcttgaaaggatttcgaaatacgcgttttacgcctttgggcacgcatcgagcctatgattatgtctcaaagaaaatctgattgttatgaaaaacgtattaaagaaattacctttggttcttcataatcgtcgttatttttaatatttttagtaatatcttgtggattattagatgtatcactagaaatattagtatttcttatgtcatgattaaaaatcactacacatttgcattttcttgaatgaatttcaggagtttttcttaacatttcttcaattgggcagtcggcgtgttcaaaactattaattaatttgtatgaccaacaaggaacttttttgcgtattctttagttccaa

SEQ ID NO: 341760 - DNA, 900 bp, Cannabis indica
agaccgttcctattagggtaataaccctaatcccgattactaaacactcatgcatatcattctcaatataagcgccactgcgcatactctacgtgctaatcactgtcttacctgttgtccagcaatagatagagatttcgaatccccgggtgctcctgatcaggtgccggtaatcctagtcacacaaatctgagatatttcacacttagggttaacccctgattccatactcataaaattcaatcatggcatttaaaattcagataatcatacagagctcggaacaagctttccaacgatataaagaactcccaaatcgaagttcggaatcaaaagttacgcattttcgaaattttaactcgaaactgcccaaaatcacgagggcgggccgcagcatgcccaaaccatgtcgcggcacctgggacaaaacccaggttccaccaacaagggcgggccgcggcatgctccagagcatgtcgcggcatctgggtgcagaacctagaaaccagcaagcttttccacgaattttcagcaagaacttcaatctttttacaccaaatttacaaccaaactcacaagataacaaataggttcactagaaaataatagatgctcaactaacatatttcatgcatcaaaatcccataataaaaccaagaattcagattgtacaatcactcaaaaatcatgctcaaaatcacaacctcaagctctcaaacttgagcttaacttcaacctataaaatccagcagcataacacaactttaacatgaaatttccaacctagaaatatcataaaatctcagcccaactcaacaataaagcatacaacaacacaaactcttaatttcaacaaattaacaccaatccacttaacatgcaacaaagaacactcaaagc

SEQ ID NO: 341761 - DNA, 625 bp, Cannabis indica
atattcctgtttttttccctataaaatataatcgattcaatctatacttttacagatttgattggatttgagttattatgtagattagaattagatttgatccaaaatataaaatccacacttagtgcagatgcaatacactatgagtaaaataatacaaattggattagatcaacacccctaatttcatcaattttactttaatgattacaaaactaaaaaaaaaatatgaattatcttgaaaaagaaaatattattttattatattattcattaacataaaaaaatgtgaagtgtatttaatttacaatctatttatgagttaccattcattaattcactcattttactataaaattaaataaaatgtgattgaaggaggatgctattataaaagttatatttcgatgaatattatttaaacatggtatatcacaaagacattaatagtgtaaaaaaaaataaaaagtaaaaatactaattatatttttttaaaaaataaataaattttaatagggaaacttgaatttataggctacatttggtgtatattaaatttttgaacacaagtttactaaaattaaaaaaaaaaaaaaaataggcacactttatatttatacccatt

SEQ ID NO: 341762 - DNA, 516 bp, Cannabis indica
acttcagtttcttccattccacagcaataaatggcagacttagtaggattcggttgtaacccagatgtacaagaaaagagtttcaacccttgaagcaaataatgaatgcttttgaagtctccgtggcaaaataggataacatcatcagcaaacattaagtgattcaacataagttccttgcatctatcatgaaactgaaattctggattggctccaatccggactattattcttgacaagtattccattccaagaacaaaaagtaagggagacatagggtcaccttggcgaagtcctcattttccctcaaagtaaccatgaagagttccattaaacatcaacgagaacatgggagtgcgcacacagatcataaccagcttgataaattccttcgggaattgaaatgcttgtaaggtttcttccaagaagtcccactcaagagtgtcataagctttttgtaaatctagctttatcatgtaccctgtgttgggttttatgccctaaataaaactcttt

SEQ ID NO: 341763 - DNA, 828 bp, Cannabis indica
atattttttaaaaattattattaacatatataagattcgatacttaattacactaataataatataacacctaacctaaaaagagagcattgttattaggcaccagcagtacctagcacctctagatatgtcgttttgtgactggctaacaatactccataaatgttattatattaaattatatggaacacaatatttatttggaccaatagcaatattaatacataaaaaagtgttaagcaccactaatacctattaacatttttccttaaaaaggtaataagcaccactaataaattttatatgcattaatctattcattataatgataaaaaagagagcatttttcaattataatttgtaggctagcctttaaaaagaaagtcaatagatctagttttgtttaatacatagatattaatattagaattactcaatgctaccttaaattatctgcaaggtgtaaatatttcatagtaaactttaactaaaaaagaaataactcattattatgtttagtctaaattttataattatgccaatatatattataattaaataaaacatattttttaattgataaaattattagatattaaatatcagtagtatcttttaacattttttaaaaaagatcaatattattttttacgagcagtcacatcagtttttctactctatcatttaaaatacatcacaaaactcaacttttttttatgttacctcaaattttttattacaccatacattaacttctttaaaataaattaccagaactctattttttcaaattttattttaagatattttattcatttcaaacatata

SEQ ID NO: 341764 - DNA, 546 bp, Cannabis indica
gatctcacaaactaaatatataccgtaatattttatttataataaaagataatattatttgtatttaattttatttattaattcaaaaattctattcaaattaatataatagaaggtaatgattcaatcttaccattttttaaagtatcaacattaccctcttcaagggtagttataatactaagggaataacatttcaaggctaaacactcaaaacaaacaaggtaatgtttcacattaccattcccttattcgtattaacccattctaaacaccccctaagggtaaaattgtcattctaatcacacatacaaaatacatggatttcagatttctcatttatcaaaattataccatatataaatcccaaaaatgcattttgggtcccgaacccagttcggcccaaaataccctgttgtgactatatcgcgccgagttgtcagaaaatacctgcagatagacagaacaaacatactatataaagtatagtccacaagcatgatatatcatataaattacgattttactcttctcgagtcaaaatta

SEQ ID NO: 341765 - DNA, 904 bp, Cannabis indica
actgtaattgtgaatgactatatgttctggacttaccagatttttgtatattttaaaccataaacatgaaaactacatgtaaacataaacgacttctaatctttcattgataacaagtcaaattagattgaaatgagttttatttaaggcataaaatcccaacaatttcgacaacatgtaacagtggtaacagtagtaatatttctgaccgcctcattataatacttcgcgttgaacaactcctggaactcttcttaggtaacagtagtaacatcacgagtcagggacaccatgtcccactaaaccagggaatcctcttgaaactgaaatgtggcacaggccactctgtcgttgcgagtgacgcccataaaatttagaattcttgaaataactgttagccattgctcggatttcatcacatcgggacctcccaggtgcctatttgcggaacctttcatacagtggttccatccggttcattgcagtagtcagcccggcctgcacagcaggggcaagagccacctacatttttggaacaggcattgcataagcaccttggtgcctcaggcgtctgatttgttcgtcttgctcgttgattctggcttgcattgctgtaaccatgttttccccttcctgggcagcctgcggcggtttaacatctccccaaacgcgtgccctgcctctagggcctctgcctcgaccacgtacattcaaggaaatttgaactccccgactgccactgaatctaaccattcccttttagcttctcatgttttgcctggcattcattctaatagaacagcctgcgaaaccacgaactagcctggtcagatttcaagaataatttactaaatatcgcttattttggaaattaaaacatacgtctattcaactatcaggctac

SEQ ID NO: 341766 - DNA, 519 bp, Cannabis indica
tgaattcataaaaagtattgattagccagataaaatcataagtataatttagtagtaattaatccaattccctgtggttcgacctcacttgcatgagcttactacttgactgcgtatacttgcatagtgttcataattttcgtaacatcatacgaagcatatctgagacctctcattgttgatcctaaggaattctttcatcggcctttatcttttctggaatagttataacttttgcttaaataaaatctatgtctagaattcgaaaagcttctatagattaagtcattagaaaaatgctacaacatcttactaaagcaagttgctcgcactagagtaattaaatcaccaggtacaccataacccatatgtttaggtaattttaaacctttaatactaggaacaggaagtttcgttaagtccattgaatagaatttttttcaaaagttcctttcttgtccttgtaatagaaaactttttgttactccgtatgaatggttttaaccatagttctcttgg

SEQ ID NO: 341767 - DNA, 537 bp, Cannabis indica
gggaatttttagatatttttcctgatgaacttccaagtttaccaccgtagagagaaatcgatttcattattgatttgacaccaggagcagaaccattttctaaggcaccttacagaatggctccggcagaacttaaagaattgaaaatttagcttctggggttgcttgacctagggtttacacggactagtgtgtcaccctagggagctcccatattgtttgttaagaagaaagatggatccttacgcatgtgtattgactactgggaattgaataaactgactgttaagaacaagtatcctttacctaggatcgatgatcttttttatcagcttcaggggaagacgatcttctcaaagattgatcttcgatcaggctatcattagttaagaatttgagaggaggacattccaaaggctgctttccgcactaggtatgggcactatgaatttctggttatgtcttttggactaaccaatgctcttgcaacatttatagatttgatgaatagagtattcaaggatttcctcgatatct

SEQ ID NO: 341768 - DNA, 526 bp, Cannabis indica
taaaataatttccaacagatcttgctcatagaagagttggttaagttagttattgtctaactagcttaacaactttgattcttccagccaccaaatttaggatctcaatcctaagcttataaataccacattgacttttcattttacggaaggcgattcagattgagcttaagagtaagagagagaagagattgagaggtagacagagagatactgagaaaagagagaaagattggatttgggttttgtatgaagaattttctatagatgaagaagattcttgagtaagagtgtgagagttgaaatactttgggagaactcaatagagaatttgtctcaactgtaatgtacatgttcttgctcattcaataaaggagacttcagtggtgttccagaactgaagtagagccatagatcatatcgatctatcagacttgaactagtatatatcttggtgttgatttctttattttttgtatttattgttttttattttatttttcaatactctgtttgctcctatttt

SEQ ID NO: 341769 - DNA, 642 bp, Cannabis indica
tttaaaaaaaaaaaaattatatttaaattttctacacatccaacatttaaaaaatttctaagttgtatcatatctaattagctaataaactagtaaaatacaaacttttaaaattaatattacactaaaataattattacacaattatgcaaaataaaattgacctaatttatatctatgtatatattacaacacttaaaaatgaataaacattaccctagaataactaattgtgaattcttaaaaaaaaaaatttaaaaaacttacaagaccattaataatatacactagttttatttaactattccactagtctcacatttcaatatacataaatacatatttctctactctactatcaaataccaacaaacacatatgctatttccattaccaaattatacacaaaactttttaccaaacaaattattcacaacaacatcaatatatcaatcatccaccatataaaccaactctaaaaaattatgtatactcatatttactatttaaactatcatgataactacaatatatacttagaacataaaaatcatatacttaaccattacaaattttaaagaaaatataaacttttaaaatcaacattaaaacaaagcaaactattttgacatatttaatagc

SEQ ID NO: 341770 - DNA, 983 bp, Cannabis indica
ggagtacacatcgtagaagaggcattgaataaccacttctatataatttgccttctactatggtatagcaaggcacgaaatacaagtgttgggcgcttcatttttgtttgtaggaagttgttcgttgagtagatagctaacaatgtgggtaatccatgtcggccaggcctcaaccatcacaacttcttccttttcacatatactagggtcgctcaacatttccatcggtaccaaattttaggtcatcaagttcattttgcgaggccaatttggctagtgcatcggcatttgagttgttttctcttggaatttgttcaaatttaaaataatcgaacttctccaagtttttaaaaatttctccaaacatttttccatctttaaacctttggcctgatattcacctagaatttaattcacaatcaattgtgaatcacgatagcatataagatttttgacttttaacgttttggccattctcaaaccagccaacaaagcttttttaattagcctcattgttaaaagaatcaaatttgaatcttaatgcgtagtgaaatttaaagttatctggcgagagcagtatcactcctgcacccaagcaattttcattagatgctctatccacatataatttccaagtttctgtgtttcgctggaaagtggattttcatctagaactattccttctattaggacatcagccaaagcctgacctttgatggatgctctcgggtgataggttacatcgaactgccccagttcgatagaccattttatcaaccttctagaagcatctggttttgacaaaacttgccttaatggttgatcggttaacacctttataggatgtgcttggaagtagggccttagtttgcgagatgcatggatcatgcataggggaagtttttcaagagggggatatatcgattctgcccctagtaaccttttactaacataggttgctggtgctttccctcttctcgcac

SEQ ID NO: 341771 - DNA, 541 bp, Cannabis indica
taaacaacaatcggccacttcctaaccaggttgatgaggatggtgcctatgacccaaccagatacataccaatcgtggaattagaaaattgccatcttaggcatcgattagaggaagcaaaccagggtaatgccgagttagagtgtgaaatagtcgcggtaaggccagcgcaagagaatggtaccaaaaatcaacctgaccttgagagaagagattcatgaggcaaacctcgcaactcgcaaaccaaggggtaggagacaacccagagatatactcagaactctcaggagatgcaacctgaggaaacggagaaaaatctggggatacaggctgggatatgtggaacatcggacgaaaatcgccaaccctctcttcaggttcatcataaagaaattcacacaaacccataaagggagaataagatgaatcaaaccttaagaggaagagcaaggtctgaccgcagccacgacaagagtgatctacgagagcatctgaacttgaagaagcttgaccttcgtcaacgactcggtccaaagcaaaa

SEQ ID NO: 341772 - DNA, 647 bp, Cannabis indica
agtcttttactaatgtaatagaccagatgttgtatgttgttttcctctctgatcagtataacactcaagacatgctccgttacagctaagtatatcttaagttcttctccgtctacaggttttgagagtataggatgttttttcgagttgcgtttttagctcttgaaaagctttttcacattcctctgtccactcaaattgcttatttcatcgcaggatgctgaagaatggaacacacttgtctgttgattttgaaacaaatctgttgagtgcggcgatccgaccagttaagctttgcacttccttcattcttgttggcgatttcatatccaagagggcttgaatcttctctggattggcttcaattcctcgggcgttgacaataaagcatagaaacttaccggagctgactccaaaggagcactttaagggattgagtttcatgttgtatttcttgaggactttgaagcattcatccaggtcatctatgtgccccccaaccttcctggattcgacgagcatgtcatccacagatacttccatgtttcgtctgatctggtctttaaacatcttgtttaccaatctttggtatgtcgccccagcatttttgagaccaaatcgtatgactttatagcaatatagaccca

SEQ ID NO: 341773 - DNA, 672 bp, Cannabis indica
tgagtagcctataaacactttccatgtcttccgtcaggacggtaaatacagtatacttggcaagattctcccgggaagcttgttcgggttttccaatgaactttccctttttcccattcccttgtctattattgttgctggaccgtttaccacttgggcttgaattgcttcggtagaaggaacttttgactggctaggtttttgttcaccctctgctcactgaatggcttcttcaagtttgataaaaccttctacacggtcaagaaaatcactcatcgagtctactggtccgttcttccttggccttccaaagttcgccaaggacttcaattccccctagtatcgcagacaacttttcgtcttcgattacccgtgcaacgcctctgtcatgaatttgctgatgtaggtttagagaggctctcctagtctttgctttacttcgactagatctcctaggtgcaacggaagttggcgagaggaggagaattgtgcatggaactctgaggagaaagccttccatgagttgaactttccgagcgctaacttgaaatacctttgttgggcgacttctgagagggtggcagaaactctgcaacatacatctcctcgtactccttgcaggtccatttgcatctcgaaatacttaaggtgggataaggtatcttccttcct

SEQ ID NO: 341774 - DNA, 543 bp, Cannabis indica
tgagtgggagtaatgagtaggtatttgattaatccaggaaaggaacattggaagataattaagtaaatcttaagatcaagaagaggaactatatgttagtcgataagggtggtatttttatactcttgagaatctttctgtaaattctcaacagtggaattgccaagatcctagattgaaagtttccaacacgtctaagagaggtggaatttacaatttcaaagatgatgtggatttaaaaacttcattagcaaatataactaggaaattgaattagcaaagatcaagaagaggaactatatgttagtcgataagggtgctttttaaatccaaaaaacagaggatttgtttttttatcctttaaatcattaaaagttttggttttagccttactgagtgtgttcaatgctgcaattgcagtcactgttcaaaaacttgcaaccggagctcaactatgttcggtgccaaaagctggattgctcccccgtgtcgatgataatggcgttattgtcccaagacttgttccctggagttattaccaaa

SEQ ID NO: 341775 - DNA, 488 bp, Cannabis indica
caatgtatattaggagtgacaaaatgccttattgtgtcttttacgtgtcatacttgaaccgtttctatatttcgtataaggagtgtcaatttattttttgactcgtgtctaattttttcaactgtaacccgacccgtaaaaaatcgtgtcgtgttcatattgacctattttgacccattttgttattattgaaactggagtgtagagaaaaatgatagatttaagttccattagaaaacttatatacatttacaagtcataacaaattgtaacttttctccaagttacaacatgtaggttacaaaaatataggttaaattcatagattacacatttatttacaatacacttaatatatattattcacataataatatatttatcacattttaatctaaacttattatattataaaataatataacaataatcctccactagattaaaatgtgtgacatacttgtaacacacttgtaacatttatttaa

SEQ ID NO: 341776 - DNA, 758 bp, Cannabis indica
atgtactaaattatgctccctaaactttcatccatgttagtatttttttactaaaattaggaaaaaaatcattaaatccaacaatctcaataattcaggggcatttttaacgaccttaaaagtttaaggggcataatttggtacttgtcaaagtttaaagggcaaaaatcctaatttgccttttagtaattcttagttaaatttaatttgaaatctaaaatctaaacacacaaaacaattatgattgaaaaaactaaaaagatgagagaattcaatcttaattaggcttgcctgggtatacaatctggcatctgaagttgaatcattggaaggagaaacgaaaagcttgagcaaataatgagtaccccatttgatgatgtccttaacatgatcaacctcacctatctcactatatttttggtgatattcaatcacactccaactcaacaatgttatagtataagctgtaggaaaactaaactttatgttgttccctgaatcataaaatccacccacaacatcctcatcactttctctcccaccaaatttcccatcttccaaccccgaatctcctcgaaatttcacctgattgttcttcgggtacagcccagctgtcaataataaaaataagaaaaattatctcatatactattttttaaaaaattattcattacgaaaaattttcttaaaaaaaagagagagaaaaagaaaagaaattacacttttgagcatcgaaaaaagtgagagcttggttgagt

SEQ ID NO: 341777 - DNA, 526 bp, Cannabis indica
aattatatacgcaccaaaagaacaattcaaatgcgcgtaggagatacaggtggtgttcttgaatatcttcaaaagatgaagtcaaaagattctaatttcttttatgcaatgcaagcagacacagatgatttattaacaaatatcacaactttggtgatgttgttagatttgacacaacctaccgaaaaaattatgattgtcaaccttttgctatgtttgttagggtaaataatcataaacaaacaactgtatttggggctgcattgttatatgatgaaactgctgagacgtttatgtggttatttgatacttttatagaagcaatgtttggaaaaaaaccaaaaactattcttaccgatcaagatgcagcaatggcaaaagcattaagatcccaatggtcagaaacttgtcatcgcttatgtatttggcatatgtatcagaatgcagagtagtgtttttgaaagatttcgtgagtttgcaactgattttggaaattgcatttatgaatatgatgttgggttttatg

SEQ ID NO: 341778 - DNA, 517 bp, Cannabis indica
gcccaagtcattcgaatagactttgcgaatttttctatcttatcctcaaaattgtgataagttatttctatccatatgaatggttagatttactttctcagttgaattctaaagttcctatcatgatcataacatagtaatctataactagtgtcatccaaataaagatgggcttagaattttaaaattctcccactcaaataaggtactgtgatactatgtccaagaactttattggtatcaatttctattacaacagtaacatataaattgaaacaaaatacaggatcaagaataagttctaataatttgctaatttgttcattatattacatccatgtctaatcaaaatatgtgtatcatagagatactgtggtctattgagtataatctagagttcaaaattaaaagtatttaaactgcatatgtcaatagcttcttccaccctaactgttatagagatcatgtgaagttatcaatataatctagagttcaatagatataaaagatcattgaa

SEQ ID NO: 341779 - DNA, 856 bp, Cannabis indica
aaatatatctaaaccaatatattctcattagaccattagtgtttccacctccctttattacaagatcctcaagattcttattcttccatttacttaattaattataatatcaaaatctgagtactaaaattaccctcttaaaccttatttcagtttaaaatattctttaaatcataccttaaccaaaataatcattttattccgactaataaatctgtatagtgcataacttattaactttaaaatattattgtgtcaaaattttttatacattcaataccgaaaaacgtgaaaatttaaacaaactaccctaaataattaggggcccaaccatataataggtgctaaagccttgtaaggcgccaaagccatatataatggcgcaaaatagaacaaaatcaatataaataatgctatatttataatcatgattccaaaaaaaggtaaacgtacaaatataattattactcccaaaatcaaagaaaatgcaaattaaattaaataccataaatgtagaaaccataattataggaaaaattaacactgatatcaatcaataattaagtatacacaaacttacgaaaattaagtaacgtccctcaatttcgtcttcagctaagtggtcaaatcgaatatccaccacatcctcactcaacaaaaccagggttggtcacatccaatgtacagtaatggcacacaacaattacaaaacttaactctggcattatagagagacaaaaatatcaatgaagatcagaatcctttcagcacacaataccataatcctgaacagacctaaatatggacggaaataacaacaggactaccaaaatctctaccacactgttagcaaaac

SEQ ID NO: 341780 - DNA, 902 bp, Cannabis indica
tcccaaacaaagaaatccgagtttactcaaggaaaaagaaaaatcttgccagcattgaacaagctaccactcaaactcagcaaagtcatgaatataatccgattccatttattcttgaacaaacacaggaagatgttcgagttgaacctgctgtggaagaagatgtgtctgacgatctaagcattcccattgctctcaggaaaggtgttcgttcttgcactcaacatcccattcgcaactatttgagttactcaagcttatctcctacctatagagcttttatcaccaccctggatcaagttcagattccaaattcagttcaggaagctctacaggatcccaattggaatgctgccacaatggaggaaataaaagcacttgaaaagaataaaacatggattatcacagatttgccaaatggcaaacgcacagttggttgtaaatggatattcttggtcaagtataaggctgatgggagcattgaaagatttaaagcccgattagtggctaaaggattcacccaatcgtatggcattgattaccaagagacatttgctcctgttgctaagttgaacaccatccgagttctcttatctattgctgtcaacaatgaatggcctttattccaacttgacgtaaaaaatgcgtttcttaacggcgaccttgtggaagaagtatacatggacattcctccaggatttgaggaccgattctcaaaaggaaaagtgtgcaaactgaaaaaatctctctacggcctcaagcaatcccctcgagcctggtttgacaggtttacaaaagtgttgaaaggagatggttacacccaatgccaatcagatcatactttgtttataaaacactcagttggtggaaaattaacagcattgattgtttatgtcgatgat

SEQ ID NO: 341781 - DNA, 891 bp, Cannabis indica
aaaagctgttttttgactatttgtcaaacacatttttttcacagctttttgaaaaagcagcttttagcttttccaaaagctgtgccaaacgggcccataatcgctaggctacttggtttgtggtaaaaaaaaacaatagcttagtgagattcatactcacacattttacactaaatcacgatatgcaattttcacacaaaaatacgacaaaacataacaatgaatgagtggtctaatcgcaaagtgcatactcccaaacggtttaatttgtaagatagaagccatgtgtttgaatatgggacggtggcttcgttaggaaacttggatgtgaggacaatatttgcccatccaaccactcttataacatcagtctaagggacattcacgcacttagtatttggttggggctcatctcgtgtgacacactccgaggacacccgcctcagaaaatgggcgaggtttggaactctcttgttacacccaaaaagactaaccacacttggtagtctcctccacttttttagtaattaataaaaacaatagattaatttgcaccgtaaataattaaatttaacttttacttacaaataaatacttacttaaatttaatttttggcgataataatatttaagttataattttagaatttttgcaggtacctgattaagtaaattgtcacatgacactcctgattggtttaagtcattaaatttttattatttaaaaaaaattagtttaaatataccaataaaaaaatgacacattaatttaatggctaatatttaagggttaagtaactaggagttttagaaatataataacttaagtattattaccactaaaaattaaatttagctatttatttacaattgaaagtttttttttttttt

SEQ ID NO: 341782 - DNA, 571 bp, Cannabis indica
tcagtggcaagatgaaaagctaagacttatttagaatcgaatcccggatggtgagcaactagatgggtggacaattaatggtgaaaggtacctataccatatgggaagactagttgttacaaatatccctgatcttaaggagtcccttttatttaggcccatagatccaagtttgttgtacatcctagaagtacaaagatgtaccaagatttgaagagacaatattagtgggaaagtatgaaaagagatgtggctagatttgtagctaagtgtatagttggtcagcaagttaagactgagcatcagagaccttcaagtttacttcaacctttgcctatatcagaatggaagtgagacaagattacaatggactttgttactgggttgccattgacacctttgaagcatgacgatatttgggtgattgttgatcgtttcactaagtctgctcattttaggggtgagcaacggtcagtttggtcggttttttacacaaaaaaaaatccaaaatttagtttttggttttcatggttataatccgaaaacctaccaaccattatataaatgtaaa

SEQ ID NO: 341783 - DNA, 838 bp, Cannabis indica
ggaatagtaaattttatgaaaaagaataagatacaagattgaactgttgaggagagtgattggagaatacaaatggacattatttgagagaatattgtagatgtttgctatggtatgatttgagtccaaattaaccttctttatctacctttcaccctagccttacattataagcctataaagtcctattgatatttagattgtgtgtaattacattagtggagaatggtttgataattaagcttatggagtggatttttgttgaaatacacatttcttttgagataagcattgattgttggcatgcataaattgatttaatattagtaatatgatgagttgattgaacacacacacacaccaaaaattgagtttgaaaaataattatcttgagttgaaattctaatgattgaagagtttggattttcttggaattataaagggatgtacaatttttgaaactaaaaatatttttcataaagaccgatttgtttaaatattattcattttatcattaacttactcgaggaagaacaagagtcaagtgtaggggaatttgatgagtccatatttatcttataaatatgatcaattcatgtattaatgtttttacattgattctttaaatacttgattagtgtgattttaattgttttcgatattttacagactaatcgtgcatttagagttatttggaggaaagttagcatattttggtgaaaatagtggaagtcgacgagctaggttttataaggtagagcttaattgcaaattttgataaccttagaagtagaaatggacttagagctcaacataaaagttttagatctcgttctta

SEQ ID NO: 341784 - DNA, 1265 bp, Cannabis indica
ataatatcaatatattatattgtcattacagatacgagtaagtcaatgtggataaatttgccaatatcaattcttttggtttgcgcattaagtattctttttaatgaggtacgtacttcgaataatatcaagagttatgaaagttaggaataaaaaaaccttttctaatcacacatatagaggataggcttgtgtattgttagcataaatttttactaagttatgaaggttgggcttgtatattgaaagtattgttaaaatatttgtaatatagacacttaatttatgtaatattattcatgtaattattttaatttgaatttatcttttagtaattctaactttatattattattaagttaataatgtatatgtttttacatggatatatgatattaacttatcttttatatcttttatatatggacaaaacattattagtttatttatgattttttttaataagtggaaagttttaccctggaaaatattttgtgtacacataagtgtcaatttataattgacgcaaaaaccacttgttgcgtcggttaaagattgacgcatatcttgttgtgtcacttcaaaactgacgcaaaatgttttaatttttttttaatgtgttgcgtccgttataaaatgacgaaaatagttttttgtgtcattttataaccgacgcaaataaattacaatttacgtctacggcttatacgtcggttttctaaaccgacgcaaaatctttattagtcacttgaaaaccgacgaaaatacccgtttttgtagtagtgttattttaagccttaaaatttctttgcataagttctttgtgccaattcgatgctttgtacggtatgggcaccccttaagagaccatctaggcaagtctcttggtcacttgctattcactaagtttcacagacttttcttgggttcttccttggggtgctgtccatagtacgcatgtggaactgaaagagtaactttaaaaagttagtcttgtgagcaagtgttttagacacagtcggtctaacgtgtaacaaaagcttacagcttaatatccccttttaaaatcacgtagtggctacccctgcgcggcttaacgaagcagaggccatcgttaaagaacggtgggagaccacgccaagaaggttgtgggtactagcacttttatgggatcttgcacaatgaaatgttagaggaacttaattgacaagttcgccaattagagtacttaccgagatgttccctatttcagtgtttgggtagaa

SEQ ID NO: 341785 - DNA, 1197 bp, Cannabis indica
ttgcataagtcattcgaatagacattgcaaaattctcctatcttacacttataattctgataagttatttctatccaaatgaatggttggatttactttctttgttttatattaaagttcctatcatgatcataacatagtaagctatcactagtgtcattcaaataatgatgggctagaactttaaaattctcccactcggataaggtactgtgatactttatccaagaacatcattagtatcattttctattactacagtaacatgttaattggaacaattacaggatcaagaataagctctaatattttacaaatttatttattatattacatccatgtctaatcaaaatatgtgtgccatagaaatactggggtgtattgagtataatctagagtttaaagaaaaagaactacatatgttaatagcttcttccacccctaagtgttatagagatattgtggagttatggatataatttagagttcaaaagatataaaagatctttgaactgcatacattgtttcttaacttcctccactcctatcagatcaaaagatcgttttatgaaataaaatcttaataattgcttaagaattaacaattattcataaacattgaatttaattaaacattgtgtatgtggtattatctctttgcagagattaaaataccatatattttgtatcattaataaaacacaaacacatacaaacacgataaacacataaatataatacagtattggcatacacaagttaaagtaaatataaagctcaattcataagtgcaattcataatgaaaatctcttaaagaaattttttattaataatctcaaaaatgtcataataaattgtctccataaaatataaaatagggaataaaatctcaaactaataattgaattgtctaaattattcataaactaaaacaattaattaaaaaacaaagaagatttcgagcctcatcttcaacttggacaatctccacccttctgtccaaccattcgactccactcgctaggatagcaatccaagtttaagcagttggagctaaaataagaagaaaataattacggttagtagatccagaattaataatctaaggggataataatttctgaaacacatggaattataacaaagatagaaataccatgtttctttgccaaaaacttaggacactggggtttcta

SEQ ID NO: 341786 - DNA, 575 bp, Cannabis indica
tttgacttcggtaagaatctatcatggccctgtaagcatatataacattattttcatacgttggttcccttagaaactctgactttaatggtgagtctattatagtcgaatgttgagcgtaagactcaaaattcatcaaagttattacacttgacacttgcactttgcggatattcagcttgtatgctgacacggtttggcaagttcacttggtacgattgcccagcgttttgtctaatgcttggaacctgtaaagaactatgccttagctattgcccagtacgcgatccctataggagctcttttcgattcttttcttgctatacagttctttgttggaatatgttctaccaggatctagatttactaacaagtatgtttttaacaccaaaatatgaacctctaaaacaatataaaataaatacataaaaggtatgagaaaccttacattggttacagcaaaattaaatgactcctttcgctcaaatctctgaccctggtatcctttctaaagcagagtatcaccaagatctgagcccaaaactccttgttttttagattcttcacagtcttac

SEQ ID NO: 341787 - DNA, 722 bp, Cannabis indica
aatttaatcattgatgctagattaatacaccatattttaataacaaaattagtagaaagcaatacttactcgagacttgaaccaactaggaaactcattctcttgaattgtgtcaagattttgatgacccctaagttgtagctcgttcctatgctcactacattaaaaatggggagaatgttagataatgtcgtcactaaagagaactaaatcgaataaggaaaaagtatcttacatgatatatttcttcacatcattacaattgttgagaatgtaccactctgccttcaatttatcttgcattagtaaatcaacaatggtcctctgaccaattggccgtccaacatgcttaaatttagagaattccctttctggcttatttaggaggacatcactatttcaatcttgacgattaaatcgagtttcaacttcctggaagtacattgaacaaaaaattaaggcttcgttaactgcataagtttcacaaatagatccttcctgtcgagaatgatttttgacatattgtttgtacatagacatggctcgttcaattggatacatccacctgaagtgcactggtccccaaagtatcgcttctttaggtaaaagcatcaccaagtgaaccattatgtcaaaaaatgctggtgggaaaatggtttctaatttgcaaagaatgtccagatacttttttgcatgatttgcaagtctgtaacattcaatgt

SEQ ID NO: 341788 - DNA, 901 bp, Cannabis indica
acctaaccctaggtggtttcctataaatagatagtgatggcttaagggaaaagatgatgaatctcattcctttagataaaatttgagcctcctgcactaaccctagccgaaacctctctctctctattatattccgctgcaaccactataaggtttcttatactttgtatgtgtttatttcatatcgcttagaagttcatatttaggatgttaaataacatacttgttagtaaatctaagatcctggtaaaataattccaatagtttgaaggctcttaatggtatgcctgaaattgaatttttgaccatcccactctttattttattaacacacttgtgttgacaatttagaaaataagatagaggattactatgatcatcacggttctcaaaagaccaattattttggagaatgctaaagaagtcaggctcggaaagccaatgattttcaaaacaaaacctattggtgtgggaacttttatttttaggatcgttaaggattattttcaaagctctatggtcagaaccaaaataagaaagatgtctaagggtagccttaggaaaaaaggccaaccaagctttattgacaatactccaatcaagcctttcgaaaacattaccatgcttccaagtagaacgattaccaatgaaaggtagtggagagagattaaatttattaatgaatgattgaaaattggacatggcatatggagaacgtttagtacaagtagacttgtcattaagacctaaataatcgttaatgtctccaattatgatccatggggctaaaggagcaactgttgaaattattttaccaagatcttagatctactcacaagtatgttgtttagcatcctaaatatgaacttctaaaacgattataaataaacacatataaagt

SEQ ID NO: 341789 - DNA, 336 bp, Cannabis indica
ttccaggctgtggagcatccggagcttctcacggagtgggttagaatcccttcttatgcgcggactgaacctactcagcttttcctccagtgggccaagaccttcaccacatatgacaagaaggtccttgacgtcggggagttggtcacgacagaacactgtcggaaggccacgctgatcttggggcatcagtcggtggacgactccaacctttctaaagtcgtctgtcctaatgtgagggctccggtcgcagagaaggtattctgggatgacatcatcgccacggaagaggataagtaccagaagtacctcttcaagagggaacaggagcgggct

SEQ ID NO: 341790 - DNA, 703 bp, Cannabis indica
ggtcacgacagagcactgtcggaaggccaagctgatcttgggacataagtcggtggacgactccaacctttctaaagtcgtctgccgtaatgtgagggctccggctgcagagaaggtattccgggatgacatcatcgccacggcaaaggataagtaccagaagtacctcttcaagagggaacaggagcaggcttataataaggcccaggtgactgccggaagggcccttcacattggggctccggtggagcagaggacccccagaccaaagcccgtgctccctgtaccgaatacgggggctcctgatgccagcacttcgggttctggtaagtctcctttaatgatacagcatgtcccttccgtccgcgagtatgctagccttaggcctatagggttcgatgaacgtctccataggtttaggatgccttccactcgatgggagaatcatgccaaggagtattatttctcccacttaggtgattatttaggtcggtcccagatgggttttggacctccagtgcccgttcccttggactcttcagcctatctatcctctagctggttccgtccctcggacagctatctcggagatgatgcagccagtgttaagattcgggactttgctagggctaaattagggagtcagggtaggactagcttgatttcctttttgttaagtgtatgctgttttcacaggtgttct

SEQ ID NO: 341791 - DNA, 530 bp, Cannabis indica
tagttttcactctttgtttctagttttagggttattttacgcttgattcttttgtttcaggtcctcgggtgtttaaagaaagtatgtacaagaattgaggacaagtggtgaaggaattgagaagaaaaaccaagaaaatgtgtgttgcctaatcccatcgcgacgggaaatgtcccagtcacgacggggattggcagaaagaattcaagaaaaaaatgtttaaccccgtcgcgacgggggcattgccagtcgcgacggggaccccagtgtcgagatttttgggcagtttcgtaatttcacgaattttgaagatgagacttggtataaatagtgagagctcgtgaaaattagggtttattcagattgtgagccctagaaacaaagaaggaggctagaagagcggcttgtggcgacccggatcaattgcttcaactagttctttctcttctctttaatttttctatgctattttctgtttcaatgttaattatggatttgattatggatgttttgaactaaactcctattta

SEQ ID NO: 341792 - DNA, 570 bp, Cannabis indica
attgttcaattataacggccttttctccctcgtgctactattttttttttttaaaaaaaaatagcctcaaaaaaaccaactatgagtggagaactctaaaagagtcgtggactaaaaacatatcattgataaataacatcagtcaaaaattcaaaaattctaaatacaactaggatatcttgaccacaaaactatatttgtaatagcagacaaaacaaattttgctaaagtatcaactactacaattttcgttctatgacaatgaattaaattaacaataataaatttatgacaattagaaataatgtcttttaaaattagccacttgacgatagtatatagtaggaacactttatttgtctccataggatgtgacattttattagtcatttattatgttgatatttgaaggttcaaactatttattatggaatagcatgtacaatatataaattaaaaagtgttttcttgattttgtctttttttttaaaaaaaataaaagtgatattggacttcttgggaagcacatattgagcatgtggcactcaactagcaccttattaataaaaa

SEQ ID NO: 341793 - DNA, 755 bp, Cannabis indica
atgttttagaaagctttaaaatggaaaacatcaaaagagattaattcatgcatgcataataatatgcagtcactttttatgtgtattatttttcaaagtgataaatacacaataagactgatatatggtcttaattgttgtactgcctgcatcttggtttaatggttgttattatatttgaatgtctcctaggccaaattatgtgtagtatacatatcctatcgatatgatatcatacataatttatttgactgcctattgcatgatggagattaatatggtgtttgttaataatatttgtccaagtgggagagatcttggaatcttgtatgaactaatataatcacaaacataattccatattcacaaccatgttagatgttttctaaagagaccatatgagattagtctttcacaacaactctcaagatactgagattcaatggatcatatcgctttattttgaatagcctcatgaatgttgtcactgaataaggatttacatataaggctatttaaggagttttaatattatgaggcaatatatgacattgtatttgacaatcttggactttaatcatataagtgaagacgaatatctcaaaggttttattgagaatatccagtttaatacgtatgtccctcctagttattactattgataagtaaataaagctacatatgttgaagttttaagctggcattagacaagttttaaatttttttatgggataattgggtttatccctcatttt

SEQ ID NO: 341794 - DNA, 1102 bp, Cannabis indica
atatttcaaaatcaccctttttctctcaaactctctctctttcggcccctctttgagcagcaaagatttggtattttccttggtaattcaagctggttttaacaaagatttagtgatctcaagttgttggtaagattcttgtagcttcctctttgttttcttgagttttaagaaaaagatgatagttgcatgcttggtaaattatgatgttgttgctgctgtgtttatgtgatgttttctgcagcttaaatatgtttaattaagtggattggaataggttttgatgcgtgctagttgattttgttcaagtttggaattttgaactcaaaacttaggatttttatggtgaaatgataaatcagttgttgtgcttgttgtagttgattgctgttttttcagaggcttaattatgcttgattgggtagattaaaacagattttgatgcatgttagtgggatttaaccaagcttgagttttgaactcaaagcttggagctttaatggtagtttttgtaattatgtatgaagcttggttttgttgcttttgtaatgttctttggggtctaaatagcaggtctggagaatttggtatgatttggggttgaattgcatgagttatgaattttttaaggtttcctgcactgaaccggaattccggttcagaatggcctgtaggaaccggaattccggttggtgtcctgggttcctcccagaaccggaattccggttgtagaaccggtctgccggttgggaaaaaatttggaaccctagttcttcccatttttgttttatttagggttttgtcatgctttttatcgatagggaaacttttagtttctagtttaagtccccgggaagtgatttagcgtgtcacttatcagtgttgtgattattatggtttgggagcctgtaattcgccgagcagttcgttccactcaggttgactggcacacctaaattcgaaattgaggtaagattagtataatgttatgcatatgcttatacatgttttgcgtacatgtcaatttccatcagattaacatattagatatatgttaggcaaattttatatagccgtcagattagcatatcaggacaacagt

SEQ ID NO: 341795 - DNA, 744 bp, Cannabis indica
ttattatagttgaatgtctcccaggccaaattatgtgtagtatacatatcctatcgatatgatatcatacataatttatttgactgcctattgcatgatggagattaatatggtgtttgttgattatatttgtccaagtgggagagatcttggaatcttgtatggactaatataatcacaaacataattccatattcacaaccatgttagatgttttctaaagagacaattgagattagtctttcgcaacagagattcaatggattatatcgttttattttgaatagcctcatgaatgttgtcactgaataagaatttacatataaggctatttgaggagttttaatattatgaggcaatatatgacattgtatttgacaatcttggactttaatcatataagtgaagacgaatatctcaaaggttttattgagaatatccagtttaatacgtatgtccctcctagctattactgttgataagtaaataaagctacatatgttgaagttttaagctggcattagacaagttttaaattttttatagaataattgggtttatccctcattttgttgcttccgctattattattaatgatctactattggccagaatatagtaagaaactctatatggggacaaacaaaaataaaggatcaagacagtttgatgaacctgagtttccatacacgagacaagtttgattacatatacctctaaagttctaaactatagccattggta

SEQ ID NO: 341796 - DNA, 708 bp, Cannabis indica
cccgatgggaatccttcccccgtcgagtaatctccgccccgcccccgctttaatttaaacgggtattggatcgagtatgggggtgaatttaagaagcgggtataggggtgggggagcaatccccgcacccaccccgccccgtttacatccttatgggctgggctttaccagataagctcaaagtcaatatattatttgtaaactccctattagagaaaaaaagataattgatatgacctttatgcactataaatattcaataaaccttacatgcaaagggttgaaaattcttagttcatttactcttggaagaatcgagtgttcatactttattgtaaatccttaggcttttctagcctctgataataatattgactcgtgaattaaggcttgttagcgccccaaacatgtaaagtccttgagtgtccttattttatttcctttgaattatattcttttggctcatatatttaaattattagtttttaaaaatcttggtaaataagtataattaccgaaatgaatgttcaatcatttattgcctttagccaagctcatagaaaactatcgttttacttctaataaacatagaagctatacatgttcatatctatgatcaggcccgactctttaggtgtgcaaccagatctattgcacagggcccacacaacaaaagggcccaattttctctaatctctctctctctct

SEQ ID NO: 341797 - DNA, 1199 bp, Cannabis indica
aattgtaactttgtaaaaagaaagtccaaaatggtatttatccataatttaattgcttcataaaatgattaaatttttaacatgatttgcaatgcatgtaaattctaggagtgttcataaaatatataatccaattcaatctgcaaaaatgtagatatatatgcacttatgtggattggattgaaaaattttaaatccgtctttatacgaattaaatattgattgacatataaaataaccgatcaaatccaatttatacatatttatataaaagtttaaaaaaattatatatataattactattttagtgtaaaaaaataatagtaatttaaaatctaatctatttcaaaacttaatgtatatatataattttattttgtctacatacaattaattaaataaaattaaatattttttttctacatacaattttttttcttgatataaattttttattttatttattttaattttttattagaaacatataaaacaacaatggtttgtttattttgttgttagttatgttagataaaattatttttaataaatattaaataatttaatattgaaattagtaatcaatttaaaataattgcggattggaatgaatttgagttattatgcggatttgattcaaaatatgaaatttgcaaattgaatgcactatgagtaaaataatacaaactaaattagatgaatacccttaataaagttttgggtgattctacaatccactcccttaaaagggatatactgatgcactctctacttgtttcggcatccaaaaaaaaattttagtctattttttttttcatattcatattcatgtagattataactatttaagatattctaaaaaattttgaaaaaattcgaaataatttataatatagaaaataatattcaaatagtttattttacactcgtataaaataaaatagtcacgcgtgaaacacattgcttaaacgcaattttcggcgtgttaaactttctgaatttaatttttaaaattttgcagaatgtcttaaataactaaaatttacatgaccattatgaagaaaaatttgactaaaaaaatattgggaaattctgcaatgcacccccttaaagtggatacattgatgcatccttatctgttttagcacccgaaataattttttagtcaaattttttctcatggttatgtacgttatagt

SEQ ID NO: 341798 - DNA, 494 bp, Cannabis indica
ttattttaacatatatatttatttaattaaaattactaatttagatgaatctaaatttaaattttaatttaatatttataaaattataccttatgaagatctaaaaaataaaatatccatccttagtattaattttccaataaatattatgaaaaattacttaatttaagttggtccaaaattaaataattaattttgaacccaaatttaatttttcataaatgtagtggccaaaaattgctctaagcccgacgaaaaggcccaacgattgaagtactgacaaagcccacttataagtcagaaacaaggaacccgtaaggccaatggctcatatgggccacgcctaatccatgccttttgggtcatacccatattcgaatgtccaacccacaataaagcttgatcttaaagtataatgttagggttgacacgtggaggaagaagaatgttaagtttcccaactaacccacgaaaatagtgatcttccctagcat

SEQ ID NO: 341799 - DNA, 585 bp, Cannabis indica
gcgatgcatccgggggaccctgacccattcggtaagcagctccgggcgctcaatagcttgaaagtcggaggagaagaaagaccgatgacgatattccttaacattttttggaaattaaaagtagtcggaccctcattagtaggatgggcctggagtttgaaaatgttggaatatgttttactaggatctagatttactaccatgtatgttgtttaacatcctaaatatttaaatatctaaaacaatgtaaataaacactcaaggtatgaaaatatgatgaagaaaagagaggggctagttcgaattctatagaaggaatagatggctcaatttttcctaaaggcaagaaatttcatcttttttaagtgtgagcaatcactatctattcataggcaaccacctaggtttatgttaggatttattaggcattaaaataatagaaaaattaagtggaaattaccacccaagtggacgaccacactaatgggccccactttggaattttttttccactttttgacatcttctttagtttctaaaaatgccatttttctaattcttaactatttaaatgcaaaaactaat

SEQ ID NO: 341800 - DNA, 545 bp, Cannabis indica
tgggagtcccctaaccgctggaaagaggccccctccggatgtttgccaaaaatgaaaactcaaaggattttccttagcaaacacgtgtgcaaaaatcccaaaggcagcgaaagcagaagaaaagcgagaaacgcagaatgagggaataaaaatcgccccatgccctaaacagtctttcgacagaagggtcgattctaaagaagaatggaggaaaataacaaagactaaaataaagaagattctatgcatcacacaacaaactcagtcagagttatttcccagaaatccagcattcaaccaagaagttttatcctaacatgcaaacaaacggtaaaaggcacagtgtccagaaaacttacatgaaagttgagaactgggggtcggcgttggtcggcggtataaagtggattgacaacggcgaaggaaaagtaacaagaaatctatggtttctgaaattgtttctctcaaaagtgatcttgtgaaaaaatggcgaggtagtgaaagtaaccaaatgaaggagaaaggctggcttttataggccagaa

SEQ ID NO: 341801 - DNA, 1224 bp, Cannabis indica
catctagagtatttatgtggtatatgatgccatgcttaaaatgttatatgttaagtgtttaattatatgaagtatatagttgagttaaggtttaaggtaataaattcataagtgtggtattggtgcttaagtcgctggggttgttaattacaagggtaattgtaaaaatggaccctcgtcaatcatctagaccacagggcgagcaagtagagcattgttagaccaaaccaatccaccggcaccgcatgcacctccgcagaatccaggggataatgcgggggttggcaatgctaatcctcctgcttactggtagcagatgttgcatcgattaaggcaactggcactggcttcccctgttgagaaaatgttaccagcagcgcctgtgccagtggtaggtaaccaggggtttatgatgcctcatagagattctgtgtttgaacggtttgtgaagctgcaacctccgacttttcttggaggtactgacataattaaatctgagtaatggatgagtacaatcacccgtatcctagataatatgggagtgacgggaacaaagagagtgaattgtgcagctttcatgttgcaagatcatgctcgcgtttggtgggatattgtgggacagactcgtgacgtcaatgtaatgacttgggatgagtttaagaatctatttgaagaaattttttataatattgctgtgaggacttcacatatggaagattttgtgaagttaacttaggggaagatgtttgtggccgagtacactctggagttcgatcggctatccaagtttgctggtgaactagtgcccacagatttcactaggaaacaattaatatgtgagaggactgaatgccactatcagttgggacttgaaaattaccactacacatgacactttgtacaagaaagtggtagagctagccgtaattgctgaagaggctgagcagcatgtaacaaaagagcagattgcaaaggatgccgccatggcatcgaatcctcctactagtggtaatgtcagtaaggggaccgacggtggtaaccctggtcacaaacggaagctgatgcttccggaacatcaggaggtaacagaaagtttcgaggaaacagaggtggtcgtcagggctgtggatcttcattctgatcttatcctgagtgtctgaaatgcaagaaacaccatcagggtgaatgtcgggccaagacttgtttccagtgtggcatggtggg

SEQ ID NO: 341802 - DNA, 822 bp, Cannabis indica
tggtccgaaaagaaaggacgaaatcagggaaccgttgaaggatagaaagaaagagaagaagcatgacaaatatgtgcgagtgtatactatttataccaagcttaatgaaactcgagaaaatatttacctcgcacataagcagaaggtagccttcagcaaatgtgagcctatgaggaatttgaggagcaaaagagatcctaacaaatattgtaaatttcataaagttgtcgggcatacgatccacgaatgtcgccaattgaaatatgaggtagagagtcttatcgctcgaggccattttaagcagtatgtgagaagacagggctagggataaaaccagccccgtcagcctgataacccaaataaccaggggttacaacctattcctgtggaaggagaggacatcttggttctttcgggagggccgcatattgcaggggaaagcaataacgctcagaagagatatgtgaaagaaataaagaacgagtagtcggtctttgcctcagaaccttctaagaaggtgaaaaccgaggaacctccattacattcatagaggaagacgagaagaacgtgagatatcctcatgtcgatttgctggtcataaccatttaactcactaataagaggatcaagagagtgttaatagattatgggagctcggtaaatatcatttataaggaaactcttaagaaaatggggctcgaaaaggctaagttatggccttgtatggtgaatctttgcggatagcatcgctagccttggcataatcgagctcgcattaactgtagcgaggcacctttagctgctactcttatgcaagacttc

SEQ ID NO: 341803 - DNA, 660 bp, Cannabis indica
aaaaatactttaaaaaatatacacattctttaataatgtttaaaaataccatttatctttatagtaagggtctaaatctttttttttggtctatgactcatttcaactcaaggtcgcccctgttacgaaatcatgtcccctgaatttttaacaccattacaatttcttttgaattattgagaatgttggatttaagtacttttgtctaattttagtaaaaaaagtctaacatgaatcaaagtttaaagtgcattatttatttattttttttttttttttgacgcggtgatcaaaatcacacatgattaacaaagcggcaatccataatcggcggcggcacctcctcgaaccaggatagctcatcgtctaaccgaagggcatgctttgccaaaccatgagctgcagaatttcttatcgcaagccacatgggacaaaactgcccccggaaatttagacaataaagctataacatcctcaaacagcacccacagctcatttaaacacccttcctttgttgatagctgaaaaaacaaacaacaccaagcaacaacaggtattagaagagacaatccttgaattaaacttacccgacaaagtctctatagtcgtaggccctccacaaaattgacctacaaaacaacaataaataaaactctatta

SEQ ID NO: 341804 - DNA, 1074 bp, Cannabis indica
ttcacaaaatcatttctccaaagaaaaacctccataagggtacacattttttcttcttcttaattaatatcatacttattttgtcctactatataaatatatttattaattaattaataataggcaaatggtgaaattgaagctgatggggtctgatggcagtgttgaatttaatctgatgaaaagtggaaggacaatttggagatttgtaaggccatatacagccaaaggagtattgtttaactctgcgtaagaactcttctttattaatcttgtatatacatatagatagatacatttgaggattgttattaggcgtttagcctttctcgatatgttgcgttgcggttggctagcgatatgccctataaattaatatattaaattatatgagacttgatacttagtggtgctagcaccacaggtacccatatatatatataaatttatagatattaaacttggctgttattaattaataactataaattggtttaattattaattaatatctcttatatatatatatatctattctatataaagtgtgcctatataattgaatttttaatttataagaaatttataggtggcattttatttatatataataaaataataaagtattatttatatataataaaataaaaaaaaataaaaataaaataaatcccattaatacgaaacgcagtcgtgatagattcgaactgatatatattaaaacaaatctggattaagtttttagtaaagataatattttgcattttaaatttgatgtcatttttctccattaaaaatatgcaagaatgggacagcaaagacagagctggcaattcgatctgtggccgttgacatcattacgatgaactctaaatgattgtaccaaataattaggcaatggatattggattgtagggtcttcggccaattcaaggttttaaatttatttaggcactatgagtggcacttggtcgattaattctcaagcttcaggcatttttgaatcattgtttgcatgacgatttataaaatatatatactaaaaaagattaaaaagaatgggttaacaattat

SEQ ID NO: 341805 - DNA, 726 bp, Cannabis indica
aggagatcgaaaagtttgagttaacattaccaccgtccacaacaccgtaaacacgcatcgacgaagacccaaagcaccatccacgaaccgaacccacacccactcgaccgaacccacgcacgcacgcacaccatctcgaccgaacccacgcacgcacgccggccgaacaccaccggagaagaagaaggtccgatgccgcgcaaagaattcaatttttttgggtttttaaggtcgggtccgatggtcccatcggacgggcatcaggcccatcggacggggcatcgggcccctgacttcaaaaacccaaaaatcacatcagaccccaaaaatttagcatcgggcccatcggacgggcatcgagcccgacttcaaaaacccaaaaaatgcccatcggacaggcatcgggcccatcggacccgaccccttaaaagttcaaaaaaattgaaaaaaaaaaagtttttgagaggggtatttttagggttttggaaaagtggtcctagaaaagtattagtttaggaaaaaaatattaggtatatgcaagtatagaaaatcaaatttcccttgtataataaagtacttggcctatttttctctctcatcttctttctctctctctaaaagaaatagaaaaaaaaagaaagaaaagaaataaaaaaggttccttgtatagtgtcacgggccgcctatttggaaacccccaagtaggtggaacgtgcggcacttgct

SEQ ID NO: 341806 - DNA, 998 bp, Cannabis indica
tttgggtttgggactaggttcaggtttgggtccttatcagggttcagatccaaggctgggtcccaaatccagacactgactacgggttttgtccaagccttgagtccagatccaaatcccaatctcgggtcaattctggttccatttctagtcctgggtcacgagctgggtcctaggttcaagttaggttctgggtcagatactaggtcccggtcctagttctgtttcccaggtccctattctgactctgggtccaggtctcgtttgttgtgtggctttgggtctcggtctaggtttgggttcgagtcctaatctcggttcgggtttaggactctgtctaggttttgatctaggttcgggtttgggtttaggtcctggacctggtctcagtcctagttccgttctagttccatttgcgattcagagttcgagtttgggtttgagttcgtgtcggagttcgagtccttgtctgagttcgggttcgggtcctgatttcagtctaggtccagatcaggctccgggtttgcgttcaccaactgggtcttggtctaggttgggtccgagtcccaagttccaatccctattggagtatgtattcagttctcggtctaagtcctttgttctgatcttggtttgggtttgagtttgggtccgggtccgggtcttgctttgggtcggattctaggtgtcgatgtttgagttcgggtgcgagtctgtgtccgggtttgtctccaagtctgaccccgatctgggtctaggttcaggtccaggtccaagttcggatcccgagtgcgggtccaagtttggttttgggtcaagatctctgtccagatctaggtccagctttttgatcccagtcaaggtcttggtctgagtccaggttcgtatccggatccctatctaggtccaagtctatgtttgggatccagtccaatatttagtctaagtctgggtctcagttccggtcttggtacacgaccgtttctgggccagagttc

SEQ ID NO: 341807 - DNA, 532 bp, Cannabis indica
ctagttccatttgcgattctgagttcgagtttgggtttaagttcgagtcggagtttgagtcctggtctgagttttggttcgggtcctgatttcaaactaggtcaagatcaggctccggttgtgggttcgcgtcctgggtctttgtctaggttgggtcagagtcccaagttccaatctcgatctgagtttggattccattctgggtctatgtccttcttctgatcctagtctgggttcgagttggggccgggtccatgtccgggtctagcttttggtatgattctaggtgtgggtgtttgagttcgggtccgattctgtgtccaggtttgtctccaggtctggacccctatctgggtctacgttcgggtccaggtccaagttcgggtcccgagtgcgggtccaactttgggtctgggtcgggttctcggtccaaatctttttgcagcctttcgatcccagtttggttctaggttcgagtccagtttcgtatccggatccctatctaggtccaagtctgtgtttgggatcgggt

SEQ ID NO: 341808 - DNA, 853 bp, Cannabis indica
tcaagcccaaatgtttcgggtttgctagagtccatcaccactgctaaaaatcccacacatccactgtgtagtagatccctaaccctcaacacataaataaccgggattcgagacccctgaaatgatccaacataaacaaatggatcctcaccttctggctggaaagtcaccattttccgtttacagtctatactggccggatacttggacagaaaatccatcccaggtatgatgtcaaactccgttaattccagttctataagttcagcactcaactccctatcctcaatcctaactggcatagacctaatgtgcttattggaaataaccgactccccgcaaggcattagggtcccaaaccctctttcaagaatatcacaaggcctacccaaaagatcaattactctcgtagccacatatgaacgtgtagctcccaaatcaataatatagtatacaaggatttgttgacaggaagctgacctgtcaccacagaaggaatagctgcagcatcagcttgggtgatagcaaacacccgagcaggtataggctttgcctctgctttcgattcttccttctttgcctgagggcaatctttcttgaaattccccaccatgccacacaaaaagcatgtcttccggttacattctcttggatgatgtttcttgcaacgtgggcactcagggtaagagtaatcatggcgtccacctctgccttggtttccacaaaaccgcttgctttaccctgagccactagatgcttgggaaactttcctcttctactctgtggtggaatcaacaccatccctaccatagataggagtaggaaaagtgggggttccaccaacattcggagt

SEQ ID NO: 341809 - DNA, 590 bp, Cannabis indica
ggctaaaccttgttttggtgagattaaggttaattgtgatgctgctgtctttgaggatgacaatagtttcggtttgtggtgaattgcttgggatcataatagtttattcattgatgcgctggcggttaaaacttatggtcagcccgacccgtttttggctgaagctatagcgttaaaggaggcgctcagttgggtgaagggaaggtgggttgaggggggtgtgcctactagtgtagtcatggagtcggactcactgctgctagtgcaagtcgtacaacggaaaaagcttttgttgtctccggtggggcttttagtttcggattgtgttgctcttatgcaatcctctcttttgtttcctattttaattagttttgttaaacggtccgggaaccaggcggctaactttttgtctcgttcttctggttctattcctggctgtgtttcccgcgggggttttgtccctgctggtttggaagctatcttggtagctgatttgatttaataaaatttaatattttgggctaaaaaaaatactttataaaagtctaatgatttattttattttatttttattttgggccctcgaaaag

SEQ ID NO: 341810 - DNA, 1027 bp, Cannabis indica
cgcgggggttttgtccctgctggtttggaagctatcttggtagctgatttgatttaataaaatttaatattttggctaaaaaaaatactttataaaagtctaatgatttattttattttattttttattttgggccctcgaaaagagtgggctctaggcacaggcctagcccgcctatgcctaaggctggtcctgaccattagtcttgtatttgtgatatagttttgagtattagtgttcattttgtttttttgttggtgttttttatttttcgatagttcaccatcaaattattgttagtggttagtaataataagttttttgctattgaaggagttgttagttgtgcagttacgtaccttacataatagtcgagtgatcaagctacgagattgaatgaacctgatgcaacagtttctactgttgtatcttttgagcgatggatgaaacagaatataagtgtttttaaagttaattgcgatgctacaatcttttttatctaattttattttagtgtttttgttaaataatctagaaattaggctgctgattattttacttgtttttctaattttaatcctagttgtgtgtccaacgagaaagatgtcctgattaaattatagattattattttaattaattatcattaataaaattccatgaatttattcaagaataaataaataaataaatatacgacatctttcattttttacaaatttgtcttttatttttttttgcttaatcatttttacaaattgttatttcaaatatagtcgatgaaaattagcagtttcaactttaaattctttacatcaggatcaatactagtttacacgatttgaaaaattatatttttacatatgccaataagtttttttgaaaaatagtaaaaaaaaacgactgtaaagatatgcgttacatattagaaacttgttactatagaacacagatttacaataacataatagaaataacaagtgtaaaatataaaaacttgaacacaagagaattatacgtggtatta

SEQ ID NO: 341811 - DNA, 732 bp, Cannabis indica
acgctgagtttgtttctgcttttggaggagaccgtaggcgcttttcacagagaaatcttcatcattctcatacatccaagaccaggagtcacatgtagcatttaagctgagaggaattcctagtattgcagcagcatccgaagcacagaacatgtccataacaacatcaatgtcccatgctctagaatctgttatgaagagcgagtcaacgtattgattcactaacccaggatgatgcacagatacatacggattcgccaaatttgggagccacggatgttggagtatgttaacatttgtacccgtaccaatggttcttcgaatgccagagcgtaaatgatcttgagaactccaaatgcttcgccaaacgaagctaggattattacccaattcggcagtaaggaagtctgaatgagggtaatatctagctttgtagattttccccacaagggaatcgagtttgcacaaaagccgccaaccttgcttagcaagcatagcaagattaaagtcatgcaagcgacgaaagcccaagccaccttcagactttatagcgcacatgcgatcccaagacatccaagttatgcctcgtcctttacttgaggctgtcttccaccagaatcgagccatttccttctcaatttcaagacatgtactttttgttagaaggaagacactcattgcgtaagttgggagtgattgaaccaccgttttgagaaggatttctttaccagc

SEQ ID NO: 341812 - DNA, 602 bp, Cannabis indica
taagtccttctacggaaatatcctagtgatagaaaaatttcagaatgataggatggttatgtacttagtgtaaaccattactagacttatggatgacctgatcgtaaacttaagaaaagctagaactgttaactttggtttgcatgtttgatcgctattgtaagtgattaggggtggaccatcctgtggtcattaagataaaaaagtatttgtttcaatagatactattttctaagaatatgactatatctgaaaatacagtggcaaagtagaggagatattatttgattccatggtgttctatcatcttattctatataagatggtcccactgcctctgttgtattgacacaattaatgaggacaataacacttatgttcttagacaacaagtcacgataccttgtcgtagtgggaggattttaaggaaatcaacctgttatgtgttgcgatatttagcacacacaagtgtacgtatcgtttcaagtagtagactcacgaggagtgaggtcgatcccacagggagtgtaggtaagtacgttaaatttaaacttttacttctatttggttaaataaaataaagaaagaattaagaataagaa

SEQ ID NO: 341813 - DNA, 346 bp, Cannabis indica
aacatgcaacactcatcttttttatcattttcaacaaattacaagagggaaaggtgtcgaaaccttaccaacacttgaagaacacttagattggatgaattaagctagaatcaccaagaaaaagccaaagatccttgccgcacaaggaggctgaaaagagagagagagagagagactagagagaaaagcaatttttccaattttttctaaattcctttctttgaaccaaatgagaataaatgcaaactaaactctttattcagccatcaaaaatcaaataacatttaattttttttcacttattaagtccactaaaggacaaaacataaatggggcaaaatgacca

SEQ ID NO: 341814 - DNA, 1080 bp, Cannabis indica
gatccatatccattagaaaagcgggggtagatgatatagagggtaatgatttcgatgatcatccattggacttgcttaacgaagcataggagaaatttcttaatgatcctgaaaaattcaataattttctaagtgatgctgataaacccttgttcgatggttgtaaaaaactaaggttaccaacagtggtaaagttttacaacatcaaagcagaaaatagagtgagcaataaatattttactgtatgaagtgaaaaaaactttaaattccataggattgaagtatgaaaaaatttatgcatgtccgaacgattgtattttatatcgtaaggaatatgcagacatggattattgcccgacttgtggtttatccattcataaagtaaacaagagtaaggagaataagaatcttatgcctcaaaaagtgatgtggtacatgcctttaattccgcgactgaaatgattatatcgtagtgcagaacattctaaaaatttaatttgacatgagactaagagagttaaagagggaaaactcagatatcctacagattcccaagcttggaaaaaagtaaactacataaatcctgaattcaaatctgaaacaagacacattcatctcggtcagtctacgaatggagtaaatccacatagatctctaagtagtcgccatagttcatggcatgtcttccttattatgtacaatcttcctccctggttagtgatgaagaggaaatttaatgtactttcttttatgatatcaggcctccaataaccctaatataatatcgatgtatatttggaaccattgattgacgatttaataaaattgtatgagaatggtgttcaggcctatgatggttttaaaaagaattatttaatttgaaagcagtgttattgtggactgtcagtgattttccttcttacagtaatttatcaaacttaagcacaaaaggttacgaaggttgtctgatttgttgcactaacacatcggctcgtcgcttggcaaatggatacaagatgtgttatatgggtcacagatggtacttgcctacaaatcatcctgatagacggaagaagaaag

SEQ ID NO: 341815 - DNA, 841 bp, Cannabis indica
acatgtaactccgcacctgctctgccacctatagatatataatgactatgatctttgatgtcttctcttgtatacatttttctccttgaatttaccgtaacttgtcgaagaagaaaacggatcgctaaatccggtcacattggttcctcgagcatcagtaggaccactaatatcattggtctctctatcattattaggacatgtactgtcagtggttcctctagcattactggttttgcctggacgactactacgagtagcaggtgtttggcaattttttctacggggcactcttttctgtgtcggtggcctcagtggtatttggtacgatagtggagtcaagttcaaagctacagcagcagggacctctgtaccttggtcgtctcttatgccatcattgccctcaacataacagtctggaccatcaaaaaaaccatcaatgaagggcatttgtgctacaatatcagcactcgacatcatagtgtttaattcaagtaatacattggcaaccaacacctctggatttatttctggaacaaaactcccaacctcgctacggttttccttaacaaaagttggtgtgggactaggatcgacgcatacattcttctttaacaaagtcacaaacaaaggaataaattcatctcgattcttcgcaagtgtagataaaaagtatcttgcacacttatcatttccaataacttcagggcgatactcacaacctttcctgtacttgtaatttacttccaatgtcaagtcatactccactttgtcaatatccagttcttcatacaaaacatcaaccaaacctgagtagcttaggttcggatcaatgtcaaat

SEQ ID NO: 341816 - DNA, 878 bp, Cannabis indica
aagggcaaaagcaaggcaagagcccactctattcttcaatgatgaggatcataacaaatttgtcaatgatttctcttctaggaagattctcaaaggtaaaatttgtgatctctctagccttgattatgttgattttagtcatcactttgataccctaggatggacatctttcattcaaattaatactccattatatcctagactagtccaaggtttttatgcttgcattaaacctaccttagcccctttaggtgttaaaggaacccttagaggagtagcttttgaactcaatgtagcatctctcaatgacatgttaggagcaccaaatagtggcatattacttgaacccaaactttctctcaaaaatgatgccatttttaactttgatgagtgttctaggaatatttgtggtgatggcccttttattatgagaccaaaaagacaccaactcactttagaggctaaaattctccacaaattcattgttgcaaatcttgctcctagaagtggacaccaagatgagataaattccattgatcaattactcttgcatctcatcatagccaaaactacaccaatcaacctaggctatcttattttaaaattcataattgatgtggacaagcctaatatgattaaggcacttccctttggtttcttcttagctacctttttcctctcttaggaatccctaccctacatgaaaagaaaaatgatcctacctctagtgacattctaggatccaaaactttcaaggctatgggttacaaattccttaacaatgaatgggtgttcacaccaaaaagagggcaaagaatgcaaattgatttggagagtgatgatgaagaaattaatttgcccgcaagtgaaagtgaaga

SEQ ID NO: 341817 - DNA, 378 bp, Cannabis indica
agagccatggtaattgattttcttgcaagaaagttggactttaaaactattgtttgatgttttggatggtatcatgttgtatggagtgttatatgatgacttattgatgtttgtgaatttttgtgaaaaataattgaatatctatttctggaattatggaaaaaattaagcaagttactttcttacagaactcaatttcgatttaatttaaattagttatgattttttgaagtttcgaaaaaatcagggttgagcagcagggcttacgcgcgtggatttcatgaaaatccccatagcgccgaggtttctcggcccagctcccctactgcgcgcgcagacgggtatgcacagcatcccgtctgtacagctcgcaatttt

SEQ ID NO: 341818 - DNA, 1125 bp, Cannabis indica
cggctgtctaggattaacagttggcagaaccgttatgtttcttgggttctacgatctaggatccaacctctgtgaatttgctgaatcagtcaagcctctatgagtttgcaccatcgtatttgtgattagatgttgaataaagagcgattcgtgatccttctctcaatgaaagcaccaaaatgttgacctcgcttttagccaaggacaacgagtctatttttataagcaataaatgatttatagcagcaaatatatgataaagcaatataaagacacaaaaattttatagaggttcagccccgagcagttcggtaatagcctaatcctcgttatttgtattgacttaagatcaaggagaacgattccttttcttatagctcttacaacagtatctctgaatgtataattcttagataatatatttagggtatagtcttagctcaactacttttttgacctcttgcccagtgaatatgcataactatttatagggctagtaagcttgaggaggaagagtttcccctctcattacaatgcgcacaaatagaaagatagtgggatcgatgctgaatgcaaggatcgtgggattgaggctgaatacactgatagttggatcgtgtgtatgccatatccacgtaaattggtcccagagttatagggattgtgctgatgactcacaatgcgaaagctgaattcgctaagtgttggtcactctacgtgaattgctgaatactttgccctgggcatgccagcgaggcatcctgctcgaactatgcttcccgaggagatctccagttggattccacgtgtcaccattcatgtgatgccacgtcaaagttcaaaaattaggataacagggtgtttcaggaaacaactgtcgtatgtgcaaggatatgattatcgttccacaagtaggcatgacaaatggattcaatttcacacacaacttttttgggtactgaatggccatcaacactgagttgatgagaaccactctcttagaaaaggacaaattttgagagctccaagttcttttcctagccaccatcttctctaaataaaagaattacatttcagatgcagagtattctttttaaagatatatatgtattccttgtaaattgg

SEQ ID NO: 341819 - DNA, 476 bp, Cannabis indica
aaagataaaataaaataatatatttttaagtgatatggaggtttttgacaattttaaagaatgtcaccattagagatgctctaagagcacttacaatagcttctctaaaatatagaatttttaaaaaatttaaaaaatcgtactaaaaatacgttatagcagatactctaaattttttcttcattttaaaatttctttaaaatacactatccatgctctacatttatagaatactattcattgctttaaacatgttttatttatttattcggattttgataactgtttttgtatgaggatataaaagtatgatgtgaaatgaagaaactagagttttaatgatgtattttgaataattttttttgagggaaggatcaatgatttcattcaacaaaggaacaaaagacaaagtccaattacactgactcaacgataagcaaaagcaaaatcaatcccgatatacaggcgagcaaacg

SEQ ID NO: 341820 - DNA, 216 bp, Cannabis indica
acaattctaacctaaacctagagggcattctataaatagaaaatgttggcttcaggaaacaaggcacttgcatctcattccttcagagcaaactttctacacgccactttctctctcttttcctctctaaaatttcgaaacccttgagtgaatgtaagactggaaaataagcatcaaagaaggagagaaggagatctagattcagatcttgataat

SEQ ID NO: 341821 - DNA, 1126 bp, Cannabis indica
tacttcttcccagatggcccccatttaaaggcttattccagtgctcctccagacactattgactcagtggatgaggatgtgctcccgggagaaggtcaagaaaagcaatggcgtttttctgaggaagttgaagaaggtgaaggaggacaccgggctcttcctgaggaagttgaagaaagtgaagaagagcaagaagttgctctgattcgcaaacgcaagggcaaaatggttgcccaggaggagcccaaacggcaacggagagctgacactccggcccacggtcttgatggcggggtctctcccatggaggaacacactgcccctcccaatattgtgctgactccggttcctggagatgaggcgagacaggagctccggatagctaaacacaactacgccatggacgaatactcccgggggtatgctgaggtggaggccctcaagaggatcttacgagttgagatgcaaaatactctcaacaacccggaataccagaatccgtgggatctaaatttggatcccttgtcggactggttcggtcgtttcctcgggcccacattagctccctttgccgcggagatgactggcgagtttgcgtcccagcttacccggtgtgcacctaggcggttcgctgcttgtgcatccttgaactccatcttccaagtccaggatctcagccactccctcactgtggtaagtattttgtagtttacttttctccttattattattttctttttggagattcttacttatacttgtatcctttcccagcttgctgctgaggccggccgcctttccaagaacataatcaaccatggcttcgtcctgtccgattttggggacatggatgaagttaggaagatccttcaggatcttactgctgagaggcggctttatcaggaggctgctgagcgccgggaggccattgccaaggccaatgaggaagaggccaagcggagggaagcgcaggcggaggcaatgatccgggaggaggccctgcggagagataggctggaggccaggcaccaggaggagctgaggacggagggcgaagccactgcgaaggccaggcgggagcttcgggaggccagggaagccttggaggaaatggctgccaaggtga

SEQ ID NO: 341822 - DNA, 1362 bp, Cannabis indica
cagcccgagtactcaccattttaggccgaatacttgcaattgttcttcaaataatttcttcttgtcattaatattattacatacttttggtgttgcgaattttgctcgacaacatttggcgccgtctgtgggaaacgggaagtacattcttgctaaattcaggaaggaaaataatcatggctggaaaccaaacaaacggaggtgttaacaatgagtccatcaacattggaatgatgaatgttccgttatctggagttagagcgccacctgtggacgttattaatggcgaaataaggagaggtaatgtcagacctctcaatctgttccctgaagccgctggccctcaagtcggagaaacatccacgccagcagcaacaacggggcactttccacccattactttggcagtagtatccgagggaatcgtccagctcactactgaaaagtacaccatgatccaagatcaactacgcgccctgcaggctgaggtggatggacggaacagggcccgacgcccccctcgagcccccactactcgcacagataaccctcaagtaataaattctaggcgtcgtaataaccgtgttcgcagggaacaaagaaccaaccctgaaggtctagacctgaatcagccaacctcgggagaccagtctgcgaggtatcccaactaggagacacaggttgatgaagaccccgagcgacgcaaccctcgcagcaggccttcaagagacaacgacgtagaatccacctcctcgtcttcacatggctgcacacctagcaggtatacaaggtccggttctgttgagacgcagcagggaggacgatatcaggtttgtaagggtgatttgcgtgatcaccttaacgctgttttcagagcacgctcccacgcccctcaagacgaggaaacaccccgtgatccccaaatgggcgatcaaggtgtaaacactcgcataaacccgcctaacgcaccagcagcgactactggggttaatgtcccgtcgaacctcgccgcagtagccatagctcctgtagtcgcagcagtcccggctcccatagccgggggtattgatcaaagcatgcttttgcaagctttgaaaatactcgagcagcagagaaagcccatatacaagctgcatgggacctctccttttactacggaagtgcgacaagctcagcttcccaagggattctcgagttcccaagcaccgaagtggcatttgtaaacgacaatatcgacactgctataccaaatggagaaggatggatattgtacgtcgatggggcttccaatagtgaaggttccggcggtagaatcatactaattagtcccaataattttaaggtacacgctgctttacgttt

SEQ ID NO: 341823 - DNA, 595 bp, Cannabis indica
ggcccctcctcgggtctttgtctagttccgccactgactacaaggtcactctattatcaaaataaaataaaataataatttggaattaattaaggaccggttccttgtaaatataaattattattataataatataataaataaagaaaatataatacaaaatatcgttttaattttatttcaaaaagttgcatatagttgaattgggttatatagaattggtcaacgaaattcctgtagttgaagttgaagtagaccgaacccaaaaaaagatcaattgtatctatatgtatctattacacacacgttgtttgggtcaaaataaagttccaatctaatcttgttcaaaaccctagcctctttaatttaccaaaataattaccagtattatctaacatccccatctgcaggtgatattttatatttatttaatactatcttataaaaattataatatttaattatataaggactcgatagtactgtatcaataataatataatatgttaattaaacacagactgatcctgagcataaacaaactagacatgtgtctatgtttttttttttccttcctagaaatacacattttttt

SEQ ID NO: 341824 - DNA, 912 bp, Cannabis indica
actctcagtcagaagaggagcatgagcatcatcatcgaatggttttacagtgattcagggataataagttgtatgcaaaggttaagcagtgtgaaaattggttgttagagttatctttactggggcatattgtagggaaagatggaataatggtttacccgagtaagattgaattagtgaagaattggccgaggccaagatctgtgatggaatttcgaagtctcgatttagtagggtattatcgactcttcaccgaattattctctatgatctctatgccactaaccgagttaactaagaaaaataagcgattcatatggttcgataaatgtcaaacaagtttctaggagttgaaacagcgattaataacagcaccagtgttagctttaccatcagatctagaaaagttcattgtttactgtgatacatccagacaggttctgggatgtgttctgatgcaagcagacaaagttatagcttatgcctcccgtcaactgaaagattatgagcagagctagccaatgcatgatttggcgcttactgctatagtatttgctctaaaaatatggcgacactatctttatggtgaaaaatgttagatttacactgataataagagtctcaagtactttttcacccagaaagttctaaatatgacgcagagaagatcgctgaaactggttaaggattacgactgcaagattttgtatcactgcgtgaatgccaatgttatgacagatgcattgagtagaagaggtcccgggcaagttttcaccactattatgatagctcctcaactgacctcaaagatggtcaatgcgggaattgagtttgtagtcggaaagttgcataacttgacactccaatctgatttgcttgatagaatcagaaggcgcaattggaagatcctga

SEQ ID NO: 341825 - DNA, 1111 bp, Cannabis indica
ttataaatcatctgcttatgatgccattctatttttttctatgaaactgaatggctcagatgactatattcccgacattctatcccgaaatgatatcaatcctcgatcttaaaatctccttcttgtattacttactataggcaacctaaacttagagttagattagtagtggtggtctaagaaagaatcatttcattgtatatttggcataaatttaagtttttgaatttaaattttagattccaaattgaaattttaatttcagtttctaagaatgcattgaatattacagtacgacttttacaagttatttttctgtcaatggattcaaactgtatatttatgtatgaaatatgaattttgtattcagtgaccaggatccacttggactattctaagaactctttattataactagacccaagattcatcaaaccacatgatatatctttggcagttgcatcttgttcatagtagttttgacaaattattctctagaaagagaatatatgcctatatccacttgaaagaaggatcatctgtattagaaaatggatgtacatttaggcgtggatatgagttatcgttatattcttaaaatgatcactctacatatttatcttatgcaaagaaacttgaaatgtttgagaatttcatgaatttctagctatggtggaaaaccattaaggtaagtggttaaagatcttgcgaactgttgcccctgagttttcccaaaatacgtggaccaaccagacagggacacgtggacacgaaggttttaacactcaaataaatagctaagtctttataaagaaagacattatcctgaacgtgcctcctggagaaggcatacgaggctttctatgctcccggagattaacgtggcatcaaagtatctccgcgagatgtcaggcttcctatgagcagtcatctcgcatttagtgccgcatgggaggaggcatgttggaactgccacacgcaataaagtctgacgacacaacccccactctacacctacgagactatgacctctagagtctaatgacggccactttgtgaagaatcacatcggtcaaaaaggaataaggacaagcctcataaaatccctaca

SEQ ID NO: 341826 - DNA, 655 bp, Cannabis indica
actttttgttgcctcgcaatatattaaaaaatggcacacacttattagttgacgtcgaaatgaatctattaagtgcagccattcttcctgtcaaggcctgtacttccttaggctttgccggtaatggcatgtctattaatgccttgatttttttttggatttacttcaatacccctcgcactaattatgaatcccaaaaactttcctgaggaaactccaaaggaacatttttttcgagtttagcttcatgttatatttcttttttatcttaaagcattccgcgaggtctgaggtatgatccttaattttattgattttaccaacatatcatcgatgtaaacctccatgtttcgccctatttggtttgcgaacatttcgtttaccaatcgctgatacattgccccatcgttcttcagaccgaacgtcattgccagcatctgggcgccacgcaccactcccaagccatcttgtgtttggaatttcaaggataggtgcttcatcgaactagctgcccctagtccaatcagggcttgacgacccaacaatatgttataagccgatggcaggtggacaactaagaagtcttgcataacagtagtagataagggtgcctcgcctaaggttaatgtgaactcaattatgctaagactggcaa

SEQ ID NO: 341827 - DNA, 491 bp, Cannabis indica
ttaaatttaataataatagatttttttaattaatttgcttttagtatactaaaaaatagaaattaaaaaactttcgttttttttttgttttttttttttttaattttgaataaaaaacacagttctctaacaattttttttttctaatttataattattattaggagtgtgtataaatcaattcaatctaatgacaaccgatcgattcaattacaaccgaccaccaaagattggatgtccaattgtgattggatcggattggatgttatttttaaatatctaattagatcagatgatatgttggatggggtgttcaaaaatccaatacatccaacatctaatcgaaattcttaatattttcatttagtttggatgcataatttgattttatattattatacataaatatatatatactagcaaaaaactatgtgcgaggcacgtatattaaattttatgctaatttttttttatgttatttgaaagttata

SEQ ID NO: 341828 - DNA, 460 bp, Cannabis indica
aggacacaaaacccaacaataatttgtggccaagatcttccattgcgttgtcattatgaaggcaatgattttgaaattgactatcgatcactttctggcacaatcaatagttggaaggaattgagtacttctgtgtcaacaagtttttagacacttttgaaatcagtgagtatattatcttccatgtgggtatgctctagtattgagatatttcgtgatgttttgaaccaattagtgagttgctgatgtcctacgactcacacatttttggtgaattgggggtgagttagttgtaacattagaagatgtctatgctctccttttactgcctatatgtggtaatacttccgcaattgaacccatggcaaaagaagagaaaagacctgttgtcagccttgacggaagcatccaattaggtaaaaaaaaatgatgccacgtgtgatatgcacgaatggataac

SEQ ID NO: 341829 - DNA, 501 bp, Cannabis indica
catgtgaaggagaaggtttatcacgctctaaataacaagtagcaaactaataaccactcttgatagaatagaagcttgaagaatcatggtcccaaatcaatatacgatatatttttcaaccctaaaaaatcctaagtgccaaactctaactctctctctaacccacacaccactttctctctttagagaattggtgtatttcctctcatctcagttcacagtatctcatgacttgagtacacactgtgatagaaaattcatctaatcaatcttataagcccactcttatcgtgagtgttgaggatgatctagaagacctggtgtgaagtcttcatttatttcatatttcttgtagattggatgatcaaaaatatataaaaaaagaatcaagaatacactgatagacatcaagaggtaaaatactttttctcatagattagatttaatttatgtaatcatgttgagattttgggatcatggttcatattagattcaactaaa

SEQ ID NO: 341830 - DNA, 1013 bp, Cannabis indica
cagccttgacggaagcatccaattagttaaaaaaaaatgatgccacgtgtgatatgcacgaatggataacccatttccataaaggtaacggctatagtcttgtagaattgactgcttgtatcactttatggttaagtaggtatatttttccctcaaaacaatccaggtcggtacgtcatgctttatactccttagcatgtaaacttgcccacgggaagcaactcccaataggatctttttacctaggaactttgtatcataacttagactccatagtttgtgatataaattctagaagtatgaagacaattagtgtcgtggatgcttctttcctccaactgtttatttgggagcaatttcataagcttgccccaccctacaaatggttgaaggatggaagtcctcgtgcctggtcacagttttgttctcgttgaaagggctcagtacagttgactgatattgttgactatatttcagaattcaacttctgcccatatcttacaaacatagatgcttatttcaccctggacatgtatgatggaagtgtggtaccattaatgagcaaggttcgatcgaatctgaatatttctcgtggtggtataggattttggttttctatttgtcttcctcggtggttgttgtgccttcaagataactccaaatctctttctcggtcttttatttcatatcgtcctgatcgtgtggctagacaatttggatttgatcagcatgttcctcatgatcgtaaggcagggagtctagagaaggcatcaaaatcatgtttgttaggttctcttcaagtttcaaaacactcacatgacttgttccaagtcccatgtaaggagaggcagggtggggtatcctcaaagtttgctgacttatggatgcaccaaaataacatatggtcagtctgtcaaagtaagaatcatgatcgcgaaaggggtatggactctaccttatttttttcttatcatgcatatctttttattacatatttatgtattaataatgtc

SEQ ID NO: 341831 - DNA, 633 bp, Cannabis indica
aaaaaaataacagtacaacaaaggctcttttaacaaatgaaattatccctccagtatatgtcatgtgtttaaattttagaaatctaatttaaccaactcaaatgataaataaaagttcaaaaagtcgttttctcaactctcacaattcaccaaaaacaatgaaaaactttaagcttgaaaatttctcaactatttgtgttaacaaccattttactacatgtttgaaaagtgcattaaagaactctggaaatcacttcttaatagctaaacatagcaaaaaacaactcaaacaaaatatttcaatcatgcttagaaaaatttgagaaaatttgacttaaaaattcaacacaacaatgtaattctccaaatgaaagctcatcagagcttaccacccccaaacgaaaatcagacagtgtcctcaatttcaaaacaaatatgcaatgaaaaagatgggcgaaagagaacacctggaagatgacaatatccacaaggcgacaattgaagcaacctgataacaacaaaacaaacaaaaaatgaaaacacacaaaactaatagaaaagtagaaaaataaaataaaataaaacatgtaaaagaaataaacaacttagagtgtatactgttgggttttatgc

SEQ ID NO: 341832 - DNA, 625 bp, Cannabis indica
tccactgtgctgacgacacaataaacaagaacataaatgtgaaaagggtttggatgaatttatgaatcaaatagacatgtaattaataatatgaaccaaaaaatacacaaatgaatgaaaaatacttttgtttatttattgaaattgaataatacggattacattgaaatagagttttatttagggtataaaacccaacactttgaataattaaaaaaaggtaattcaataaaaaaaaaaaacactactgcaaaagttagaattcgcgactgtcctaaaaatgctttttttttggagacagtcgctatgaaaattaagtaactatttaaaaccgtcgggaaaaattagcattcccgacgatttatagtagtaattatagaaataagcgacgattttaaactgtcgcctataagggcccaataaaattttacctacttctcgccacatttttcacgtgcccacctacttcctttctattttcaacatgtccacctatttcttctccattcccataccctaaaatgaaaatcttaactctccaaaaccccacccacgcctccgcaccatcgtcctcctctctcgtcgtcttcctccctctctcgatctccttttcttctcgtctctc

SEQ ID NO: 341833 - DNA, 730 bp, Cannabis indica
ctaggtccaatttcagttatgattccaaatccaagtcctagttccagtctcagtcaacttccagttttggttccaattttgggtcacagggtagaggttgaggtccactttttgatttgggaatgggttcaggttcgggagtggcttcgggtccttgttagggttctggtccagggctgggtcccaaatccagacacctactacgggttttgtccaagcccagggtccagatccaaatcccaatctcgagtccaagtctggttccatttctggtgccgggtcacgagctaggtcctaggttcaagttcgggtctctgtcgggtattaggtcgcggtcctgactctatttgccaggtccctatcctgaatctaggtcaaggtcttgattattgtgtcgattttggtcccggtctatgttcgggtttgagtcctagtctcggttcgggtttagctccctgtctgggttttgatctgggttcgggttagggtttaggtcctagtccttgtcctactcctacttcgcttctatttccatttgcaattttgtgttcaagtttgggtttgagtttgggtcggagttcgagtcctggtctgagtttgggttcaggtctggatttcagtctaggtccagatcaatatccgggtgtgggttcgcgtcctaggtcatggtctaggttcggtccgagtccaaagttccaatcccgatctgagtctagattcagttctgggt

SEQ ID NO: 341834 - DNA, 428 bp, Cannabis indica
ctttcagaacatcaggacctcccagaaacactggaggtgcctgcttcctgaatctctcatataaaggctccatacggttaccagcaacatgttgctcagctgtcaccgcaggagctgtagaaaccgcaacaggcggatgcgggggaagctcaacaggagcatcctgttgcctgagtcgtcagatctcttcttcttgttgctcaattctagtttgcatctcagcaaacctttgttcccaatcaaccggagcctaaggtgggttctcctgtccacctctcgggtcatgaccgcggcctctaccgcgcccacgggggttttggggagtttctaccaccccgaccacctccggtctcaccaattcaccctgccatctaatgtttcgctggtcgtcctattaattaggacttagcctgcgaacccacaaggca

SEQ ID NO: 341835 - DNA, 885 bp, Cannabis indica
tcacatatcttttctgggtgttaatgctgctcttgcgatatgtggccctcctgaaaataacaaggatgtcctctccttcaacaggaagaggttgtaaccactggttgtttgggttattgggcaggctgggttggttgtatccatggccctcgcttttcacgtactgtttaaaatggcctcaagtgatgagactttctatttcatctttcaattggcgaaattcgtcagtcgtatgcccaatatccttatggaatttgcaatacttgttaggatctcttttgctcctcaaattcctcatgggctcgggcttatcgagggcaaccttttgctcatgtgtgaggtaaatattctcccgattttcattaagctcggtataaatagtatttacaggcacgtacttatcatgcttcttctacttctttttatcctttgacggttccttaactccgtcctttctcttcaaaccagaagcccccgagttatcaattctcgtggaaacaatacttgttgaaacattgctgggttttcttcccaagcttattttcaacagattcatttctttttgggcttcttccttccaaacgaacacctgagcccttttgttgaactcaagatgcttctcactggacgtccttgtaagtcatcccacagctcgcccccctgcaattaatagatcagtagagattctcgcctgaagggctgtgagttgcgtgctgtcatcaaaatccctaaccctagccgcagtcgtgctgaaatgacttaagtgcgccttaagtgtctcgcccggctggtactttatattggttagcgaagccgcttcgggtcgcctatccctagcagcctggaattgtttcttgaaatatctggacagctgctcccaggaag

SEQ ID NO: 341836 - DNA, 3772 bp, Cannabis indica
gaccctatatttataggtgagatattccattagtatttacgccacattaattgtcagaatattttgacaattaatttgataaatcaaatcaagaatgattcgataaataaaaaacggaccatatttagaatattcatacttatcacatattgatttgtgataaaatacagtcagggagataatgtaaaattaatttgaacgattttgtactaatattaaaaatattcttatattcttccacttggtcagtatttagatttatcacttaaacccaatgtttctctttacacaataaacatatggatcatagcgataggtcctcattatatgacgagtgttatctttcatgtattgagatatattcattacataaaaatgtactttatgtggcaatatacttaagcgaataaaccctacaccttatgtttgttcttgtattttcgttaacaaaattaaagcctatttcgtgatggagttgcacaaaaataattgtagtaaaaggaaaaaaaataactcaaagttttcttacatggttttgcagttaaatttttgcatagtccacaagtctatcttattagatttctgatacaaaactagggctttttctctaaaggatttttcgtcgttttttcagtgtattctgcccctatttatagttacataggagggcagttaattacaatcagaatgatatcccacaacaataatcccttgaaattgtgggatttgattacgtcccacgtaaaataaatgcggttgttatttgaaaatcacataactgtgattggtccgcttttaccaggtcaatgcatatgtgtattaaatatgttgcaaaatgcatcgtgctgggacatctggctgggaacatagcaacaataaccctggcagcaagctgaaacttttcccatatcttttcgaggttgataatataaatctcgtcgtttctacgattgaagacataacgctccatctcaccatcacatttcttggtgacaagatgaacttcagcagtcaacatcatttgaatgtcagcttctatctgagagagctgactcgacggagcaatgaatcccattgaaagatgtttgaagcttagtgaaggtaccatgagtatgcccccctatagcgagatggatgtctcgctattccctgttcaaattcattcaactgttatacttagtttgtataatgtatattatacgctgtcttttaacagtcaacatgtttcatctacttctcttcatatgtaatgaggttgatgccttgctttgtacttcttacgtagaattatttctcgtcaatgcgcgagacactagtttgtatatccttatctcgcttaagactttatagttagcaagttgtaaatatactctatcaactctacatttaatgagttattctattttactatcttctaatataattatcattatatttgttgattcgtattctcccattttgacacgtgtcctcctctgaagtgccagccgaatttcgggtataacaattgtcccttaaaaagttcattttaatgaaaagtactttttaaatgattgcatagggtatttataattttgaaaaaatgcatgtcctctcattttggtggttttgtggtttcgagatatatcaacatttaataaccatcttttccacttctctttcaaattctaggcgttggatcaattgcttccctgttctaacggagattatcccaagagtattaaaggagaaaaggaaccacctttgcattacttttgtcatttttgaaattcttgaattttttcaagcttttctgtcgaaaaaccattcctaaatttgctcaaaaccttgcatgccatctttgtgattaacattttttctacgagtttcatccgatttaaattttgacttcaagcattcagggggatcttcacgccgtttgttgattcgtagattgtagggtcgtacatcgtcccaaaaaccgacgccaaacaataagtgacttttctcctgattttttttacatgctcgttatgctgtatttctgggtttaattaccaacttcttggtcagcatcgttgttatctcatttggttttagcaatttttagggtccaattgtatcactgtaaatgttagggtttaggcagaacataggtttttgaaaattctccaatttaccaaattctagtttgataattttcttccaagaattgggattgctttctccttccatcaatgtcccaatctaggttagaagtttatcgtccagaagagttagaaattgagtatcctactgaattttccatcccataaaaacccaaaattccaaaacccaaatccaaattggagataattgatgcaaaaattagggaacacctagtgaaaacccaccaagatgatattgctagtcgccacagatgcttcttgcaagaaattatagaaggcagacgccatttcttgcgagatgctacttggcctgaacctctcaatgtgtcttctattcctttggctaagcctctatttttacccaaggtcacaattgcttttgaaccaggtgacttggattttgaaattatctcttccaagacacgtaaatcaaagactcctcaagaccctaatgtcaccttcgaggctgagctaatagagtcaaaggtgcgagccatcagagaatatgtaggtaacaccttgagggcttgtggggtcgaatataggtgggactgccatgttagatctgtacgtgtcggcgagttcagttgctatcctccagtgcgactcacgagcaaaacatcctagagggccggtggtgagacaagtacaagtggctcaactggaataggcgcttggagcctcgaccacatcagggctggagcaataatccccctgtgagactactttaaggacttcctgaaccacctcgggcttgtcccatttcaactgaatcctatttcatatagaatcctcgcaagttttagggttttaaacaaaatcttgaattgggagtgcctcgctcccttggaaatagagtatctctattctattaaggctgttccagtgaggatgaatgcaatagggggtttttattatcttgggatgcacacaggcgattactagatcattgttgatttgcccaataaaacttctttcaaggacgaattcttttggacgatcggtctctcccctatcggcacaaccactttccgcattatacgtaagtgattatttgtacttgatttggttaaattaatccatcccatacggtcttaggtcatgcgactttcttctgaatgaggtcaacctaacgtctgtggatctcctaactaacaaggagtttacttgtgattataaatatcccaagtattctccttcttggcagcaggttcccgtcccagacgaggagaaagctcaagatcacatgactcgggcacaatacctccaaaataatgcccctcgggaagctgatgaaggagcatcccggggtaatcaatgtggttggtcacccacagtgcttagggtcgagcgtaatactctagtttcatttggagatagccgctataacttttagacctggaatcccctcctcatatatcgtaatacacataggtttgatagttggtatcccaagttccacgtctaaattaactgtactgacttgtactacggtatagccaaggagtacgctaccatgacaaatagggcaagttatatatacgcaagttgggatttagaactaattaatccctatgatatattcaggatcacaggttgtagggatttttagtagatattatggt

SEQ ID NO: 341837 - DNA, 704 bp, Cannabis indica
tgaagtagaaattatgagcccaaaatggattacttctctagtctattgaccataccacaaaactatcctaaacaaataaggagaagccatacaaaatggcacaaataccataaaaggcacaaaagatcataaaaaaagtgcaaaaaaaacaattaaggtcttattagcatatatactttagacatataataatactatttgaatagctagaataagaaataaatcaaacattcatatataaataaatacgtatataaataataaatacgaataataaaaatattaaaaaatattttatcatatttgtataataaaagttaaaaattaaaattaaaaatagtgagtataattaaaaatcgttattaattaagaaataaattaattaaattaaaagtaaataataaaacgaataatataaaagtgtgaaagatttatgccaaaagtaaataaaattataataaatgcacttgacactaagggggcgtttggtatgaggtgttcaaaataatttgattataggaaatattatgaaggagaatatgattatagagaaatgtgtaaactgcgtttggttgtgtagggtaatatgtaatcatattcctgttaattaaattaaactgtttggttgagtacaggaatcttatatattattttaaaaaataagaataaaaatattttttatatatatttatttaatgttaatt

SEQ ID NO: 341838 - DNA, 587 bp, Cannabis indica
gtaatgggttttatttagggcacaaaacccaacactttttacatcccaggggagtgatatagaggctgctgtctctatttttgactgtttaggatctgggctcactgaccaggatgtggagagtctttctcaaccctttgttgctgaggaagtcaagagagctgtttttcagctttctggggacaaggctgtagggttagatggtcttaatgcctttttctatcagaaagactggtctgttttgggtaatgattttactgcagctgttttggactgtctcaacaagggtattgatttttttgaaatcaactccactttaattgttttaatcccaaagaatgctcgtgctaatatgcttaaggattttaggcctattagtttgtgtactactttttataaagtcatctcaaaagttttggccaatcgtttgaaacgagttttagatagtgtcatttccccttttcagagtgcttttgtttctggtcgtgttatttatgataatattattcttgctaatgagttagttcataatataactaatagaaaagtagaaaaaaggggttgggctgcacttaagcttgatatgg

SEQ ID NO: 341839 - DNA, 740 bp, Cannabis indica
gtgtaacctcaaatttccccattgaattgtgagtgtagtgtacaagtctaaattttatctattttatttcttgtatgattattaaataaggaaattaatatctaaaataataattataaatagataataattataaattgtgccttttttttaatgatcttaataaacggttctgtatttttccttcctttaattgataaacgtttttggtttgggtcaaataattacaaaatgggtagctacattataaacatatgattcactcaaaaaaaaaacaatataaacatatggtgagtaagctttgtaatatctgctaactccgaaagggtatttttgtaattttatttagctgagagtatttttattattttacatatttatggatttaaatatgtatgggattatttttatgatgatataatatttaagttattggcatgtgcataatgcctaatagatatatatgtctggatattgttatatgggtatattattatattattataaatattattattattattataattataattattattattattattattatcattattattattattattacgtactgtttgtatagaatgtatatacacgcacgaaccgaatgcctatttttgtggaatgggaatcgctccacttcggttcaaagcgatattttgcttgggtttaaatacgatagaaattaggttttaagctctattttcgtacacccaaaacagagaaccaac

SEQ ID NO: 341840 - DNA, 939 bp, Cannabis indica
gatcataagtgactaaaatacgtattatatatattttttataaaaaatattacacaatatattacatagaatcatttactaatatatgcaagcttcatagactaataaattaattggcgtatatcattaggtttgattatagtttactctattaaaaaatataaaatgttgttccaacaaacaaaaactagtaggtttattgacaaatataatggtaatatgcgaaaaaaaaataaaaatttattttaatatgccaaaataaactaatagatttattagcatatacgatggtaggctatactaaaaagggaaacaaagaataaaaatttgtttcaatatgccaaaataaactaataagtttatttggcatatttgagtatgtgcatatctgattataagatatttagtctaatcatcatctttttattttaaaattgatgattttattaaaagtaaccaattggtatcttatcgaaatcataattaattggtctaaaaaaatatgtctttttagtaatgatttaaaagttatgtgtaactctaatctttacttaattaatcaaaatatatatattaatttatatttaaaagaatatattttttaaaacagtttactaaaatggtagtttactagatgacaactaattattttggaaaaataaacttgaaagttttagagataaccaaaataattagtttactagatgacaactaattatcgaaatcattaaaatgtatacatgtaagttttagagataaccaaaaaatatctcaaattatataatataaaagtgatacttttttttacgaaaaagttacttattagtttctcatcaacatcataaataaccaaaaggttacttttgaaacgcaggaaattaacaaaaaaaaggaatttcaggattagtttcatttctaggcatattattttgtaattaa

SEQ ID NO: 341841 - DNA, 787 bp, Cannabis indica
agccacttgcactccatcacgagtccttggccctacacggtctggggcaccgacctaataggggagttacctaaaggaaaaggcggagtcaaatacgccgtggtcgccgttgactacttcaccaagtgggctgaggcaaaggcacttgcaactattacagcaaccaaactgcacgagtttgtccataactccataatctatcgatttggcatcccttacaaactcatcttagacaacggaaagcaattcgattgtaaggaaatgcgacaattgtgcgatgagttaggaattcaaaaggcgttttcagcagtcgcctacccatagagtaatgggcagacagaagccgtcaacaagataatcaaacataccatcaaaggaaaactcgaagaacgtaagggggtatggccagaagaactttcgcaagttttatggtcatataacacaaccccccgatccacgactggtgaaactcctttctcactctcctatggatgcgaggccatggtaccagtcgaggttgggacaggttccctgcgaagagatgttttcaacattgtccagaacgaagaaaaacagttgcttcaccttgaccttttagaagaaaagcgcaatcaggctcacctgaaaaatgcggcttatcagcagcgaactgcacagtatttcaactctaaggttaaggagagaattctacgagtaggggatttggttcttcgaaaagtcatgccaaacacaaaaaacccagcgcatggggttttcggagacaattgggaaggaccatacctcatcg

SEQ ID NO: 341842 - DNA, 444 bp, Cannabis indica
gggggtgaatttcagtcatttgctgagtgtgttgttcaaaatggaatagatttccaacattcatgtccacatacctcagctcaaaatgggcgagccgagagaaaacatcgacatattgtcgagatggggttgacactcttggcacaagctcacatgcccttgaaattctggtgggactcatttcaaactgctgtgtatctaataaatagattacccacaccagttttgaaaaaccagtccccttatgagattgtccatggaaagaaaccagattacaagttccttaaaacctttggagtcgcatgttatccgtgcattcgtccctatcaaacacataaattacaattccattcggtcaagtgcataaatctaggatatagtgatgctcataaagggtacaaatgtcttagttccacgggaagaatctatatatccaggaatgtt

SEQ ID NO: 341843 - DNA, 553 bp, Cannabis indica
tgagtgagtacaacttatggtaagtgattaccctattggatgccaactgtgagaataacacaaggcagggcaggttacctcatgcctgatcaacatgtgtgtagttgattatcgtatgtgagtataatgtgcggtagaagacttgatttatggatgtgagaacaacatgcattgtgaatatattttatggaatgtgaattattgttgattaatattaagagtaacttatgtcaagtatctggttaggagggttatgtcatacatagctgttcttactgggcgttagcttatgggtactttgtgtgcaggaaagggtaaggctaagcagtgagactaaagagctcgaggcgtggactgcatgttaaggggctggcacagtatttcttttaaagtttttaaatgttaaacattgtggatccgttattttgatttaactagttcttatttaagtttacagtactaaaaatatttttgttttaaacagtgagatctcatgcttagatatttttcaataaagaagtattttattgtctttatcttattaaattgtttt

SEQ ID NO: 341844 - DNA, 968 bp, Cannabis indica
gggtaaaacacctcgcggataaagtcgttgaccaacaacttatccagttcctgttgaagtgccccttgtctctctgaatccaagggcctcctctttagtatctttgcttggtagtttggatcggcatttaagtgatggcagataatcttagggtcagtccctatcatatctccatgtctccatgcaaattgattctggtttgcccttaaaaaacttattagctgctatttcaattgttcatctagtttcttcccaatgtaaacacactttgtgggatttcctgggtccaaaacaacctcttccagctcctcaattggtttcaataaatttctctcatcttgaatccgaggatcataatcttcatctttcttcgtgccttcttctaccaagactgccattagctagtgaccagcttttctgtgctgtagctctatacgatagtattcatgagccagcattttatccttttgttagcgagctagatggtgattaccaatgggtcgacgtgaggatacctcacgtctttttcatcttcctccgaaaatataatcggaggttcgtcagtctttgctttcttggaaggttctggagtaaaggtagattgcttgttcttcacttccttcacatacctcttttggggattattgctttctcctataatatgtcgccctccctagataaccatgatatcctctccttcgccaggaggaggttgtaatcctttgttgcctaggttgttgggcagattatgctggttatgtccagtgccctgtcttttcacatattgccgaaaatggcctcgtgcaatgatactccctatctcatccttcaactgacgacactcgtgtattgtgtgcccgatgtctttgtggtacttgcagtatctggttggatctctttcatgcctcgcgtgcctcatgggctcaagtttccaaatctgaccttgtgctcatgagagatggatgttt

SEQ ID NO: 341845 - DNA, 1383 bp, Cannabis indica
tgtctttatcttattaaattgttttatacggactatcctgtatgatatctcgggaaatcagggtgttacatgttaaacaccattattacaaggaaactaaatagagaaagcaaacaaaacatgcccctaaactcaaacaaagaaaagaatgaacctcaatctgtcaagcatggataaaggaacatggacacagacttttgaaaatactagtccatcctcgaactcccacatggattcaaaatagtaaaggagacaggaaaaaggttgaacattccttgggataaacccatattctcccttcaacatctacgctccttggctttaaagtcgagacacaataaaagaaacaccaagatctagaaaaggaagagtagcacatccaaaacccaaatgccaactagctacaaccaccaccaaagctccacaattcaccatcaaaggaggaaaagaccaactggtaaccaccaccactgctgcaaagcagactaagggcaaaagaccaccgacgaccaccatccactaccactaaacaaccaattcaagacccataaccaccacgaccatggtcccaacacctaaaaacctcaaccacaaaccgcacccatggaacaaaggaatacaaaactcgtcgttgcatccatgtggatggaccaacgatggttgaagctccactcgatcatagacccaccagaaactacaaactaaagatctcgaggcaccaccaatcaagaaactagccacaagtaccgaaagaaaagaaaactctagagggttacttaagataacgagaaagcaagagaatgaatatttaatgttaagaatacaacaaacgattgactgctaaaattggtgaagaatccaatgtccatttaaaatagatcaaactcactaaaacattatatatcacgcactactttattttattcgaacttcaccccataagcattataattttctatcattcctcattagcaatagcaaatacattcaaaaggtgaagaacctcataaatgtctaaggaaaaagtcagtcgcatgtttagttgaattaggaattcgtaagatgcacatccccaaagtgcatgaaaggtcacttcaatcttagtagaagacatagggcacaaaacattttagctaaatttccaagaataagtaattagttaagcgtgactttctaattgaacatcttaactaggggtgggcatccgatccaatccaatttttttctcctcatccaatctaatctaattagtaattggattcaaaaaatcatcatccaatccaatccaattagacctcaaaatccaatccaatactacccaattactaattggattggatcggttttttaattggatatccaattacacacctaaattttaat

SEQ ID NO: 341846 - DNA, 436 bp, Cannabis indica
tttttattttctatttatttttaaattttttttatagtataaatttatatgcatttaataaaaactttgtatacaaactttgagtacttatacaaacttaaaactttttatgccatagaaaataaactctattaatttttctcataaaaattccactaataagtaataactttaagcaaatcagttacttggacaatttattggacttactctttattcaacttggcccaattagagattaatgaagtccactccaattttatgacctagtccaaatccaaagtggtacattaatgtcaggggtacccttttatcaatcaattaattaaatttgcctctaattttatatttatttgaaacatacctctttttatatgtattatactcaaaataccctgacataagagagtcacatagagagtatcttgaagtaaca

SEQ ID NO: 341847 - DNA, 836 bp, Cannabis indica
atttctattacagcagtaaatatgaatcggaacaaaaactaagatcaagaatatgttctaataatttgctaactttgttcattatattacatccatgtttaattgaaatatgtgtgccatagagatatacattggtgtattgagtatagtctagagttcaaaatgaaccacatatgtcaatagcttaatccactcttaagtgtcatagagatcatgtggagttataatccagagttcaaaagatataaaagatcgttgaactgcatatattattcttaacttcttccaccactatcagatcaaaatatcttttattaaacaaaatcttcataattgtttcagaaataacaattattcataaacatagaattgaaattctaaagtgtttatgtggtattatctttttgcagagataaatataccattgattttttttgtctgtaataagacactaacacatacaaacattataagcatatatatataattggtactggcatacataagataaagtaaatgaagttcaattcacaaatgcaatacatttccaaaagagaaaactttattataaaattctccaaaataaacgaattgtctgcaacaatataaaaaatagggaataaaaatccctaaccaataatttaaatcaaattgtttaggaattaaaacaattaattcaaaaaattataataaagaagattccgagcttcatcttcaatcttggagtatctccacccatctgtccaaccatctgactcaacacgctatgatagcaatccaagtttaagcagctgaagctaaaataagaagaagaacaaacatggttagtaggtcca

SEQ ID NO: 341848 - DNA, 1059 bp, Cannabis indica
ctaatgttgagtagatagaactggtactttaaagtagagttctctaagctggctactgatagtatttgggaaggtactctccattcgagtatcttggtagcagaatgagctccatattcttgttgtaccttcctagctattaagctcccttaatagttatctctgtaacttgataagtgccttcccagttaggtccaaacactcatgccgctgagtctttagtgcttacgaacactcttcagagcaccatatctcctatgaagaattttttgctcttgacgtgtttgttgaagtaccttgccaccttttgccagtaggcctgtagcggttctcttctttcttctacttcgtcaagggactctgccagtagggtgctatttgtttgttggtcaatggttgttctcctatgagacggtggcactagctctacaggcaacatttccttatagccataagctagagcaaatggagttttcccagtggccatcttctcggtagtcctatgcgaccataggacctcttggagcagttcaggccagttgcctttcgctacctcaaggtccttctttagggtgtccttgagggttttgttgacagctttcacccgcccatttgcttgagtatgggccacggtagagaagcttttaatgatgccatgtcagttacaaaaattagtgaacatatcactgtcgaactactttccgttgtttgacacaatcttctagggaaggccaaactggcatatgatgttcttgacaacaaagtcaaggaccttcttggaggtgattattgacaggagttcagcttctttccttttggtgaaggcgtctactgccacgatagcaaattgtacccctccttttccctttggcagttgaccaattagatctatcccccactctacaaagggccaaggagattgcatcatcgtgagctcattgggtggaactcaaggtatcttcaaaaatctctggcacttgtcacatttctaacatagtccatcgagtcttcgatctgctggaaattattttaccaggatcttggatctactcacaagta

SEQ ID NO: 341849 - DNA, 579 bp, Cannabis indica
tcattctttgtccaatagtcttcgtttttggttgaacgggccggaagtttggattgatggtcagggcatgtgaaattatagaaggatcaattccggccatgtcctcatgtgaccagataaaaaagtcaatgtttgctcttagaaattttatcagagctaattttacttcaagcaacaaactttttccaattttgagttttttggtcaaaacacttgggtcaaattcaatttcctctaattcttccaccggctcaacatttgtatttggttccccaagtcgggatccacatcttcatccctgccttgggtggttccctatttggcaatgctcttccccttgtccgaactctgactgaggattcctcctttttagccttggttagggcaaggttgtaatattcccatgcaacttgttgattccctctcaggcatcctaccccattctttgttgggaacttgacgcacgaacggaatattgatgtaacaacttttaagtcatataaggctggtcggcccaacatgacgttaaaggctgatggaacatccaataccaaaaattgtgccatcacagttatgctc

SEQ ID NO: 341850 - DNA, 654 bp, Cannabis indica
tagtagggatttatatataaaaaaaaacaaattatatataaatattaatttccaaaagaggccttattaaatatttaattgattattttaagaaaatagttaattataattaagtaattctaaaaaatttttttttacctattgataacctgctattataggtcaaaaaaaatgtaaccatgatggttacaataaaaatgtaattatcgagtagtcacccatacatatatacacatgggtaaataccattttagatcctatgttttacaaaaggttaccaagtggaccctctgttttgttaaatgataaaatagaccttatatttttcaaaatagtaaaaataggacactgagcttaattttcaacaattcattttttaatataacaaactttaagaaaatttctaacatgaacagatacagaaaatgtaactagttttatcataatatctttagattagattattattaagttttattttgacaaaaaatcagttcagtatcctatttgtacaatttcagaaaatacatggttcattttgtcatttaacaaatcaaagggtccaattggtaaattctgcaaaacacagggtccaaaatagtatttaccctatatacatttgttattttatttttaatttatttattactaatt

SEQ ID NO: 341851 - DNA, 605 bp, Cannabis indica
ttgtaatacttttgcattaaatagttcctggaacttctcccaggtcatcgttgtaacatcctgagtcagggacaccatgtcccaccataccaaagcgtcttcttgaaattgaaatgtggcacatgccactctatcatcaccgatgatgcccataaagtttaagattctggtaatcacacttagccatttctcgtctttcatggcatcaggacctcctaggaaaactggaggtgctcgcttacggaacctttcatacaggggttttattcggttcactgcagctacaggttctgcctgcacaacaggggcaggagctattggtatttctggagcagggattgtaggagcaccctgttgtctcaatcaccaaatctcctcatcttgttcattaatcctggcttattttcccaatcttgggcagcttgggcagcctgtggcgggttagcatcaccccggccacgtgccctgcctctaggacctctaccttggccacaaatatttaaggtaatctaagctccctaaccaccactggatccaaccgaattgccttggctcctggtgtttcgcctggcgtccatactaattagaacagcttgcgtaaccaa

SEQ ID NO: 341852 - DNA, 1338 bp, Cannabis indica
tatctctagaaattcgtactcatttttccctaaagagtagaactaaattaaaaacacactaaaaattaacttaaaaataatactaaaatcaacctaacactaagtacagtttactatacactatactactagtgtgtgtgattttgattctgatcacatatgtggatatgcatgtagtaaacatgttgtgtataattcgattatgcataactggattgatatgtaataacatctttcattaacgtgccgtttaccatgaaagtgttattcatattacaacgatgatcattagtagaccagtctgaatcctaagtatacatgaactcttgtttatgttcattgagttctttgattcactcattatagtttatcaaagaagatgattcttatagcttctattttgggagcttaataacatgagtagttgggaacattttatacaataatggagtccaagctttcctaacaaattgaatattagctcccttatagtgttatttctgggagtgctaacagttggatccaaatctataataagttatagattaattgttcacattgaattaatggaacataagcaatcaagagataattagaagggtaaactggtaattttgaccaactctaattatgaactaatgattggagggtgaactgcttatattgattatattaatggactataagtaaaaattctatgaatataattctatattgcaaatgagtgcaattcaatatttatagtggaatattgatgaaattaataaatcagatcaatactaatcaagtgtttattggagcttcaaaatataggtctatggtccccaagtcacctttatacaacattgtataagagaagattttatttgatgagtaaatttgagtgagaattaatttctaagagaaatacattcttaaggaaaaaaaatagtaattcatagaaattattattttgaataattataacaattatgaattgtataattaaatagtatttaactatttagttctatttaataaaactatattaattagttaaacataatattattcttaaataatattaaagaaatatatcattttggtaaaaataatatttattttaatccttgtgaaataaaatattaacgagaattaatcaattattatttattggcaaaatacataataaatcttatttatggtaaaattgagaaattaattttggaccttaaaatatggtccacacatgtaggatgacatataaaggcccacattagttttgtttgattatttcattggttaaaataatttaaattaaattaattaattatcttttgattattgaattaaatatat

SEQ ID NO: 341853 - DNA, 798 bp, Cannabis indica
gtattaaaatgaaaaataaaaaaatggaaagggaggtcagtcctacgatggttggtacagaccgttgggctgtccttgggtgttcatagtctggttttatgaatgttgtcctgcgatggtaaacactttttgcaaaagagttgcatccaagattctaagaattttgaattggaccaatgaggttgggaccaaaaatccaacttttagggacttgaaaggcaagatttttaatttgccattgaacaaggtgattctcagtttctttactattttatctttgttttgtcccagtttattaatctttgttatttttattttttttggttttacattttctatttttgtttctgtttttttagttaaaggttaagaacattcagccatttgatgaagagaggcagaagttacaattggatgacttatttttagaagaatatatcgatgatcgtggtacaactaagcaaacatttgagagtggttcatcttctagaaaatctgattcagatgacatagaaatgttaaagtctaagttggaattggtcatttccagtcaagaatcagtggccgaagattttatatctttgaggtgttttgttgaccttaatttcaagtctgtcacgactgttattaagaatacacaagaaaaagttaatgtcatttatgatcgaccttctgttcaggtatttattttcatagtttttgtttcatatttttttctggttattgttggtgttttttttcctattttatttcagttgcaatactgttttcaactaggttaagtcatctgatgaattt

SEQ ID NO: 341854 - DNA, 734 bp, Cannabis indica
agaacataagttatatgccaagttcaagaggtgcgaattttggctaatctcatgtgtccttccttggggcactttgttagcaaagagtgggatcaaggtggatccatgaaagatagaatccgtcagggattggccaagaccgaaaacagtgacagaagttcgaagcttctgggtctggctggttattatcgtcggtttgtagaagggttctctaaaatttcaacacccttaagcgagctcactaaaaataatcagcattttgtatggacagataagtgcgaagtaagcttttaggagttgaaacagagactaatcacagctctagtgttagccctaccttctgataaagagaagtttgtagtttattgtgatgcatccagacagggtctggggtgtgtactgatgcaggctgatcgggttattgcctatgcctcccgtcagttaaaagattatgaacagcggtacccgactcttgacctagaacttgtcgcattagtgttttctttaaagatttggcggtattatctctacaggaagagatgtgaaatttatactgaccataaaagtctcaaatattggtttactcagaaagatttgaatatgagacagaggtgttggttagagttggttaaggattatgattgtgagatcctttaccatcctgggaaagccaatgtagtgcttgatgccctaagcagtaagggtcctaggcaagtagctagtatggttcagat

SEQ ID NO: 341855 - DNA, 977 bp, Cannabis indica
ttaacaaaaataaataattaataactaataattactaaaaaattaataaataataaaacaataaaaaataatataataattaatcattaataataaaataataatcaataaataataaaaaattaataagacaataaaaattaataataaataaaaaattattaattggtaatcaaacaataactaattaataattaataaaaaaaaaattacctacgggtccgatggctaccaatcggacccactgtgaagtccgattggtagccatcggacccatacaaaaccacaaaattggcaccatcggacccgacataatcggaccatcgggcctcaataacacccatcggacccctgtacaatcgggcccaactatgaccatcggacccatacaatctgaccccctatgaccatcggacccacacaatcgggccaacctaatttgaccatcggaccccccccccaccaccatcgggccttcttcatctacccagtccgaaacacatccgaagcttcatctacccagtccgttcacagatccgaaacaaccccacaccaaatcgaacccaaacaattttttaaatctaacaactaacaattccaaacaaaatcacacacttaataaatcttaaaaacactttctaaaaaaaacaaaaaaatcacaccttggccatttttttgctgcgccgtcaccgtcggtcctctgctgcgccgtcaccgtcggtcaaggaaggggctgcgccgtcaccgtcggttgaggaatgggctgcgctgtcaccgtcggttgatgaaggggttagggttgcgagttggagagggttcggtttgagagaataggggacgaagagagagagagaattttgaaatgagaggggtaaaattgggatttagggaaaatatatcccactttacaaattatgtttagtattgtattaggattcaaattttattatttattaagcatacaaattcaaatttcc

SEQ ID NO: 341856 - DNA, 852 bp, Cannabis indica
aattaaaaaaaaaaaacatatctctatctctcattctctctctaaagatctaaagataaacccccactaagccttaagttctctaggcgctaaggttgacttctggaaaatcgtttcgacccttttttaatttttaggttttagatttgaatttttcttaacttttttattcaaaatactgaagaatgataacttagaaaccacttggcgggatccaaatactcattttggagtcccgaagtcaaactgggcgcaagactagagaccctgcccagacttgactgttatgactcgggccgcgtacttaacttcatgaatgttttctttcttacgacgtgtcaaatatttatgtttacatcatgaggattactttttgtttaaatatttgcccccaaatcaataataatatataaagttttaaacaaattaagttagatcaaagatgttagcaagatgtatgagaacaataatgttaaatttttataaattatagaaaaccacttaaaaaattattttatattaaaaaaataatatataaagtttaaaaattttagaaaaataaatataaagtttaaaattattaaacgcgaacatatatataatagtattaagtttaaaaaaataataataaaaaaaaattgttagatacgcgcaatatatttaaatttgaatcacaatatttaaaaaaaaaatagaattaccttatatatcatttattttattttatttttttcaatttacagtttgggttgctccggtaatttttatgcggattgctatgtggattttagttgcgattaaggttgctctattggttgttatgtcattttttatgcgaatttctataaaaaa

SEQ ID NO: 341857 - DNA, 532 bp, Cannabis indica
ttgccttatagttgcattatcgttttatgatagtttatatattatgctggaatttaatttgacggggactaagaaatagtagttatacaaagtaagttttgtgcaaatagttgcatattaattttataatgaaataacatatgcaagtagcaaaactataataaaactactaaacaactgtatacaaactataataaagctaaggagtgagaaagatgtaggaattaatacctacaccacaacaagagataaaccagtcaaagaaaacaatggtcaaatcagacctttacccagtcaaagaaaattttgactccttgatattagaaccccacaaaacgacagcctcccctttaatcgaagctacaggacgtttttaatttaattgataaccctaaaaccatcagacatatatatacatctttttctcaatcatacattcagcctctaaatgaaacctagtcgtgagacctttgttcttctttgaagaacacagcaaagacacaaacaaaaaaaaccaacccagaaattaata

SEQ ID NO: 341858 - DNA, 566 bp, Cannabis indica
tttatgctgcaatttaccctttttaatataaccaacataattcctaatacgaactacgaacagatgcaaaaaatttaactagttttgtcataacatctctaggtcggatttattattaagttttattttgataaaaaatcagtttagggtctattttatcatttaacaaaatagatggttttatctgtaatttttgtaaaatacaaggtctaaatggtatttattctattaaaaatggtgggttttttttaataaataaagaaattttattaaataatagcgtgcaatctaatcgaacatctcatttgttggagacatgactaggattagaattagaaaaacgaactaaataattagttggattattgcctaatttctagattgtttgacaaaaaaaatcaaataaaatcatatgaaaaaaattacagtatcacagttaactataagaatacatatattctatttcatccaccctcaaaatatacaacagtggaaactgttgcagcaagtttaaccacgtagcttgagcactcaactattgtgtaaggtacgtaactgcattacta

SEQ ID NO: 341859 - DNA, 857 bp, Cannabis indica
acaaattttaaaatgtttattctattttttttacggttaattactaatatagcttatgtattacattttttgtacatgagtcaaatttatattgatacatattaatattattaattttaaaagtatatcaattatttcaaaatttataatattttttattttttaaaaaaaatttattttattttataattttatttaattttaaaaatcaattttaaaaaatgattttttaaataataatattaggtgtactaaatataaaatataacatgtggacaagagtgtacacataagctgctcatagtgatagttaactgaatgacaccttaaatttactactagttcagtagtttgagaagttttactactaaaatttgagcttgaagggttaaatgcaagtgaaacgatattttaccacataaaaacacctaaattttcaaccctggtgactaaattgccaataaaaatcgtctgtcgcaaaatttgttgtctttcctctgtctctttaataagcaaatgcctcgtattattttttttataatctcacgtgactatactaggagcactatactccgtttcacgacaatttttttgacagtaataacactgaaaaactcctttttattctactttcaaaaggaaataggaaaaatatacactacttacaatatttatattattttctaaaagaagtcaaatattcaatctcatccctttatttccacctcccatcatatataaagttaagaataaatcaataattattaaactaaatttattttatttatatattttttttattaattcttttatttagattaatttgatatattatttaatttattaaaataaatatt

SEQ ID NO: 341860 - DNA, 516 bp, Cannabis indica
tttcacgtgttgttttttcatataggcatgtggttataattatttgactttattttttgtgctttaaattatttagaatttttttttaaattttacaaatagttctaaaacatatatgaccattaaaaaataatagtaaaaaaaaaattaagctaaaaaattctttcaaataaaacaaattacatgtttaccgacatatttaaggagattacaaatttaattttccaatatatattaatttcaagtgcacactatcaaataaatacattgtaagtcttatatattgttttttaataaagtaatcatgacgaggttatcttatacatattttagagcattggcgtacacataacaccttagtagatattagggaccattagtaaattttttagcaattctcataattttaacacataaaaagtgctaaaatatgtttatcacttttttgttgagatgttattattataattaaatattaaatttcgtataattatttaaaataataatatttaaaaa

SEQ ID NO: 341861 - DNA, 897 bp, Cannabis indica
ttaaaaaaaataaaaaattctattcaatcaattaaaaatgttttgggtaaaggtctagccaataatatgtctacaattctggatgtaataatggacctcccaaagagcgtattataagagtaccctaacccatgaatttttttgcccattatcctgttgtcattattagataatgatcttacagatcacttatttgaaatacaaacctgaaaatataaatatatagggttttggggtaactctttaatcgtatatataatatattcattaaactaagtgcatagtattggcgcatcaatctagaccgtttgacctataattaattagtattccttctaattatataacgacattgctttcctttataacaatcacgaaaacaaaaaattgctgacagcccttaatcttttatagctatattaataagtagcttgaagaagattagagcgtgaagatctttgtagtttttaatttttctggaaggtattataataatcaacaaaaaactacttgtaaaaatcattccaattcaattcattatgaattagacgaaagttgtacccattaagttgatcatcgagtatatatatatagatgagtagcttatttatgtgatcatctttttttcacatgtatatatatagatagattgattcttatattatattgaagttagaaaaaaagaaaaaaaaaactcatatttagagtatatatggcgaggctttggatttggatatttagtatgagtaatcaatacacataattgaatattttaaaatgtaaagtgtatttggatatgagatggtaattacatatgaattcttaatatcttgtttggcaaaatagttagtaattatatgggaaaataataattttagtaactaatgtttaatatgg

SEQ ID NO: 341862 - DNA, 1164 bp, Cannabis indica
ctgttggatgagttctggtggttgcaagctgcaatgcaggatgaaatgggaaattttaaaagacttggtgtctggataatggcccctcgaccagatggtgcaaatgttatagggacaaaatggctttttaaaaacaagtcggatgaatttgggatagtgactcgaaataaagctaggcttgtggctcaaggatacagtcaggtagagggaatcgactttgatgaaacctttgcaccagtggcacaattagaatctataagactgctactcatcattgcatgcttcatgaagattaaactctttcaaatggacgtcaagagtgattttctcaatggtgtaattcaagaggaagtctatgtcaaacaaccacatggatttgaagatccacaccatccacaccatgtgtactagctcaataaagccctatatggactgaagcaggctccacgtgcttggtatgatcgactcacctcatttctaatctctcatggcttcatccgaggtactgcaaatagcactctattcattaaacatattgaacaaggagtttttgttgcccaaatatatgttgatgacataatttttggctcaacttgtgaaagtgaagtccacacatttgtcaccttaatgactagtgagtttgaaatgagtttaataggcgaccttaatttctttttaggattccaaataaaacaactagatcatggcacattcatatcacagtccaaatatgtcaaggctatgttagataagtttggattctcacaggtcaagcatgcacatacaccaataggcaccacatccaaattgtcacgagatgagtctggtgatcctgtagaccacactctatacagaagtatgataggtggcttactgtatctcacagcgagtcgtcctgatatatccttcagtgtaggtttatgtgccaggtatcaagccaatcctaaacagccccatctctctgcagacaaaagaattctaaaatatctggctaggacaattaactatggtctttggtatagttgtgacaccaatacttctttggtaggatatagtgactctgattgggaagggtatctagatgataggaaaagcacttcagggggatgcttctacattgggaataacctagtctcgtggtatagcaaaaaacaacagtccatc

SEQ ID NO: 341863 - DNA, 528 bp, Cannabis indica
tattgagaaaataccaatttttttgggaaataaaatattgataatgacaatctccatcagttgtagataatttagtttatctttgagttataccacattcatttgaagtaaaaatatttatatgtgggattataaactgtttgggaaaaattaactataaactataataagtgtagcattcctctctcatttaacttcaaaactaaaaattgtatcaatcactctaaccacatacagagcaagttttgatatttgagaaataaaataggtaatttaagttttaaaaaccatgacaagaaaaaattatacttaaattcttgtttccactttatttaacatatacttaaaagcataaaacatccaatacttgtgtttttgaaaataaacacacaacataacattttaaatccacccaataatagttatctattttacttagaaacaaccaacacacttattgaaatatttagcaatcctatctcatttgtcaatgagtctttatgccttggaatttttagtcttcacttt

SEQ ID NO: 341864 - DNA, 490 bp, Cannabis indica
accaaactctaccaaactttccagtatacctgtacaatgtatttacaacataatcaaaccagaatttcacagaacaaaccattaaaactcaacttgccatgaatgatccaagctttgagtttaaaactaaaacttgcataaaactaattccaaacaccaaaacgctgctaggaactaaaatcaacttaaatgaacttaaaaatacacactttgaacaatcctaaccctaacagcccctataacccaaaatcacctcttgaaactacaacttcaagaacttaaaaggaaagaggctagggtttaccttgcttattcctccttgagtctttagccaaaaacacagaaattcagcagcaaaaccccctggtttgcctcagccgaaagagagaaagagaggaagaggttgcttcctttgaatttgactttttcctttaatttgttggttttcttcaaagggaaaaaggatttctaattaatccttgctgccctt

SEQ ID NO: 341865 - DNA, 764 bp, Cannabis indica
tcgtgaaccctagaaaccagctaggaattgggtttttcttaagcatttcaagcagagtatagcaggttttaaatgaatccaagctaaagtaagcctctaagcaatttcctccttagtttcttaagttttaagttgtgaatgtttgcatgactttggttttaaggagttgtggttgctgttattgtttgttcctgtttttagagattgaattatgtttagatatgatgatttaagcttattttagtggctgtagcatggattgagcaagctttgagttttagaactcaagcttggctctttaatggtagtttttaattctgagcttgggtcgttgttttatcacctggaaaatgtttattggggtgtattatgcaggtctggaaagtttggttgggtttggaaacattttggttagggtttgagctttgttggttttttgggtaaaaccggctaaccggttttacactgcttgtaaaaccggttacccggattttgcagcagggaggaaaatcggtttttcaacttatcgtttcgtgtcagtttcaggtttttaattagttgatttccctgctagtttgggatattagtatattaagttgcagtagatagggttttggttttaaaaccttagtccaggttgtgatttagcgagtcgcttatgcgtgttacgattgatgtgatttaggagcctataattcgccgagcagattgttccactcaggttgaccagcacatttgaattcggaattgaggtaagattagta

SEQ ID NO: 341866 - DNA, 1112 bp, Cannabis indica
tcaatcagaggaaaatacttgctccacgaccctccaaaatccatgacacatgctcgtaataggtcttcaagtatctgaatagttcgcttagatttcccatctgtttgaggatgaaaggccgtgctgaatttcaagttagtgcccatggccttctgcaaactcatccaaaacttcgaggtaaatttagggtctctatctgacacaatagacgttggtaccccatgaagacggacaatctctttcacatataagtcagcatactgatccactgtataggttaccttaaccggcaagaaatgtgctgactttgtaaagcgatccactacaacccaaactgagtcgtacattcctgtggttttgggcaaaccaaccacaaagtccatcgcaacgtcttcccacttccattttggaagtgttaatggctgaagtaatcctgcaggtcgctgatgttctgctttaatttgttgacaagttaagcacttagtgacatagtctaccacatcccttttcatcccatactaccagaaatatggatgtaataagtaaggggtagtatgagcttcatccaaaatttctttcttaagctcagacttatcagggacacacacccgtgctttaaataataacattccactgtccgagattgaaaattccttagctttgcctgctaagacatcttctcaaatctttaatagttcaggattttctaattgagccgttttgattctttccaacaaatctgactgaagtgtcaggttatgtaatttctcaaccaccaattcaatatttgccctaggcatatccatggctaactgaggaggaatcatgaccacattgaatatctgatcaggtcctttttggcttaaggcatctgccacaacatttgcctttccaggatgatacaggatttcatagtcatagtccttcactagttctaaccatctccgttgtctcatattcaaatccttctgagtgaaaaagtacttgagactttggtggtcagtatagatctcacacttcttaccatataagtagtgtcgccaaatttttagggcaaacaccactgctgcaagttccaggtcgtgagttgggtaacgctgctcataatcttt

SEQ ID NO: 341867 - DNA, 1133 bp, Cannabis indica
ttccaagtcggcttgtcttcacttttactaggttgaggtatttatactggctcggggttgttttctgataaactctcttctttacctatgcattcaaatacaaaatccgctaaggcttgacctttaatcgctgttcggggtcgaaaaataatctcatactgacccaactccaccgcccacttgagcaaccatccataggcatctggtttttgcagtatttggcataacatttggttagtgtatacccgaataggatgagcttgaaagtagggccttaactttcttgttgctaggatcaagcagtaagtgagcttttctatcaatggatatcggctttcagcctcaatgagtcttctactgatgtaatagaccgggtgttggatattattttcctctctgatcagtacgacacttacaacatgttccgtgacagccaggtatatcccaatgtcttctccgtccagaggttttgagagcataggaggttttgcgagttgcaattttagctcctgaaaagctttttcacattcctttgtccactcaaattgcttatttcctcgcagaatgttgaagaacggaacacacttgtctgttgattttgaaacaaatctgttgagtgcggaaattcgtccagtcaaactttgaacttccttggttcttgttggcgatttcatatccaggagggcttgaatcttctccaaattggcttcaattcctcgggcattgacgattaagcctagaaacttacccaagctgactccgaaggagcactttaagggattgagtttcatgttgtacttcctgaggactttgaagcattcgtccaggtcatctatatgccctccaaccttcctggatttgacgagcatgtcatccacgtatacttccatgtttcatccgatttggtctttgttcatcttgtttaccaatctttggtatgtagcacctccgttcttgaaaccaaatagcatgaccttatagcagtacagacccatatctgctcggaaacttgtatgttcttggtctggtggatgcattttgatttgattgtaccccgaataggcatccatgaagcttaatatttcgtgccctgttgttgcatccacaagatgatctattcttgaaagtggaaa

SEQ ID NO: 341868 - DNA, 1046 bp, Cannabis indica
aagactgttttccacttcccaggattgaccagttagtggatgcaactgctgagcacgagcttatgtcatttacagacacatattctagatataaccagataaaaatgtatgtcccagatcaagaacatacaagccttgtaaccaacatgggactctattgttataaagtcatgccatttgggctgaagaacgctggggcaacatatcaacgactagtaaatgaaatgttcgcaaatcaaatagggcaaaatatggaagtttatgtcgacgatatgttggtgaaatcgataaagagtaaggatcatacctcagacctcgtggaattctttaaaatattaagaaagtataacatgaagctaagcccgaaaaaatgttcctttggagtctcctcgagaaaattttgggattcatagttaatgcaaggggcattgaggcaaatcctgaaaaaatcaaggcattaatagacatgccatccccaacaaagcctaaggaagtacatgccctgtcaggaagaatggcgactcttaacagattcatttcgtaatcaactgataagtgtgtaccgttcttcaacgtattgcgaggcaacaaaaagttcgagtggacaaaagaatgtaaggaggcctttcagaacataaaaaggcatctcgcaacgcccccagttttggcaaaatcaataactggagagatgttatttctttatttagccatctcgggagatgcgattagtgcagctatagtgcagaagagggtaagcaccaacaacctatttacaacgtaagtaaaaggttactacgggcagaatccaggcatccccctctagaaaaatttatgttatgtctagtccacacgtcttgcaagctacgaccatacttctaggcacaccccataaaagtgttaactgatcatcccttgaggcaagctttatcaaaaccagatgcttctggaagattgataaaatggtcaattgaactgggccagttcgacataacatactttcctcgaacatccatcaagggtcaagctttagctgatttcttgataga

SEQ ID NO: 341869 - DNA, 749 bp, Cannabis indica
aggctattcaacattggagacttggtgttaaggcgagtatttgcgaatacaagagatgcatctgcggaagtattcaaattggctcggccaaatggctcgctaattaagaactactgaaacgtggaacatttgcgaccctactaccagtaaaattaatgattggaactcgcattgctgatgtagtattttaaacttcagttatgaataaagtggatcatttctttagttaagggacatttgtgtataattaaccagaattcatctggaaatacatgatatagtgcaaacccacaactttcaaaattttttaatttttttttaaaagtttttgatcaaacctttctgacgaaaaagggatcaaaccatcgtaactctttgacttaaaacctgtctgatgagaaaggaaaatcaaaagttataaattagatataactcataactctcgtgtgaagctaaatattaacggcttgcacaatataggaaagtattaaatgagacatcaaggtgtcttgacaaaagtacttaaacctagtgtatggatatataatataactattcatgtaagcaatcaaaaatgtacaaagtgataagatcattaaaagagtattcaagtttgcttaagacaggttataactgttattgcaaggtagaattgataacttctcgtaaatcaaaagcctggtagataataaactgcccgcgcacatagtagattactaactacttaaataggaaaattacgagcaatg

SEQ ID NO: 341870 - DNA, 1799 bp, Cannabis indica
agggtcaagctttagctgatttcttgatagaaggtttaactccagaaaaaaactcatcttatcagcgagatggagaaacatggaagttatatgtggaaggtgcatcaaacaagcagggttcgggtgcaagggtgatattaatatcgtcggaaggctttaagtttcactatgctctgagattccaatctgacgcatctaataatgaggctgattatgaagccttgatcatcggcttaaagatagcagaggcattataagtcaaaaatctcatctgtcatagtgattcgcaactgatcgtaaaccaggtcctcggggaataccaggccaaaggcttgaaaatggcaaagtatttagagacagttcggaagaacgtggaaatatttgattactttaaaatcgaacaaattccgagagaacagaacaccaatgtcgttggcttagcaaaattggcctcgcagaatgatctggacgaactaaatctggttctggtagaaatgctgagcaagtcaagtatatgtgaaacagaagacgtcgagatgatagatagctctccaacatggatgaagcctattgttaactatttacttgacaggaaacttccaaatgaaaaaaattttgtatacagtgcctcgctacacaatgatcgaaggaaaactatatagaagagggtattcaatgaccctacttcagtgtgttcttcccgcagaagcaaacgaaatcattagagaaattcatgaaggcttctgcggggatcatgcgggtttgtaaagtttgtctaaagagatcattagacaagcatataactgcacaacgatcaataaggacacacacgagtttgtcaagagatgtgataaatgtcagagattttcacatatacctcgcatactgccaaccgaacttagaatgatgacctcgccctacccatttgttatatgggggatcaacatgattggggcattacccactgggtgaggaggagctaagtatgcggtggtagcagtcgacttcttcactaaattgacggaggttgagccccttgtatccataacttgcaagaaagtccttgacttcgtcgtcaagaacattatctgtaggtttggaattcccataatgatagtatccgataatggaacccaatttgatagtgacttgttcactaaattctgcgagaggaataaaattatcaaaagcttcttgtcagtatccaggcctgaggcaaatggacaagtggaagttcttaataatgttggaatatgttttaccaggatctagatttactaccatgtatgttatttaaaatcctaaatatgaatttctaaaacaatgtaaataaacacatataaagtttcagaaaccttacagtgggtgcagcagatataaatggctctttccactcaaatatctaacccttgtattttgtctgtagcagggtatcaccaagatcttagtccgaatctccttctcttgaaactggattcttcacagccttacacactatgattgattaccacttgatgtgtgtgggcacttactctatcactaaagggtatgaaaatatgaagagaggaagagaggaatgtggttcgaaaatagcaagagtgatggctcaggaaattttgactgaaggcttgaatttcaccatctttaagtttgagccatcactatctatttataggcaaccacctaggtttaggttagaatttattaggcattaaaatattgaaaaaattaaatggaaattccctcataagtggtcggccataggatgtgggccccactttaaaattttgccatttttc

SEQ ID NO: 341871 - DNA, 686 bp, Cannabis indica
gagccacaataccaaagccatatgcattttccttctcaaacaaagctccatcaacatttaacttgactgtaattgaatcgggtttggtccaacgctcaatcttattatcatattgtaagagagacaatgataataaactagatttatcttgagcagtacgccaatggtcaagtgtagtccatgctgaatttagaacttgggttggagatgaggctttcttttcccaaacaagcttgtttcgtgacttccaaagggcccaacaaagcattatggcacggcaagatgtatcatcaccatacagttcgaaagtagaatcaagccaatagccgatagtatcatcaacattgatttaatactcggtatttgtaccaactttgttgtatgtcaaatacttcttaacctgtttctgtaacagtagagagcatctctagtagttatatctcttaaggatattaaatttttttacattatttaaaagtataatattttattttttgacacttttatttttaaaatacttaataatactttttaaaaatgctataattatgatctcacacattattatttaatatattatttattttaattataattaggctaattagtaatttttcccctcgaactttgacatatactaaatcatgcccctgaacttttttaaccgttaaaaatttcccctgaac

SEQ ID NO: 341872 - DNA, 1783 bp, Cannabis indica
ctttaacattttttgttttttgtgcaatatgtcattttttgcataaagaagtttgatttctagaccaccattgctccatgattaaattcaaaatctaatgtatttaataaaatacatttttcgaattttacctgaaaaataaaataaaataaatcttgaaaaattattttaatttatgttggtctaaaattaattaataaattaattttcaacatgaatatattttttctatttaattaaatttcatgaaaattttctaatatttaagtatcttaaataaatcaacttaaatattaattttcttaattaaatatatctagaaaaataccaaaagtctactcaaaaataactatctagatatttcataaactaattattgattttctaattaaaatataatatattttagtctatttaatttattatcattaatgaaaaattacttgatttaaaattaattaataaattaattttcaattttaatctaatttttaaaattgaaaattttaaagtatctacatttaaataaagagggaaaatgaagaagaaaaacctgattcaagtaaatcatggcaagggagagaagagatattcacctgacataactacatcaataagcgaagtgcgctaaacaaccgtaaggtcgttaacgctaccgatgaaaagacgtcaagccgataggacctactcgaacaatcgccctactcgatcaagctgattagcaagtcaaccaactcgttcacgttcattcgacctacgctgacgactacaggggaagcgactgactgtagtgggtgttgcgtatccggaagagtcagacttcgtttcaagcagcaatctttgaaaggaaagatacttgttgtcaattcaatgtgggatagttccaacaggataggaatatatttcaaaaattacatggaaaaatgattattaaaataaaataaaatatactcttaaaattattctaatttaagttgatctgaaattaaaatttctaactttaatataattttctatttaattaaatttattataatataaacaaataactaagcatcttgaataaaataaacttgaatattaattctaatttaaaatctaagaaaaatattctaatttaagttggtctaaaattaattattaaattaatttttaacttaaatatatttttctccttaattaaatattagaaaatataaattagttactagaaatttttaattagaatatttcattaaactaagtgtgttttttctaaattaattttataataatctaatgaaaaattaatttcatttatttaaaattaattatgttgctaatcaattttagttaggtgaaacgaatataattagcttaagataattatttaaataagacaaatggaccttcacaattagggtgattcatgtgagggagagctgggttcagtatgttgtatccactactaatggccccctaactctcacacaaggtccaaaagagaaaaattttaacctttcattaaataattgttattaattgaataaacccaattctaattagacctaaataaaactatcaaggtgatattttatttttagcaacctagtctatttaaatatctataattaaatgggctttctatatgcatctaagtccaatagcaaatatataggctcatatatacaaattaatttgtatgggtcctatcatgttactaactttatcacagatgaaaaaaattacaaaatttacatgttacaaattatttatttaatctattgacaattggactatgatt

SEQ ID NO: 341873 - DNA, 515 bp, Cannabis indica
ccccaagtgaccaagcagacgaatgactcttggtcacttgtctttaacaagtatattgtttatctgttcggtactttgggtttgaccaaaccttttgtacgcactggatggtaaattagagacatgctgataatttcgcctcaatttgaattttgaaataactatatttattcatttattgatcaaaaagtgtatttgttaccgtagtaacttacatcagagctacttgatccaatctgatcttttagcttaacatgagataaaacaaattgcagaaactgtactttagatcgtggtcacctaacctgagtactttgtttcttttatcgaaatctttgagcgtagtccgcctagcaggccattcacttaaaagtaaatgtttattcagtacttaatgtggtcatccgactcggtactttattggtagtatttcttaaattttccccattcaaatatcgtggtactagaacgagttgcatttttccgtcatacttacctaatttgtatgcttcgga

SEQ ID NO: 341874 - DNA, 1349 bp, Cannabis indica
gtacaaaaaaaattattatagtcttttaattaaaacaactttttttaaaagttgggttggagcaatttcagtttttagttgtagcttctctaaaaattcttcaaaaagctattttttgactgtttgccaaacacatttttttcatagctttctcaaaaagcagcttttaactttttcaaaagctctgccaaacgggtcgtcttataataataactaataaataatcgtcgttttacggcagatatttatttatttttattaaattatatatatgatataaattgtgtattttattaaataataactatacaataaaagttgtatcaaattttaacattattgatagggctgagcatgggttgggttggccggattgagagtattttaagggaaatttacaaaatactcaaatttgggttaacttttacaaaaatactgtcacacaaaaaagttttaaaaatattgtgtttttataaaacatcagtagaacacaaaacagaacaactaaaaaataccagtagaataccagtaaaaacttaacacagtatactacagaatgaaacttattaaaaaacacagtaaaaagtaaaaaataccgtctggcagtatttttgtaaaaaaatggcaaaagttagtatactatgtaaattttcctattttaatgacccaacccaatgacatcggcctagaaattttcaactcattcacatcctaaattttttataacccaacccattttttcttttacgggttgggttgggttgggttataacccttatcccataattaaaaaaaatcagatttcaacattatcaaaatcatatataaattaaaagaaaaattaaaaattctaacataaacatatccatccaaaattacaaatcattcaagatcaaatattacagttatctatcatctaaaatctgaaaactattaagattgtccaaaacaaactcaaacaaaataaaatcagtttagatatcagcctcactcaataatctcattgtcaattgttgatgatttcttgaccttagattttttgttctgcaattataagaacacagtgttagtcaaattattatgaataaaaaaacataataattattataaataaataaagaaaaacataataattaaaaaaaaaacatattcaatattcatcaaggaaatgaaaaaaaaaaacagattataataataatagcaactaataaaaaatttgtttgctatatactaaagatcatagtaaaaaataatagtataaaaaataaccaaatccatgaaatcacaaatagaaaaaaacagtacaaaagaaaaaattataatacatttatttgcaactaccaaaattt

SEQ ID NO: 341875 - DNA, 391 bp, Cannabis indica
aagatgtaagtattgggctgatccattagtcagctttaacgaacaagtcaaagaacacaaataacacattaagccaaacttaactatctcaggattaagatctattgacctatgatcaactaagtgatattgacttagaaagatataacggtaattttatgatatcttatccaatgtcaatatcggtccaatccgatgtatactccatatatctgatactagcatactttagtacaataccctggaaggacattaacaacttaaataccacaattagtagctattaaccatctaattatgattattgacattattgggcacttcaacctcctgttacaacctcttagtcaatctccatgcccgaaaacacatgtcgggatattttttcaaa

SEQ ID NO: 341876 - DNA, 837 bp, Cannabis indica
aaaatttaaaatttaagatgcggcaaatgacatttctgatccgaaacgcgtaaaattgaagcatgagaattgcctacaatttaaatcgtcgcctatagtattgtcgacaattataaaccatcgcatatagtattgccgatagttttaaactgtaagccattcccttttaaggcacgtttaaaaaactgtcgcctataccttccgacagtttaaaaccgtcaggaatattctatttttctcgacggttttaaacactcacttaatttttttagtgacggttcccaaaaaaaatgtttttaaaaccgtcgcgaatactcttttttatagtagtggcttgattaattttttaaaaaatttgttaggtaagaatagtcgcagggccaaccctaggcataggcgggctaggcccgtgcctagggcccctcttttggggcggggcccaaaataaaaaaaataaaaaaaaattcattaggcttttattaaagtaaaattaagtgtattataaacaataaatagtcataacttagtttgttgaggtgtatgacatattataaatgttatcgattcgaattccataacactcttttttaatttttttatatatatttctgagggtcctaaaatttagttcgccttaggcccatatattctaagggtcggccctgaatagtcgggtacagtttgtggagtgccctaatgatatcaatggcatgattgatgctgccaagtttgcgaatgggctgatatgcaaaacgaccctaaatttaaaaattaagctagtaaatgtctcctttttaaaaaaattaagaaaatgaccaaatataataaattagctaa

SEQ ID NO: 341877 - DNA, 618 bp, Cannabis indica
ttgtcattataaatctaaatatctataagacttgaacttcaattcttatatcaattgttattagtgtgtatataggattatggttttttattttgttggagacttctctgatgttgtttgaatttttattgttatgaatatgttttttgacttactgtatcgactttcgttcgattttttttttttggtagaaagaaattgtttttcgtgatgataggaaaaagtccactaattataatgagttaaggaaaattatgtcaacattaaggtaaaatttgctcttttaatttcgagttattatagacccatgatttcgggtaatatatgttagtattaaattaccctattatatgtgttaattttctcattaagttccttttatgttattttgtttaaaaattattttccaatttaataattttatatgaagtttacctttattacttttatctcaccttgataagttaaccattttattatagaaaagtattaattataattagttttagtgtattaaagaagttttattggtcaaatattttattttaatgtttttatctcacctttataagttaaccattttattataggaaagtattaattataattagttttagt

SEQ ID NO: 341878 - DNA, 643 bp, Cannabis indica
aaaaatgaaagagaacttatgccccatagagcttgatcaaggaggacagctgcttggacatctcttgctgaacctcctccatggcagcaagacgattgttaaccagttgaacctcatgcttgacctggacatctgcaggagcagaactcgagcttgcaccagcttaacaccaccaccaactttaggtcgcttgggaaaagctccatcaaaatactccgagagttggaaaacggtaccagtgaagcgaggctcaagtgtctcatgagaatatgctacatccttcgagaggaaagaatcttgaagattaaattagggaaaacaagcttatgagtacgctttttacctcgtccaaatgacacaatctaatccaagatataggaagccaaattgatggatgctcccgaggtgatacgaaagagaaaataggccacatcttgaaacacgacaattttgttggaattgggaagccaattgctaagtgcaaacctcatgagtgatgcgtggacataagtgaaatatgtaatacgaagacttttcccagatttccattcaacccgtgcaccagtgagttcagtgagcatcagatggcgatccatggacattatagcatttgtcacatctttaggtagttgcaaagccttgg

SEQ ID NO: 341879 - DNA, 579 bp, Cannabis indica
aatcctgccaagttctttccttggttggttagacacctgcagggagcaggctggccgcccatggtgttatcaagaggctggcaggctagcttctgtgaggaagttggtctatcatttgaagcctgtttgagtgctagggcccccatctacttaggtactgatttcgccttcttgttggtgagttgtactaccatgtggcatgtaagcactgccacatcaggtgggcaaacattaggataacatttgcccccaagtccctgtgtggatgtctgtacaaataagtgggacttaccagctatattggtgcggtcgagactgctgttgcctttgctgaatagaagttgctgtatttttagtccttttgtaaataccttgccttgattgtctgatcttatttaccgtaaaaaaataactgctttaattgtctctttgttgtgtaggtggagtaagtgaagaaagggtctcacatgtactaaataagtgttttttgggggaaaatacccttttcgcttttagctttttactttttgcatttcacttctctcactagaaattttcatttgaagaagctcctccttc

SEQ ID NO: 341880 - DNA, 774 bp, Cannabis indica
aaagggttttatttagggcacaaaaaccaacacattacacaatctagcaaactcagtgttgatgaactctagaccatcatcggttctaagtgtcttaacttttaaatttgttttattttccacctgagctttccatatcttaaactgttctaaacactcatctttgttcttaagtaaataggtccaaacacatctactaaaatcatcaataatagataggaagtagtgtttacttgaatgtgttgagattctacttggcccccaaaggtcagcatgcacatactctaagactccctttgtgttgagagttgctgttgtaaacttgatctagtgttgcttgccattaatacaagtctcacagaatggtaatgcacatgtctgaagcttttcaatgactctcttcttgtgcaattccctcatgccttgttcactcatatgtccgagcctttgatgccatagctacatatcactttctaaaccttttactgtatctgcttcgaccacaggtacaattcaccctcgagtacatagaactcatgtactctgtttcctttcatcacaagcattgaaccttttgtgacccttaggctcccattcaaggacttatagccataaccttcatcttccaaggttccaagtgatattaggttcctcctcaattctaaaatgtgcctcacattatgcaaaatcttcacttcacaattgaacttccttatagccaccttccaattccaacaaccctgcaagaacatcattacccattagtactctacc

SEQ ID NO: 341881 - DNA, 487 bp, Cannabis indica
gagagagagagagagagggaacttgcctgagacgatgagatgagagaccagccacctctttcgccagagaagattcgaagagatgagagggtggaaggtgaggtcgcgattagggtcgaaggtgaacagtagcatgtgattggattttagggattttattagtttttgttgcgtcggtttctacatttttttaaaagacgcaaatagaaagtaactttttaaatttttttctttattctcgtcagtttaattattagcgtcgtttaataaaagacgcaaataaaatagtattagtgtcatttttaaagtgacaggccaattattggagtactattcacgtcggtcaacgccatgaacagtagcgttgaccgacgtaaatagtaaaatttgtagtagtgggttaaagtaaagctctggttggatgcatggagtatgcatcggaagggaccgatattgaactttgacttaaatttattaaacttaccgt

SEQ ID NO: 341882 - DNA, 530 bp, Cannabis indica
caaaccgcatttttttttgcggtgtggtgcggtgcgggcggtttgagcggtttgatgtacacccctaggagaaaacatgaaaaataatctgaacaaggactaatttttttaattattattaattaaaataaataagattttttcttcaaaatatgattgttgtagagttttttctcttgaattttttttttcattataaaaatttctaaattataaaaattattacaaatatctcttttcagtttcatattgatcattttttataacaatttatctatgtagtcaaccgtcactatagttgtagtatcctatgagagtctatttaacaattttcagctagctgaaatttaatttattattaacattaaatgtacaaatattatatatttaagaatgtatatatatatatattctcataatttatcattagagtactattcatgtatatattatatgtctgtgttggattaaaatcatattgtgggcacatatgtataatgtatatactattataaagtgtgatacaaaat

SEQ ID NO: 341883 - DNA, 1278 bp, Cannabis indica
ggctgaagatccaaagaatattaacaccccacgtgaggaaactaaccatcgttttggaaaaaagcccatgggctctagaagatctaccaatccgcagtcaagaaggaccacccgttccaggagggctcaacctgaggatggccccattgctcggaccacgcgtccccggagaactcaacccaatgttggtcctagtacgcgaacaacgcactcaaggagagctcggcatgggaatggtaagaatcccaggatgagggatgaagagctcaaccgtggaggtgcccaatctgtgggagaaagaacttatgaaacagaaagctgccgcctgagacgccgtctggaagagacgtagtgtcgaaatgttgagttagaacgagaggcagtctcggccagggtggtgcaggggacgaaagctcaaaattaacctgaacctgaagtgagaagaccacaagggagaccttatggctaacgaaccaggagatggaaaaggcccatgaagaacaacgtggggaaaatgagacaccccttgagaatcaagatgaacaaccagaaaggaggcaccgaaaatggtaaacaagaaatctctcatgaaaatgaggaagatcttggaactcaaccgggagaaaagagatcacctgctaggaatcaccaacgttcttcccaaacccatagagcgaggacttgtacgtaccctgatgggggaaatacgacaaacttctctgggaggaaagaacaaagcgtgaagagcaagtgtgacttcaaggtgatccagaacccatagctgatcaacttgaagaggagaaagtactcaacgagctaatgatcgagaaagtatgggaacaagtaaattcacgagccacttaaagacaaagtctatgagtaggacgcggtctatgagtaagacaaaatctaccagcaattactcatgtgagagcacttgaatcagaaaaaacctgaccttcgccaacagcttggtccaaagcaagaggatccaatgcaattacggataaacgagctggaggacacgtttaggagatatcaagtgggggaattagggaaatcatctggacacaaatctaacgaggagcttgaatcgtatcacccaaatattatgaatacccccttttcatcggggtttaaaaacctgcatgtctcgtcctatgacagaacacagatccggtctcgtattttaataactttaacacgataatgcgagcaagtaacgtgactaacaatttatgctatattttgttcccacctcgcttgttggagcagcga

SEQ ID NO: 341884 - DNA, 932 bp, Cannabis indica
aaaataccctaaataacacaaaaatgggaaaaactagggtttccaaatttgccccaaccggtagaccaattcctcaaccggaattccggttcctacaggcctctctgaaccgaaattccggttcagtgcaggaatgggctaaaatttcacaactcattcaaatcaaccgcaaacttcatgcaaccttccagacctactaattagaccccaatgaacatattccaagtgataaaacaaagcttcatgcacaaatacaaaaatcaccattgatgagtcaagctcgagttcaaaaactcaaagcttgctcatccaactaattagccataaaaacctgcttaaatcacttcaaacaaatataatataactacagcaaacatccccaaacacaaacaacaactacagcaagctaaacaacatttcaccattaatgagccaaacttgagttcaaaactccaaagcttgctcaaacaacctaataaccaccaaatcaagcatagatcaacataataaatcataattaaacctctgaaaacaaagacaaccaaccacagcaagtaaaacctcaaagcacgcaaaattccatttccttaaaacccaagaaactaaagaaaaagctaaaagaaattacctagagcttaagcactccaaaaccttgaagattcttgctggaaatgcagaaagataaatcaaaccctagctgctcaagtagtggcgaaaagagagaaagagagaaaagcaatgctcttgaattttcaattttttaatcttttgaatgaatgaaccaaatagcataatacctatcttatttcagccaaccttaaccaaaataaatccattaattacttaatactaagtccactaaaggacaaaagcttatggggcaaaatgaccattttgcctcccatactaaaaggattaaaaagcactaaagg

SEQ ID NO: 341885 - DNA, 1454 bp, Cannabis indica
tgcgactacagcgtacttgactctgccttttcctttaggtagttcacctatcaagtcaatgccccaccttgcaaagggccaagggcttgtgatggaatgcaagcagctcggaggttgataggcatatgtggctatccgctgacatttgtcgcatttctttgcgaagttgaaagcgtcttgccgcaaggtaggccagtaatacccctgtcgcatgatttttagggcaagggaattaccactagtatgattcccacaaatacccccgtgcacctcgtgaagtatgtactcgcaatcttccccatcaatacatttgagtagtggttgactgaagcttttgcgatacaatcttccatcatagatgacatatcgggcagcccgctgccgcagttttctcgcttccattttgtcttcgggcaagatacccttttccagatatgcgattattggagtcatccaggtgacttcttgggcgatatcaatttccattatttcttctcgatttattatcgggtaagtcaatacgtcaacaggaattacatcgagtaattcagcttctctagtcgaggccaaacgggccaatgcatctgcgtgtgagttatgagcacgcggtactcgggacacgactactttctttaatttctgcaacagctcgcatactatggcgagatactcaaccaagcgtccacctctggccagatattctccattcacctggcatacgacttgggaatcgctaaaagcctgtaagtattcgattttcatctcgagagcgagctttaatcctgcgatcaaaaatactcggcttcattgttagatgcagaaaattcgaaatgtaaagcagtgtgtaccttaaaattgttgggactgattagtatgattccaccgtcggaacctttgttattagaagccccatcgacgtacaatgtccatccttctccatttggtatagcggtgtcgatcttgtcatttatgagtgccacttcactacttgggaactcgagaatgaaatctgccaaggcttgccccttgatcgcagttctcggtttgtatctgatgtcgaactggcttagctctaccaaccatttcaacaatctccccgatgtctctggttttgctaagacttgcctcagagggtagtttgttaaaacttcaatattgtgggcctgaaaataaggccgcagctttctcgacaacattaccaaggcgaatgctaacttttccatttgaggatagcgggtctcagcgtctagcaggcatttactgacatagtacaccgagtactgtcgtccttgatcttcgcggattagtaccgaactaatcgcatattctgacaccgctagataaatcgataagacttcaccggttatgggttttgataggattgggggctgccccaaatgcgtttttaatgcttgaaaagcctgttcgcatttctccgtccattggaacttcta

SEQ ID NO: 341886 - DNA, 724 bp, Cannabis indica
tttcataaataatcatgattaactgataatttccaaattaactaagcgggctttacatgacctcttgggaagcgtgcgagtgaggacaaagcacgctaaaaccactcgtgttggtctgtagggtcagtcatcagcccatgaagcagccagagtaacgtactcgtgtataagagccattcatttcgtgggtgtaaggacccaatggaggcttgaagcggggacgttacatttgtgtagcttagcttccatgacatagagagtactcactttctttcctctcaccactacaagagaaccatgggtgagcttccatttatttttactaaaacagtttataaaccccttatcatcaactcatcaagtcttctagtagatatcaagttaaggcgaatgtctggaacatgcctaacatctttgagaactaattcactgccaacattagtttccaagcaaatatcttcaatacccacaatcttcgatgcaccactgtttcccattctaacattgccaaagtcaccaatagtgtaagaagtgaagaaatcactacgagcagtaacatggaatgaagcaccaaaatcaatcacataactacaatcttgggttgcaagaatgacacacccagaggcggatgtacatatacatctaaggaggccctggcccgccacacttctcctaaaacctttatttttatatataattttaaagtttgtagagagagagagag

SEQ ID NO: 341887 - DNA, 1754 bp, Cannabis indica
ttttatagctttattttttctatgtgagattatcacagttaggctcaattttggttaacgaaaatccgtgttagcagtttggtgctttcattgagagtctctgtggaaaagctcataaaaaaacccttctttcttttgaagaaaaaccacctccttcatggttgaaaacccagaagatgttaataccccacatgaggaaactcatcatcatcttgggaaggagcccatgggctctagaaggtctaccaacccacggtccagacggaccacccgttccaagaggactcaacctgcgggtggccccagcacatggaccacacgttcccggaggactcaacctgacgttggtcctagtacgctaacaatgcgctcgaggagaactcagcgtgggaatggccaaaaccctgggacaagggatgaagagcccaatcgtggaggtgcccagcctatgggagaaggtacttatgaaacagaaaaccaccgcctaagatgtcgtctagaagaggcgcagcgacaaaacactaaattagaatgtgatgtagccggggccagggcggcacaggggaagaatgctcaaaatcaacctaaacctggaatgacaagaccacgaggcagacctcgtggctcaccaggagacaagaaaatgtccaggaagaaaaacccagggaaaatgagatacccttgaaaataaaaatgattagcgagaaccctctcaccgatatgaggatgggaggcaaccgaaaactgacgaatgagaaattcttcatgataatgaggaagatcttgggactcaaccgggataacgtaggtcacctacgagaaatcaccagcgttcttcccaaacccatatagcgaggactcgtacagaccctaatgtcggaaatacagaaaactacactcaaggggaaagaacatagcgtgaagaagcaagtgtaacctcgaggcggtcaagaatccacaggagatcaactcaaagaggagaaactactcagtgagctaatgatcgagaaagtatgggaaccagtaaatctgcgagtcactcaaagacaaagtctatgagtacgacgtgatctgtgagtaagacgaggactgtcaccaattactcctaaccggatctgctagagcacttgaatcagaagaaacctgaccttcgccaacagctcggtataaagcaaaaggatcccatccaattacggataaatgagttggaggacaagttcatgagatatcaagtgggggaactagggagacaatcaggacacgactcatatgaagagcttgagctgtatcatccagtcatcacgagtaccccttttccttcaggattcaaaaacccgcacgtttcttcatatgacggaaccactgatccattcttgcatttgaataactttaatacaataatgcgagcgagtaatgtgacaaacaatttacgctgtattttgttccccacctcgcttgttggagcagcgaggagctggtttaacaagtttactcaccattcaataacttcctgagagcagttgtccagggatttcaagaaacagttcaaggctactagggatagaccacccgaagcggcctcgctaacaaatataaagcagcagcccggtgaaacacttaaggcatacttaagtcgttttagcacggctgtggctagggttaggaatttggatgacagcacacaactcacaaccctttaagcggggatctctagtgatccatcaaccgcagggggcgagctgcgggacgactta

SEQ ID NO: 341888 - DNA, 576 bp, Cannabis indica
tttcacacccacggacagaaccaccacggcaacacaagagcacccaaaaaaataactattaattccggcgagatagaacaagagcagtgaaatcagtgtcaaataaatatatcatgacaagcagccataaaataacactaaaacaaataaaaaaaatgattaaaaaactaactaatcttctgcacaacctcaatactagatgcaatagagactatatttgcaagcaagttctagaaaatcagaataacaacacacactaacacttgtattttcccaaaacgtaactaaaacttcaaaaactaaataaaaaaatcaaaagaagcactgaacaagaaaaaaaagtaaaaaatttaaatgttaatggagaaaaatagagagaacttgagtagtgaaaaaaaaggaggaaggtgatgaataggaagagagaataataagaaactgggattaaagtgaaaagaataggcattaaatattattttgagtatcactttttctatcattaattttagaaaattaaaaaaaatatgtcactaaagtgacaacacaagtcaagtcacacttttatatcacttaaaa

SEQ ID NO: 341889 - DNA, 579 bp, Cannabis indica
tttcttttatggatgggtttagcaggtacaaccaaattcagatggccaaggaagatgcagagaaaacgacatttcgaactccgttccaaaacttctactacatgtcatgccatttggcctgaaaaataatggtgccacatatcaaagggcaatgacgacaatatttttcatgacatgatacatgaaagcatagaggtgtaagttgatgatatttttgtcaagtccaaaaacaaatttgatcacatttgcaacctcgagaaagcattccaaagaagtagaaggtataagcttaaaatgaatcctcttaaatgtacctttggtgtaagctctgggaaatttttgggatttgttgtacacaaaaattgtataagcatagacaaagataagactaaggctatactagccattaaggtaccgcaatcagccaaagaatggaaaagctttctcgaaaaagtttcatatctacgacattttataccagctttggcagaactcacaggcctgcttcaatcattgatgagaaaaggtatgtcttttaattggggagaaaacaacaaaaatcgtttgacaagattaaaa

SEQ ID NO: 341890 - DNA, 541 bp, Cannabis indica
ccgttattgctttccactatacaaaacatgtcattacactgttacgtacacagaaaacatcacttctatttttccttctacttttaactttaacgctcttttaaagcttccaaccaaattactcagcttaattgacaacgaaaaataagcaaagatcaaattttgcattattatcttttatatatgtaaaaattgaacattatatgtttttgcattatgctacagatgtatttatccaatgagattatgtgattttatatttaacattaaggattaggtttggtaaatcttatatttattttaaattaaggtggcgtttagttggaagtaatgaaatagaatggaatggaaaagaaattattttcattctatggaatattcattccaatagagtggcttttccaccattttgatggaatgaatattctattttgaaatggaaggaaagaccattccaatgcaaaaatttgaaaaagtttaatatttttcttatcaatttttttttatgcattttaaattttattccattcctattccaatt

SEQ ID NO: 341891 - DNA, 878 bp, Cannabis indica
gttcaatacgatgttcttgagccaaaagaagggcttcaagagcagtgacttcaagaggttcagctcgagaattcacagagattacaaaagtatcatagtcaggcgatggaaggcctcgaaatatagcagtaacatgttctttatttgaagtggtgtgtctaacagaattgagtttatcaatgagagaacgaaccttgagtaggtattcatcgagagtgagagcacctttcttgagattctgtaatgcagtagtatattgatcaatcttggcttcagtatgagaggcaaagtacaattcaagaacgacccagagtgcagcggaggtttcactattcacaacacgagtgagaataggttcagtcatagatgaaagaagccaggagaacaacaattgatcttgttgttcccaattaatgaaggcaggattaacattttcaacagatcgatcattatcagaaagaaatcttggtggaggaacaacagttttagaaatgtattgttgaagtttgtgacctctaattgtagaaagaacttgaggcttccaaagaagaaagttgtcatggtccaattttgtagccagcttgtgagagaatacaacagggacgaacgatgatgttgtagctccaaacgcagttgactggcttgttgtagatgacattgttggtggagaagacattcacagaccaacggagaagacgatgaatgagaattagagcatgctctgataccatgtgaaggaatgaaataacagcaagagaacgaaataaattgattctcattaattgtgaacaaggaggttacaacctttatatacacagtagatgaacaaagacaaaagacaatactacccttaagatataacaaacataactaaaaaa

SEQ ID NO: 341892 - DNA, 726 bp, Cannabis indica
agattttaccatctaacaagcatgcccaaaagactattttcccttaccacgaattgaccaaatggtggatgccacctcgggattcaagccgttgtccttcatggacgcctacgccagttataaccaaatcaagatgcacgtcatagatcaagaatgcactagcttcaggaccgagaaggggtatactgttacctggtcatgcctttcgggttaaggaatactggggcaacttatcagcgaatggtgaaccggatgtttaagggccttctgggatgcaatatggaagtatacgtggacgacatattggtcaagtcaaaggcatacgtaagccacgtggatgacctagaagaatgctttaaagtggtccggagatacgggatgaaacttaaccccaagaagtgcacttttggggtcaaattgggaaagtttctgggcttcattgtcggccagcgggggatagaggcaaacccagagaaaatccaagctctcctaagcatgccttcccccaggaaacacaaagatgtacagagcttaaccggaaaggttgctgccctgagccagtttatctcccgatccacagacaagtgcattcccttcttcaacatcctgaagaaatgccaaaaatttgaatggtccgacgagtgcgaggaggcattcaaaaaactaaaggaacacatggctaaacccccaatcctatcaaaaacccgttctcggagaagacttgtt

SEQ ID NO: 341893 - DNA, 805 bp, Cannabis indica
tttcttatattgattactaatcagattgtaaagagttttatttagggcagaaaacccaacaggtacttgggccaaattgggaaggaccacatgaaattgaggatgagattggctctagaacctataagctaaaaagattggacggaaccattgtgccaagggcttggaacgccgatcatctccagaagtattaccaatagtccaaatatgtaaacttaggctttgttaaaagaatttgtaccgtaaagtgtatgcaacctctaaatttcaaataaaactgagtgctttaaaaacaaagttttcatgccactcaggggggtactaaggcataccacacgggcagatgtaaaacaggccaaaagtaaaaacagtaaaaacaagatcaaacggaatatatatcaaagtgaacatatatatttaaaatatccttacccaaagggcaggtccaaaaaatatatagcatactaagggcctggggacgggccgtaataattgtctccccttagaagaaaataattaaattaaaattgtctggaagggaagaaaagagactgtaaataaaaaaaaagttctaatgatgaaattagttggactccacagcctattcaattcgaggaggaagacgagggccccgacgctcttcaagtaaagcatcaagccttttcttcttctcccggaacttagcaagagcctcttcaggcttgggatagaagtcaagtttgatactctcgccattcaactgccaggccatgtagacgccgtcattgaagcgcttgacacaatgcttgcagacgacgggggtcag

SEQ ID NO: 341894 - DNA, 514 bp, Cannabis indica
cctcttatgtgatgacagattatcaattaacccaaactcttttttagatcataaatgtccttaattgcatgtcaactactagatctcttagatagtacaataaataattttcattaagaaataatctaaaagttacataagttatgtgaataccctcttttcatatcaaaatctatgttgattcatttagagcattcctaacattcactttttagatttttacattaggatcataaatcatgcataaggtgactaatcaaatacatgtaataagtacaaatatgaacaaatcacacaataaagtaagaaagaaaaattaactaatattaactcatgaaataatttcaaaaaatatccatcaaatccctaaattgggagtttaactcattatcaattccataatcaaactaaatatcaacataaacattgaaaataaaagaaaaatgagaaggaaaatagattgggattgtcatagattgctaacttcttgctccaatcttcttcttcttctttt

SEQ ID NO: 341895 - DNA, 946 bp, Cannabis indica
atataaatattttttttttactttaaaaagaacttttaaagcggtctacctacataaatttccaaagatatacatgtatatatacaattaattaattacaccctcacacttaattaatttatgtttatatatatatatattaggttattgttacgtatacttagttatatttttaattttaatttttgttaggtatatttttaaaatttaataaattaacataatttaaaaaaaaaatataaagttgaaaaatattaaaattaaatatactcctcatattaaataaccacattttagatataaaaatatatatatttttttgaaataaaagcgtttatatcatagattcaaataggattagacctcatggtcgttacaaaatatattgtcaggtaaataggaaatcgggatagacccaaacacctgatgagcaaacgcccatctagccacattatgagcggcgaaattacaagttctactaacataagaaaaattacaactaataaaagagggagaagacttagtacaaaatgagacatagttttcaaggctccaacgagactccatcccattgagagcattgataaccaccctcgagtcactctccacaattacaaacttggatccgatttctacagctacagaaacagctaaacagcaggcagccgcttctccacaaagaacctccgagaaatcttcccgagccgtctgaactctaacaactcttcctaagtgattccttgcaacaacagcaatacacatactattgaatcccaccttgacatcacaattcagcttaatccaatccggaggaggaggggaccaagcttcctttagatctggagtgggactaggaagcaaagtatcatgacaatctgcataagaagtacaaatattatcaatacatttttttatgtcaggataacagttattatggaccttttca

SEQ ID NO: 341896 - DNA, 1391 bp, Cannabis indica
aatttttatatttggaatcccctcctcgtagaccaaattgctcataggtttgataactgataccctagattccatgttcagattaattgtaacgagtcatattatgatatagccgagcaatatggcaagtcatatagacacgagctgggatttagaaccaatcaaggcatttgatatattcaagattataggttgtagggattttagcggatactatggtccttctaccccctcttctagtgatagctcgccttctagtggctttggtaaattccttaggtggaaaatcatactccacacttctctttcatttgcctttaaataatttgaatgttttattttgcctcgcaaacatgcattttgaggatgtcatggaacggaaagggaagaaaaagggaaccaatctagggccttctgcagatactgaggtggagccttccaaaaggcaaaagaagaccattgcccacaaaaagaagaagatatcggagcctatcgaccttgaggtctctaaatttgagactcgtgaacaaactcctcctctgatcgatcccaataccaaagcgcctcctcctagcacaactcatgcccctgcttcctcgagcgaggccattgaaacattatttgtcgtagcagggaagactcgttcggaatttgcccagttgtttgggactgcctgctggcgctaactcaaggctttcctcccccacgattgggatctaatcaatctcgagaatctgaaggaaatgcttttgaggagcttgcatcatgccctcatcgtaagtttactgtattaatccatatatttcttctttctttttcctccatttttctaatattcatttgctcgtaattctccaggcttctttcctctctttttcctcccattggcgaatcctggagaagctcaaatacctggagagcgaggtccgaaagtcactagcccaatgtgaggccgtgattaaataatggaacgacgcttaccatgaaatcacccgtctcaaataagaagctgagaggtcgaagaaaagccttgaagaagccgagaaggccacaaagatcaagactaatggatacaatgaacttatgaaggtgcttgcggggaaagaggctgaaaccaaagagcgatgcaacaaggtcggcctttgtaccgtttatcgagccttgatggcgaatcctaacatggacacaagcttcttggaggaggatgaggaggagattttggcttattgtcaaaaggccaggaaggaggaggaagaggccgaggcagtggtagaagaagatccatccaagtctcctacaatgtaggcttggtttttatttatctctttcttcttctttttttttgtggaaatgactttagagctgagacaatggtttccccttgtggcact

SEQ ID NO: 341897 - DNA, 676 bp, Cannabis indica
tataaagatacctcatttattaataaaatttttaaaaatgattataaaaagagagaagaaactgacccaaaaatattggtttcctcttgatttcctttgttgcagtgctctagcattccaaaacagagaaaatgactaaaaaagagagaaagagagaccaatttttaaatatatataattagatatttctcaagtaaataatcacaaaaaagaaaaaaaactcagaaaacatactcacccataaaattatcattaaggtggtgatatgtaggggtagatttaaagaagcaagaggagatggattgatggtggtaggggcggagaggaagagacgaagagggggagatagaaattaatgaagagtgaagatgaagatgatatatatataaaattattaggggcggagatccgccggtaataataaaaatgtaatttttaaaatattattagcggcggacttccgccggtaatagtccgtcgctaataaatttaaaatttaataccaggacaattcccgcacaaaccaattttttttattttcttaaaaaattaaccctactattagcggcggatttagtccgcccctaataattccgccggtaatgtaacattttcttgtagtgcaaggatttcgcctcaaaagaataaggcatgcaagttctaagctattcaacca

SEQ ID NO: 341898 - DNA, 534 bp, Cannabis indica
ctttttttctgagttcaataaattcaggatcattttgttggccaatctttattctttccagtaaatcagactgcaatgtaatatttgccaacttcccgactacaaactcaatctcagccttggccatatcctcagccaatcttggagagatttccttcaactcataaacctgccctgggcctttccggctaagtgcatctgccactacgtttgctttgccgggatggtagaggatttcacagtcataatccttgactaactctagccatcgtcgttgtctcatattcaaatctttttgagtgaaaaagtatttcaaacttttgtggtcggtgtaaatctcacacttttcaccatataaatagtgacgccaaaccttcagggcaaaaaccacggctgccagttctagatcatgagtggggtaacgctgttcaaaatccttcaattgcctagaggcataagcaataaccttccctgattgcattaacacacaacccaaaccttgtcttgaggcatcacagtatatcacaaactttt

SEQ ID NO: 341899 - DNA, 1144 bp, Cannabis indica
aacctactccagcgggagtagggaacttcattgtgagatgatagatcgaggttatgatcttcatctccttcaagattggtcgaccaatcacggcattatatgctgaatactggtcgattactgcgaagtcagccattgatttggctgttactggggcggttcccaaggtgattgggagtttgatcattccttttaatgcgatgacgtcgccagtaaaaccgtatatgctcgacgtcacaggtcgcaggtccttctcctgcaaccccatttgtttgaaggcttggaagttcaaaagattcactgaacttccattgtccacgagtatgcggtggacattatctccgccaatattggcgatgataactagtgcatcggaatgtgggtgatggacccatctcgcatcactctccataaaggtgatgtcgtcgcattccttcttaaacagtttctctggccgctcactaagattgtttacattggtgagcggcttctccttggcttctttggcatatcgctcttgcgacttgcgggagtctcctgcgatatggggccctccaatgatagttaaaatattgcgaggcgttctcgaaccactcgcattttggttttcttccttgtcatccgctcggggatgaccttcctcgttcttcttatacttatcgaattttcctctccgaatcagctcctcgatttcgtcctgcaagacccaacattctaaagtggtatgaccgatatctttatggtacttacagaactttttggggtctcttctatcgcggtttcccctgatggggggcggcttcttgaagactccattcctctcttcaatcgcataaatgtggtctcgggacaccgcgagttcggtataattgacaaaacgcggtccacccttcctctttggagaggactccttcttgggaggagatttggccagctttggacttcgttgtctccgtgggctgcgtcttctcggacttcggcctctggaattcttccctcggggactgcgagatcttgatcgcggtattggtgatttacgtttatccttgcccttctccaactctgccagagaattctcgatccttttatgaggttcggccatagcaaagaattcgactagcgattctggccttcgggcttgtag

SEQ ID NO: 341900 - DNA, 761 bp, Cannabis indica
tttggtttgggcgggttatttggtttgggtggtttacaaatttttttgtacagtcctaaaagcgactacaaaataagcctgagtcgtcctaagatcgaactctccaggtcgtacccgcttgacatgtacaatcatcctcgagctccgaattcattgatgctcagccttagccttttctttacctacacatgcaagcaataactgtgagtcgacagacttaataagaaaagcatataacatacaatatatcaccggcttgtatctaggcgctcatacacctatccacaagacttaacagatgattaagaacgttcttaataaaggtatgacatctataccacatgcactacgtaccactactgtactagtgttggtagggtttaaaccgtaccccgagtaccactgagtgttgtacaacatgcaccatgtacataactgtactagtgttggtaacactggattgtacccttaaacatcatatgttgtatgaatgaactcagtactgctaccgtacgagtgttgatagtacacttctacaaaattgggctttagaggcggtttttaagggctttcagcgtcagttttggcgaaattcgctaccgacgctgttccggttgacgctgtaggggtaaaaacaaccgacgccataggacccctatggcgtcggttattataagacgccataggggtcctatggcgttggttgtttcatataaccgacgccataggacacatatagagtcggttattaagaaataacc

SEQ ID NO: 341901 - DNA, 1169 bp, Cannabis indica
ttttatggggtgagcctggaactgtggccgtagtttgcgagacccgtggacaaggcataacacgagtttttctagatggggatacctggattctgccctcagtaaccttttacttatgtagtaaataggttgttggtgcttaccctcttctcggactatagctacacgaatcgcattttccaagatggctaaataaagaaacaacgtctctctagttattggtttcgccaaaactagggcgttgcgagatgcctttttatgctctgaaaggcttcttcacattcttttgtccactcaaattttttttgcctcgtaatatgttgaagaacgtacacacttatcagttgactttgaaatgaatctgttaagtgccgccattcttcctgttagggcttgtacttccttgggctttgtcagggatggcatgtctattaatgccttgatttttttcaggattcgcctcaatgcccctcccgttaactatgaatcccaaaaaatttcccgaggagactccaaaggaacattttctcttgcttcatgttatactttttaataatttaaagccttccacacattttggtgggatttcttgggtcgagaataacctcctcaaattcttcaattggttttatcaggtttctttcatcttgaactcgaggatcaagatcttcatctttcttcttgttttcttctgccaagatcgtcatcagcagatgaccgacttttctaggttggagctctatgcgataacaatcgcgagccaggatctagttgccacgcaccacccccacgccatctggggttttgaactttgaggacaagtgcttgatcgagctgactgcccctggtccgatcagtgctggatgacccaacaatatgttgtaagccgagggcaggtcgataaccaagaatttttgcataacagtagcaattaaaggtgccttggctacttaatgcgagcttgattatgcctatgcgagcgatgctatctctggtaaatccgcaaagactcaccatacaagggcttaacttggccttttcaagccccattttcttcagagtctccttataaatgatatttaccgagcttccattatctattaacactctcttgatcctcttattagctagttgaatggttatgaacagcggatcgacgtgagggtatc

SEQ ID NO: 341902 - DNA, 1029 bp, Cannabis indica
accctaggtatcttaatataatcctttatcacttcttgactgatgtgatccctcgtaaagtagccgtcactaggcctattaatcatagcgtaatagctgcagaagagaagttacaccgtcagacttaatacttatggcagttccaatacgtcttctcccatgcagtattaaatgcgaggtgactgttcagatggggtctggtgcttcccggaggtgctttgctatagctctgccctccgggagtacatggatccctcataccttctccaggaggtgttttcttgttgatactcttgatataaaaagacttagtcaaattatctcaaaaccatattcctcaaatccacgtgtcgtagtcgcattggtccacgtattttgggcaacagtaatatttagatacaagttgtcactaattttgttttagacacaacaagtattatgactaaaaataaatttagtcacaacaaattatattttttatgactaatacttttagctacagactttttagtcacaacgtaggaatgacaatttataattagtcgcgatttttttacttttagtcacaagttttgttgtgactaaaagtaaaaattttgtagtgtatattagcaatgccagtaataaattatatatacatattttattatttcttgaaatcaatagtttcaaaattgttggtgtaagatatgtatatatacatttactacttaatttagttttatatattcctataagtgaatatctaatttagtaatacttatagtaaaatttgtccgtgattcaatataaattaatattgttacattcctcaaagtgataaataaacacaaaataattatttaaaaagcttcctaaaaaatgtctaaaatataattgctacttgaagtagtcaaacatatttgtatgttcctagaggtataatttttatcaagttgtgaaaatgacaagaaatgttattatgttatgattatattcatttcactgttacaacaacatgatgaagatgtcttgtaccttttaattaat

SEQ ID NO: 341903 - DNA, 544 bp, Cannabis indica
tttctttcatctctctctttatcattttgtggacattggccctttgagaatttgtcacctttcactattggtgcctttccaggtgaacaagtatgcatattgaatcttttcaaaatccgatcaatataagttctttgagacaaccgaagaatacctttagatctatcccgaaggatctgtatcccaagtacatatgaagcctcaccaaggtctttcatatcaaaatggtcagataacaattgctttgtctcagacaacagatttttatcattagaagcaagcaaaatatcatcaacatacagtaccaggaagatgaagctgctcccactgaccttcatatatatacattgatcaactttgttttccatgaaaccatttgcagtgacaactgcatcaaacttgagataccactgtcttgatgcttgtttaagtccataaatagacttattgagcttgcaaaccatatgctccttgccaggctcctcaaaaccaacaggttgagtcatgtagatatcttcatacaaatctccatttagaaaggcag

SEQ ID NO: 341904 - DNA, 661 bp, Cannabis indica
tacagtttttcccaagtgttgtgtatcttgttcactatcagtatcagcattatttcttcaaaacaaaaaaaaaaaggaaaaaaacctcagacgaatggtacctatgaaacaaatgaagctggtttttggtaaatgtgggaagaaagatctccaattgtcttcatttttggacttgtttcgttgggaatgatttgatgttcctctagttttttcaagttaaagccagtagtgaatttctctagacatagcataaagagtaaaatgctttgttcgaactatacgagaccatgttaaaacgtttatgtgttcaagtaaagaacaaatatactgtaagtggctttagaagaaggtttagcaattatgcctgccccgcccaactaatttgggggccttgggcgaaaaattaaaattgagtattttattaaaaataaaattattaatgggatgagatgcaaaatgaccttaaatttagaaattaagttagtaaatgtccctttttataaacatttagcaaaatagccatttgaaaaataatttaaggggagttatatttacacttcataaaattataaatacaccccattattaaaaaaaatataaagttaaataattttaaaaattacttttaatacttttaaaaaaaattcctcacattatttta

SEQ ID NO: 341905 - DNA, 834 bp, Cannabis indica
gaagaaacaatctatatggagcaaccagaaggttatgagcttccaaggcaggaagagaaagtttgcaaactcaataggtccatttatggactcaagcaagcttcttgctcttggaataaaaggtttaatgaaataatcaagacctacagctttcaccaaaatgatgatgaaccttgtgtttaccaactcaaggataatcaagtggtagtatttctggtcctttatgttgatggcattttgattattggcaacaatatcaagacaatgactaacatcaaggaatggcttgacactaattaaattttaaatgaaagactttggtgaagctgcttatgttcgtggtattaaaatcattagaaaccggaggaacatatcccttgctctctctcaaacaacttacattgataaggtactagagagattctcaatgacaaataccaaaggggcagtgatacccttctagacctggtatccatttatctaaggaacagtctcccactgatcctcaagagatagaggacatgagaagggttccttatgcttcagcagttgaaagtctaatgtatgcaatgttgatcccgacatttgatatgtagtaggaactatgagcatgtatcagacaaatccaggagagaaacattggactgtagttaagcatattctgaagtacttgaaaagtacaaggcattatgtgttagtcatcaagggtggtgctgtaaatcctgtaggctataccgactcagatttacaggcttatcttgatgacaggaagtctacatctgggatggtatttactcttggggtggagcagttgtttggagaagtgctaagcaa

SEQ ID NO: 341906 - DNA, 526 bp, Cannabis indica
aatgacttctaatcttttattgataaaaaagaagattatattgaaatgggttttatttagggcataaaatcccaacaaactcccgcttgaactaacataaaacaagaagtgcatttcaatcaatccattatcttgatatccatatcaaatttagtgtatttgactaaatccaaataacaggaactgtaaagctatggtaagcaactgctttctccaccattacatcctttgtgttcataaaacattatgtaacattgcatttctatatgcattactcctccagagatgctgaattctttactacttgttaagtgcatctgaatgtagagaagacacatctctatttctatctaaaaaaggaatagagatgaaaacagttaagaactttcttcagtttgaataactttctagtgctttccaaaacaactaagttatttagcttcactgatggaactaaattattatagatggagttttacatccttctagataattcttcaccctagagtaactaccatctctaata

SEQ ID NO: 341907 - DNA, 898 bp, Cannabis indica
gtgaaaattcataaataagacatagtctaatttagaattataattgattaattgaaatcaattaactgagtcttacaagcagtattgtctcaactagtatgaggaccatggaccaatataattttatgtctagatagaagctatagattttatatctatgtttagcgctcccattcaattatactatcatgttctcaagctgtacgtgtgacccaaaccaaatggtaggcttttactaacaacttaaaaaatacaaataacactcttgaggtcgaacttaaccatgtcaggattaagatcttttgatctaagatcaaccagtgatattgacttagaaagatacaacagtaagattataatttactaagatcaataacggtcccaacccaatgtatactccatacatccgatattagcatactttgccaatgttctggaaagaacataacacttatccaaggtgtaagtaaactttatcgctgactatcacatcagtgtaaatccagtgcactgatgaatcataggacattactttgaagcatataatcacaattacattccactgtgttgacatcactataattgtgaataactatatgttctggacttaacataaattgtatacattaaaccataaacatgaaaactacatgtaaacataaaggacttttaatcttctattgataagaaaccagattatattaaaataggttttatttagggcataaaatcccaacaatcccacctatagcgatctggatagtatttccctcagtataaatacaactaaaagggaagtagtttaggctttgtgccctaaataaaacccattttaatataatcagatttactaattaataaattaaagatcagaaatcacttttatgttgcacggttc

SEQ ID NO: 341908 - DNA, 714 bp, Cannabis indica
acaggaagtctacatctgggatgggtatttactcttggggtggagcagttgtttggagaagtgctaagcaaactgcaacatcatactctaccatggaggccgaatacatagctgccactgaggctgctaaggaacctgtctatcttagaaagttcttctcaagacttggtgttgttcctgaaatggaaaaaccattagttttactttgtaataacactggagttataaagagcctcaaagccacaatagaagcaaacacaagagaggaaatatcatatcatcagggaatatgtggcaaaagaggatgtactggtggagaagtggatactgaatacaacttagctaatccattcatttaagttttgactgtaactacatttgaaaagcacagactgaatttaggattaattgaaatgtactgttgggtttcgtgccctaaataaaactatattctaatgtaatattttctattcaattatcaataaagaaacatatttatttcattacttatacaatgtgttatttagttcatgtgatcatttatttgtttatttaatttataaattcatccaaatccttatcacattcatattcttatttattgtgttgtcaacacagtagaaattgatcaagattgtgtgattaaatatattcctatgatttatcagtacgcagggtttaactgataagataatctacaatgtaatttacttg

SEQ ID NO: 341909 - DNA, 524 bp, Cannabis indica
ttcatgaattgagttgttttgacatgatttatcatacgcaataaattttcaaaagatttgactaaattttgttgaagaacaagaagattcttcttaatcattattaatttataataatcaaaagaagaatgtgctcatattttgcacatagaaaaaagtgacagtatattttaatattttcttctaattttaaaagtaatacatctataattttatttagtttttcttttatacttgtttaaaagataaaattatatttttattcataaatatttttgctaatataatttagggtaaatagcggcaaaacccccaaaactttcattttggtttcacttaacccccaaaactaaaatttaggcggcaaaaccaccaatacttgcattctgttagcaatgtaacatttccgtccattttaggtgttaagtgccatgttggactgtacacagtgtacacatcgcacaattttattggtccacgtcaaaattatttaaaaataaaaaattaattattttaaaataaaa

SEQ ID NO: 341910 - DNA, 580 bp, Cannabis indica
taccgagattaaaagctacctggtcagcctgttgtttataaaatgaaaaataattccaagtttaaagactgcttggccagtcatgatgtcataaaaaaggccttatggcctgatagatatattaagagaaagataaaagagaattatttagaaagctagagtcccaggctctttgttcgtgtcttctgggtcggtaggagctggaggatctattgtctgagcggggggtacgccaacgttctggctagaagtagaagtggtcacctcgggttcaccataagccacctgagaagcgcagtactcgagaaacatgtctttggaatcaccaaagtaatcaaaatttgcctcacgattagctttccaaaagtcataaaaaatctcgagacccgctatctctagggcatgtactttctcttccagcctcgtcacatccgctctctgctgttcatcctccgatttgtacttctcgaactcagctgtaagctcctcctccttagacttcttctctacttccagctgacggaagacagcccgaagaactcccctttcctcttgaagactattcacttctgctaacaag

SEQ ID NO: 341911 - DNA, 711 bp, Cannabis indica
tgtaaaaagtataccgtataaaattgtaaaattgtacataatttgaatgaaagatgtattaagtgggctagagctggagtaggcactagtaatttatagagaattgttaaaagacattcataatgcctaacatcattgtaaggtgcaatatctttattcaaacaattcaatattaagtctcacttattttactttaataaagattatagaaaactgttaactaattatagtagtatcaggcacattggtgcccatatgacaatgctctaatttataagatatcattagctctgtgttataattagttagtgtttaaggtgcccaatgtaccacattaatgtgatattttataattagttagcgatttttaatattttttattacatcaaatatgtagaacttgatgttaaaatgcactaaaaacggtatattttatagtgcttagcaccttaatatgtacatttagagatatgatacttaattttttttttctttctttctttactttctctaagagtactcacaacaagtgaggtgtatgatagctaaaaggtaaaataaaataactaagagtttaaaattaagctccatcaaatgctttaaacttttagcaattatacatatttttaaactccaagaaactcttctctacatatagctcaatgaatagtggtgaggtaaacatattttatattttttctttctcttttt

SEQ ID NO: 341912 - DNA, 803 bp, Cannabis indica
gaagaactcccctttcctcttgaagactattcacttctgctaacaagattgcgatagtagcttcaagttggtcaaaagcctcgaggtccttagtcaactcagttactttcctctcgacaataaaagtcttcttattgacttcacccagctccattctaatagctctgagttccaccctggcgtcatcagcatccttcctggccaagtccactttccccctcatggtgttggacatggcagtgttcttggaggcagcagacttaactcgggaataggtgtaagccatcttcagaccagcctacacagagaaaaaacattagagtctgagctaagttaagaaggatcaaaggaaactatcaagaaagactcacctttgtaaattcctttaggacttcacccatcagcagctccaggaaagattcgttttcagcgccgaccaactgctcactcacctcaggaaccaactggttcatgtagtgagtgagcatctccttgcttctcttggcttctggatgtaatggaaatggtggagtaggagcccgcatctgctcagatccactcttggccagctcggatccgccctttgactgttcaggcctgtccgagcttcctccacaagaatccttcgacttagcagctttcaaagcagaagggtatacaacatttagctcctcaaaaaaaataaaaaacctccttggccggtgccttttccctgaatggggttgcgtcaccgcccctagatttcttggccggagcagatgtgcttgagcttcccccaactctcttcttcagagcatcgagca

SEQ ID NO: 341913 - DNA, 763 bp, Cannabis indica
gccttccggaatccgtggaacctgaacatggatccactgacagactggtttaatcgcttcctcgggcccaccttggctccctttgcctcagagatgaccagtgagttcgtctccgatctgactccgctcccgcccaaaagatatgccgcttgtgcctccctgaactccatctaccaggttcaagacatccaccatggttgcggtaggtacttgtaatttattccttcccttgatattttttctagggcatccgatctcactcttatctcctttttcatattactgcggagacccaccgcctttccaagaccttaattaaccatggcttcgtcatgtccgaatttgggggcatagacgaggccgtgaggatcctgcaggacttgtctgccgaaaggcgggtgatccaggaggaggttgatcgaagggaggccctcgcggaggcaaagctcaaggaggaagctaaacagagggaagcccaagtggaggcgaagctccgagaggaggccaagcggagggaggctgagacagaggcgaggcaccaagaggcgctgaaggtggagggtgaggccgctgccaaggctaggcgtgagcttcgggaggccagggaagctatggacgagatggctgccaaggtagagtccttagaggaattgcaccaggcagacttgcagtctatggccaacttgaccgtggaggtgaagtagttgagggacttcaaagatcaggccttaaaaaaggccaaaagagaagaactcctaacccc

SEQ ID NO: 341914 - DNA, 249 bp, Cannabis indica
taaattaatccctatacaatgtaaatcatctatagaggatcattgattattgggattataaaatggataactaatagcgtatctatatcgtggaacatatagagcgttctatataactgagagtaatttgtaaattaagagattttattaagtctaattaataaatatgttaaatggcaattttatttaataattaattttaattattaaataattagatttggcatttaagtggttaaattggaaaaa

SEQ ID NO: 341915 - DNA, 877 bp, Cannabis indica
gaagaagcttgtacagtttgggaaggggttttgattggtcaaaaagaagaatctacttcaaccgatatgcccttaggcacgaccatacataacatagaaatcacacttggaaagggtggacaattagctagagcagcaggtgctgatggatcggagttgtcgaatcgaattggaaaattgaaagatttgtacaagttatacctttcatcaccattttgtggaaaatcgtttggtatgaatatgttagacacctgtaactcaattggtgaaatggtatctctctccaaaaaatcatattttttttaccgccggacaaagaaaatattttgttgcgaatgaacaagatattgaggaattgtccatacgtaaaatcataattattgatgcgggccttttccacataaaagggaatcctttgttacaacagaagcagaagtgatgtggattattcaagaatcaaagtcgattggctttataaaaagaagatatcaatgaacttctatgaaatggtttcacgggatttagctcgtcttcggttctgtattgcaaagaaaagcaaacattcaattttataagattagtttatgccatgaattttcagaataaatgaattggttcctggttcgttctgccatcctacctaatgaatcattaggattcgttttcaatagaatcttatgcactcacgggttctgtcgttcccaccatttcgcgattaatggttaggtctaaattctacaacggagctcttaaatgaaatttcttgagtagcatttcgtatagaggttagtatattagcaatagtgtctttactcataataaatgaagattttggttgtccccaaatttggatataatcaacatgctcttttttttt

SEQ ID NO: 341916 - DNA, 1016 bp, Cannabis indica
taatagagtcatagacttgaagagaccttatgagaagtgatatgggaagataccaaacctgaaacacttgagagtgtttggatgtgcagcatatgtacatcaacccaatgataagcttgatgctagatctgtcaaaggcatgtttctaggaaatcttataggcacaaaaggatatagaatctacataaaccagaatggaaagcctaaggtaattatttctagaaatgttgtgtttaatgaatatgattttccttacttgaaagtcgagaaaggcagtgtgttacctgatgcagattcatctgacaagagagaagatttggcaaagtttgaaatcgagctcaaaggatttgaaccagcaagtgagaagaatgacagtacagacacagctccagatgagactgaggaacaaccagatctgtctgactaccagcttgctagagataaaaccagaagagaaatccatataccagcaaggtttgcataagcatatctgattgcctatgctttgtcaatagatcattcatgtgacataccagaaccattgagtatagaagaagctttaaatggaaagtacaagaagcagtggtctcgggctgtggatgatgaattaagctcgcttagaaagaacaagacatgggtattggttccaagacctgaggacaagaagatgatctcatgcaaatggattctaaaagttaaagaaggtgtgactgaagatgagccagtaagttttaaggtaagattagttgccaaaggtttcactcaggtggaagggatagattacaccgaggtgttctcacccgtagtgaagtataagaccataagacttatgttgccaatggaacctcaacagggtttagaagtggagcagcttgatattaaaactgcatttctaaatggttatctagaagaagagatatacatagagcaaccacctgaatttcaggtggaacaagatggaaaagagatggtttgtaagttggaaaagtccctatacggccttaagcaatcaccac

SEQ ID NO: 341917 - DNA, 1125 bp, Cannabis indica
ttagtgtagagcttgactatacgaagtagggctcaaccattcatggtggagatgtagtctccaaattcttgtaatgtcagtataaagctcaactgtcttgagttgagctcaaccgcttatgggtaaagcttgactattatgtttgtactcgattaatatatattacctctttttatttaaattagccaatggagagttaagaagaacaataaaaaacaaatagagaagaaaaatcaaaatcaagtagacaagaagaaacagaattggatggagaagaacaagctaaatctaatggagatgaacaagtagaatctgatggagaagagcaagaagaatctgatggagaagaacaattagagccttcatcagtgtcactagacaaaacacatttggtattttttgaatttgttcactttattttattattatttttcttgtgttattcagatagtagaaagattatgtttaatttattgcaagtggaaaatatttctcgattggtgcctatattaaaggaaaatgaacattttgagtgcaaaataagtataaaaattcggatggacgagatcacaaggcacattaatgatgtactaaagaatgacccgactcacttaaaattgttcaaagaatcttcgtttggtcactttcttgatcattctgactactatagacattttagccaagtgatgtggctattactcgttcggatagcagattgttacagagattcagagattcagagatgtggtttattgtgaatgggataccaatccgattttcattgatatagtatgcattaatatttggactgtaatactcaaagtaccctaaaggatgggaatctcaagctgagtcaaaatcattcaaagatagacactttcgtaaaagaccttcatgcatcaccattggcgacttaaagaacaaattaaaataattacctatttcaggagatagcacaatgtcttcacaatccatggacatataaacgattacttgatgttccataaaattcacgtaagtatatttataagtatattcatacatgctttcttagtcaatatttattgcaaacatgtatgtattattgagttcaaaaatttcttataacaggggagattgtgtggt

SEQ ID NO: 341918 - DNA, 490 bp, Cannabis indica
agagaagaactcctaacccccgtctcctgcaagcattgtgccaaacgcttcgacgagagcgtctatatggcctggcactcgaacggccagagaatcaaacttgacttctatcccaagcttgaagaggctcttgctaaatttcgggagaacaagaaaaggctagatgttttgcttgaggcgcgctggggccctcgtcttcctcctcgcattgattaggtcgcggagtccaacccacttcatcataattatatctcttttttctttatttacaaccatttttctttcctttaagacaatttttaatttagttgtttatattttttttaaggggagacagttattatggcccgtccccaggccttttgtattttttctttttggacctgccctttaggtcaggatattttaattatatatatgctcgctttgatacatatttcttttgactatgtttttacttttggcctgttttacatctgttcgtgtggta

SEQ ID NO: 341919 - DNA, 547 bp, Cannabis indica
acccacattaggtccaattactggtgttgtctacaaaaaaataaaaagcatttcattttttatgccacaacacagtgacaagtacatctgttgtacggaacctacatataaatattaattaatgttatgaaaatccaaataaacttaaagccaaatgcaaattgcaaaattcacttcttgtgcaataaatgagatatgacaaaacactagttgttttgtttatgtaataccaattattctattcacttatatacatcacataacattattttaagaaaaattgctatggagtgatccaacatctctatttataactaggaaaccaaagccgtgcttcgcgccgtattatctaactcttttaatcttttatttatatattttttatatttattaagtcatataatttaaaatatatcattttgatgtatgtattacaaacaaagtaatagtagtgaaattagacacattataatatatattgaaagatggcaattttgtggcaaatattaaaaattgtggaagtaaaaagaaattacatgtgtttttt

SEQ ID NO: 341920 - DNA, 1125 bp, Cannabis indica
ataaataggggtagaatccataggaaaaaggaaggcaaaaagtagagagaaaattctattattattactaatatttagactttgtattcaaataaatatcctcaataatacgaactcgtagagtatgtagattctaactacaaaatcatgtaaaatatctggtatttattattattatgaaattctacagtgaatttattacaaaaaagtctatatatttggttaacaaaaatttgcgttaacagtttggtactttcattgagagccttggtgacaaaaactcaaaaaaatccctccttataaacacaaataaaaatccatatcaatggctgataacattccacatgaaggtaatcatccagaggaaacaactcatcgtcctgacaaagaacctatgggatctcagagaaccaacccgtctaaaacaccacgttcagggaggaacgatggtaatttcaatactgttggtgatcaaattccagaaaaaaggagtgaagatgcctatgatcctactagatatgtgccactggtagaatttgaaaataggcaacttcaacaatgcctagctgaatcaaactgacgaaacgttgagttggaacgagaagtcgcagcaaccaggactacacagggaacaattcctcaaaatcaacctgatccaacagtaaggagaccacgaggaagacctcgaggctctaggactaggagataggaaaataaccaagggaatctcccaaatactcaagaagaacaacttgggaatgcaagggatttcccaatggatagagaaaatcaaccaaactcaggtaatacaagaaatcaagaacatcaacgagatgttccaggaacttcccatggatttgcaaactaagggaatgaatggacatacatactaggatcatctcacatgaatgcagaggcgagacaaccacgaccaggaaactaagaaattcctcgtaatgatggaagaaatcctagaaaccaacctaggtccagttgtcgacccccaaggcatccacaaaggccttctcgcatagacatggagattatgcacccttatctaagcatgggacgtgtgtctaattgttgggatttattttaccaagatcttagatctactcacaagta

SEQ ID NO: 341921 - DNA, 686 bp, Cannabis indica
atgatgaatgtgattgaaattacttttggttaatgataattgctatttctcctttcttgattgtgaatttatccatatttgtgtttaattacatgtttaagattgatcaccttctacatgttctatgatcccaattcaaaatctgaaaagtgagaattgggaatgctaaaattggataaactaggttttgatgtgaaacgaaagtatttgcatagcctttgtgacatttagattattgcttaatgctgattatatgttaatctatctcagagatgattagataacatgtgatttaggacctaaaagatctgaaaagagttaggttaatttttataatctgtcattcacattaagaaagagaatagtaattagcattaacaattgggtaattaaatcaacaggattcttttccctaatttctcatccttgattaaacacctttattgctttctttaattttcttgtttttctttatttcaaaatctatcaaaattatttatctaccaaatagaatcataagtctaatttagtggtattcagttcaattccctgtggttcgacctcacctgcgtgagtttactacttgattacgtgcacttgcgtattgtctataaatttcgtaacaagtttttggcgccgttgccggggaattgtttaaaaattgatattacataaaattatactaa

SEQ ID NO: 341922 - DNA, 497 bp, Cannabis indica
tttcttcttccttttgagcagagtctcctgctcttcctcaacctcatcttcctgctgaaagtgctcctaagcatactgtttggctcacgcacctcccttcaacttagcctcacgcttcagttgaatgggttcattctcctaatgagctccctcagcccgaccagcactggatttcctcttcttctccttcacaagctgggaaatgaaatcctttggataaagcccgtactccacaaagttggccttcgaggtcaacaaagtgatattccgggcgtcatccagcaactgagcgatcctttgagctctatccctaagagctggcgtgaagggtgggcgataatatatgggatctgctagaatcgagtataggtacccatgccttccaccatgtaatactcgtcaacaaaatttccaattttgctcacaggcttgtctccggtgcccgtcaccacttgaagtctggctgagaaaatagaagtatcccgacctgccttgct

SEQ ID NO: 341923 - DNA, 1556 bp, Cannabis indica
aaaacacagcccctgtctagatcatgagtggggtaacgatgttcaaaatccttcaactgcctagaggcataggcaatgaccttccctgattgcattaacacacaacccaaaccttgtcttgaggcatcacggtatatcacaaacttttcatcactgactggcaggcttagaactagtgcagtaatcaatctcttctttaattcttgaaagttattctcgcatttatcagtccacgaaaacttataactcttttgggtcagctcggtcaaaggagtagcaatcttggcaaaaccttctacaaatctcatatagtactcggccaatcctaagaaattctaacttcagtttctgtcttaggtcgtggccaatctcgaagagcttcaatcttcactggatctaccagaatcccatccttacttaccacgtgtcctaagaaactcacttgggacaaccagaactcacacttcataaactttgcataaagcttgtgttctcggagacgatgtaataccatacaaaggtgatgttcatgagcttcctccgattcagaatagactagaatgtcatcaataaacacaatcacaaaattatcgaggaagtccttagatacccgattcattaagtccataaatgatgctggtgcattagtcaagtcgaaggacatcactaaaaacttgtagtgcccatattgagtacgaaaagcaattttgggaatatcctcttcccgaatcctcaactggtgataaccagatagaaggtcaatcttggagaagatggtctttccctgtaactgatcaaacaaatcatctatccttggtaaaggatatttgctctttattttcaacttgttcaattctcaataatcaatgcacatacataatgactcgtccttcttcttgacgaacaaaactggtgcaccccaaggagaggtacccgacctcgtgaatcgtagatcaagtaggttctataattgaactttcaatttcttcaattctgtcggtgccattctatacggggccttaaaaattagctcagcccctggtactaatttaatttcaaagtcaatctctctctttggtggtaatcctggtaactcttccgggaatacatctagaaattcacatactattcgaaccttttctggtccctcaggtatatcttttgtggtatccaacacactagccaggtatcccatacatccttctcgcaatgattcccttgccctaagtgtcgatatcaatggaattcgagatccatgcacctttcccataaaaacaaatgggatctcaccctctggttcgaaggtcaccatctttctcttacaatatatagtagcattgtacttagtcaaccaatccattcccaggattgcatcaaaatcttctaagtctaattcaatcagatccactaataattctctcccttctactaacactgggagagacctcacccacctcctggagattaccacttctccagtaggtaacaaggtccaaatccactagacatgatatcacatggcctactcaacttctcaatgattctactgaaatata

SEQ ID NO: 341924 - DNA, 1972 bp, Cannabis indica
atatgatggatgcaatgaggaattaataagttagtggatttgcttggtaaattctagatctgcttattggaagctcggatatataggcccatggtcccaatactagtttagaaaatactacttgttagactcagttaattgattttaattaatcaattataattctaaaattagactatgtctagtttatgaattttcactaagctagggcttacttgtgaagaaaagagatggttgggttatttgttaattaagagactttattaagtctaattaataaatatattaaatgaaaattttatttaataattattttaattattaaataataagatctggcattcaagtggtcaaattggaaaaatgacattttgagaaaataagatgtgttgacctcacttttaccaacgacaacgagtctaatttaataagcgataagtgatttatagcaatcgatatataataaagcaatataaagatacaagagttttatagaggtgcaccctcgagcagttcggtaatagcctaatcctcgttacttttattgacttgagaacaaggagaatggttccttttcttagagctcttacaagagtatctctgaatatataattcttagataatatcattatggtatagtctcaactaaactgcttgcgacctttttcccaatgaacatgcatcattatttatagggctagtaagcttggagaggaagagtttcccctctcgttacaatgtgtataaacagagagatcgtgtgattaattctgagtacaaagatcgtgggattgatgttgtatacactgatcatgggatcgagtgtatgccatatccctgaaatctgatcattaagttatatggatgttgttgatgactcacgatgcgaaagctgaattcgctaagtgttggttgctttgtgcggattgctgaaagcttttctcagggcatgctagcgaggcatcctgctcggactatgcttccgaagcagatgctccaagtggattccacatgtcaccatttatgcgatgccacgtcagagtgcaagaaattgggacaacatttgcccgcaagtctgtacgggacttccgaagttgcgtgtagacttcatccgagctgcttcttcctttggatggggacacgtgtcaagggcgaccgtccgagaatctatctaaggctgactgggcgtcccttcagtttttgactaataaatgctctgacacttaatatttcaaaatccgattttctctctccacgactgacggctgcccttgattattttttatttcccatattcgcttttaaggagggaaactggggcgtttgaggttcctttgacatgattacctcttttcgtgacttgcgtgtaaatatcaaccagcattggcacataaactcattttcaccatccttctttgctaaaagagtttagagtgaaaagagaggttcttggctttaagtttactgaagtgtcgtcatcaaagctgcttgttggattgacgttgctcgaacccagacatctgactcttgagtaagttttttatttcctttatgcttattttcgcatgtttacatttcgaatgcacctttgactttgctgtagaaaatatctaggaaaccctaggtccagaaacttctgcgattcttctttgtcatggcttcatgtaattttacagtccataatgcttattcgaaacttcatgaaattttttgccctaactcgagaaaattccaaacttcttgggttttgacatctctttgaacattcttgttcttgaatcacttgagtattcctcgtcagcatatttgcttgtttatcgttcgatgttccaacaaaacactcatcttgtgtgttgtcttttgtagatgaactcaggtgagttttgggagaactaacatcgtatcgaccaggacctacttcaacttttgcacgaggattatcctcgtcttcgttctagccctccttcctcta

SEQ ID NO: 341925 - DNA, 504 bp, Cannabis indica
tagacaagagtcaagacaagatgaaagtctttttaccagaggaagaaattcaagaaggcataactcaaagttcagaggtaactcaagatcaaagtcaagatctaaagagacaataaaatgtcatcactgtggcaaagttggtcatctaatcaaaaactgctgggaaatcaaaaataagaaaaagaaacacagggattaagaagagaagtctaacgactcgaatgctgtggtagatgaaacttacagttcagatggtgatctctttgctgtaataaatgactgctgcactagtcagaaaataggtgatgcctgcaacaatctgcaacaaaaggactgtgatgaatggatcttggacagtggatgcacatatcagatgagtcctaacaaagattggtttattgattatgaagagattaatggaggaagtgtagttatgggaaatgatcacaagtgccaagtaactgggattggatctattgctattagaagttttgatggcactgt

SEQ ID NO: 341926 - DNA, 811 bp, Cannabis indica
gatcgtaatccttcaggaaaaaaagagttgttcaattatcgaaatttacctttgagaaatgtcattgagcgatgttttgacatattgaaggcttgtttttctattttaaagcaaatatcttcatataatttgaaaatacagatgtacattgtgatttcctgttgtgggattcatacttttattaggacgaatgcaaaaaaatacatatattttgatggaaatgaagagattcttgaagtgcaagatactactgtacaaagcacacacaaaactttgaatgatagtgttaagtttagcatttcaagacatcaaattcttaaaatggctaatgtctgtgatgaaattgataatcatatatgaagagcaaatcgacgatgaagatatttgaagtctattaactgttaggacttttttaaatttttcttcaagattggacaagcactagttcgtattttattacgactttgtcgattttgtgttatagataatgagtatcgtgatttcaaattacttgaaatttttttaagatacaaattttttatttttattataatttttatatatttatttaaaaataaatgacagtcttagtttttttaattgaaaaaaaaaaaaatcaaaattcatgttttttatttttaaaattaaaaaattagaatagttaccaaacacatttttattttttgtttttaaaattataaaacaaaagtgattacataagatacctttgtttttttcctttaaaatttaaaaacaaaagtggttacataacacatttttatttttaaaaaataaaatttttaaaacaaaa

SEQ ID NO: 341927 - DNA, 537 bp, Cannabis indica
acttccaactactgaagcataatgattttttctcatgtcttttatctcttggggatcagtaagagattgttccttagatagtcacaaaccatgtctagaaggcataattttccctttggtattggtcattaagaaacgctctaacaccttattaatgtaagctgcttgcgatagagcaagcgatatgttctttcggtctctaataatttggattccaagaacataattagcttcatccaagtcttttatttttaactgggtgctaaaccactcatttacgtcagtcatcttcttgacgttttgcttatgactgaaatgttatcaacataaaggacaaataatactaccacttgattattcttgagttggtaaacacaaggttcatcttcattttttgtgaaagccataggttttgattatttgatcaaacctcttgttacaagagtgaaaagcatgcttaagtccataaattgacctatttatcttgcaaactttctcttcttgtcctggaagtttataaccttctggttgctccat

SEQ ID NO: 341928 - DNA, 656 bp, Cannabis indica
cacaaaaaccagttaaataaaataacttaaacaaaaacattcattcaacagactccaacccaccaaataattacacccataccatatctacctcaaaaatactcattaattatgcctatataaccggttttattttagttataaccagtttaagttattttgtgttatttatttttattcattataacattgttatataaaactggttctaatttatttataattagtttgagttatattgttttatttgtttttattctttatgttacagaaccggttatatttcaattataaccgttttgagttattttgtgttatttatttttgttctaatatgttatagaacttgctctactatataatttataaatatatataaaggagaagtatgaattggtgacatgacgctctaaaatctctctaattaatcttatttattctctctttagtcctctcattttattaattttttattagcttcgtaaataaatattcattaatcaagtcatatataaattaaaaaattaatatttatatacaaatatatatatatatatatatataaaataaactacgtaatattagtttttcttttatttgaaatctctattaattagatttttatttattaaatgtacctaatataattttttttc

SEQ ID NO: 341929 - DNA, 242 bp, Cannabis indica
tgaaataaacacatataaactatcacaaatcttacagtggttgcagcggaatataatgtctccttccactcagatttctaacccttgtatcaccaagatctgagttcgaatctccctctcttgaaactggattcttcacaaccttacacactatgattgagtaccacttgatgtgtgtgggcactcactctttcactatagggttcgattttgtggagaggaggagagagagagagaggttt

SEQ ID NO: 341930 - DNA, 699 bp, Cannabis indica
tttgtatttttttttatagaatttagagcattttttatatgaaattaaaatttaaaaaaataaaaaaattaaagagagaaaagaaaaatagctttaaagaaatttcagagtactatgtcaccactttatgtctttgccatatatatagatatatatttatatatattaattaatattttatgtatgtgtataaacaaaatttatgattaattatatttgatttaagttttaatatttttttggaatttatttttatcttctaactttttaaaaatactttatattttttttatagaaaattgaataaatagtaaaatatcaatttgtagatttatatatttttttatagaaaaattattaaaacgatagtaaaatatcaatttgtaatttatttttaaaaaaattatatttttatagaaaaattatataatagtaaaatattaatttgtagatttatgctttaataaaatattaaaattgagagaattaaaaagagaagagaaaattttttttagagtgattttagaatgtcatgtcaccgtcttatacttttcctatatataaatatatatagaacactttttaatgggtattacccataaatggttactaaacaaatttaactataaatattaattttaaaaatatgaaaccattgaattttgatctaataacgaataatgaaatcacaaatttgaa

SEQ ID NO: 341931 - DNA, 790 bp, Cannabis indica
tcgattaaaaagaaaattaacatacataagttatttgaaaatttgtcgacacaatatcgacatgatgccgacattcggtcgatatcacacttaacaatcacagaaagcaattacatcacattgtcgccaacatatcgacatactgtcgacatgctgtcgatattacaaatatatgatcacgtctatttagcaaacaaaattgtcaacataatgtccacatcatgtcgatatgaggtcgatattatcacacaaaaagcaattcaatcacattgtcgacaaaatatcgacataccgtcgacaaattatcgacattttaagtaaaagaaaaaattattctcattgtgttgaaatcctatcaatacacctacgacatcctatcgatatacattaacaacacagaaaattttattggtcaaactactctcaattttgaccgaatgtcaaaaaattctcaaataacttatgtatgttaatttgctttttaatcgacatcatatcgacaaactgtcgagaacatgttgataatggtcatccctaacctttcttagcaggatattgacatagcatcgatattctatcgataaactgtcgataacatctggaaaacccagatttcaacagaaaaccagatctgcaagatctctaccattttagaccaaaaaacaccagttccaacaaatacgacacatataacgaaagaaaactacataaactctaacaaaatgcttaaaacacaacttatccattataatggtgtaagattcttcagtgattggggtgtgctctggtt

SEQ ID NO: 341932 - DNA, 938 bp, Cannabis indica
gactttcctcattcttcttatacttgttgaacttacctcgcctgattaactcttcaatttcatcctacaaaaaccaacattccagagtagtgtaaccaatacccttgtggtacttacagaatttcttcgggtctcttttgtcgcggtttccctagattgggggaggctttttgaagaccccgttcttctcttcgatggcgtagatatggtcccgagggactgccaactctgtataattcacaaagcgtggaccacccttcctcttcggagaggactccttctttgaaggggacttggctaactttggactccgctgtctttgtggactgcgtcttctgggactccttcctcttgaatttttccctctgggaatgcgggatcgtgaccgcagcactagtgacttacgtttatctttgcctttctctaattcagccagagaatttttaatcctcttatgcggctccgccatagcgaaaaactcgactagtgattcaggtcttcgagcttgcaaatcctttcagaaattagttcctggcaggacacctgttataaacatacacactagcgaagactcgggagccttctctacttttgttacttcggcattaaaacgtttaaaatagtcttgttggcctatatgtcatcgtggcttgaaaatgtgtgaggaaaaggtcgacaaaggtctcccatgttgagatagatgcttcgggcaattgcctgaaccaatcgtgggcattgtcctccagagtttccacaagaatgcgacacttcacaagttggggtacctgatccacttccataatagtattaaatttttctaagtaatctataggattagtggtacctttatactttagagactcggataaccggaatcccttgggcaaccgagcttgtcgcacttctacggtgaaaggagaagtcccatgcagcttgta

SEQ ID NO: 341933 - DNA, 644 bp, Cannabis indica
atttcgtaatcgttttagaagttcatatttagagtgttaataaacatacttgtgagtagatctaagatcctggtaaaagaatttccaacagttggctagagtgatgattgatgacggagcatcattgaacaatctcttcaaactaaccctagagcaaatgggtttgtctctagaggacctagagccattcgattagctcatgtatttattcaatggggatagaattactccctatggttttatcaaattaccactaattgtcagcattgccttgaggtagaatgttattaagtaactttcatagtggtcgagaccaagttttcgtacaactcaaggatccgaagttcaaccctatagaacctccaagaaattctcgtccatctaccttctagctgtcgaattctcgatcatctaaccaaagagcaacctacgaatgctacaacacctcattggaactcacaaagaagacctcctcatgttgtttcaatagttgtgggaacaacccaaacctctattgggttttgtgccctaaataaaactcatttataatcaaatttacttaataataaagatcagaaataatatttttatgttgcatggttcaaatgatttatttcatgattatatacatataatgtatgaat

SEQ ID NO: 341934 - DNA, 1182 bp, Cannabis indica
gtgtgagacatgatttgatagagcattgaaatagctttgaaatgcaagttgaatcgcgtcaattggatcaatattgagtgagttatggatgttttactgaaggttactctgataccagggcctaggttaacatccagcgcccacatagatatatgatgccaacctggacgctgggccaagggaaaattgttagggtttataccctaaaagcaagtattaaatagataatatattatagaatatattaaatacaattataagataaatgaatatgttaattgtagaagtatactaaataaatatctgaaaatttcattttcatacagagatggtatgatcttgtaaggtagtacaaaagaattaagatcatacaatatgaataaacaagtcggtagtgtattaaagtatagaatctttaatatgaaattaccaagtacggtttactatgcactatactctaatgtgtgtgattttgattcggattacatatgtggatagacatgaggtaagggtaccgtgtataatttgattagacatgactggaccgatatgtaataacatctttcatcaacgcatcgtttatcatgaaagagttattcatatcacaacaatgaccattagtagatctgtctgaattcgagtatacatgaactcctgtttgtgttcattgagctctttgattcactcgttaaagtttctcagagaagatgattcttacacttttattttgggagcttaataacatgagtggctggtgatgggttttgtgccctaactaaaattctatttcaatgtaatcttgaatattcatttattaataaaaacagatttattctattacttgtttaatgtattatttggttcacatgtttatttcatgatcatttgtttgatttataaattcatctaaattcttatcacattagtattcatgattactgtgttgtctacatagtgaaaagtaatcaagattatgctattaaataaagtcctacaatttatcagtacacaagttttccactgatataatcaacaatgtaatttacttgcaccttcgacaagtgttttgtcatttccaggacattggtaaagtaagcttggattggacgtatggaatatacatcggactggaccgatattgaacttggataagatgttgttgtcattgttgggttttatgcc

SEQ ID NO: 341935 - DNA, 520 bp, Cannabis indica
agagaagagaaagagagggagtaagttgattatggagtgattacttggttcttaagtaatttatagtaaaggtcttctctcttttctttctttctttattcttttttttaattattaaaagtcagcccataaaacaaataaaacataatacttctttcttatttttttaaagtatgactaatttaccctcaaagaaaaataaaactttaaaataacctaggggcattttagtaattttactaatccattaaaccgacattctaatattcaaaactaatccggaataccctcaaaataagtcatcccttaatgtcgtaatatttctgaccacatctcaaattttcacagtcatcgggcccgaaaaatatttttattttaaaatagtatcctcgatacccacatatcccaatttaacctccgtaattaataaattagcttaatataatcatttaattaaattctcactaattaccctaagtaagatcataatcttactccattaccaaaataattacatatt

SEQ ID NO: 341936 - DNA, 1048 bp, Cannabis indica
aacattgtctaaaactaaaaattaattctgaaacttgaggcgggctcttcctttagcttggaccgatactaactcgccatttcaaactttgagcttcaactcatctggatttagataatcccaagttttaagcagctacaatgaagaacaaacatggttagtagatccagaatcaacaatctagaaggatttgtcattctctaaaacacatgattcaaaaacaaaagcattaccttcattcgaattgtttagaagtctgggacatcgttcttcctgatgtcccttcttattacaatttgaacattgaagtgtattaccatcaattgtacttgaagaagcaacattgttagaaacttcatccataattcttttcctcttacacaagtttccaaaatccagggggcggcattgcaatcaagttccgttcataagctcgcaattctacttctagcttatccatgtcagaagagttaaaattgttaatcatataagatacaacaaatccattatactcaggaggaagactattaagtatgaattgaacccattgttctctagataattcaattccaagcaaatttgctttttggaactttagattcatcattaacaagtgtgagttaatgctcttcccagggaacattttcacactatagagttcatttgcaaaggcatttactaggagtgggcggggtctgggttgttcattttgacactataaatataaataaacagaagtaaatcatttggttcaataaattcacacacaaattcagaaaataacaagtataacaaatatgtttataaaaataccaaaatgaaacatattctttattttctaaggttttcaacaaactgatatagtgtcccgtttaggcgagagtcaaagcatcatccattgaatagagtagtcaactcatctaaaatgacaaacattctagaaaccttttattcgatcgaaaagagaatccgacattgtaccgtttaggcgagagtcaaggtcattcctatttcacgagcctccacaattgtttcatacttttgtaag

SEQ ID NO: 341937 - DNA, 433 bp, Cannabis indica
atcatatatctattttgaaaaaatacaactattaaaattctttaaactttatccagataaaatgcacttagaattatttagttaaaattatttaagttgcagccacccttgttattactcttgggttttatgccctaaataaaactccatttcaatgtaatctttatcttttaaatatcaataaagaaaaagtttttcatcactttgtgtgtcttttggttcatgttatcatttacttgtttatttgatttataaattcatcttaacccttatcacatttatgttcttgtttattgtgtcatcagcacagtggaaagtaatcaagattatgtgattaaatatgtattcctagatttatcagtacactgggtttaactgatatgaccatctacaacatagtttacttgcaccttgaataagtgttatgttcttt

SEQ ID NO: 341938 - DNA, 739 bp, Cannabis indica
ttgtgatatatttgtatcaatttttagtattatattctaatgtacatttataaaacataatgtaaaatttaatatttaattaatatttttattaaaaatataaaataatagttttatcattaattttattattattttattatataacacaataaaaaagaatataaataattaattcataattttataattatatatattaataaaataatacaaaataatgtcataaaagtaaataaaataataatacatttgtggtaatgtaaattttacatcatagtaaatattgtgtatttgtactaaatatagtataaaatttgatatgtatcaaatttacatcacattttttatcacaccaagagatgcaaatatgtgatgcaaaatgaaatcataactcactcaacaaaaaatataccttctaataggatgccaaaagtcataggggtgttcattggatcacatccaatatttttaggcctatccagatctgattcaatcatatattggatgttagattttaccatctgatccgatccaattaatttcagtcatccaatcgatccaacatccattggatgttggattggatcagttctatctattggatgtatttcatatatattaattggtttaatttgggtttatctaatattttagacctagtattttttggatcggatcagatccatccaatattttaggtccagtatgtattggattggactggatccatccaatc

SEQ ID NO: 341939 - DNA, 940 bp, Cannabis indica
aaaaaataatgaaagagaagaagatggcagggatgaaaacccatgacataagcatgcaaaggtatttttgtaattatcaaatttttgaaaatataatattgaaacacaaatttgttataaatgtttaaataaccgaataaagacaaaaatataaaaaaaaaatagtaaaatgggacaccaagtgtaaaaatcccttatccaaatgcatgcaaatctttttaaagctaaaattaatattatatttaatatgaccaaaatttattatgtgaccaaaattgaaagaggtaatttgttagtggaattaacaaattctaccattcttaaattaacataggtttctatttttctttaaaaattacaagtaaatattgattttgacaatattaaattgaatttcttatactttaaagtaagttggatatctcattacgattggattagatgttaaaaattagattttaattaggttggattagttaatgaatgtatatttcaaaatccaatcaaaaactaatctaatccaattatattggattgaattttgaggtttaattaaattagatcggatgataattttttaaattcaattactaattggattaaattacatttggagaaaatgattagatcatatgcccaactctactttaaagcactactcacattttattttctatttatctaggctaattaggatttttggtctctaaactttaacatgtaccaaatcatgctccctgaatcaagtaattaataaatggctaattgcgatttttgtccctcaaactttaacatgtaccaaatcatgccccctgaactattggaattgttagtgttctcctcaacagtgagtgttttaatatttatactcgcaagtgcacgaatcgtttcggaatataatgttcatgtaagtgcaaggtcgaacccatgggagttgact

SEQ ID NO: 341940 - DNA, 371 bp, Cannabis indica
cacttaatttcagccaaataaaacataataacattttattttcatttagcaaaatcacaaaaagacaaatactaatggggcaaaaagaccattttgcccctccacactaaaaccacataataatcaattaactgctaatttccaaattgaactaagcgggctttacattgttcgtctcaacatggaaggggccaaaccttgttctaatccaacaagttcatctcttaaactttctctttctgaaggagaaccgtttaatgatcatacactttacagaagtactttgggggccttacaataccttactctcactcgaccggatgttgcatttatcatcaacaagttaagtcagttcattcatgctcctacaa

SEQ ID NO: 341941 - DNA, 545 bp, Cannabis indica
atgagcaaatcaaggagaaaatgagcatgcaacaattcattagttcaccttatacaatctctgatggctacaatctattttgtccccctcaaaggaaggtaaattggagtcatggagtttggaataggcaaaatatcccaagacaaagctacattttgtggactgcagtgcaagaccgactcaaaaccagatcgagattgaagaaaatcaatgtcatttcagatgactgctgccttctttgcagtaaccattctgagacaaaatcccatctattcttctcttgttctttctcttcacaatgtcttctgcagattaaaacatagttgaattggaaggttgaaacgatagacgtggatgcaatattgagatggattgaaagatcaaaggctggcagatttaggaagagcttatggtttgctgtcatagcttcgactgtgtaccaaatctggaaaaccagaaacctgctgctttggtaatcaatggaacctagagtaaatgaggtggttaggagaatcaaggaagaagtaaagagtagattcatttat

SEQ ID NO: 341942 - DNA, 473 bp, Cannabis indica
gatgtagaaatgataaaactgcaaaattgcaaaagtgaggcccaaatccataatgccatggccagccacttttataggctttatcatatgatattttcattattttaatgccaaataattcaaacctaacactatgtgttccggggtccgggtctaggtccaagttgggatcagggtccgagtctcagtcctatctgggtccaagactgagtctggatctaggtttgggtattgtttctggtcccaggtttaggtctgggtatgtgtctgggtccgggtttgagttcgtgtccatgtccaggtccaaatcccaatttaggtcaggtgcttgatttgggtccgggatcgagtcctaagttcgggtttatgttctactctaagccatattctgggtctgggaacgagtccaggactgggtccgagcacgagttccggggctgggttctggtctagttctgggtcccagtccaggt

SEQ ID NO: 341943 - DNA, 677 bp, Cannabis indica
accttaattttttttgtttttttttttttttgttttttttttttatgtttttgcaactaaaaaaaagtatggaaaatttgagagaggtatttttgggttttagataaaatggtcatatattttcaataatgatatgtattagtttagaaataaaatattagatatatgtaagtataaaaaatcaaatttcccatggcacatacacagagtacatttttgttgttttactcttgaataaaggaccacgtacaattttctaaaggctttaaatctcagtaggggccacaatctgagtcacgtaagaatttaataattaatgttttctagcatgtgctatttatcttgtggacattataattccttattttatatcaaaacatctttttcaattgaatgatatctttaagatcatcaatcgaattaattgatttggactttaaacacccatattcatgaacattcttacaaattattataggataatttgtggttaaatccttgtacttttatgtttgttacagtttaattcttttactcaaaaaattatggctatattctctgaattcgacaatagttttgctctgtaatcattctgtccattttgatttgttaagtgtcaaagtggattaccatagtgtgtacgtaagtgtacaggtagcaaaatttcattagtccac

SEQ ID NO: 341944 - DNA, 1353 bp, Cannabis indica
taaaataatttccaacaagggattgctcatgggtgccccaaagtgtgacaatgagggagctaaagtgagactttgattgtaggctagggtggtggagaattgtatcccgctcgtttgaggagtggcaagatatggggctccctgaagttgagatccaggtacatagcctgacatcccaatcgagtagtatcctccgtaagccactttttgggcttcttccaagttaatgtatttttggaccctcttctgaaagtcttggaggttagctgctccctcttgctacagctcgttccaaaaaggggtcccatgcggattccagcctgaagaaggaccaactgttgtccgtcatccaccttcttggtctttgaagcctcctctttgaatatttttatgaagttctttagggtttccattggcagttgttttatgttagtcagggcgctgacctcgaggttgatcttcctcgccgcgacaaactgcctccagaaactaacttgtaacttgtttcagtagtccactgatcctggctccaactttttgaaccattcctcagcagaatcgcccaatgttagtgtaaagcataaacattttgcgtcattgctgaccctcatgacggtcatctctctgttaaaccgggacagatggtcactagggtccgaatctcccgtgtaagttgccatttcgggcatcttaaaatttttgaggtgttacacttctagtatgtgtcgggcgcatggttctcggtcctcgcaatcagagtcagaatcatcccatttttgtctccgggagactctagcgatgtctttacgtagtattgccaattcagccaagattctttcgttcaaggggccttcggagactagcaacgcatgttttttcttttcaagattgtttcttaagtcaccatgcttctcgttgattttcttagatcaatcaggggatacctctgagttttctccctctttcctcgagttcttgatgcacggatacgctttttcagtcctctcgatcctgagggccaagactcactcaagggagcttgcccctttgcgaacctttctcttttgggaaatcagagcagacttttcgaggatcatgtgccttcctgtttctcccagggatcgaagtgggatttttctcagggttctcctcgaaagggtaccatatagggcttggttccctagtcttgggcctctgagtgcttggcgatgattcttcttgtatttcctctagtcccgtgggtatagcctagggatgtactgttgggttttatgccctaaataaaactcatttcaatataatcagatttacttgttaatatagatcagaaataacatttaatgttgcatggtt

SEQ ID NO: 341945 - DNA, 583 bp, Cannabis indica
agttgacgatcaagaataagtacgcgttacccagaattaatgatttgttcgatcaacatcaaggaaagacagtgttttcgaagatcgacttacgatccggttatcatcaactctgaatccgggaagaagatataccaaagactgtgttccgaactagatatggacattatgagtttctggtaatgtcattcggattgactaatgctcctgcggcctttatggatctcatgattagggtattcaaggattttctcgataactacaccatagtgtttatcgatgacatccttgtatactctcagtcaaaaagaggagcatgagcatcatcttcgaatggtattgtagcgacttagggatcacaagttgtatgcgaaattcaagaagtgtgattttggttgtccgaggtatctttcctagggcatattgttgggaagaatgggattatggttgatccaagcaagatcgagtcagtgaagaattggccgaggccgaaatcagtatcagaaattagaagttttctcggtttagatgggtattatcgacgttttgtagagggattttctaaaatctctatgccactgac

SEQ ID NO: 341946 - DNA, 1222 bp, Cannabis indica
attgatgaaagaagttgggataccgatttggttcgagatatgtttaatgacagggatgctaatctaattttaagcatccctctaagcttctcagcttcttctgacttctggtcctggtctaatgaaagctctggtcatttctctgtcaaaagtgcttatcgtatcctccaagcttctaaagaccccagaactggtagcaacaattcaggtttttggcaaaacctttggcaactaaaaatcccaccgaaggttcgtaatttcctttggcgtgctgcatctgggagtttgccgacctgtgtaaatcttagaatcaagcatgttgatgttccacctgtctgccctgtctgccgagctgctcctgaaacaacctcacatatcctgctttcttgcacttttgcctcttcttgttggcaccatatgggtctaccagctggggtctctcttgacctctcctttgctagctggctggatagcctctttcagtctcttgattctgatcgggtctgttcgttggctatggttgcgtggtccttatggaaagcaagaaactcaattgtgtggaaagataaggttcttactgttgcaaatgttctatcttcagcccgcattgctcttgatcactggcgtaaagctcaggataacacctctctatctcatatctactttggtagttctgatgatggagctgagctatggactaaaccagaaactaatacaatcaaggtcaatgttgatgctgcgatatttgctagtgaaaaccaatatggttatggaatggttgccagaaacgactcagggtctcttattgatgctacagctcactgttctaatggtgccttcactccagaagttgttgagatcatgggtatcaaagaggctctaagttggatcaaacgaaacggttggcaacatgtggttctggaatctgacagtctagtctctattcaagctattcgtagctccttgcctctttgttccatttttggaaatctagctcaagactgtcgttcccttttgctttctatgcctttaataaaaatctgttttgttaaacgatcagcaaaccgtctagcacatgttgtagctagaatgtcacggtacttatctggttgtaatatttctgtgtctaatgctccagttgctattctggatgttttgtactcagaatgttaatttaatgaagttgatatttcatcaaaaaaaaaaaaacattatcattata

SEQ ID NO: 341947 - DNA, 960 bp, Cannabis indica
gctaacataaatgaagctaaatcgttttggaattggcttgagaagttctgttcgtggtctgggcagaaggttaataaacttaaaacgtcaatattctttagcaaaaatacctctcctggtatgagaagaggaattaaagaagctttgggtatagatactcctgagggggttattaagtacttggggttgcctctcttcagatctagacaaaaagatgttgactttaatttcattcttgaaaatcttatgtctaaacttcaggggtggaaggctaaaactttgtcaaaagcaggcagggctacccttattaagtctgtagggctatctttgcccatctatgctatgcagactaccaaattttctaaccgccttgtgaataggattgatggtatgatccgcgacttctggtggggctttgagaacgggaaccatggtctttatctcagagcctgggataaactttgcctccctaaatctctgggaggactgggctttcggaaaacaaaggaaatgaaccttgcctttttggctaagtggggttagaatttaataaccgggagtcagtcgttatgttgtaaggtcctggaggctaaatacctaaggggaaaggattttcttactgcaattataaagattctgattcttggttttggaagaatgtcgttaaagccagtgcaatcctccgaaaaggggcttgtaagagggtggctgatggaagagacactagcatttggagggacccctggatccctcacttgaaaggtttcattccgaaaccgaatggaagtataggtacggataataactgtgtggctgatctcttatctccttggggtgggtgggatattcctaagctaaaaaatctctttgatcatgagacggttttagctattctgaaagatggtaccccctcgggaattggaaaaaacagttggatatggacgttggagagtaatgggc

SEQ ID NO: 341948 - DNA, 887 bp, Cannabis indica
aaaaaaaaaaagaacttttttaaggggaaattgttatacccaaaatttggctgccatctcaatggaggacacgtgtcaagataaagggaatgtgaatcgatgcaattgcttcttatggaataacttattaattacgtaagtattagagtatatttgtagcccgctgactgtaaggtcttagatgaggaatcaatgtacaaactggcacttagtatattagcgagaaactatatgttgctaaatgtgaatagcgaggcaccaaagaaagcgacacgtatcaatcatgaaagtccttagcgtacaatgtacaaactaagtgtaaaagttagatcggctcaacaacaagcaagcgaggtgcccgtctcgttatgggaagacttcatataatttcatcctgttagcgtcagtgagacttacaatcctggtgagccagaagataacattcaaatgagccttgaagaattctttgtaaataagaactacggtcaacactagacatacatcgtcgacctcgaaaggaagaatggccccagctcgctattgagatcattggaactaagtttctatcgagacatctccagatacaagaactaaagacgtgtttaatacacgattgttttgagccagtaaaagtgggaaaatcacagttatatgattttcaaatcataaattgcatttatactacgtgatatgtaatcaaatcccacgattttagggatgattgttgtaaccatattacagtcaactttgtaattaactgtccactatgtaattataaatagtggcagacaagatcaaaaaagggacgaaaaaactcatacaagagaagcactgaaaaacaatcagaaatctgaataagattgattcgtggactatgcagaatttta

SEQ ID NO: 341949 - DNA, 620 bp, Cannabis indica
aaactgaacccaatgagtttccgtagaaaatgctgctgttcaggtgtttgtatcacttgggtgagcaattcttttaagcttcgatgatctgtgcggatgataaagtggcggcctagtaagtattgtcgccacttagttacagcttcgacaattgcccttagttcccgtaaataagctgacgtacccacaaatttgggacctaatttcttgctgaaaaaagcaattgggtgattttcttgcattaggactgctcctataccgacatttgaagcatcagactcaatgacaaacactttggagaaatctggtaaaataagaacgggagtttctgtcatggctgccttgagctgagtaaaagctaactcagcgggtgtcgtccatacaaaattatctttcttcaaaagctccgttaaaggggcggctatggttgcataatgtgctacaaagcgacggtagtaacccgttaaacccagaaatcccctcaactgtttgatagtgcgcggtttaggccactctatcatggctgtgattttggaagggtcggcccgcactccttcagctgaaactaaatgccccaagtaatcgatttccgactggaagaacttgcacttgctgccttt

SEQ ID NO: 341950 - DNA, 695 bp, Cannabis indica
ctgccaaaaccagctagccggtttgcaccagtattcccaaaacactttatcctttgctcaattttccaccaaatgctaccaaacttaccagagtacctacacaatgtattcacaacatattccaaccagtatttcacagaaaaacacaccaaaacaatttatgccattaaagctcaaagcttgagtttcaaaactcaagctgaaactcaagcttgcttaaaactaacaccaagcaccaaatttaactaccagaacttctaatcaaccaatattaagcataaaaaccgaaccctaaccatatgaaagcctaacagccactaaacctaaaaatcacatattcaatcacccataaaattcaagcactaaagagggatatgactagggcttaccttagcttcaagactcttgaatctctactgaattcccagcaaaagaagcaaagaacccactgattttctccttggtttggtgcagctcaaagggaaagagagaaagagaaggaactttctctaactttggcttttctctcttttttttaattcttcaaatgaaaagagttattcttacttaatctttgctgaatctgactcactaggtgtcaaataattgggcagccacctcactctccctttaaccaaaagactaaaatgccctttaacccaatactaaggtttttccaaagctaggggtaaaat

SEQ ID NO: 341951 - DNA, 645 bp, Cannabis indica
atgtgatcaatttaaaataacataatatccttatcaaccctcaatttcactaataccgtgatgcttaatgaataaggtagtgaaattaaccataaactacttaataaataagtaagtgtcactaaacatgcttaaaaattaagctaacaaaatatcattgtcattaagtaattaattaaacttaaaagacaataatcacaacaagatatgaactacatgctttcaattcaattattctcgaaaatttaacaaaacataattgaaagcataaacatccaataatcaaaaaaagtattggcctacaaagtagttcaaaacatcaacaagtaaattacatataaatgtaatctcaagaaatagaataagaaactcccactaacccaaaggtgcaaaagattataaaataatcatatcaacatgttttataaacaatatggcacttaatcctttggttagaggatctgttaacatcgacttggtcttacaatattctatcacaatgtcccctttcttgaccaagtctctaacaaaactccatttcaatgtaatccatttcaatattctatgatactttatttctatatgtttagaagtgttgggttttatgccctaaaaaaaactccattttaatgtaatccattttat

SEQ ID NO: 341952 - DNA, 1353 bp, Cannabis indica
gctactgaggaagaagcacacaatgttaaggattttgcacacttatgaggtggcttcgggtcaaagaattaattttgctaagtcctctgtgttcttcagcaacaatacaaattgtcatcttcgagatgttatttatgcttcgttggaaatctatgaagctgatgaaaatgggtactatctgggccttccatgttcggttgggaggaacaagaatgctatcctcaggtttcttaaggacaagcttcgtaagaggattcaaggttgggagggtcgtttattgtctcgtgcagggaaggaggtcttgttgaaaactgtagctcaagccttgccaaattatgccatgaatgtttttcttttccctttggaaacttgtaaggagttaaaatgacgtatggctaaattttggtagcattcggcttctagtagtgggaagggtataaactggatgaggtggggataggttgtgtcgtcataagcatgcatggggattgggttttagatgtttgagagactttaatttggctcttctagggaaacaattctggcaacttttagtgaatgacagtttgttggtcagtaggatttacaaggcaaagtactatgcacagggtagtttattctcagctgagttgggagataacctaagttttatttggcaaagcatcatggaagtcaaaagcctgatatactcgagagctcaaagaactattgctaatggggtgaatgtctcaattcttgatgacccttcgctctctcataacactaatggctttgttgaaacaaggcatcttggctttgttaataaaactgttagttgcctacttcagatggatactcaggcctgggatgaagatgtggtaagaaatctctttgtggctcgtgaccaagatctgatatttagcattcaacttagtgacttgactgttagagatggatggagttggaagtttgagtcttgtggccagtattcagttaaaagtgcctacaagttcttgcatgaaacaaaaggagcttggagtgtggatggcaatacaggtttctggaggactttatggtcgttaaatgttcctcacaaggttagtaacttcttattgagagctgcatcgggtgtccttccaacgtgttttcagcttaaaaaacgtcatgtccttgttaatgctgcttgtcctctgtcaatgttgttgcagaaattgtgcatcacgccttggtggagtgtgagtttgctactgctgcctggaatcgcaactcggtggatgttgggggtggctctgcaacatttagtagttggctgctgctattatttgggaggagacgtgttagtgagatggaggaagcagctgtggtgagttgggc

SEQ ID NO: 341953 - DNA, 1044 bp, Cannabis indica
tatcttttcagacttaattgaatcttgcattgagatctttatggatgatttctcggtttttggttcttcattcgatcattgcttagagaatttggagaaggtgctaatcagaggcgaaaagtcaaacttggtcctaaactgggagaagtgtcactttatggtaacagaagggatagttttgggtcacaagatctcaaaagcaggaattgaggtggacaaagctaaggtgtcaacaatagagaatttgccgcaacaagtttctgtgaaaggagtcaggaatttcttgggtcatgctggtttctaccgaagatttattaaggacttctcaaagatctctacaccgctgtccaatttacttgttaatggggttccttttgaatttggagaagaatgtttgaaggcattccaagttcttaaggagaaattgatttcagcaccaatagtcacttcaccaaattggaagttgcccttcgagttgatgtatgatgcaagcgactatgcaattggagcggtcttaggtcaaagggttgacagggcgtttcacacaatctactatgctagtataaccctgaatgatgctcaactaaattaatgccacaatggagaaggagatgatggcaattgtgtttgcttgtgataagtttcgcccctatctaattagaaataaggtggtagtctacacggaccattcagcaattaaataccttatcaccaagaaggatgcaaagccaagactgattcggtgggtgcttctgcttcaggagttcgacatagagataaaggataagaagggaactgaaaatctggtagcagatcacttgtcaagactagaattagaagagagcaagaataccaaagaggtgcaaataaatgagaaatttcctaatgaacaactctatagtgtgaggaaaacctgatggtaccgtggtatgctgattatgtcaacttcttggctgcaaaaataactcctcctgagctttctcatcaacaattaaagaagttctttcctgaggtaaaacattactattgggaagagccaatcct

SEQ ID NO: 341954 - DNA, 1208 bp, Cannabis indica
attagctttttgttctcagacctcagaaaatgcctccaaaacgaaggaagacaaggagaacggtaggagaagacgcccctcaagctaatgtccaacctccacaagctgaattccctatgaacgcccttctcgaagccttaagagttgttcccgctcaatagatggatcctgccgctcgacagagtcatcattttcaagtctttcatcggatccaaatgcctaagtttgagggtggacaaaatcccatggtagctgaaaggtggttgaggcagataaagaaaaatttcaacacaataggaacacctgaggaatatcaagttacttttgctgtgtccaagttataaggtggtgcagcagattggttggagactttgtccaggacaatggaaactgatgggatgacttgacgggattttgaggaagttttcagggagcaatattttagtccatctcacatgagggctcttattggagtatttgatggtctaagataaggggatatgactgtgaatgaattttacatgaagtttgttgatcaacccttggtgattgaacaattcatgcgtcgtttgagaactgcgattcgtggtcctatagcccctttgacctttaacaatctgactgagtgtgtgacagcagccttgcgaactgaggctcatgtagaggggaatgagaagaagaacacaagcagaggaagaggaaatgaccgaaagatgacccagaagaatcaaggacagttgtcccaaggacaacaatttagtgggggtagcactagtagtggttcatgtggaaagactcgtagtggaccatacgggtgtttcagttgtggtcaacaaggtcataagaagaaggattgcccacaacaacaacaaagatttcaagcatctcacggacgacccatagggagctaagagtctactccttttcatgggcagcccaggacaaaccagtctcagtcttcatcctatggtttcacaccccaatcgggccagcagtctcagtatcaacatcagtttaggccacaaggttcagggttcaacatggggtactcacaaggtttccaaactcctgctcctagtggaagtcaaagagggtacaatcaaggtggaggttctggtgcaagtaaaagctatcctagttagggaaggggaaaggcaaaagcaaagtcatccgctcaagcctatgctcttggggttgatgatgtacag

SEQ ID NO: 341955 - DNA, 457 bp, Cannabis indica
cttcacttaattaacaatataaccatacatcattgctttcttacctttataatattctagggtaatatttctaacctgcagtactgttaaactcaaggtactagtttaccgagtctagcttaactatgccttaggcgcataattctttattccaacttatttagcatggcataacactcaaaatcttttaattactagggtaataaccctcgaccatgtaaccgctcattttagggtaataaccctaatttcgattcttaattaatcacaatcacaatgtacaatatgagcgccactgggctaaactctacgtgtaaactactgtcttacctgatgtctcgcaatagtagagattccaaatccccaggtgctcctgaccaagagccggtaatcctagtcacaattttgggatttacacaaaagggttaacccctgattcctcactttataaaatata

SEQ ID NO: 341956 - DNA, 1056 bp, Cannabis indica
cgagattgaaaacttgatccgatacggggggacacctctacgaatggatcaaaaaccggttgccccatctcaacccaggtcaggcggctggagctttgtcgcaaggagcaccagggggtgcagcaggagtattggctccagttgttccccccggagatgcccagcatatgcccggcctgccacctagacccaacgggagaggggcaatgatctcgggaggaccccacattggaggaactacccgcaaggagctcaagcattacgcagggaccgtgaaacacgatgaagtttaggaagttactcaactcccagctcaaaggccccggctaatggatcagcccattacattcagggaagaagatgctaaaatagtgcgtttttctcaccatgaaccgttggtcatagagacccctattgccaataaggtcgtggccagaatcctgatcgacaatgggagttccgtgaatctgctattcaaagaggccttcgctacaataggcctaacggaccgagacttatcaccaagtggttcccaactcacaatgttcaatggaacaacacttatccctatgggaaaagtgaggctcccagtcaccttgtgcctggatacacctcagagcatcttcaagtactgcacgtttgtggtggtggactgcccaacagcttataacgtaatcctcagccgaccggccttggtggacttcggtgcagtcacgtcaatacggcacttgtgcctgaagttcccaacccagtaggctgggatagggaccgtgaggggaaaccaaggggaggctaggcagtgctataacgttgcagcccacctacccgtattgatggtccgagaaactattgaaccagaaatggcagaagaagatgagttaaatccccgtgtgggatccgagaaaagtgtagaaccaatggaggacgtcgaggaagtgtcagtgtgcgacctcgactccaccaaagtcctccgactaggaaagagcctagaaccggaggaaaaagaaaaaataataaagacattgagaggtttcattgacgttttcgcatggtgcc

SEQ ID NO: 341957 - DNA, 390 bp, Cannabis indica
aatcacgtaatacgcctatgttagttagggtgttacaacaaagtaccgtaaaaaaatattgaatttatgtgtttatctataaagaatttaattgttatttttaatgaatttaagttgacaaatggttgttattttgattcatgttttatagaattagtatgcactattgctatttaattcctgttttatttgtattaaaatatatacattattgtgttttgagtaaacacaaatttagttatatatatatatatatatactagatgcgacttacgtatattagttttattttaaattcttgtagtttttgtttaagaatttagtgactaattgtaaattatattataaacgatatgttttataaaactaattgttaagaatgtcataatt

SEQ ID NO: 341958 - DNA, 559 bp, Cannabis indica
ttttaaagaaaaaaaagaagttcggtttgggcgatttaaactgaccaaaccgaggttcaaaacagtcggttttaagacaagttctggattgctcagtcggttttcggattgtaccaatccaaaccgaaaattaaattctagatttttatatagaaaaaaaccgaccaaactgattgatgctcaaccctattaacaagattgatgtcttgctatttttctattgatttatagttgtctttttgttatttcatagttatttttatgttgttgtttaggtattctatagttgtttcttttgttaattttatgtgttttgggtacagttgttgtttagtttatgtatattttttatcgtgtatattttttatcgtgtatatttttagtttattccagataatatttttattgtatatatgtgcatttattttgttatttttatgttattttttagttgttttttaactatcattaactcaaaaaggaaaagaggaaaaaaaagttgaaagaataaaattgtaataacaaattccataaaaaaaaaaaaacaatgtaatagtac

SEQ ID NO: 341959 - DNA, 1026 bp, Cannabis indica
acttgcatttcataagttttattttatctgtccatctttttggtttaggcaaaccctctgcacacatgttatgtaatcaaataacttgctataatttgcaaaaaagtataaaattgacacaatttgaatgataattgatatctttattcatttatttgtttgtatgtgtgttactgtagtaacgtacatttattaaataaaaagtcattttagccaatttaaatataaaaactcttggatggtatatttcgaccaaaagacattattaaagagtaataatttttttaaactaactatactttaaaagtggttatctgaccttagcaccggttgttctccaaacctttgagcgagattcgctcataaggccatcacttaagagtaatgttcaagcattgtgaaatttatgtggtccatggaccttttgcacttattggtagtattttcttaaatgttcgctattccaatatcttagtacaagaactagctccatatttttatcatattgaccaagcttgtatgctccagattttataacttcacttggtatggtccttcccaattaggtctgagcaaactcgttgcactatatccttagtgcttaggaatacccttttgagtaccatgtctccgacaaaaaatttccttactttcacttgcttgttgaagtagcgagctactttttgttgatgagctagtagctttagatttgttaaatttcttttttcttcaacttcatcaagtaattctgctaggagggcatggttagtctgctggttgtacgtcaaccttctatgggatggaggttctaattcaatgggcaacattgcctcataaaccataggtcatcgcaaaaggtgtatgcctggttgttatcatttttcagtttctatgtacgatcaaagtacctcaagtagttcctcaagccagttaccccgcttctttgagtcgtttcttcatggtatctttcaattattgattgcttcaacttttccattttattggggtgtgcaactgccaaaacct

SEQ ID NO: 341960 - DNA, 967 bp, Cannabis indica
tcgtcttggctacacgaatcctgaaggctcgttattttcctactggttcttttcttacagcggagattggttcaaatccgagtttcgtctggcgtagttatttttgaagctagagacttggtggcggcaggggtgcgtaagagtgttggtgctggtctctcagttagcattttgacagatccttggcttgttgagatggatcatccttatattgagtctacacacccggggttaatcggtaaaaaagtttctagccttatgaggatcgatgagcgtgcttgggatgttgagattcttgaagatctttttgagactcgtgataggatggctattctctctattcctctcagttcttccattcacgaagactcatggtattggagttttgaaaagtcggggctgtacactatcaagagtgcctatcggtacttggatgatttaaagaatggcttttctacagataattctgctggtttttggaagaaaatctgggctctaaacattccgccgaaggtgagaaattttatttggagagctgcttctaatgtgttgcctacgtgtgctcagttggttacaaaacatgtcccgattagtagcatctgtcagctgtgcaacaacagcaatgaaacaatttttcatgctcttgttggctgctcttttgctcgctcttgttggcaccgatcttgtgttgatattggtagctggatggagatggctttctcggcctggtggtataatttgtcgcacaaggttagtgagtctatgttggaagaggcggctatggttgcttggggcatttggcgagctagaaacgatgtagtttggaaccagaaatcttcaaacgctactggtgttgttctctcggctaggcgtactcttgatcaatatcaaattgctcaatcttcgaaaaatgattctttattattttttcgtggtgatgaaacagtagttgagcattggaaacctc

SEQ ID NO: 341961 - DNA, 520 bp, Cannabis indica
aattcaaaataatcgatccaattcacactttttatagattggattagatttgagttactgtgtagattgaattaaatccaaaatatgagatctgcacttagtgcggatcatatgtactatgagtaaaatagttggattggatcggatgaacacccctaaatataagtactctctataaaatatgaattcagatctgttaataatagatgattccactatttatagagaatggagagtaaatattattacttaaaataatagaaaaaacaataagaaactaacaattaattcttgaaatttctagtttatgcaaaattaataagggtgcgtttggaaagccacaatgtaattggatttgtgtgtaattggaggtaattacacaatttggcatgtttgtctgaccatataattacactgtaactatgtaattggaaataattgaggggttccaattacactctccaattctcatggcccccatgagaattgaatgtaattacactgtgtaattactaaaaac

SEQ ID NO: 341962 - DNA, 952 bp, Cannabis indica
ggggtgtgcaactgccaaaacctctttatgattccatgtgttgtgcagaagtctgtgaacatttagctgtcaaattattttccattatctgaaataattatttttggaagtccatatcggcatttaatattctttaccacaaaatccaaaattttcttggatgtgattgttgttaatggttcgacttccgtccatttggtgaaataatcaacagccacgactgtgtattgtactccattgtttcctttgggtaattttctgatcaggtctattttccatatagcaaagggccatgggcttttcctcagatttcccattgacatgactaggtgtcatttcgcatccccatacttcacacactttcttgaggtgcataatacgcactggtaagggtgttcattggatcaatcacatctaatgtttttaggcctatccagatttgatctgattatatattggatgatagattttaccatatgattcgatccaactaattttagtcatccaattgatccaacatccagtggatattggattagatcagttctatccattggatgtatttcatgtatacctattggtttaatttgggtttatccaatattttagacctaatatttattggatcagatcgaatccatctaatattttagatccaatatctactggattgaattggacctatccaatctaaaaaaaaaagtaaaaatttaaatgttaattttgatatatacatgtatttttcttacgtataacaacataaaatttaatttttcattcaaactaaatgaaaatattcattagtttgattagatattggatgtattggatttttggtacactctatccaacatctgatccgatcctattggatattcaaaaaataacatccaatctgattcgatcacaaattagatatccaatatttggcggtcgattgttattagattgg

SEQ ID NO: 341963 - DNA, 629 bp, Cannabis indica
ggtgatgatgaacttctgaatctcgccgcgggcggtcaccttgcattttacttcttttttgagtttcttgactttcatgccttgtgttttctgatggctgttttctaaccatactatttttgttctgtgcagacatgtctcggcagatgcttgatgctctgaggaagagaatgggcgaaagctctagcgctctcctccagccaagaagtctaaaggcggtgaggggtcctcggagaagagaccttctggagaggtcattgacctttccaaggagctgactgctgcaaacccttctacccccaaatctgccaagtccaaggagtcaggaaccaacggctgggtctgaactggtcaggagtattcctgagcggatgcaggcaccaacttcgccttcgcctgtgcttcccgaggcaaaaaagggcaaggagatgctggcccactacatgaaccggcttgttcccgaggtcagtgagcagctggctagtgctaatagtgactcatctctggatgtgttggtgggtggagtccttaaggagctcaccagggtaagtcttttttgatacttccctttaactttccacacttagctccatgtgctgaattttttccttgtgcaggccggtttgaag

SEQ ID NO: 341964 - DNA, 704 bp, Cannabis indica
attaaatgcgagatgaatgttcagataggatctgacacctcccggagatgctttgttgcagtcttgctctccgggagtatatgagattgacatgccttctccgggaggcatgtctaaggttgatccctgcgcttaagaagacttagctgaattatttaaacgctaaaccctttccacctacgtgtcatcgtccggttggtccacgtattttggacaaaatcaggggcaacatttaccccccaagccttgtttggtgaggaagtgaacaaggcttgcttagatgcctccggttgccttatcaacttcctggcacgtgctttgggcgtggggatatattaatgaccatcattattgcagttatttgctttttccaggcgtcgattcgtttcttgtccatttattgatacggcgcataaatgggtgtcagacgggtactcaagcgctttctaaccgccttgatgagtgcttaattgaaccgttggatttgtggaattcgaattgattaccatcctgaccgtacgatggtgggttatcacagctatcccatgcctgttttggcctataaaagccagccttcttacctcatttggttactttcagcatttcaccaaaatttctcagagttttccagagagagaaaaaacttcaaacaccattgatttcctgctcttattccttcggcgctgccagtctacgttttaccg

SEQ ID NO: 341965 - DNA, 858 bp, Cannabis indica
tttgtatttaaagtttaatttccgcgctaatgttattagtaatcccgtctaggggattaggatgtcttaattatcttgggtaacgtgcctattagttagggcgttacacaatccaaccctaaaattgctaaaaccagataaggagataaaggtgctaattgaggaactattgatcaaacccagaaacgcaaaattaaaagcatgtaagaaaataaagagagaaatcacttattgtttgaagttggtttttggagcaatgaatagtcctgcaatcgacggaataacgaacgatgtgatgatccccttgaatgcttgaggtcaaaaatcaaattggacgaaactcgcaagaaaaatgtcaatgacaaagatggcatgcaaggtttcaaaatagtctgggtatggttttttttgcagaaaagcttgaaaaatttccaaaatttttgaaatggcaaaggtaatgaaaatatggttccttttttcgttttatactcttgcgttgatctccgtcagattaaggagacaattgatccaacaggtaaaatttaaaagaggaagtgaaaaagatagttattaaatgctaatgtgcctctaaactacaaaactgccaaaatcagaggatatgcgttttttcaaaaatgattatgacaaatataccctctataatcatttaaaaaacacttttcattggaaaaactttttaaggggaaattcttatacccaaaatttgactggcacttcagaggaggacacgtgtcaatcttggagaatatgaatcaacaaatataatgacaattatataaaaatattaaaatggaataactcattaaatgcagaattgatagagtatatctataactc

SEQ ID NO: 341966 - DNA, 879 bp, Cannabis indica
ccaaacgtgtcattaagtgatgactctttcttaaaacaactaacttatttttaattcacataaaacaagtgcaaccacttggattattatatatatatcaatctcttttggttgtgaaaaatattcgaatgttcattaagttatatataatcattttaacatcagagaacatagaaacacataacacttggaaattatttaattgcttaatgataattaattttgaggtagtaatttttaggggatatcaaggatattcataattaatgttccaaaatcattgactttctcatagtaaaattgtgacttagaacattagtcttctcttcagaaataataagtttgaaacctctcatgtttttacaactcttatcaacctctgctacaataataacaggaacaattatgtccagaaattgtgtgaatatagataaatagaatcaacaatgaaatgaaatatatttattaagtcaagacagctcaaaaattcaaccatgtttctcattgttacatgctctaatatggtatattatctacatccaattcgtaacaaaactaaattttgtatgaataagaatatggtatggtggataaccgtcaatggcgggcggcaagaatagttagccgaagagatcttttgaaagaaaaattacaaaaatcatgttctgcatatgccttgacgctctgcgaaggaccgtgaatcaccatagtagatcctaatctgaagaagatagagaagtcagaatcttctgatctttcagtaaatgaggaaaaatctttagcactaatgagatagcaaagcagataacagctactcacatttttctggtatggattccactaactgaaggagcaaaatagatgattaagatgtaccaa

SEQ ID NO: 341967 - DNA, 558 bp, Cannabis indica
attatttccaataagtagaatgttatcaacacacactactaaaaaaatgggttttactgatacacattgagtgactttaaaattatttagtgacacttcaccgcgcgtcactaatgtgggtgactggaaagacaatttttagtgacacttcccgcgtgtcacttaacccttttacagtcactcactgcgtgtcactataggcatttaaagtcaagctttgtcagactaaaaaagtaacagctacacataaaaagtgtcactttatctttttattattattatttttattctttattattatttttagaggtatagtgacacacaaaaagtgccactatattaaatgtttttctaaaaaaataatataattctctcaaaataactttaattattttatttttagaaaaaatacatacgatacgattaataatttattaggcacctcaaatcattttgtaaaattataattaaaacaacaatcaaaaaaataaatacagatccataatcaaaatagaaaaaaaaatacattaatttccacagaatttttacaaaaaatca

SEQ ID NO: 341968 - DNA, 882 bp, Cannabis indica
ggggcgaaaccaaaaagaaactaaaatcaaaccttataccgaagaccaactccgtcttgattatttttttgagcatcaacttgaggaattttttcatgggcagccacctttgatttcttctttggaggagcaaaatcagagtcatcctcctcaacaacaggtcgtttacccttgtttataaaattaatgaaaaatattctcttaattaaaaggatattctgttaaagttaacgtaaaaatctaaaaagtatcgttaaaccaaaatttctgttacatagccacactttatataaaataaatatatttatgtacatatctacatataataatttattcctctcatgtgtgtgactttttgtgtctattcgtatgctataataatcaaatacttatatataaaactctataatatttgtatttgactatctttatacactacaaaaaattttatttttagtcacaacaaaatttataactaaaagtaaaaaagtatttgtaactaattataaattatcattcttatgttgtgactaaaaagttcatgactaaaaatattagtcacaaaaatcgcaagttattgtgactaaatgtgtttttagtcataatacttgttgtgactaaaactgaattagtgacaatttgtatcttaatactatgtttagtcacaagtaacttttttgttgtgactaaaagtcacatttagtcacaatttttttttattgtgactaaaaagttatcaataaaggtggtttttttttttgtagtaataattgttacttttaaaattttgttagagttttgaattttatcaaaagatataattaattaattatatcggtaagatttcagagagagagagagagagagagagtagttagtaag

SEQ ID NO: 341969 - DNA, 595 bp, Cannabis indica
tttttttaattttgcataactattaattttagtattttgaaattcgttttaattaattttcttaatttttatttgtttatttagtctcccaattaattaaatacaattgtgtgtggtgttgtaggaatttaaaggaaaaattgacattaagtgttatgggccatgatgttggcaagaaacaaaaaataaaaaaaataaaaaaagcccaaaggaagaaatttgtgcagcccatgactttgttttggataaacaatttagtaaaatcatatatatatatacatatatgatatatgataaaagcaaaaaaggaggcgtgattggaagaaaagaaaaagtcgtgcacacttcgggcagagccgcgaaacgtcttaaagagagcgacattttctgtgactcagccagattattctatcggtaattcgttccaattttattgtatttaatttcggtataataattttaagacgtttcgttcttctatggctgctatcgatgaattttctggctctgcttctaacgatattaacaagcctttccgttttgagggattacattttaagcgatggaaacaaaagatgatgttctacctgacgat

SEQ ID NO: 341970 - DNA, 774 bp, Cannabis indica
aaatctgattatattgaaatgggttttatttagggcacaaaacccaacagttgcttggttgttcggggtagtcctgtctcaaaattcatggctatatcttctcacttccattcagggatttctaggagttgtaacttccctgctggtctctgatgtcagccttaacttgttgacatgtgagacatctagctacaaattcagatacatccttcttcatccttggccaccaatacaaggtttttaagtcattatacatttttgttgaccctggatgcattgagtagggtgtagtgtgtgcttccatcatgatctttcttttgagctctatgtcgttggctacacacactcttcccttaacctcagcatgtcgtctgtaccttcggagagatcctctgcctccttctctggcaagcctgcttttttcttctgtaagaactcatcaacagtcagtgcatctttaagttcttgtagcagcgtcgagacaatggttaggttagccagtttttgtgtaatgatctctataccacttctttggagttcttggtgtagtggctatttttatttgtgccagtattgccaagctggcataactgtgtctacttagcgcgtctgctactacgttggcctttcccggatggtagtggatttcacaatcatagtccttaataagctctagccatcgcatcttcctcatgttgagtcaagttaccctcacacttttctgaccagaaaaacttctgcgtctttcgagtcaagttggttagaggagttgcg

SEQ ID NO: 341971 - DNA, 568 bp, Cannabis indica
tggtggaaaaggcactacgagctcagggtgcagttggatgcatgacagagtctgctaggactccagttgatggcggggctcctacccctcctgcatcaggctttagcaggggaggtagtggttcggccatggatcagaaaaggaaagcatccactgcaaccggtggcctaggtcagaacaagaggtttcgggggaaccagggttgaggcggtcgccatgttagttctgagacccgatacacttacccagagtgccccagttgtaaaaggcaccatcagggggcattacaagagggattgtcctcaactcagaaccaaagcaccgaaggctccaacgaaacccactccagctagggttttcgccattactcaagctgatgcagaagcaagttcttcagtggtaacaggtcagctctcggtcatcaactctttttactctgtactgtttgactctgggaccactcattcttatgtggcagcgagaatctttagtaaatttgattgaccacatgatagttacgaatcagggtttggaacctttttacctggcgaagagttagttatctcca

SEQ ID NO: 341972 - DNA, 1429 bp, Cannabis indica
ctccatcttattatatgccgcaagcttgatgtattctatcttctaattgaatcttgctgaaacttcaagtgctcgaactcccttcgatctccttgaagagtgcttgcttcctcccgaggcaagacttgaaagcaatctcccgaaagctttgtaaaaccttctcccgaaggtagtactgttgttcgtcttctttgtaggcttgaatacaaactcaagacaatacaaactacaaataaacagagtaagagttgaacaagctcttctctacaaaacaaagactctcttttctaaagatatgagtgaaaattaaagatgtaaaagagatacaagacctagctgctataagatgtatttataatcaatatacaccttattgacaactcatacacggtctgaacaagatcacaaaccactagaaaattccataaaatagatcttcaatcagcccaagaattgtcatttctgtacctacaaaatcgtgagcagtgagtgcgactttcctcttatagaaaatgaaagttttgctccgattttctccttaagaaacctgatcaatcaaaatgaaaaactcacacaagatcaaaaatatcacagctggttagatagaaaagaattgagtaaccaaacgtaccatttttaccttatttttcataaatagaaaagctagacaactttccttctaaaaatagattacttaatgtaaaagtcacatacaaaatatggaaaccagtattaacaccagccgaatttaaacaataaataataaaatatttttgtcacattaaagatgccaaaaatagaattaacactttctaatattaaattatttagtatttgtgaaaaaatatatttttttttcacataactagtagcaaattaaaataaattattgttattttatgtttccaacaacaaattaaaataaataaaataacaaatagtaaattcaaaggaagaaaaaaattgtatgtgttatcccaattttggtcctcatgacgtgtcatgcttacatggacaaaatcagtgccacgtggcagtacaactcaccaataggaaggtcaacacaaacagagactccgacactcaaacagacatcaagtggcagaccaactccctctcaagagttggtcggccagccttgggattgcaccatggccagcaagtctcgcctccataggggcctgatcggcaaggacgtgctctgcggggtttcttgtgcacttctacacatggataacaagtcatgagctgcgaattgggtcctaaaagcccaacataatggcttaataatatctagattcaatggcactttagtcttttataattatctaacaaactaagcaaacatctaaggatttaaactgtaatctagggttttaggccttaaccttagcctagaaacctaagttgcatctaagcttgaaacctg

SEQ ID NO: 341973 - DNA, 971 bp, Cannabis indica
taataatttttataaattattaatatattttttttaaaaaaaataaatatatcattaaatattattataatgtataaagttttaattgtatacaagcagtcttatcgtaagagtatacaccttatattataataaccacacgatttaaaatcaatggttaaaacaagtaccctaccggtagggaacttttgttaggtcctaccatagtcttgccctatatatatatatatggataagcatgagcggaagctactgacaaacttccttttttctttaacaaaaaataaaaataaaaaactagtgcacatcaaactgatacaccctttaatgttatagtatttaggaaaaatttaaattatcaaataaaagtacatgcttgtttcaaaaacaaataaataaaagtaagtatctctatatctattctatataaagtgtgcctatataactgaaattcttggtttatgagaaatttatgggtgactttttatttttatttaataaaataataaaatattatttatatataataaaataataataaaacaaatcctattaatatttgaattgatatttagcatatttcaactctatatataatcacaactataactctagaaattaaatatatatatatatataaaataatcgtccattttatttatattatttagaataattcattgtggttcaagatcacaatgaacagaaaaagtggcaaaaacacaaatgtagttcaaaatcatagtaaactaagaaagaatgagaagagattattaagcattaaatattctcagtaaacacactcaaagaatcgcattgagagaggaaaaaaaaaagaataccaattgtgatatatataaataaataaaagcgaagaatattatataattatttatattctatataaagtgtgcctatataacagtaattcttggtttatgaaaaattcatgggtgactttttatttatat

SEQ ID NO: 341974 - DNA, 909 bp, Cannabis indica
cgttacaaggcaccctgctcttgtgaacgaatcggtcaactgcctctttcaagttggcactcgcgcttgggatgagaatgttgtgagagacttgtttgtttcacgtgatcaggaccttattttgtccattcagcttagtaatacgccgtaaatgatggttggaactggagacttgagacttgtgggaattattcagttaaaagtacctataaatttttgcaagaatataaaggtgcttggtgccgtgatgccaatactgatttttggaagcgcctttggtcgttacaaatacctcctaagatcagtaatttcttatggagggctacttcgggtgtgctcccaacttgttttcagctccaaaaacgtcatgtttccgtcaatgctgattgttcgctgtgtatcgctcatgtagaaaccgttcaacatgcgttagtggagtgtgagtttgttaaagctgcttggaattgcagcatggtcgacgtcggggctggggctgccacattcaacagctggctgttggggatattcggcagagggcacgaaggtgaaatggaagaagtggttgtggtaagttgggttatttggcgcgcgcagaatgaatttgtttggcaaaaaaagagttggtctgcatcaaatattgtggcatcagctaggaacatgcttaatcagtataaatttactcaaggaaggaagggtctttcgttgtctccgctacatgatggggggcaaaatcttgagcgttggattgcacctaagttaaacaagatcaaagttaatattgatggggttttatttgaacaagaggggcgctttgacatgggttgtgtagctcgaaatcatcatggtgctattgtagaagcattcaagaagggaaagattggttgttttcaacctgaaattgctgagata

SEQ ID NO: 341975 - DNA, 694 bp, Cannabis indica
attttcttattttaagataagatgaattttcactaattaattatttcaataaaataaataattaatgtcttaattgctttggtcaaagaaaataatttaaaagggagaaatatatgcttaaaagaagatttgtaataaattctcaaaaaagaaaaattgaaaaatttacacgaaataatacttttaaacacgtgggaaagttattatttgatcaaaaaaaataatttaaagttaattttaattggttgttaattttttttttaattttgtgctatttttttttaaaataaaaaattcaataagctacaaacaaatatatgttacacaatgttaatttttgaaaattatatagataaatggttaaaaagtttatatataatataagaacaaaagtataatcactaccataaaattattctatatatttgtgatttgttaatcgatattgatattgtacaaaatgattgtattgaattgatataccttttagatatataatttgttagttaatttttttttgcctttggtattaggggtggcgtcatccaatccaatccaattgaaccgaaccgatccaatccaatccaattacaaaaagttggattggatgctaaaagttagattctaattggatttgataggttattcgatgtcaatctcaaaatccaattaaaaccgatccaatccaattaca

SEQ ID NO: 341976 - DNA, 798 bp, Cannabis indica
agtgattttttttttggttttaaaatttagattcttaattaaaaaattgaaaagtaaaaataatttaatagaacacgattttgaaaaatattaccacttttctaattttaaaaacaaaaaaattgattatcaaaaaaggattactaaacgcactataagttagttgcactataactgaccttaaccacctatatataggggacttggtctcttatgtgtgtgaggaattgagtgaatcctaggctacaaaatgtgtcccgaaaaatttagagaggggggcgtcggctatggtgcttgtttggtcaggttttatagtcagggcacaacaaaaaagaaagagaaaactcttattctgtttggccaacaatggccgattaggttagtgggttttcctcattattttggtttttagtttcatcattattattattatttttaaatctatatagatagaaggggatgaagatcgttttaccgagaatgggagcccgacgattctaatattggggcattgccacatggtgatggtgataattatggtttttaaattcttggtcttctctctatatgcgttatcccatgcctgatccaaaagtatctataatcatcagaaattaaaacattttctaatcagtctagaagaatttttacacgttaccttagataaaaattggtgacagatatcttcttctcagcaccggaagtaaggttcattcgacattcttttatcttgttctctctataataagattagagttaagttctctttgtctttttgtcatttttttcatcaatgaa

SEQ ID NO: 341977 - DNA, 549 bp, Cannabis indica
actaattgtgatttttggtgtagtggctatttaagacattatgtaaaattttaaaaaatttaacacgtcgaaaataagattcaaaaagtgtgttgcacgcgtgactattttattttatacgcatgtgaaatagattatttgaacacagctttctatattgtaaataattattccgaatttcttaaaatattataggatatcttaagggaaatttacacagtttactgtgttttcccattttctttcttttatactgttacactccaaaaataacttttgtactgtttttttttttttttttttcggcttgccaactttttttttttttcggcttgccaacaattttatgttattgttttgtttttttttttagatttgatttgggacatgggctcaattatttatttaattttttattttaatggatataaaagttattatttattatttttaatatttaataattattattttttgagtataatttaataattattattttgaatgaaaaggttggatgggatgtgtcataaaagtgactatgtttta

SEQ ID NO: 341978 - DNA, 1277 bp, Cannabis indica
tttatagtgttttcgtggggtgatccccagaattatagtacatgtatttctgtaactatcaataaagttgtgtatttccgatgaatataccatgggtaatgcatggtcaaatcccgaggtgttgtagggattttatgagggctgtcctcattcccttttgactgatgtgattcttcacagagtagacgtcattagactttattggtcatagtcttgtaggtgcagatcgggtgttgtgtcgtcagactttattgcgtgtggcagttccaacacgcctcctcccatgcggcactaaataggagatgactgctcagaggaagcctgacaccgcccggagatgctttgatgctctcttgatctccgggagcgtataaaaccttgcatgccttctccggaaggcatatccaggacaatgcctttctttacaaagacttagctattaatttaagtgctaaaccctttgtgtccacgtgtccttgtctggttggttcacgtacattgggcaaaataaggggcaacatttacccccaagccttgtttaattgtgaaatgaacaaagcttgcttagatgcctccggttggctcctcggtttcctggctcgtcctttcggcgcgtgaaggtgtatttaatgatcaccattactgcaccaattcactttttacagtcgtcaattcgtttcttgtccattaattgatacgacacattaatgggtgttaggcggacactcaagcgtttccaccgccttgatgacgaaccaattcagccattggatcctgggaattcaaatcgtgtgccttcccaaccgttcgattggtagatgatcgcgcctgttctacatgcgttttggcctataaaagccaccattcttacttcatttggttactttcagactttcacctaattttttcaagttttctagagagaaagaaaccctcaaatcagaaaaccctcaaacaccatagatttcttactgatcttccttcgccgttgttaatcaactttttaccgccgatcaacaacaacgcccagttctcaagctttatgtaagttcttcgcatctcctactttattgtttgtccacatctcatgctttactattcatcttctttttctgggttggatgtttgaattctctaggaatttctgtcttgagtttttgtgtaatacgttagattcctcttttctggtgttcgggttacttctactctacgtattttttttttcaaggacccatcttttctttacgtaatgaccttcaagggttcagagaggactt

SEQ ID NO: 341979 - DNA, 531 bp, Cannabis indica
atagacctaatccaccttttggagataactaactctcctccaggtaatagggttccaaaccctgattcgtaactatcgtgcggtctatccaatttactaaagattctggctgccacataagaataagtgcacccagagtcaaacagtacagagtaaaaacagttgttgaccaagagctacctgttaccactgaaggactggcttctgcagcagcctgagtaatggagaacacccttgctggagtgggtttcgttggagcctttggtgcttcgattctgagctgagggcaatcccttgtaatgccctggcatgccacactggaagcacccttgccctctacactccctcagatggtgccttttacaacaggggcactctgggtaagtgtatcgggtctcagaattaccctggcgactgcatggaccttggctcccccataacctcttgttctgacctgagccactagttgcagtggatgctttccttttctgatcaatgaccgaacctgtaacaccctaactatcttaggcg

SEQ ID NO: 341980 - DNA, 1445 bp, Cannabis indica
gctaatctgatggctatagatttacctaacatatatctaatatgttattctgacggcaactaacatgtacactaaacatgtataaacatatgcatgacattatactaatcttaccttgattccgaatttaggtgtgccggccaacctgagtggaacaactgctcggcgaattacaggctcctaaatcacatcaatcataacataggtgagtgacacgctaaatcactttccggggtcttaaacatgaaactaaaagtttccctatcgataaataacacggcaaaaccctaaacaacacaaaaataggaaaaactagggttcccaaaattgccccaaccggtagagcggttccccaactggaattccggttctgtggggtttcctgagagccaaccagaattccggttcctacaggcccatctgaaccggaattccggttcagtgcaggaatgagtcaaaaaattcataactcattcaaatcaaccccaatccacatgaaaccttccagacctgttctaagcatcctaaagattattttccaagcaacaaaacacagctacaagcactaaaacaaaactagccattaatgagccaagcttgagttctaaaactcaaagcttgctcaaacactaaattagccaccaccacaagcctaaaacaacatttctaagcataattaatacatagataacaataaccaacactagcagctagaatagcaactaaaacaacaactcatgcaaaatttcctttttcttacaattcaagaaaacaaaaaggaggttactagagcttataccttggcttggattacactttgaactgctgaaaacactgaaatgaaggtgagaaaacaagaaccctggctagttcaaggtgggttcgaaaagagagaaagatgagagtgaaaatgtgacttgttattttctattttttttgcaaaataatgaaattacattggtttatccaaatgattcagcttaaaaatcaattaaaaacctgatttaatttagcccacaaaaagacaaaatacaacgtagcaaattgaccattttgcccctttaaacactaaaaatcactaaaagctactaaggggtaatttgggaaattctaaaatcccgaacattctcgacattcccaatgtctaactatactgcctcgctaaactaaaatactaagatgtgattaaactaagccatacaccgcgttccaatgttgccgggcactgaacatgcaaaattatgaaatttctatatatgacataccaaatgcattctgaattcaataaatcataataaattaataatttagaattgatagctaattttcgtaattaaaccctaattatctgctaatttccaaatttaagctaagcggtctttacaactatcctcccttaaaaggattttgtcctcaaaatctaacctgaataactctggatattg

SEQ ID NO: 341981 - DNA, 608 bp, Cannabis indica
tctgagaagggtattcctaaagaccaaagatagtacggcaggtgtgctaggacctaactgggaaggaccatatcaagtggccgaagttctcgactctggagcgtacaaattaggtaagtatgatgcaaaactgcaaatcattctagtaccacggtactggaatggagaacatttaagaaaatactaccaataaagtaccaggtcgggtaaccactttaagtactaaatgaacatttgcttttaagtgaattgccttctgggcggactacgcccaaaggtttcgctaaaagaaacaaagtactcaggtcgggtgatcactttaaagtacagttttttatgtctgcaatttgttttatttcatgttaaggtaaaagatcagattagatcaaatagctctgatgtaagttactatggtaacaaatacacttttcgatcaataaatgaataaagatagtatttcaaaattcaattgtgtcgagaaaatcgacatgtttataatttaccatacaatgcgtacaaaaggtttggtcaaacccaaaacacagaatagataagcaatatatttgtaaaagacaagtgaccaagagtcatacgtctgctcggtcact

SEQ ID NO: 341982 - DNA, 930 bp, Cannabis indica
ggataaattaattttaagcatataatatcaaatttccctttctatttctagtgttacttcagcgttggagtgtttttagaaaatagttgctaataataaattatacgaaagaaaaaataaaatattataatattaaatgatgttaagttttttagccacttttaaagtacttttaaagtggcttgcattggtgatgctctaagtatcataggtatgggtctggcgtgaaagggaggaaaaggttgattgatggacacttgggcttcagagaaaggagagaaagctgattgctgaagtaggcggaaccaatggggcagcgccacgtgggcgtgctgctgaaggaaggagaggcgccacataggcgctgatgcaagtagttcagacgaatgatgctacgccaactggcgctgacgaggcaggcggggtccaaaagagaactaggcctattgggctgggcttctccttttttttttctttctttattttttctggggaaacttacaaaaatactatttttttaccaaatgttttcaaaaatactgggacacagcaaactttacatttttactgtccaagcccatttttatttcttttatattgcccaggcccaatatatttacttttatactgtaaacagtaacaaaacacaaacggcacctctccttcgtggttggggacagacaaatcaacaccggaatcatagaaacactaggaaaaaaccataaaatctggcaaagagaaaaaattactaaatcaacaacaaattactgttttgtagtgttattttactgttgttttaatatgaaaaaaaagccacgtaaatgaaatattgtgaaaaatgacaggacatggaatctataccagttctcataaagagcaatggacaatgagaaaaagaacataattatttcaagagaatgtgacaatgct

SEQ ID NO: 341983 - DNA, 887 bp, Cannabis indica
attatttaattttttttttaaaagttttttttaaaaaaacttgctgttaacctactctagcaagtcactaattcgccacctcatctaatttttttagacgcattaataggtattacccatttaaaaaatcatccatctatatatataaattgatgttacaatagaaaaaaaaattattaaatgtctattacttacgtttaatttttttttttttttaactttttgtgttttttttattttttatttttttatgaattgaaattttgtaatattttttttaaatgaattttttgtattactataactacgtagcattttaaggtgcgtaaaaccataccgattcacatacaaaataattacttaatagctttttaaatcatattaaattaaattgtgtaagaattaatattgaaatgcaccatattgacacctaaatgtattttttaacatggtttttaatatgtactatatttagcaaaaaatgacttgtgttataaatattaataattacgtggatgtctaaattttttatttattatcattaattataatcaatattccatttttcttagtttcctttttacttaatatgtactatatttagcaaaaaaaaatgacttgtgttataaatattaataactaggcaacaatgtcgcgcttggcgcaactgtttaaatatttttaaaatatattattttttaaagtagaataatttgcggcataaatatttaaatttaattcacagttgtaaataaatatttaggtaatttttggcggtaataatacttaagttataattctagaacttttgtaagtatctgctgttaagtcttaagtaaattaattgctacatgacaattcttgattggtccaggtcatgaattttt

SEQ ID NO: 341984 - DNA, 883 bp, Cannabis indica
gtatgccatatccctgtaatctaatctccaagttatagaaatttcgttgatgactcacaatgcgaaagctgaattcgctaagtgttggttgctctgtgcggattgctgattgctttgctctgggcatgccagcgaggcatcttgttcggactgtacccttcgagcagatactccaagttgatcccacgtgtcaccattatgtgatgccacgccagagtgcaaaaattgggataacataaccctaatctagttctgtcaaagttttgttaagttttttgtaggtttcctttggttttaagtgttcaagttggggattatggtctgctgggattagggttaaatttctagggttaaactaagttgattaagactaatttcatctagttttgttggtttctgaagtggttgagaaagcttgagttttcactttgttgacctcgcttttagccaacaacaacgagtctaatttagtaagcgataagtgatttatggaaattgatatataataaagcaatataaagacaagaaaattttatagaggttcaggcccgagcagttcggtaatagcctaatcctcattatttgtattgacttaagaacaaggagaaagattccttttcttatagctcttacaacagtatttctgaatatgtattcttagataatttctttagggtatagtctcgactgaactgtttgtgaccttttgcccaatgaacatgcatcactatttataggactatattcttggagaggaagtctttcccctctcgttacaatggacataaacagaaagatcgtgggattaatgctgagtacaaagatcgtgggattgatgcaggatacactgatcatgggatcgtgtgtatgccatatccctgta

SEQ ID NO: 341985 - DNA, 1147 bp, Cannabis indica
attactctaaatataaatatatagtcttatattacagagcattgttattggacactaataatgtttagtactttgtaattaattagcaatattttctaagaaaaaataatttttttgaatctttattataagatatattaaaatatatatatatttttaggagaattatcttatatattatatatattttttaattttacggtttaagttgctctagtagtttcttcaatactttctatgtagattattatatggatcttaattgtgaattaaattactcttttgattattacgtgagttgttatacgaatttctataaaaaaatatataaaaaaaagttgctttttaaatgttttttttttaatttagaaccctaaaataagtggacgcatatttatcctacttgttttatcttctttagcttaattcgactcaatacttaattataccaataattatattataacgtaaaaaattatcttatcatcccaatttttggagactcataaatataaatcttgtacttacttctcctaatttgacaaagagagaggagcaaaagggtttggttgggtctactttagtattattattatatgatatgtaatattttctccatattttcagcgtttttctgtggttgttagcaaatcatttgaattcccctgccgactacgctactttccccttttatatattttctaatacgtatatataatatgtatattgttatcttctactaattaaatttgtatatatatatcaacaaacttcttttttctagttttattattattgtttgcactactaaatatgtattgcattgactatctccactaatattattttatgactcactacccaatcatccttttcaaagatatgattccaaacaaattctttctttcttattttgtaaatatatcacatcattttttgttatctttctatgtagatatgagactattatatcaacaaggtgtattttattttctggtagctcatcacaaaagaactcacagtttcaagatgggtaaccttttagaaaatttttctaagaagcgtacaagtgttattataactatttttaggttaatattagtatatttttaatttagttttactcttgtttggagtaattttatgc

SEQ ID NO: 341986 - DNA, 813 bp, Cannabis indica
gactaaatttgtagtcccaaaccggcaacataaccaaaatggccacaataaattattaatcgtgaataatacagtatgacaactacaataaaactatcaacaaaccaaaaacaaactaccaaacagatacaactatacaaaaataaacagcaaagatctgaaatcgttttgatacctaaaaactaacagcaaacaactagacctaatgaaaatcgaaaaacacatcaaacataacaacattaaactataaaaaaactaataagaaactacagacaactgattgtacacactaaaacgaaaaacaaaatacagaacctaaaacacaaacaaacactgtaaataaagaaaacaaaatcaaatttaaaaaccaacccagaaaagaacaaaataaattgctcaaaaccaacaataaagacctaaaaaattaaacaagataaaacgaaatgttcaaaatgaaaccctaaaattacacaaagcagaatgaacaaaaaaacgcaaaaatctggaaaagactaaatgttgaaaaagggggaaacgagaatgaaactgaaaaccaacctctgttcgaacttcggcagaggcactagcttttttcccagaaatttcttgaaccatttgctcctccacattgagcttcgatttcttcgaagtatgtggcctcccacgcttggtcagaggagcatcaaaatcagaatcatactcttcaacgatcgggcgtttaccctttgatttgttagccaaagttttcttgcccatttttgattttgtttctgaactggggaaggagatgaggatgaacgagtgatggccatt

SEQ ID NO: 341987 - DNA, 699 bp, Cannabis indica
gtttagttttgaaaaaaaaaaaaaacacacatttggattcaaaactaaccttggctggcctaggagatcttgcttgagacttggctggccctaggacttaatcatgggagttggccagctctaaggtttcatcctataaagctagccagttcatcctgtggtttggtgaccctggccagttcttggctgagacatgggaccctggccgaccctttcaaggcttgggaaccttggccagcccgggccttggttccaagcgagtagccagttttctatcctcttttcactttagcaagaatctagcatggccctaaatgcataatctgttggggattattttaccgggatctagatttactaccatgtatgttgtttaacatcctaaatatgaatttctaagataatggaatttaaacacatataaagttcaagaaaccttacattggttgcggtagaattaaatgactccttcaactcagatctctaacccttgttcctttatgttgcagagtattatcaaaatctgagcccgacactccttcagttgattggactcttcacagtcttacacactatgattgagtaccaatttgctatgcacgggcatgtactatatcactataagggattcgaaaatttaagagagagagagagagagagagagagagaaggattacaaaatagagagagaaagagaag

SEQ ID NO: 341988 - DNA, 664 bp, Cannabis indica
aataattttcataattaaacatgattaacagctaatttccaaattaaactaagcggtctttacattgttgttcctatcttgctatatattttttttctacaacactttcttttgtctcatttcatagtacttcctttttctagcccaacaagatgtttttcccatataataaatttgtctgaagtctaacatcgtcacaacttagaatacgggtcgagtctgatatatattttctcagcatggagacatgaaaccggacagcgtaggagttaaggctaactaataggctacctggcctacttactccaatgaacatatatccaatatttctctcataccacacttattaaggtacctaaccattggtacatttaattatcatttttaaataaacacctcgtcaggaaagagattattctaagataatctaacttttattaaatatgctcacaacatgtttctaatattccattaatcttctcgggttacccacctttcaagaataaaacatcatactattttcgctttaacctccatggttctcaataaccttctttaattcttaacatcatagccaaagatatcaaccttggaatttcacaagattagactattcctttatatgaattttgtattctcatttatagtataaattgtctacact

SEQ ID NO: 341989 - DNA, 1232 bp, Cannabis indica
caaataaatgcatgaaggcatccgatccaatccattattttttttcttcatctgatccaatttaattagtaattggatttggaaaatcatcatccgatccaatccaattagacctcaaaatccaatccaatccaatccaatttcggttttttaattggatatccaattacacacctaaatttcaatattaacttaaaaatataaagaaaaatacggaaaaaaactaagtatcactttttatttaagtttaatacttcataaatatactattcttacaagtgtattgtagctaaaagttttaaataattaaaacaataacatttctaagtaataaaatagaacaaaacatcatgaaaataaatacactaaacaatcaagtgttacaaattcaacatacaaaaaaatctaataaaaatataatatttattatatttttcaatattttttattatataaataattttttaatatatatatatatataaatataattagattggatcggtttttaattggattttgagattgacatccaataaccgatccaatccaattagaatctaacttttaacatccaatccaattgtaattggattggtttggatcggttcaattggattggattggataatgcccacccctacatgaaagtattaatattatgataaagttatggtaaatactattttggactttgtattttgtaaaaattaccaattaaaccttctattttattaaataacaaaatcgatcgtatattttctaaaatggtaaaaataagaacctgaactcaatttttgacaattttattttttaatataactaacttgaagacaatttataacacaaatagatacagaaaatgtaaccagttttgtcataacatctctagattggattattattaagttttattttgacaaaaaatcagtttgggtcctatttgtgctattttagaaaatacaagatttattttgtcatttaacgaaatagagagtccaattaataacttttacaaaatacaacatccaaaatagtatttaaagttattagattgagggttactaacagggtcatcttaaatatttcggacgtcatgttctaattttaaaaattggtcccctacaaaaaaaaaatacaatttataaataatatttttaaatattattatacggttatatattttacaaaataccaaaaaactccaatgtatttataaaaattgttattga

SEQ ID NO: 341990 - DNA, 632 bp, Cannabis indica
actattaataataaagtttttatcaatattatgattaatattatatcaatattattatattatattattattaatattaaacctttcaccgtttttgaaagtttatatatatatattatatatatcagtaaacagtttaacgaaagaacgaacgagccctcgctctccctctttcgacaaaaccttctccctttatatccattttttttttgtttttaatccgaaacttagcgatctaagctctggtagtagcaggatagcaaatccttgaagagggaaaacttaaggtatggtttaattttgttttaagtttaaaaacaattggtttcgtatagggctacgtgaattagaacagttatggagattctgactttgtagaattgttctttggtacttatgggactagtatcgatatttacttgttgaatttgaggtgattttgggttagaaatcgattttggaactttttaaagcttagtccgaacgttaatggcgtttttcatttaaaggctcgatttttaattctgttacgtaaggatggtaatatttatggtatatatgcgccatgtcaagtttggagtgatttggattgatagtgtttcggtgagtgcgaaaattgggattttcgagtt

SEQ ID NO: 341991 - DNA, 626 bp, Cannabis indica
ctaaggactaagtcaaaatactaattcaaaatactacatcaaagtgctgcaacctatgcattagaccctcctgcatagtttggtggagcagatgacccagctccatcaccttgtgcagccttcctagctttttcctttgccattcttttccttctctttagagtttccttggttggattttggatgtgtggcatgcgtcctttgttctttgggccctaataaacagaagaattgaatcattattgccaagtgaaaactaataccgaaaaagtaagctttagacaaattcatacctgtggttgaggtgctgcatcattcgagcaatacctcctattgtgtccagcttgcctgcattttccacaatgcataattgcaccagttcttctagcctttgtgcaagttggaggtggtggctcatcaacacttcttcctctttttttcttgggcatgcctagcaaaatgttttctccaggaggaaggattgtgttttctcctgtttttggccacttgtcaggacttgggattgggaaaactgtgtttgcataactcttttcaaaagcctctttgttgtaataagggtgggaattatggttgcacatccaaattgcagctaaggcatgtccaca

SEQ ID NO: 341992 - DNA, 1143 bp, Cannabis indica
aaactcaaagctgagtcttttgctagtttgggacctgttcttaccggtgacaatgggagggaaggggtcgactgggtttgttggaatggtgggatgaggtttgttcttttgggtttggatctcttacagtgaatctgttacgattaggaatataggggtaggttcttttattttattttaattcaaacttttttttttagagaaatatttgctatcataaattaaaaagataagtcatttacaataacatagtatatgggtggaggtaaattcttcaaccaagagtaagttttatcaaattctagagcatatcgagtcaaactatgagcaaccatattaattaagtgtttcacattgaaatatccacaattaaattattataagaagaaggtgcattcaaagtgtttgaaagtatcagtctcaacttgtgcaattggttgttgcatttgtgaaagtcagttcaagatgtgaaagatagcttttgcctccatctcgtgctatgaaaaaaatttctataatgggctttaaaaaaggcagtaactacaccacgttgagcatctcgaataactgctccaacactaatgatatttctactggtatcacaagccacatccgcattaaattttaactctcccgaagcaagaggactccatggaacagatgcttggactggttgtgggagtcgttgagctacaggggcatccagttgatatttggcttgggttgttcgaaagttctacaagtaatttgtggcaaaagaagacaccaccttggctggttttgcaacccccctcccatgtcgtactttattttgcttaaaccatatcgaccacatagtacagataatgagctccatatcagcttttgtacatatttgagagatgcacaaggtaatctccctatttcattgaacgagcatggtgccaatcaaacacaaaatcagaaaaatgccaaacagtacgcgcattcttgcagccaaacaagctcgattactgagggagcaagtggaattactttccaccgaaacaaagaagtggcaactggaagagcatcatggacaactcgccaagcaaaaatcttaaccttcagtggcagctgtaatgaccaaaaatagttccaacatgaggctggtgaggtggaggg

SEQ ID NO: 341993 - DNA, 877 bp, Cannabis indica
ggaccgtcgatttaacattgaattgtaagatcaatttcctatttggttagagtatagcatcaatgaagattctgcattttgtctgtattgttatcttttcaaacaaaacaaaggaaaacaaggtggtggtcagacatttgttagtaagggtttttcaaattggaagaagccagaaatattagcactacatgttggaaaacatgacagttctcattatgaatgttacaaaaagtgtgaagctttgatgaatgaaaaataacaaatccaacacattcttttgaagaaagagaacaaagattgaaaaaattatcgtgtgcgattaactgcatcagttgaaagtattcgatttcttctacgacaaggtcttgcatttcatggtcatgatgagtctgaagattctaataatcaaggtacttcctgaacttttaaattttttagctgatcataatgaggaagttagagctgttgttttgaaaaatgctcctaaaaaccttagattgacttctccaaagattcagaaagatattgtaaatgcatgtgctgtagaaataatcagcgttattattaaagacatggaagatgttgtggtttctattttagttgatgaatctcgtgatgtatctataaaagagcaaatggttgtaatgtttcgttatgtggacaagaaagggtatgtgattgaacgattcataggcattgaacatgttgaaaatacaacagcaatctcactaaaaatagcaattgataagctattttcaaagcatgggttgaacatatctagattgcgaggccaggaatatgatggagctagtaacatgagtggagaatttaatagtttgaagagtattattatgaaggagaatgaatgtgcttttta

SEQ ID NO: 341994 - DNA, 781 bp, Cannabis indica
tatactcatattcatacaatcctagtatatatataaaattcatacgtatatacatatacatagatacatatttattcattcagtgttcatatatatatatttatatttggtgcttatatatatatattcatatacagtttatacatacatatatatttttcttcttttcatttcattacgtatatgtatatatgttcatatattcattatatcatattgtttatatacataaatgctatatataaatatatacatatatacatttcattatatatattatatacggtataataatgtttttcagtatatatatatatatgtttatatatgtattgtatatgtatcaatacattcatatattaatatagatcgttctaagcatgaaaatccacactcaaaaacaaagaaatctcaaaaatttagtggaaaatatttttcggacccgaaaactttggtgatattaaagtctttgttttacatgttttcgatgcatgagatctatatgaatggtttaatttttgcatttagattcatttggaattgatttggagtcttttggtcgtcagaaacgcaatttctgatcaggtttgggtcgggtccgtcggacccgcgtggctgaaaaatgggtcaaaaagacccagtttggctgaagaagacgacgcaaaacgacatgtcgtccacaaacgacgtgtcgtttggcgaaaacgacgtgtcgtttgaaaggaatgttgcactgtcgttgtgtgaaaacgacatgtcgtttttcgtcttgtgaggcagc

SEQ ID NO: 341995 - DNA, 626 bp, Cannabis indica
taacctaacttagttagtaagtaaaagttaaaaaaaaaaaaaaaaaaaaagagaataaaaaaaaatcattgccaataattaccctactgtagtttttgttttttgttttttgttttttttttttttatgagttgataaaagtgaatccaatttttgtaccttctattattcttttaataaatatacatataatttttaattttgtcaataaatataattgtcttcttatacatattttggaagagggggaccataattattggtgaaattgcagagtgtgaggatgagcataagttggtgtggtcagtggtgagtgatttcattatgacatttacacgagcaatctgccgttgagtttaccaaaccaactaacatctctgccgttcatttcaccaaaccaaccaaagatctactacatcgttgtcaacattcccaccacatatatatatattttcatttttatttttattttacattttggaaaatgtttaaggtttgactttggtttagagcatctccaaggagctcattaaatttggtgtcacactatcaccatcaccaaatttaatgttaaaaacaatcttcactccaactacaacaccaaaaattacactaaaaattattct

SEQ ID NO: 341996 - DNA, 507 bp, Cannabis indica
tttgattttttaagatacgtgttgataaataaaataaattttgaaaatatttttttaagtaaaattaatagttttaattaatttaataattttatccaattttttcaaatttttttaataatttttattattatttttgaattaatagaatattataattgctttaaaaaagatagaatattatattacttaaaattatttttcttttaataaaaggaggtaaaattttgtattggtcaaaatttaaggggataaaaatactaatttttaacagtaaaagaaacagaacctaacaaaaagggtataattatgcaactgttatattttagggaaaatttttaataagccgtatattttaagaagcaaaatcagatagtgctaaaaatttaggggacaaaaatactaatattttaaaaataaatgacattaaaaaggtaaagtggtaaaataagctaaaaagtgaagaagagtcttgtttggcatggctttggaagagcttttgaagtc

SEQ ID NO: 341997 - DNA, 689 bp, Cannabis indica
accttgccatttccaacacaatgtagatagaagtggaatttaccaagaaggacgtcgaggaagcccgtgttcaacttagggctgttcggatggaactgggagaggtcaataagaaactccttgctgctgagaattaagtggtcgaactgacgaaggagctgcaggacacgccatctactgagtagcttgaagccgatattgcctctttatctaaggaagtgaccagccttcaagaggaaatcgagggtctccacaccttttttccaggctggaggaagagaagaaagctagggaggaggagcttggggccgaagttgagaagcataagtcagaggctgagcaacagaagtccgaagtggcaaggctcggagggaaggtgaatgccttagaaacagctggtctcgagattttttatgacttttggaaggccaaccccaaggaaaattttgattatttgggcaattccaaagacatgtttctcgactactatgctgcttaggcggcctacgtggaatccaaggcgaccatttccacctctcccatttatcaaagtgttgaagttcctcctgctcagacaaatgatcctctagctccagctaacccagttgacctgtacaaagagcataggactctagttgtttgaatgctccctttttctatcttttttttatctgttcggccataaggcc

SEQ ID NO: 341998 - DNA, 630 bp, Cannabis indica
cttcttcttcttcttcgttcatcgtcatctctaacctgcacgagaccagctatctttttctctttcgtcatcttccccagccgcacacgaccagcagcaatatccacacgagaataccaactggagcgccccagtcgttcgctcctcctctggcccgtcttcaactgtcctctcctccaccagctctcagccccaatcttagaaaaaaaaaaatggcaataaggacttatgatttgttttgcttaagcagtccatgtcagcatttaagtgagataaatagaaacacattaaatttgctaatagtttagcaatttggaagattttaccaccaaaatttgaggttaaaaggttaagtacaagtaaaataattattagaagattttaatcgcaaattactctaactcattttgtttatgttctaaaaaaatgcttaaattgtggtcaagatttgtatcattctaataaaagtgaagtttcaaatggtttttggtaacaaaaccaagatactagaacgacctaatcactgaattcaaaatgcaataaatatatatactagatagatgttacgtgccaagtcacgtatgttaattttattttagttttttaggtttttttaatatcataatttta

SEQ ID NO: 341999 - DNA, 541 bp, Cannabis indica
tagaacactttggaataaaaaaatatatcctctactttgtttttcaaatttagtcatattcgtaatgaccataggatggtacaccactaatcactttagaatagctatcaaacttacaaaccttagttaacagttctagcttttcttaaattcatgatttaggttatccctgaatctagtaatggtttacactaagtacacaaccattccatcattctgaaattttcttattacgagggtatttctctagaaggacttaggcaactgctagtaaattatcatagactattatactatcatcaatatgcaaactgaatttctggggaggtaagtttggatacaattcaaagtttaacttaatgatctttgaactacatatccaccaaatatttctccacccctatcagttcgtaagatctttaaccacttacctttatggtctttcacgattgctagaaattcatgaaatttctcaaatatttcaaatttctttgcataaggtaaaatctagagtgatcgtctaaagaatttaacgataact

SEQ ID NO: 342000 - DNA, 524 bp, Cannabis indica
cttgagacttgataaaagccctcattctaacattccaataaggatagttagaatcgttgacaagtggtgggcgaataatggaacttccttctacaaagggaactatattacaaaaacacaagaaaacgataaaaggattacactaagagtttagtgtcgcgctctgataccaaatgaaaaaccgagtttttgcaagtgccaataattatactaaattttagtaaaaacactgctgtaacagtctgcagcaacataatgttattatgtcattgcagaacacaattttacagaaacaaaccagaaataaatatcgtagaatttaaaaatttgacacaagaaaattatacgtggtatcagtgttcttttaaacactactagtccacgaggccacgcccagataataaaatcaattagtaaagtatcaaagtttacaaaaggaattgacttaaacaaatttagactccctctagtgatttaccgcaaccctttgtaatctaccttgctaattgttggaaattatttta

SEQ ID NO: 342001 - DNA, 560 bp, Cannabis indica
aataattaaataaaaaggaaaaaagaaaaattaataaaaataattaaaaaataattaatattttcttcttcttcttcttccttttttttccataaataaaataaccaccattatcaccttcacgagcaaaactgaaccccaatccgaaaatcgaaccacaatactcctagttgtaggagtagcaacggttccccgacgagttcgagtccttggctgcaaggtttcaggtaatggcaatactggttttcgggttcttgtagaagttcggcaagaagttttgggatctggtgacaaaagaaccgaatcttcatcaacctgagcatcatcagatctgggttgactcaaaaactactctaacccttcaacctaaaaaaatattcattttcaacaaattagaataaagggggaaaatccaaaaccctaaaaagaaagaaacttgattggagaaattgaggtaaattaccagtggaaaaagagcttagagagcatcagccatggcaatgttggttcgattagcggggattttgttcttcttgtacagagcttgaagctctctcctg

SEQ ID NO: 342002 - DNA, 548 bp, Cannabis indica
gaaatgatagagtcccctatgaagatgcataatccggttgtcgacctccttatgtcagggcaagcagcccaacctaaatccgtgtaggctctcaactaaacctcaaattctgcaggaaaataaattccctgacctggtgtagcttttacatattgtaagactctaacagcagcattcatgtgactaagtcttggcacagcaagaaactgacttagcttatttactgagtatgaaatatctggcattgtaatggtcagatattgtagttttccaattattcttctgtatagtcgggtctgccaacttgtctttgtcattttgtccaagcttgagatttgcttccataggtgtattcaaaggcttgcatccaagatgtcccaagtcttcaagaagttgtaatgcatatggtctttgtgatacaaatatgcccttttgtgatctagctatttcaagccccaagaagtagttgagatttcccaaatctttcagtttgaatcaggcatttaatctgatttttagagcttccaattcttgaagatcattgctga

SEQ ID NO: 342003 - DNA, 608 bp, Cannabis indica
tgtttcaaattcataaaaaaaaagtgtagaaaaactactgtgaaactaaaattcaactggaaatccagtttgatttgcataaaactaatgtcatgacttcaatttttagatccatgaaagatatatcttaaaaagttgaattggagttccctaacaatccaactcaagtataatccaaaaaaaatacatcaatactgtaataaaatgtttatcctggtgcatttttgttgttttccaaattttaatggtgaatttgttcatattaaatcataaagagacatgtagatagagttacgtacgtgaaaatactgttttgatttttaatgttgcattacagttgcataaacattttgctaacaattatttcgtctgattgaaaccttcgtctgatgcaaccttcggccaaccacccagaaactttcgtctgactgaaaccttcgtccaaccacctagcaaccaccctgcaaccattgtctgattgaaaccttcgtctgatgcaaccatggcgcaacacgcagcaaccactctgcaaccatcgtctgattgtgtaagtggtattttggtaaataaaattacataaaatgtataaatgttgattttaccttatg

SEQ ID NO: 342004 - DNA, 529 bp, Cannabis indica
ttttttattaggggattccctgcctcgtcctcgctcccattaggggattctttgccctatccctgatgggaaataagcgggggtggggatgaaaatgcttaatgggaatggggacgggggagcactccccgccaatttccagccccgtgtgtatccctagccatagctctatattctgattcagcattggatctagatataacattttgcttcttattctttcaagagatcagattgcccccaacaaatacacaatgtcctaaagtggatcgtctatttatcttggagcctacccaatttgcatcagagaaacactcaatttgggtatgtccatgatcttcgtaaactataccttgtcctgatgctcctttcaagtaacatagaatttgctctaatgctgcccaatgatgaattgttggagaagacataaactgaccaatgacactaactgggaatgcaatatctaggcgagtcacgagtagataattcaactttccaaccaatctgcgatatttctcaggatcttcaa

SEQ ID NO: 342005 - DNA, 682 bp, Cannabis indica
gaatttaacagaattgttcttgatttaaacaacataggtgtcaagatcaaggaagaggatcaagcaattatcttgctgagttctctacctaaaacctatgagcactttgtagatacgattctctatggaaaggacacattgaccatgttagaagtaaaggctgcactcaaatcaaaagaaatccaaaagaaaactgatgacaggggtgactcgaatgatgatggtctttacattggaagaggaagaactgataagagagaattcaagaacaagttcagaagtaatatagccaatccaagactaagtccaaattcaaaagtggaaagttctgttactactgcaagaaagaaggacactttcgagatgaatgtagagcattaaaggccaagaatgccaggggtaaaagcaaagaaagaggtgaaactaaggttgcagaagatgggtatgaatcagcagatgtgttggttgtgtctaataaggaatctggtaaagaatggatactagattctaggtgttcatttcatatgacacctcacaaggatctgttttgtgaattcagggatatacaaggtggaaatgttctcttaggaaacaacaaagcttgtcagatcaaaggaattggatctgtgttgttcaccatgcatgatggcatcagaagaacaatcaagaatgtcaggtatgt

SEQ ID NO: 342006 - DNA, 573 bp, Cannabis indica
gtgatgacgtggggacttatgtcagtcatgtcctcctggcaccacgcaaaaatgtcaatggcacccttcagtgtttttattattttttccttctcctctgggtctaggctctttcctagccgtagtactttggcggagtcgaggtcacacactgatatctcctcgacgtcctccattggttctacgattttcttggaccccacgccgggatcaaactcgtcttcttcagccatttctggctcaatagtttctcggaccatcagcacgggtaggtgggtggcaacgttgtagcattgcctcgcctccccttgatttcctctcaccgtccctatcctagcttcctgggttgggaacttcaggcacaagtgccgtattgatgtgactacgctaaaatctaccaaggacggtcagacgaggattgcgttgtatgctgtcaggcagtccaccaccacgaaagtacagtacttgaaagtgctctggggtgtgtctgggcacaaggtggccggaagcctcaccttccccattgggataagtgtgttccattaaaaccccgtgagttgagaaccactcggt

SEQ ID NO: 342007 - DNA, 741 bp, Cannabis indica
aactactgggggaatttcaacagttgaaatcgctgggtttttttttttgtttcccccctttttttagattgaagagggctccttgctgccctttgttgccgccaaatttgactccagaattctttcacttctcaaggttaccgctatgcaatgctctttgccatctcttcttgggatttcgctgtcactcggcaaagtgtcttgtggtctattcttcaaatcattggccaatttccccaattgaatttcaagattctgaagagaggtttcctggctttgaatcatagcatcattcttggtgatatagtctctcattaaactctttaaggaacttgtttgagagctttgaggttggtgtcgttgttgaggtcttggttgttgagaaaatcctggtggaaatggttattttccttgtgcttgtgctccacttgaacttgctccttaacctccccatgaaaaattcgaatgatgcatccatgctggattataggagtttgagtacggattgttgttccggttgaaattttggttacccacataacaaactgaagctagatttgaagggcaattcccaaaagtgtgcccatcaccagtgacgaagccagaaatttagttgagtgagggcttgaataaatattaagtcaaaactaataaaaataatgataaatgtatctttcaaatttttatcttcaacaaaataaaataatattgttgacaaaaataaaataaaatattgtcaat

SEQ ID NO: 342008 - DNA, 1244 bp, Cannabis indica
ccaaatagctatcgcatagcttttaggtttttatgcgatgtatatggagtatgtgcatagtttagttatttttgtgacataaaaaacgtgggtgtccacaatggcttctactgtttcagcaagtgccacttctgagatcaatggggtggaaggcatggtttccaatataggggattggaaatctaaatggttttacgtgtttaaagtaccagggattaggactgattttaatcgtcgacccagtatgttgcatatttctttacttagttaattttcatgtcaccttgtaattttgaactaacccgattttctttattctcgcagatagaccggctcgacctgcactagacgcaacccgtagacaaactgctgaaattctcgggatcctccctgttcaagatcgtgactggcgactacttgcacgaccttaaagctgcgcgaacataagctgattccgaagaacgtgagccttcaaagggagccagtgtacaaggaaccgtttgagaagcaaaaagaacggatagacaaacgcctttccaagcagacttctcggccaacatcagctaacatatcgcatttataaactactatattaaaatttattattatctgtacttatcttttcttgacctcgctgagatgactttcctgaagtccgcactagtccttaaccgcaagccaaagattggaacaggaacgacatcacctgtcattcctcagaagaggaaaagcgatgttatggctactcctgccgtggattcctccaagaagctagctaaggctacgcaagacaaggggacgaagttcgtgatcgatccgaccattttagctcacaacatcttaactttttaagagaagttcgtgggtgatgagtttatatcaaaggtcgacaggacccttgctgaagagcccctgccttgttctgcagaaatggcttcgcagttcattggtatgttttcgagggcatttgtcactggatccaaggaagtcaaacttgtgaaaagatagaatgttcagctttaggaggacatcaagaagctcaagcaagatgcgactaccaaggacaaagagctcgaagaactttgcaaggctaaggagcaagtcgagctcgaagccaagaactctcagatgaagatcgaggagatgtctcgcgacttggaggtcgagaggggaaatggaaagaagcaatacgaccaagcggtctctgactatatttatacaactctttccaagattctggactt

SEQ ID NO: 342009 - DNA, 535 bp, Cannabis indica
aaaaaatagaacttctaatactattgaactaaagagacattacatacaattgaatgacgaaagagggtcgtggtggtggtcggtgatgatggagctaccgaaatgcccagtttgcttacaaaactacgacagcgacgcaatcctcgggtactcaatttgtctccttaaacttccccaacgcttccctcaaaccattcgatgccctgcttgtacactagtcgtttggttcccccctcaatgcccttctgttctcctttggtctgatgagttttactctgagtagaaggacaggaagacgttttggtggatgaaggagaaaaaggaggtagatgggaaaattgataatattgattcttccgaaagacaattgccacattgataataatttgattttctttccctttttctgttcttcctccattatgcttacagtggatttgtgagtattagggatttgatttttttaattataatatattcacttgaaaatgagaagggaaaaaatggagtttgaaaataagatgactgccatgtc

SEQ ID NO: 342010 - DNA, 1203 bp, Cannabis indica
ctagatccctgtcacgggtcccgatctggtgttggtttaggtcccaggtctgagtttggattcaggatcgagactggggtgcggttctaggtcctggcccaatttgtgtcccgagtctggttccatgttcaggtttgagttcgggtcccgagtccaagtttgggttgagatctggttgttggttccggttcgggtctaagtttgagctggagtctaggtccttgttcggttacggttctgggtctacgtccatgtacggttacggttccaagtccaagtcctggttttggtcccattttcgggtcatagggtacgggttcgggtcaaggttttggtctaggattgggtttaggtccgggtttgggttcgggtgctggtctgggttcgggtctggggttgagtcccagatccatacaccgacaacgggtttggtccaagccccgtgtccagatctggatcccaatcttaggtcctagtctcgttccatttcgggtgttgggtcagaagctaggtcctaggttcaagtttgggtctgggtcgggtactaattcccgatcctagttctgttgcccatgtccatctaggttcgggtttgagtcctagtctcggttcaggtttgggtctcggtctggcttttatctgggtttcaatttgggtttaggtccttgtcctgtcctagtccgagtcctagttttattccagttgtagttgcgattctatgtttgagttagagttcgagttcaggtcggggttcgagtccttgtatgagtttcggttcgagtccagattttagtctaggtttggatgaggctttgggtgtgggtactggtcctgggtctgggtctacctcaaggtccaagtcccaagttctaatcctaatctgagtccaggtttagttccgggtctaagtctttggtttcgatctcggtctgggttcgagtttgggtccgagtccaggtctatgtttgggtctgattctaggtctgagtttgagtttgggtcccaagttcaggtcagatttttggttcgggtctgggttcgggttttgtccatgtccgtgtccaggttcctgtcctagttttggtctagggcaggtttcgggttccggtatgggtctgacttcagattcttgggtccaggtcaggtcttggtttgggtttgagtactgaattttgatctgggtcttggtttcgtggcctaggt

SEQ ID NO: 342011 - DNA, 660 bp, Cannabis indica
gatggggacactttgaaacgcgaccgtccgagactcaatgtgaggttgactaggtgtcctttcggttttcggctaataaatgctctgaaaattaatatttcaaaatccaattttctcgctccacggctgatggtgcacttgattattttttatttcccatatttgcttttaaggagtgaaattaaggcgtttgaggttcctttaagatgattacctctttcgtgacttgcctataaatatcaaccaacattggcacataaactcattttcaccacccttctttgctaagtatgttcagagcgaaaacagaggttcttggcttgaagtttgctgaagtgccttcatcaaagtttcttgttggagtgacgttgctcaaacccacatatatgactcttgagtaagaatctgatttcatttatgcttatttttgaatgtttacatttcgaatacaccttcgactttgctgtagaaaatttctaggaaaccctaagttcagaaacttctgtgattcttctttgtcatggcttcatgcgactttacaacccataatgcttgttttttgaattgcgtaatgtttgtgtttcatcttgtcttattctaagcttcatgaaattttttgccataactcgagaaaattttaaacttcttgagttttgactt

SEQ ID NO: 342012 - DNA, 1104 bp, Cannabis indica
agcccatctcgaaagaactccacagttaagcgtgcttgacctggggcaatttcaggatgggtgacctcctgggaagttttcccaggaagcgtgggagtgaggacaaagcacgctagaaacacttgtgttggtctgtagggccagtcatcagtccatgaagcagccagagtgacgtactcgtgtatcagagccattattctgtgggtgtaaggtcctaatggaggcttgaagcggggacagtacaggagaccatatggaaccctagaaacacaagaagaaggctcttagagcgagcatgggcgatccgtgacaatcttccatctagtttctttctcttctcttgtttttttatgtatttatttgtatttagtttaattatggatttgattatgagctaaattctctatttagggatttcatggattttaactgagattattctatagatttatgttatttgattgttctttctttctctattatggtgatttattcatatttgtgcttattacatgtgtttgattttccaccttatgcatgatttatgatctcaatacaaaatttaaaaagtgagtactgagaatgctctaaatgaatagacatgggttttgatgtgaaacgagagtatttacatagcttatgtgaattttagattattgtttaatacaaattgtatgttgttctatctcagagatgcagtagttggcatgcaatttaggacctttatgatttgaaaagagtttagattaatttataatctgtcatcacatatgaggaagaagaataattaattagtgttaacaatcgggtaatcaaatcaattgaaatcatctccctaatttcacatccattgttaaacattttatttatttgttttatttaattttgcttagtttatttagttcaaaattaatttattcaattgccaaatagaaacaagaatttaattgattggtacttgactacagtcctcgtgggaacgatctcagttacctgagtattacttgtaaaaacgatacgtatacttgcgtgttggatttatcacaacaagtttttggcaccgttgccagggactgttttagttaatatcaatatagttgaatt

SEQ ID NO: 342013 - DNA, 755 bp, Cannabis indica
atgcaatatgaaaaaatacatgcatgtcctaacgattgcatcctataccgtaagatatttgtggatgcaatatcgtgtcccacatgtggtgagtttaggtggcaaaagaaaaataattctaacgaggtaaaagtttgtgtccctgcaatagtgttatagtacttacccccaatacctcgtttggttcggttctttcaaaatatcaatcatgcgaaaaatatgatttggcatgccagcgatagaaaggtagatggtaggatgagacatccaactgactcacccgcttggaaatcaattgatgctaggtggcttgaatttggcaatgaacctaggaatatccgtcttggtctttctgcggacggaatcaatccacataccagcctaagcaataagtatagttgctggccatgaacctaggaatatccgtcttggtcttttgacagtaacgattattaattatgacattttatcaggtacctgaaagaaatactgttggacatgggtgggctgaatcgagtctataaatttctgaatccgggtgcgattgccccatataataataggtatatgtagatgtaaactaaataattttggtatttttaactcttcataaaatttattcttatgtatatgttaataattttacacatatttgttcgagcaggaagatgtttcactggatgcttgtagtcatccagccaagtacgcacacggtggcgtacttggattcaggcaacgacgacatcccggatgat

SEQ ID NO: 342014 - DNA, 743 bp, Cannabis indica
ggcacaaaacccaacattaacctgccaggaaatcaaagctgaacatcaaagtccgactgggttattgcaaacattagcccttcctaagtggaagggggaggacattgcaatggatttcgtaagtggtttgcctagtaccacaggaatgtatgattcagtatgggtcatagtggatagattcacaaaatcagctcactttctaccagtgaaagttacttatatagtgggtcagtatgctgaactgtatgtaaaagagatagtttgtctccatggagctcctaaatctattgtttcagacagagattcaaagtttacatcaaagttttgggtgagtcttcagagggctatgggtacaaagttgaagtttagtatagctttccaccctcagactgatggggaatcagaaagaacaattcagatactagaagatttactgcgagccagtgtcatggaatttgagggttcatggagtatgtacttgcctctaattgaattctcctacaattatagctgcttagagtacaatagggatggctccctatgagatgctgtgtggtaagaaatgtcgttcccctattcattgggaccaaactggagaaaggaagtacttaggtccagagttagttcagaggaccaatgaagctatagataagatcaaggctctgatgcttgcttcccaaagcaggcaaaaaagttatgttgatctgaagcgcagagatgttacatttcaggtaggggaacat

SEQ ID NO: 342015 - DNA, 830 bp, Cannabis indica
aatcacgtaatacgcctatgttagttagggtgttacagtatatttaatatttttctataatataatatttgacaaatattattttgaattcttaattttgcaaacatcacgaattgatgtctttgtttttataaattacaatgcaaactttgtattttcaaaatagtacataatattattcgtaacccaattttaatcaattttattttaataaatctaaaatataactaacttataaataattttaagcacaaaattgaaaaataatattttcataacatttggagggtagattattgttaggttctattttaaacttagagtattattatgttctattttaaaaaagaaaagtgttaattataattttttattataatcttttttttaacatttgcattcgaagacacttgtaggaatatttttttaattttttttttacaaaaaaccgtgttattatatagttataatattgtttttgtaaattttttaagaattttgaacagtgttaaaaatagttttaaaattttttgaacatgtatgaaaaatgagaatatcgagaactctatttttgacattgtaaataatttgaatttttttaaaatttacattaataatattataattagggtaaatggcggtaaaacccccaacattttcattttagttcacttaacccccacaatccaaatttaggcggtaaaacccccaatactcgtattctcttagcaatttaccctttccgtccattttaggtattaagtgtcatgttggactgaacacaatgtacacgtggcataattttactggtccacgtaaaaaaattattt

SEQ ID NO: 342016 - DNA, 689 bp, Cannabis indica
tcagagaggaacgaggagaaaactagaaatgagagggaacagaaatgaaagatcatttcatattagggagtttaaataccattatccctcattaattgggatggagacacgtggcaagggaatgcctaaggtctcacaatccaacggttatccataaccacgcttgcacagactcttaatagtttcgatgatgtggcaccctaaattggttaagaataatgatcacaaccatctttttaaaaccctcaattagacaaccaaaattcaacatctcctaacaatctttcgcctgcctcttgcttatagtttccatcgtgacatagctataaatcgcgaaactaggggcatgtgttatgatgagaatttttcatctagaaactcaagactaggctcccataaaagtgacacgtggactcactttcctcgaggagggctgagatgtcagtaggagacctcttgagtgtaaacctcgcctgaaccagactcaacgggatgatgtgatcttgatagagtctagtcgcatccgtatagcttgcacaaagcagaaccgaagatcgggtttaggatttgcatataccaagatatatgcgaggactataaaggtcttcatacgaagtagtagagatcgattctctactcagcgagctggtccggatgacccaaaaaaactcggtaacccgataaggact

SEQ ID NO: 342017 - DNA, 584 bp, Cannabis indica
aagctcatactactccatattcaatgcatcttggtactaccaagatgtatcaagatcttaggccctactattggtggtgcgggatgaagaaagatgtggtagaatttgtatctcggtgcttaacttgtcagcagatcaaggtcgagcattagagaccgccagattattgaaatcactgtcacttcctgactggaagtgggaggatgttactatagactttgtggttggattacctagaaccgcgggaatgtacgattcgacttggattatggtagaccgattaacaaagtttgcatgttttctaccggttaagacaacctttatagtggatcagtatgcaaatttgtacgtgaaagagatagtaaggttacatggtgctccaaagtccatcatatttgatagagatccgaagtttactttgaaattctgacagagtcatcagcatgctatgggtaccaaactaaaattcagtacaacttttgtaaagatcgcttagttcaatttagaaattagcagttagttatgattaattatggaaacttatttatagatatttaaataattatttatgctgttattattga

SEQ ID NO: 342018 - DNA, 560 bp, Cannabis indica
gacaatatgtaatttatttctttattttttttttagttttgtcatgtttaaacatgtttttatgttaaattatttagtattcttatttcatatttcttcttgtctgaattttttaatattgttttgatattgtatttttgttttttcccagttgttgtaattcatttattagttgttaataacaatatagttatgttattacctttttataataaaaatctgcattactataataaaaaacaaactgtatcaataaaaaatttcatatttatatatattttttcaatttagtatccaatttctttaataacccttgtaaagtgtgaaaaattaccaatgtaattatcaattttttcaaataaaaactttaaacgctaggtctcttagaaatttaaatgcctcaatatctcatgctcaaatgtatgttcagttttctcctatttttccactgttattctgttgttgtttttattctatcctacgccttctgctgcatattctcttattattctccaactccccacatttgctgcacttgttgtgttgatccttttcccatc

SEQ ID NO: 342019 - DNA, 1621 bp, Cannabis indica
gtcccggtccaggtccaggtcctaggtgacgggtctgggtcccgggtttggggttaagtcgtgggtctcggtcccaattctaatgcccgtgtctttagtcccggtcccctacctaggtccgagtcctacggtcccagtccgagtccacgaccttgtcaggggtcaagtcctggtccgagtccagtttcgggttccgatctcggtctgggtccaaatttgggttcgagtctaggtccaggttcgggttcgagtcctgcgtttcgatatgcgtctgagttccgaggcccaggtctaggtcccccatccaggtccgagtcctatgtccttgtttgggtccatgtttgggtttgggtccaagtcgcagtttcaatttcgattcaatgtttaggtttaggtgtgggtctgggtctgggtcaaggtctgagtcctggtccgagtctgggtccaagtctggatcccggtctgggtctgtgttcgggtccaggtccgagttcgagtcccgagtgcgggtctaggtctgggtctgggtcagggtctcggtttggatctaggtcttgagttttgatcccggtctaggtctgggtgtgggttcgagtctaggttcgtatctggatccctatttaggtatgggtccaggtttgggtcgtggtctcagtcttgatctgggtacacgaccgtgtttgggcctgacttctggtctcggtttgggtttggggctaggtccgagttggcttctaggtttgagcctgggtcttggtcactgtcctagtcttgttagagggtcctggcctgacggttcttgttcaggttccaatttcgggtgccgggtattggttagggtcggggttcgtgtcctgatccaagtttgggtcctggtctgtgccccagatcttgatacctatcacgtgtccagtctaatctggtggcggttctaggtcccaaccccagttttgtgccctgagtctggttccatgtttcgatttgagttcgagtccatgttcgggtctcgagtctaggtctgggttgggattcgggtccagcttcaagtctgggtctaggtctgggttggagtcaaggtctttgtccggttacggttccaggtctaggtccaggtctggttacagttccaagtccaggtccaggtctaagtccttgtttcggtcccggtctacttccaattttgggtcacagtgtatgtgtttgggtcaaggtttaggtcttcgactgggttcaagtctagatctggtttggggtcttggactgggttcgggtctggggctggctcctagatctagacaccgactatgagttcggtccaagccccgcgtccagattcagatcctaatctcgggtgccagtgtagttccatttcgagtgccgggtcacaaattgtgtcctaggttcaagtctaggtctggggtcgggtcttgggtcccggtcctagttttgttggccacgtccctatcctgattctaggtccaggtcccagttcttgtctaggtttgggtcctggtctaggtttgggtttgggtcccactagcagttcgggtttgggtctgggtctcggtttttatttgggtttgggtctgggtctgggtcctggtcctggtcctagtcctag

SEQ ID NO: 342020 - DNA, 973 bp, Cannabis indica
ggaccaataaaattgtgccacgtgtacactgtgtacacgtggacattccaacctggcacttaacagccaaaaatggatggaaagggctaattgctaacggactagtggtttaggtagttttaccaccaaaattttagattagggggttagttgcaaaaacctatccactttaggaggttttgccgcaaataaccctatatataaatcttttctttgttaaactatcatatatattacactttacttttaattttttattgtaaaaaaaatatagcatcaataccattgggtggcattaatgtaaatttcaagaataaaattcttttatcttcaactaagtaatataaccgctcttcgcgaggctaaataatattttttttaatattataataaaaaataataatttattaatataataaataataacttacaaattattctaaaatataataacactaaataatatcatctaattatatattatttaataattttatttattaaaaaataaaaatcatcaaaataagaaaaaaattaagtctattcacaatattatcaattattattaaaatgattatgaaaaagtctcttagatttatttatgaagaagattaaaatttatactattaatgtatataaaaagtttcttagatttatttaaccctcttaggacccgtttggaatagtttttggaaaagttaaaagctgttttttgaaaaaattgtgataaaaatgtgtttggtaaatagtcaaaaatagttttttgaagaatttttggagaagctaaagctactccaacccaacttttagaaaaaagttattttgattaaaagattataataatttattctatactaaaaccatatttacttatttattatatattaaaaaataaaataaataattattaaatctcttattttttttaaaaaaaatatatttattttaacattaacaaacaacatcaacctag

SEQ ID NO: 342021 - DNA, 1083 bp, Cannabis indica
atagatggatccgatatgatatagtaaatattgaatgaaaaaaattagatgaattcgattcaatatagggattcatacattgagttgatccaatccaatccaatgatttattggatcatgttggtttggttttacatatagtattggattggatttgttggagaaatccaacatccaatgtacagattgattggacctggatgggtccaaaaatattagatgtgatccaataaacaactctattagagaatatatgaaatataaatatattataaatgaataattttattatggaaatataattaataatctatatataaaaaaagttccatatttatatagaggaagtatgatcttataaagaagtataagagaattaggatcatactatatgagtagaataagtcggtagtgtactaaagtatggaacctttaatatagaattaccaattatgatttactagcactataatttagtgacatataatttttatccatatcacatatgtggatagagaattagtaaatgtactgtgtaatttgattatgcatgactggacaaactaatatcctttattaacgtgccatttattataaaacagttatttatattgttggaatttattttacgaggatcttagatctactcacaagtatgttgatttaacaacctaaatatgaacttctaaaacgataaagaaaacacataaaaagttaagaaaccttacagtgatggcagcggaataatgtgtctccttccactcagatctctaacccttgattcctgtctgttgcagagtataatcaagatctgagcccgaatgtccttcagttggatgtgatccttcacagtcttccaatctatgattgaggtactgtttgctgtgtgtgggcacttctctctcacaaaggatttcgaattctctctctcttttgctctctgaatttcgtgtgttatggcatgcaaaaggaagagaggagggctgctatatatagggaaaagggaagctcaactttctaaaataaacagtttcctcttttactgagtaattgatttactgccttaattggtgtgatccacca

SEQ ID NO: 342022 - DNA, 778 bp, Cannabis indica
tagttgtaaatgaactatagtttatagggatcccgatattacaaccgtatttataatgaaagtttttactttaaattaaaccaaaggttttaaatttaaccacacccttttcctaaactaatagattagtgataataagtttgtaaaagcacacagtggcgtcccagagagtcagggcgttacaacgagtcaatcttattctgacttttctgatacagaactagggttctttcacaaacggtgtattctcttttttctctaaagtttttcttccctattttctgtatattctacccctatttttaataacataggtttctagttaattacatttaatttcaaatcatctaacgatatttcctgaaatcgtgggcttaatttatgccccttgtaagtatatacagttattatttgaaaatcacacatctgtaatttttatcatgttgaaggaagtcaacgttgatgtgaattaggacacgctatagagtgtaccttgctgagatgtcacgccttgtgtatagacgaaggacttagtgtacacgcattccagcaatggcatgagcactaatgtactaagcaaactaaagaaccgctctttgaccgtaagccttttagactggacaatcatgtcctgggagttctcaatagcaacaataaccctgacagcgagctggagtttaccaggagtatttcttcctatagcgagatggatagctcgctattcatttgttgggttttatgccctaaataaaactctgtttcaatgtaatccaaatta

SEQ ID NO: 342023 - DNA, 503 bp, Cannabis indica
cccactttgtttcagggccggccgtgcttccatctatactattatatatgctattatatactaaatataaaaccactgctagtgaaaatcacatttggacgttaaattaaaaaataatttattgaaaaatttacgataaagctacaactaaaaacgaaagttagtacaacccaatttttagaaaaaactgttttaattaaaagactataataaatttatttgtactaaaaaatatatttacttatttattatatattaaaaataaaaatatttaaaataaataaattataataaaataaataatatttaaatctctctttttttaataaaaatatatatttcatatttttaatttaaccatatcacatcaatttagagttttttatatatttaaaattttcattttttacatatgataaaaatattataatttatttttatcaaattcatataaatttatactttaaggaaaaaataattaaaatatattataaataaaaata

SEQ ID NO: 342024 - DNA, 617 bp, Cannabis indica
cttttcaaagaataacaagattattattgcttccaacatatggaaataaagtatttcattgtgacttggtgaagaaataagacattgtgatagattattgcaagaccaagttgatgttagcagtgttaaaattttatgccctaaataaaacccatttcaatataatcagatttactaattaataaaagatcaaaaattattttatgatgcatggttcacatgattactttcaagattatatatttaatatataaattttattaaacctgaacatatagttatttatgattatagtgttgtctacacagtggaaagtaatcataattatatgcttcaatctacttagttccacgatttatcagtgcactagatttatattgacatgataatcagcgatatggttttcttacatttttataagtggaatatcctttccaggtcattagcaaagtaaacaagtatcgggtgtatccactatatattgaactggaccgatattggcagtggaaaagatgtcatacacttaccgttatatcttttctaagtcaatgttacttagttgatcttaggtcaattgatctcaatcctgagattgttaaattctagcttaattgtac

SEQ ID NO: 342025 - DNA, 518 bp, Cannabis indica
atgtacatattcgaccagtcatgacctttaaaactatggctactcttataccaacttgtaacgctctatctcataaggacgccacatgtgattttataaactagtttaatactaatagatcaactaattattaaaaattgtgataatataaaaaaaatatgactaaaataaaacactaaaaacgaacatcataacaacattaaaaatgtattttggagaccctgctgtaagagttttacaaaaaggctaagtacaacgacaaatcaaatacagatttaaaatacacagcagatacaacccaaaataactcttaacaactcgacatacagaccggtagggttaatatgtacattgctgaagaagactatcacctcatggttaatctagtggttctttgcctttacctacaccacatagcactcgtgagtcacaaggactcagtaagaaaagtaataacagtaatcatataatttattatttgaatattatcatttatacttagataatcagaatcaaac

SEQ ID NO: 342026 - DNA, 580 bp, Cannabis indica
aaaagcgtacttatgatagataagaataacctcatacaactcgattattacgatttagcccaaaggtgatttctgcatatgataatgaaataaatagagaaaattatattgtatacctaccttactttatttattttaatttttacccttatttttatattatttaagatatactcacttttatagatgatgcccctattatatttctcaggctaatgtaaattatgtgctacttcagtggagggtgagagtatattgggcaacccacttacaaaagtgaatacatcttaataaaatataatatgagagtatttttgattaataaatacaaaaaagaagtaattctcaatttatcccgatgaaatacgaatcaaactgaacgagggcgaaaatgacattcactccgacccatcaaactgggcctcacacataagagtgacagaacgtgttatcgtgtcgtattcgtgtcataatttatgtgacctgtttctatatttcatgttaggattgtcgactcgtctttgactcgtgtctaattttctcagccttagcctaacccataaaaaattgtatcgtgttc

SEQ ID NO: 342027 - DNA, 1093 bp, Cannabis indica
agaatcaaacaatcacgcattaccaataacatgaaacccaaatcactactgcatctgtcatgaataaacatcagtataaacatatttagcaatacaaaactattatatcataatagaaatcatattcatctaataatataaattatatatatgttacctcataaagtaaccttctctattacatcacattatctaatcaagcaagtcggtgctttaatctggcaatcctatattgtattgcctaatcaggcaagcccgtgccatagcctggcacccgtacatcgcatattcgcatcaccaaatcaggtgagcctgtgccataatttaacatcatacataatattattgtgtcacctaatcaggtgagcctgtgccataatctggtaccaatatatcgcattacctaatcagaagagcctgtaccaaaacctggtactcacgtgtcactactgcccgtacctaataaggtacgccgtcaggaagaaacccaataatggtttcagtctatgccataacttggcattcacatgccatttccgctcgtacctaataaggtatgctgccaagaagaaacccaacaacggtttcaatttatgccatagcctggcattctcatatcactgttgcctgtacctaataaggtatcgtcgacaagtatatcgcatcacctaataaggtgagcccgtatatcacattcatggtatcatcacattgtcattgtctaatcaggaaacctattcattacataacaataatagtcatatcttaatcccaatatcaatcaattctcaacaatattaattgtattgcaatataacatgctatgcagtataatatacctttttttacttttaatttatattcatgcatgtcggcctacctaagtggagaaatatccttgatgatctcggccctatgtcacaacaacagtaaaccgataagtgtttatcccaaaacactatttaacactcgcgtaagacaatttagaattttctacaaaatcttgaagtacaaatacactaaaataaaatttatattatggctctaaatatacaccctattgtggagctcgtcgcaagctttgaaacagtat

SEQ ID NO: 342028 - DNA, 699 bp, Cannabis indica
ccttgatcgtacgtcaatcttctgtgggaaggtggctcgagttcgacgggcagtatagcttcataaccatacgccattacgaatggtgtctgtcaagttgtcattttctcagttgtgcgatatgaccatagaacttcaggaagctcttctcgccagtttcgtttagcatcttcaagttttttcttcagtgtaaccttcaaggttttgttgactgcttcaacttgaccatttgcttgaggatgcgcgagtgcggagaaactttttatgataccatggttcgcacagaaataagtgaaggattggctatcgaattgcttgccattatctgagactatttggtacggtagtccgcaccggcatattatattcttcacaataaagtcttgaactttcttttatgtaatggttgcgaatggttcagcttcagtccacttagtaaagtaatcaactgttaccactgcatactgcactccgcctttacctttgggtaattgttcgatcaggtaaatccctcaaattgcacagggccacagactttgcatctttgttaactagttgggtggagctcgtggtatctttgaaaatctctagcatctgccacacttcataacataggcttttgaatcttcaatcatcattggccagaagttaccttgccttagaattttcttggataagctctgcccggcggcatgattt

SEQ ID NO: 342029 - DNA, 881 bp, Cannabis indica
ctgatatgatagcccaatcggagatcaatctttgaaaagatcgtcttccctgaagctggtcgaaaagatcatcgatcctaggaaaaggatacttcttcttgactgtcagtttgttcagttcccggtaatcaatacacatatgtaaagatccatctttcttcttgacaaataacacaggagctcctcatggtgacacactaggccatgaaaaccctaggtaaagcaacccctgaagctaaatttttaattctttaagttctgctggagcccaactccatctggacagctccaagttctaccctggcgttatcagcatctttcctagccaagtccacctccgccctcatggtgttggacatggcagcatttttggacgcatcagatttagttcgggagtaggtgtaagccaacttcagaccagcctacacagagaaaaaactttaaggtctgaaccaaataaagaagaattaaaggaaacaatcaacaaaggcttaccctggtaaattccttcaagactcctctcatcaacaactccacggaagactcgttatcagcaccggctagctactcacttacctaaggaaccaatcggttcatgtaataggcaagcatctctctagctttcttggcttttggaagcaccggcaaaggtggagtaggagcccgcacctgctcatatccactcttggccagctcggatccaccctttgattgctcaggcctatccgagcttcctcctcgagaatccttggacttagcaacttttggagtagaaggctcctcagaaaggtcgataacctctccagctagtgcctttccttggaaggggtcgcctcaccgcccttagatttcttggctggaggagatgagcttgagcttcc

SEQ ID NO: 342030 - DNA, 984 bp, Cannabis indica
aaaaaaaaaaaatgaaatggcgggtttgcattatacaatatatttccaaatgaattttagttagtcatacataaatgccttaagtaatttaaagaatgaaactttgtaattacttaatataaatgattctctttattcataactgaagtttaaagtttacatcagtaatgcgagttacatcatttatttattgatagtagggtcgtaaatgttctacgttctagtagttctttattagcgagccatcaagtcgagccaatttatacactccggctccaactactacttcaatgacatagggaccctcccagttcgggttgaacactcctactgatgcatctcttgtatttgcaaagactcttcttaacaccaagtctctaacattgaatagtcttttcttgacttttttattgaagtatcttgggacttggtgttggtatgcggcgatcgtgatttgcgactcagttcgtttttgctcaagtagatccaaggacaattttaaaagttcctggttttcttcttgattataaaactctcttttgtgagtcgatatgttcaattcaacaggcagcattgcttccgagccaaatgctagcgagaaaagagtgtgtcccatgggtgttttctcggtagttctatggtcccagagcacctgaggtagctcgtcaacccatctgcctttggcagtgtctaacttcttcttgatagtatcctttagggttttattaacggcttccacttgtccatttgcttgaggtcaggatactgacgagaagcttttgataattttattcctctcgcagaattcagtgaacaagttgcatcaaattgggttccattatcggatactatctacatgggaatttcaaacctacaaataatgttcgtgacaaaaaagttaaggactttcttgcaggttgttgagacgaggggctcggcctccgtccatttagtgaagaagtcgactgctaccaccgcatactt

SEQ ID NO: 342031 - DNA, 568 bp, Cannabis indica
attaggtttccgcataacgacccattggttgtggaggtcgagatagctaaaaatatggtggcaagaaccatgattgataatggaacctcttccaacatcttattcaaaactgcctatgaaaagatggggctccagcataaagatcaaaccccctgtctccgacctgcatatggtttctccggccaaggagtcgcacctctaagacaattttgtttacccctcactgttggaaaggcttcgacgagcatgactattatggcacaattcctggtattagatgttccttcagcctttaacgtaatgctaggccgaccaactttgtatgacttaaaggctgtcacatcgatattccactcgtgcctgaaatttccaacaaagaatggggtagggtgtctgagaggaaactaacagtctgctcgggaattttataacctttcagtgaccaaggctaagaaggaagtatcctccagccagagcacagacaagggaaaaaacatttccatgtagggagtttgccaaggcggggatgaagatgtagatcctcgacttggggacccaagcagcaatg

SEQ ID NO: 342032 - DNA, 837 bp, Cannabis indica
ttttcccgaaccctagtttttctagttttttcataatttagggagtttgcatcttatttattgatagggttatccttgatttcaattttaaatccccgatagatgttttagcgtgtctctcatcgaattttgaacattatggtttagggccctgtaaagcgtcgagctgcatttccactcaggctgaccgacacacttgagcacggaacgaggtaagatagcataaatattatatatatgtgaatgtacgcttgcgttaatgtttacactactaacatcaaatgtttatacgattttaagggtgttagtatagtgtaggttttaaaatagttacagtgttaccaacacgagtatcagggagtacgtcgtgcatgtggtacaacacttagtgactttcgggggtacattaatggctctaccaacacgagtacagggttggtactttagtgcatttggtacagtagtcgtacttcccttaagaacgttcttaatcattcggtgagctcgctgttgagctcagggcggcttaagcattaagccggtttagcattgctcatatatttatgttttgcatatcttactaagtctgttgactcatcagtttgctaccttgtgtaggtaaaggaaaagctaagctggaggaacagtgagacagagcttggcaatgattgtacatatcgcggcagtgcaacctggagggtctcggtcttataaatgttttgcagtatagtttagttgcctgttgttaagtttaaaaaataatattactagtggatattatattagtaaatacttttaaatcgtattttgatactcgggatcccgacttatatgtta

SEQ ID NO: 342033 - DNA, 1797 bp, Cannabis indica
agtttgtaaccagtcttaggtttttcttatcttaaatgccttgtactgttttcattcaaacttatacaattgtatttgcttgcatttttattcacaatgtaaacaactatattttgatcaaatgtacagtacttttgggtttttccattgcttgtaatcttcctgtttaagtagttagtaatctaccaaactttatgattttcgagtgattgtcaattctacctcgcaattgcagtgataatctgccttaagcaaacttaaatatactttaaggattttatcactttgtatatttttaatttgctcgtatgaatagttatattatctatccatcttctaggtttaagtacttctaccaaagcgtcgtgatccctcgcttagtactttcctaactcgcgagaaccgttagtattcagttttatacgcgagttataacttttgattttcctttcccgtgggataggttataaatcaaaaattatagttgtttaatcccttctccgtcaaaaaagtttgatcaaggtgttataacgattcgatccctctctcgtcaaaaaggtttggtcagggagttataacggttcgactccacttttgtcaaagaggattagtcgagaacctttgaatttcaaaaaaatttgaaatgacgggtttgcattatacaatgtatttctaaatgaattccgattaatcatacataaatgccccttaagtaatttttaaagaatgaaactttgtaattacttaatataaatgattctctttattcataactgaagtttaaagtttacattagtaatgcgagttatatcatttatttattgatagtagggtcgcaaatgttctacgttccagtagttcttttttagcgagccatcaagtcgacccaatttatagactccgactccaactactgcttcgatgacatatggaccctcccagttcgagttgaacactcctgctgatgcatctctcgtatttgcaaagactcatcttaacatcaagtctccaacattgaatagtcttttcttgacttttttgttgaagtatcttgtgactaggtgttggtatgcggcgttggtgatttgcgacaactcatttttcctcaagtagatccaaggacaattttaaaagttcctggttttttctttattataaaactctctcctatgagtcgatatgttcaattcaacagatagcattacttttgagccaaatgctagcgagaaaggagtgtgtcccgtggttgtcttctcgatagttttttgggcctagagtacttgaggtagctcgtcaacccatctgcctttggcaacgtctaacttcctcttcatagtatctgttatcccaattttggcactctgatgtggcatcactcaatggtaacacgtgcaatcaactctgggtatctactcgcaagacacaggccgaacaggtcacctcacacatccgctcggacgaagtcctctagaccgagcagtgagcaatccgcgtagcatgccaacacttagtaatttcagttttggcatcgtgagtcatcaaggaaatccctataactttgggatcagattatagagatatggcaagctgtccaaatcccacgattagtgtattctctatttactatgcaatctttctgcttatatcaattgtaatgagaagggaaatacttcctctccaagcttatagccctataaatagtgactcatattcactgggcaaagtgtcgaaagattttgtctaagaattcatattcagagatactgttgtaagcgctctaagaaaaggaactattct

SEQ ID NO: 342034 - DNA, 1043 bp, Cannabis indica
tgacagttggagtgcctgttgagaagcaaccagtagggagacccaagaagcaaaaggttggaagaattaagaataactgaactgcttgtaatggtgaaaaggattatcaacccacgaaattgtggcaagtgcgttgccaaggggcacaacagaagcacttgtacctacaaaggttaaaaatgaatttttaatttagtcgtaatgttatgtaaaagtgtcgtcatgtgttgttattaatatttgtggtgtaaaatatttttaatttatgtcatgaacatgaatgttgaatgtaatattattatgtgttgtactgttatgtattgcttggtaaattatttttggactttgttaaacatctgtggcaaaaataaaataattttgctgataagtagattgttcaacaaatataataaataaaatatctaaagttcatgacaagttctggtagaataaatctactccccatctttggcggaagagtggcatatggtcatcctttactccatcgaatggtcgatccaataacttatgctcaatatgctctataacgtacattccgcaatcgccactgcaatagtagttaaacgcaaaatttaattaaccatagagaataataataaaaattttaatttaattagtaaacatattctaatttttttgggtagtttaattacctcgattttttctaaggtacaactttattgtccatgatatcccaatcgaattttctgacctgggtttcggaggctgtcatttgagggaccatcaccatgtaatgggtgtcacatacaccacactggtccaccaatttagatataaaaggcactaagtatccatcagcgtcttcagttcatcttccattagagttccaatactcgaatcaaagacgaatagcttccacaactcaagattcgcctccatagcgatccaatgtttttgtcgttccaagaagatggccatgtatacgcactccatatccttccaagacgacatgaattggtttggatccccacgaacgagttccaagagggactcatcccaga

SEQ ID NO: 342035 - DNA, 671 bp, Cannabis indica
atgtgagtttgatatattagttttgttgagaaatctaaaaatgtcaaatggtattttcaaagtgaccttaagagtcatttgaagaggaaaatacacaaaaatgatatctaatatacactttatggtagaaatgtgaaggtggaccacaaatttaatcaaaatgtgatgggacattattgattaatttatttgattttgaatttaaattcttaatcaagtttgactatgtgcacatatgaaaatattgacatatttgatgtcaaatttttgtggaaataattttaagattttaagaaaaattatagagagaaagtggccttttatattttaaaatcaagatattatcttggtagtaaaaagtgaacgtgtggaggtgatcatgtttggtgtctaaattagtgcttaatttgtgtgaaaattaatctttaatgattgaattttcaaagctcaattacttaaggagaaaagtgtcacaaattgaatactatattttggcatgcatgattcacatggaaacaatagtgagagattataacaaatagattaatctcagtacaagattaaagcatgaattatcaagggatgggacctaaactcccttagtgttttgttcattgatggtaacatatcttaatactagtaaaaatctagtcttaagttcaataggtaat

SEQ ID NO: 342036 - DNA, 801 bp, Cannabis indica
tttggtgttcaaaaatacccttcagaggaccatatctcccgtgaagaatttttgtgctctcactttcttgttaatgtaccgagctaccttttgttgatgggctaccaatttcaggtttgctgcggtttgcttttcttcgatttcatcaagtgattctgcgaagagtgcatgattaacctcttagtcatttgtcaatcttctgtgggatggaggttcaagttctacgagcagcatagcttcataaccatatgccatggaaaatgaagtctgtccagttgctattttctcagttgtgtggtacgaccataacacttcagggagttcttccggccagtttccttaagcatcttcaagtcgtttcattagagtttctttgagtgtcttgtggactacttcgacttgaccatttgcttggggatgtgcctctgcagagaaactttttatgatctcatggtttgcacagatttcagtgaaggattgattgttaaattgtttgccgttgtccgagactatcttgtacggtagtccaaaccgacaaattatatttttcacaatgaagtcttgcactttcttggatgtgatggttgccagtagctcggcttctgttcatttagtgaagtaatcaactgcaaccactgcatactgtactccaccttttcctttgggcaattgtccgattaggtcaactccccaaatggcaaaaggccaaggactttgcatctgagttagttcgttgggtggtgcacgaggtatgtaacgccctgtccaacagggacgccacgtgtgtgcactttatttaaa

SEQ ID NO: 342037 - DNA, 747 bp, Cannabis indica
aaaaactatttgatttgaaggggttttttattttatttcttcttcttcttattatttggtgaacaatttgatttaaagataattttttacttggtctacatgtctaatatgaggaaagtgttaagggataattaattaattatgggtgctaaattacaatgcttggtagtatgaggactttgacagtcaaaagttttgactgtttgaaataatttgagtgtgcttttcttaattattgtactagaacattgctattggacatcagtggtgcctagcacccttaagacgtctcgccttgcgattggctagcgatattccctaaaaattattatattaaactatatgggacccgatatttaattagattaatagcgatattacctttacattgaagtggatgagaaatttgatggtttattttccattgtttttgtactgattatttcaatactatattgatcattgtttatttttttaatatattttaactcaagttgaatatatgtttatctaattgctttgttctacaaattgaggtttttattttcctttactttttttttaaaacaaaaattaaaaaaaagcttcaaaggtttaagtagatcatttagttttctatattatgtaaaatgttaaaaatggggaaatttctattatctattgtttaggccgaaagccaacttcgggtaacaatgtcccttaaaaaaaagaaaagaaacactcaataatcccatttaagaagcccta

SEQ ID NO: 342038 - DNA, 863 bp, Cannabis indica
ttatgtacaccaaagtattggtaaactagaacctagagctataaaaggagtttttctgggatatcctgaaagggtaaaagggtgtaggatctggttaaggaaaagggggggtttaaaataattattagcagagatgttatattcaaggaagatgaatttccatgtttgcttaaaactaaccctgcagatacatcggatactaatcctgtaggaataatacagtttgacccaatcctatggagatgagaggatcaagaagaacctgatatcaatcaggtcgaaccaagaggaggagaaccaaaactagatcaaattcaggtggaacacatagaaaacactaacaaagaggaggctcaaatagaagtacaacaagaagatgaaacagaagacatacaacaaacaggagctctatatgattgccaattgaccagagatagagagaaaagaacacaaaaaacctaatcccaaatacaacttcaatatccagaatgaagatatagcctatgcatttatgatagctatggagtcaatcaactcagatcctcaaacatattaggaagcaatggaaggacctaatgctaagaaatggttcaaggctatagatgaagagatggtgtcactcaagaagaacaatacctggataatggttttaagacctaagggaaagagaataatagcctgcaaataggtctacaagcataaagaaggcatatttatgggaaaacctgcaaggtttaaggctaggctggtagtaaaggttttacacagaaagaatggatagattacacagaaatattctcactagttgctaagtacaagactattaaaatcatgttatacatagcaaaccaatttgatatgaa

SEQ ID NO: 342039 - DNA, 550 bp, Cannabis indica
aagaagaagaggccagaagaagaagaggcgagagagagagagagagagagacttcctagggtttttcttgtaagaggggagagagagactaactatataagtcagtttttttacaattattattaaattttttttgttgaaatgcaattattattaatttacaccccatttattattatttcttattttataagtcagaatttttaataaataaaattaaaaaaataagttaaaaactttaaaactttaaatttatttaaaataattaaatatataattatgatatagtgacacactatgcatgtgggcataccttttctcagtctctcctagcgtgactctataggtcagtatttttttaaaaataaaaataaaaaaactatgggtattaatttttagtgacactgcatggttttagtgacacacattacacgagactaatacaaatatttagagtctaattatgagtgtcactaaaaatcattcctaactctacagtgacacaaactttaatgtgtgtcactaaaaaggccagattgtagtagtgtgc

SEQ ID NO: 342040 - DNA, 739 bp, Cannabis indica
atacaacacagatagtttcaaactaagagactcatcctgaccccacctacttcccaagaaagcatcctctatagctttatgatctatggtttttacaccacggaaacaaacctcaatcaactggtttgattcctgagaaaacaacagtttgttgcaatcaccaaaacaatcaataacagtgatcaagtaaaactcatcgacactgaatcgtatacaacggccagcaaccttagcctaaaattctttaggattgggctggtatacttccctcaaaagtaggctacggacaacttaggggttgaaaacaaaatcaggtatatccaaaaaaaatgaccaaattgagtgttacagaacatagacaacaaattgacagataaagtattcttgatattatcaagaacagagaaattactagtacaaacacatttcgatctgtagaaatcagagggactgaatttgttatcccagacctgcaatttaacacacatggaaaatataaacaaataacatatacaagtatccaaactataataaaactattaaaaaactgaaaacaaactgaaatacagaaacaactctttgaacataaactacaatgagctaaaatcaaattgttacccattggttacataaaaatggacaggaaacaactagaccaaataatattcccaaaaaacaacatacagaaagtgattacactattaaaaaactttgaaaaaactaaaacaaaatgagaaga

SEQ ID NO: 342041 - DNA, 606 bp, Cannabis indica
tctcttgaccaaaattaacacttttgtaagttttttttttatttgcttctattcactagagcatactcatactattgtccacatagcaaatcatgagtggattatagtatcatttgcatactcactgccttttatgttgcttgaacatttcataatcccaacacttcacaaaaactcgtatggtccatgtcgttccctgaaattcttctagatatatcactttagtcctagttgtgtctcacttgtctcttgcctttgagtgaggctttcctaacctctgatctacaccgttgttgtatcgatgggtatttagaatctaagtatgtcactcgtgaaatttaatttctcttcttcctctttggaatttgtgatctcctctctatagctgtttgttgtaccacccaccataaatttgtattcacaatgtattagttgtgcaattgtaacctgttccaagtagttgtcctctccttcatgttgtacccaaattgttagtcgtgcctagaccttcttagtctttctcctttgaaaatgtcactgtcgaaactatgcacatttactctattgtctcctccaccaagtagatgaccttgagtttaaagttta

SEQ ID NO: 342042 - DNA, 843 bp, Cannabis indica
aaagatgaacatattcacacataaagcatgtttttcaatcttatttcagcagctgaaattaaattaaaccaattaaaatggctacctcaacacaagcacaaagattaccaaactaagctttgatccaagcaacaactcacacattcaatcaaagaaagaaatagcttaagagggaaaaggggtttagccatgagaggagaaaacccagaaatatttcagcaacatattcaacaattaaagggattaagaactacctcaagctcaaaccaagctaagcacaatatccaccaagaatctaagctttcaagacaaaatttctaacacttaacaaattgaaaatatggagaaaagagggagaggaggttcagctgctagggctggaaaatgcagaaaataaaaccctctttaacttaaaatttcccttttaatgaatcataagccaaaatacacaattaccacattgcccttagggctaaattcccattttcaagcatataagggcaaaaatataattctcacatttcatacataaataataaatttcagatttctcatataaaaataaaatgccaatcaaacatcccaaaatagtatttcggccccgaaacccggttcggcccgaaatacccggttgtgactataccgtgccaacttgtcagaactcacctgaaaaagaataaaaaatgcatactatataataatatagtccataagcacataattaaattaaattcatagttttacccttctcagatcaaaattactaaaatgcccctagctcaccaacggggtcttaacatgtcataaatcataataattcacatataataattcatataataa

SEQ ID NO: 342043 - DNA, 489 bp, Cannabis indica
agatcctggtaaaataaaattccaacacaagattgagttcaaaaactcaaaacttgactaacccttcaaacaacccctaactcaagcattaaaccacataaaaactcatatctaagctgcagaacaaaacaacaataaccacagcagctacagcaaacaaaaacaacatatcacccataaaaaccaagttttagttcataactccatacttgcttaaaatcaactaatcatgcatcaaaaaactgctctattctactcaaataaacatatttaaacttaagaaaacataaataaacaataacaacagccacaaccataatttcatcaaacatgcaataaatcatttttttcttaaacttcaagaaaataaataaagcttgaacaaaggttacctcctcttgaattactctaaaaattgttgaaaatgcttgaattgcaaagaaaaataccagccctagcagccccaagcaaaccgaaagagagagagag

SEQ ID NO: 342044 - DNA, 753 bp, Cannabis indica
caaatgccgtttcttgcgagatgaagcttggcccgaaccccacagtgtgtcctctatacctttggctaagcctttgtttttacccgaagtcacgattgcttttgaacaaggtgacttggactttgaaataatgtctcccaagccacgtaaatcaaagactccacaggatcctaacgtcacttttgaggccgagttaatagaatcgaaggtgcgaactatctcaggctacacagccgattcactaaggacatgtggaatcgattataagcagtgaatttagccgttacccgcctgcgcgtctcacaagcgagacgtctaagggggccaatggcgagaccaatacgagtggctcgactggtataggtgcttagagttttgaacacatcaagacaggggccataattcccctccgtgattatttaaaggattacttaaaccacctcgggcttgccccattccaactaaatcctgtctcctacaaaatccttgctagtttgaaggttttgtataaaattctgaagtgggagtgccctacgcctgtaaaaatcgagtatctctactccgttaaggttgttctagtgaggaagaatgtcgcaagaggcttttattatcttggtactcactctggagagcctaaaattattgtggacttgccaaacaaaatacctttcaaagataacttcttttggacatctggcctcttcccaatcgacacaaccaccttctacaaaattcgtaagtgattgttttcat

SEQ ID NO: 342045 - DNA, 756 bp, Cannabis indica
ccttagagaatctttggattcccttttttggtaggcattcggaggggacatatttccatggaatacggggagccccattcccctttttgatcctagggtttgatatgggggctaactgctagattttcttttttagatgagtaaagttatccgcgaccttcacacacacagtttctttgggttcaaccaagaatcctagatctttatcaaatccataccatgtcaaccgccacctctgctggagaaaaatcttcgaagaaggggccaaagaaattggccactttggatgaataaatgaagggcccagtagtctacaaaaagttcttctcgctccaatggttgggaagtaggtgagctaaattcgacactgacctgcgcccactagttggaaaagatcattactgtttttggaatcaaaccttctagttcaggggtttaccatcatctctcagggacgaagagatgcctaatcataacagcaccgacttcgggcgtggagccagacccacttgatgtccggggccatgctttcgctccaggactactttattaatttttttagtctttgttggcctttcaccctactagcttataccacaaccttactgcttgttatcaggcttgtatattttttacattgtcaggaaatgggccccgcctagtcgggcttggattctgtatttttatgaacttctatcagtcccccaaaaagagagacaagtttaaagatggtttttacaaactctaggcccaccc

SEQ ID NO: 342046 - DNA, 1599 bp, Cannabis indica
ttctctctctcgaaaatcctaagcatgctatggcttattttgttcatcagttcagcaagttttcatcaaatctcagagtaattcaagttgaggtaatattttatcaagcttctctttgttttcttgaagttttagaaaaataaattgttgcatgtttgatgaatttgtggttgtggctgttgtttgtgtttgttattgatttctgaagcttagttatgttttaaaatgatgattcaagcaggtttttatggttgttagttggatttaatctagtatggagttttagactcaaaactttggatttcaatggtataatggtgcttttgcttctgtgttaattgtttatgtttgagttttgtttctggatgtttcttatgttgttttagacaggattaagctagttgtagtggctgttagtgggatttaaccaagtttgagttttgaactcaaagcttggagctcacatggtggattttgattttgtgcatgctgggttgttttgttgctcttgaattgttatttggggtatttagaggaggtctggaaagtttgaatttgtttggggttgatttggtcgatttatggaattttgaaaaattcctgcactgaaccggaattccggttcagggaggccagtaagaaccggtcgaccggttggcttccaagattttttcccaaaaccgtaattccggttgaggaaccggtctactggttggggcaattttgggaaccctagttcttcccatttttgtgttgtttagggtattgccatgctttttatcgagagggaaacaactagtttcgagtttaagtccccgggaagtgatttagcgtgtcacttattagtgttgtggttattatgacttaggagcctgtaaatcgccgagctgttcattccactcaggttgaccagtacacctgaattcggaatcaaggtaagattagtataatgttatgcatatgcttatacatgtttagcgtatatgtgagttgccatcagattaaaatattagatatatgttcggcaaattttatatagccgtcagattagcatattagggcaacagtgaggtgtacatagagttgcaccaagataccaacagatatatgttaggctatcagttagtatggattaactactaccacatcggtacgactagattaccgagtataggctggattcgcggttaataaaacgttgtcatggacatccctgattaagttaggattatggtcaggtgtatgggcgcttggttataacccgggatttagtatgttttactatattatgcttttcttactgagtctgtctactcactgtgctatgtttatttgtaggtaagggcaaagccaaagttgaggaaccgtgaggacgagccaatgaagattgtacatgtcagggcgattaggcctggagcgtacgatcctcgggacagcagtgcttttgtagttagtcgctgggcgacaaatattttgtaaggaactagtaaacttttgtaaagtgttttgtaatcgggatcctgaaatattttctacgaaaaatatataagttttaattaaataacaaaattttaattaatcacgattttcattaacctc

SEQ ID NO: 342047 - DNA, 610 bp, Cannabis indica
aaatttttaatttttgatttttaggtctaaaattgattttttagtgtgagttaatttgcttaatatgagttaatttgaaagtatgtagatagcataatttgaaaagtttatttattttaaaaaatccgtgtgcttggtgatgttatattcttgactaatttcaattttatgccgtaaaataacatggacttatattaagtaattttctagtaatttaattgattatgtatgctaaatttgacttgtgaaaagttgtttggaaaattctagaacttgtttgcttgctatttgaggcgaaataataaattatgcatgactaggaaagtgatttaagcattttttggatcgattgtgcctttcaagccatccatgtaattttatcctagctatcctttttgagccttaacctattctttgttctacacatattgagcctagaaagataaacccatgaatatccacaatttaaccctaattataccataagtagatctttagtttggaagaatttggatgggaagtttgttgtatgtgtgtgaaaaaagtgtgaaaaagagaatataataaaaaaaaaaaaaaaattaggcaacaacttggaagaaaaaaaaaa

SEQ ID NO: 342048 - DNA, 607 bp, Cannabis indica
accccaatgctctaagtttctagagacaaaacaaggtatttctatctatgctataaactgatgtgttttagagaattattatccccctggatattaattctagatctactaaccatgtttgttttcttcttatttcagctccaactgcttaaacttggattgctatcctagcgagttgagtcggatggttggacagaagggtggagattatccaagattgaagatgaagctcgaaatctacttttatatttttgatttaattgtttcaatttatgaacaatttagtttcaattattggtttaagattttattccctatttcatatttatgcagacaattcagtttttttttttttaatattaataaagttttcacttttagttatgaattgcatttatgaattgagcttcatatttttctttatcttgtgtatgtcaataccaattatatttaaatgtttatcatgtttgtatgtgtttgtgttttattattgatacgaaatctatggtatattcatcacggcaaagagatcataccacataaatacttagaatttaaaattcaatgtttatgaataattgttaaattcttaaacaattattaagat

SEQ ID NO: 342049 - DNA, 511 bp, Cannabis indica
gcgaggcatttttgaatcgttcaactaaaataaatcgaatcggcaactaatgaaatatccaacaacgcaaggcacaaaatcgttggcttccatacgccacggaatggtatgtattaattctttaattgttaataatgtttttcccttataataaactaacttaattgtttatgttcgtataggggggtcctcttggagagcatgtagttgaagcatggaaggagatccaggtgaaaaagccgtctggcactttcgttaatgaattagctgcaaaagattatgtaagtgaataaaatgatttattattacaatttatattttatattaattatatattctaataattttgatttaaataggaggaacgagcagcttgataggaaaagacttgaacggcaatcccagagcgatacgtctggtactgaatctgatactggttattagtttgacgttttaaaaagtatgttaatttatataaaaaaaaatctatatatttatatatctatataaa

SEQ ID NO: 342050 - DNA, 760 bp, Cannabis indica
taaataaataaataatgatgaatgatgtgagttgtttattatttatttgtgttgaataaatagagatagattagataggtatcgtccatagatagagattatagagtgtgggtccacctttcctttttcatagaatgggctccattgcctttttcttttttcttcttctgagtttcatgttttatttttttattaataaagtattaggaaacttctgattttggtgttattcttacttcaatagttttattatttagagattttacaccacatattaaaatttttaaaattttttattttttttttattatagggccgaattttttttaaaaaaaaattataatacactctattaaattttcacgattatttcacatattgatgttttaattataaatatttgatcaaaatacaatatgttttataaaattttctttcatttttaataaatagtattttttttactctaaatattttacactattattaattcttctattatattttatttaatttcattaaaaaaaaaatagtaggatagctctatagttgataatagttgatatttagatataaattaaatatctttcatcttcttacattattaattagaaaattacaaaaaaaaatgaattattatataatataaaataaaaagtcttttattatatatgtattagcataaaaatagtgaataatatttaatttgtctcaattatcaattactagtagtactttactcattttacaataaaattgg

SEQ ID NO: 342051 - DNA, 1503 bp, Cannabis indica
aagttcatatttaggatgtaatgaacatactgttagtaaatctagatcctggtaaaacatttcccaacaaacgcttccataactgccccatttcaatactgtccgaacagtctccctcgtcgcacaaggactcccatacgtccatggactgatcctcaaggcgccatgcctccacgcatgttggcaggcccttgagacaagccaccaaactagcagcatatgttagacctctgtctctttccaacatgatgcatccgtcccacgcgcgtatgcaaactagcccacaaatgactacccgtgtcttctcgtgttaagactcatggccaaggcactccacaacatctcttggaggtttggggcatgtcccgtgcaagcggcataccagcaagccaatggaagtgtacctgttaacctcaagcagcttcttaaacgcactaccgggtcgacccgataatgtccatgagtactccaactcatggagacatatgagtcccctagtgatcctcatatgcatgtcccactagtcctactgactagtagtagctcacttagcaccaaggtgcctgtgggtggtggagagctgacaccagggtacccccttaaagagtattctaagcttttagccttctaacaggaacatatatgaatttggctctatagacatacggccaaaccgtaaaccaaatcacatagtttttccaaaccgattgcaccattgtatttgtagacccaaataaatggggaatactaagtcccgtcctaatccggacaatattaaagatatttacaaaaatgccactaccatacaaactaagcatcagcatgtacaccaacatgtgccaccacttggccaacttgtgggaatcacttagcttgtaatgtgtcatcttggcacgcacgttacacaagacctaccctttgaaatgttagcatagcacgacacgacatgatacgacccatatctttttatgggtcagcacgacataacccgtattgttgcgtgcctttcaaaatatgagttgggttggcatggtacacatgtaattacaacaatacccatatctgtttcggcatcgataaattttttaattctttcttttaatgattgcgtacagcaacagacgtagaatttaaattgaagagatttatacatgttgacgcaggatatttggtcaatagtcactcgctagattggcgagaggagaaatatgtttaagttagtaaatagagagacacaaaaaatttatagtagttcactcccaatgtctcgacggtaatggaactacgtctatttcgagtttttatttctcacaagttttacaagattattagctaaggcaagaccttcaatttctagagagagattctaacaccctactagtttagtcgtgctacagtgtttttcaaaattactgtgcaacctttgctaatcaaagggtttatcaaaagtgataaaatttaaactttaataaatatacatatattgtattacatttataaaat

SEQ ID NO: 342052 - DNA, 527 bp, Cannabis indica
atatgatctggatttaactgattctgtgtgtaaatgtaataaacatattaaaccattagcatgtaaaattcatgcaaacatcaatcacttcaaattccttatattgataactaatcagattgtaaagagttttatttaggacataaaacccaacagtcaatgccataactaatttaacagcctagcaaggttggccttagggataggcggggctaggctcgtgtctagggcccaatataaaaaaataaaaataattcattaggcttttattaaagtaaaattaagtgtattgtaaacaacaaatagtcatagcttagttggttgaggtgtatgacatattatagaatgtcatgggttcaaatcccataacactctttttcaatttttttatatatatttctgagggtcacaaaatttaattcgccataggcccatatgtaatcaagcttccaataagtagatctgaaatttactaagtaaatttcctaagttattaattcctcattgtgccactatagatttagaat

SEQ ID NO: 342053 - DNA, 478 bp, Cannabis indica
tgggttggcactatcgggctcaaacaccaccatctttcgcttgcagtcgatcgttgccccatacttagaaaggaaatccattcttaggattatgtcaaaatcaaacagttgtaactcaattagattgacggttaactcataaacgccaatccaaaaagataaatcgaatccgccaagtggatacaattaggtctcccgagggtaacagggtaccaaaccccgaagcatacacatcacatggtttatgaaaacttttaattactctactccgacacataagagtgagtagctactgaatcaaataacataaaataagaacaaccattaatggataactgaccggtcaccactgacggagtaatatcaggatcaacctgagtcatagtaaatagatgccccgggttttgattggtgttcttctttggctcttttattttagcctgtggacaatctctaataaagtggcccaccatgccac

SEQ ID NO: 342054 - DNA, 629 bp, Cannabis indica
accccgaagcatatatatcacatggtttatggaaacttttaattactctactcaacacgtaggaatgagtagctcccgagttaaacaatacagaataagaacaaccatttatagataactgacatgtcaccactgacggactagcatttgcgtcagcctgagtcatggtaaaaagttgtcctgggttctgagtaatactcttcttaggctcctccttcttcgcttgaggaaaatctacgatgaagtggcccaccatgcaacaatggaaacaagtcttggcccaatattcaccttgatggtgtttcttacattttggacactcaggataagatcggaatgaagatccgtggctctcacggccaccactgtttcctcaaaactttctgttaccccctgatgatccagaagcatcaaccttcaatttgtgatcagggttaccaccgtcggtccccttactgacattaccacttgaaggaggattcaatgccatggcggcatcctttccagtctgctcttttgttacatgctgctcatcctcttcaacaattaagtctagctctaccactttcttgtacaaagtgtcatgtgcagtggtaattttcaagtctcaactgattgtggcattcagt

SEQ ID NO: 342055 - DNA, 644 bp, Cannabis indica
tagttatgaatttttgaaaatcacaaaatatcagggtgccatcaccccacacacgcgcgcggatgagccgcattcctcagacgcgtgggcatcggacagacttgtgtccgagttttctcggtcacacatgggtgccttgtcagaaatcttcctggtgcgcgtgcggaatggctgcttgcagcctctagcgccgagaaacctcggcctgacaccctcgtgagcgcgcgcagacagtgtgcaatgcatactgtcagtaccacttaaaatttttttcgttttcttcgatttttcatgctatttcatggaattaacttcatattttttgtgtagttttgtattgagatatttactattcatatttcaattctaattatcagaattaaattaattaatttttttaatttaatttatgatattagtgtaatttgaacttgaaaataggtaaatatttaatttttggcttaattatctatcttatttttaaatttgattgtttatcttattttttaaatttaaggtcagatattatttttttaaaattattctatttttaaaattatttgaccttatttaaatttaaaataagataactataatcaagatattttgaatagatataagatattttgctaacttttaaattt

SEQ ID NO: 342056 - DNA, 572 bp, Cannabis indica
gttctcaactgaagcaaaaaacaatttgcgtcggtttataaatgaagcaaataacttgactatttgtgtctgctgttattacgtcggtttacacaaccgacacaaaatgtttgcgtttcattttacaactgaagcaaaagtaatttttgtagtagtggtgggggagcttacggtcgaggtggacaggttgaaggagaaggtcaatgccttggagacagtcggccttgagctcttcttcgatttctggaaggctaatccccgggccaactttgactacttgggcgaggctaaggacatgtaccttgagtactgcgaggcccagccaggcccaagttgcttatggtgggaacaaggcggatgcttcaacctctggccaagttgcttcaacctcttgtcaggctgctgatgcttctcctgttctaacaacagatcctcctgctgcagttggcctagaagaaccgaaccaagagcctgggactccagctgtttaaacaattctctttttatctcctttttatatatatatatcttattcagcctcagggccttttttaagacatcatgatcgacca

SEQ ID NO: 342057 - DNA, 529 bp, Cannabis indica
ttttttagtctatttttttttaatgatcgcatatgttatagtattttaagaccacctataaatttttagagaattctaaatagtttatagtgtaaaaataaagctcaaataattgcttaccatactttaaaaatagtcacgagtgtaataaaatatttaaaccttattttttaatatcataaattaatctgatttttttaaaaatttacatgtaattatagaaaaatacaacgtacacagtcatgaaataaaaaattggactaaaccctcgtcattgtgggtagcttaatttcaaccatttgaagaatgactcgcttaatttcaaaattgttagcatcaatagcgagtggtcttatacaattgggctttagaggcggtttttaagggttttcagcgtcgattttggtaaaattcgctactgacgctgttccgggtgatgttgtaggggtaaaaataaccgaagccatagggatcctatggttgtcggttgtttcatataaccgtacaccatagggtcttcctatggttt

SEQ ID NO: 342058 - DNA, 536 bp, Cannabis indica
cattgcatatattattgatatgattacagtttatttccgcatttcatatcatttatatatgctatattacatacactatatatatagtctaacatgaacatgttccaaatactacagttgtctcactaaaaatagcaattaataagctattttcaaagcatgggttgagcatatctagattacgtggtcaagggtatgatggagctagcaacataagtggagagtttaacggtttaaagagtattatcatgaagaaaattgaatgtgctttctttgtccattgctttgctcatcagttacagttaggctcatgggtgtggccaaaaagcatgatttaataggtaatttctttattatttattatcttcgatactcatttcataaatcaagttccaataattaatgatttttattttgtaataatataggtacttttctcactgtggtatcaaatgtggtgaatattgttggagcttcatctatgcgtcgcgacattcttcgagaaaaacaagctgccaaagtcattgaagcattaa

SEQ ID NO: 342059 - DNA, 677 bp, Cannabis indica
tataactaaatagaattacattaataaaaaattaaaatactaaaaaatattaatataacaataaacaattattaatagtaatactatatcatagaattatttttgagtacatatattacaattttgaataacattattaattttacgtaaataaatttacaaaatatatttattaaatgtaattattcttatatagaaatatactttgttaatacgagaacgagagttaaaaaatatataaataattacaattgataagttattcttagtctaaattggaacttaattttttttataacaaattaaataagtggcggacccaggatttaagttgaggtggggcgacattttttttttttataagtgaggggtgcatcttttttttcttttctacattgcataatatgttaaaaattaatctaaatttatattttagtattaaatatagtataaagtaaaaaaaaaagtaaacaataaaatatacttggttcaataattaagacattaaatataagtattattggtagatgttcaaaaagtaaaataaaaaaattaaaagtaaacatgattagaactcatgacctcctttacatttacatgtatgaaatgattaccattataccaaaatttattttatgtgtataaatataacttttatttataaatatatgttgtaa

SEQ ID NO: 342060 - DNA, 562 bp, Cannabis indica
tttagcttctcaaaacacaatacttaattacaattttccccaaacttatctaaaaactcatggtatagttagggcaaagaaaaataataaatgagtcaattttttagctcaaaaagtgtgcaacaaaagaactttcggtttaaggctcaaaaagggaataattaggataatcacaatataagttagcttgaaaggcacaaacattcccaaaaaaattgcctaaatcattcttcaaagcataagacatgaaggatttcacctcaaaggccaaacaatgcaagttctatcaaattcaaattatcatattgccaattctagtaaagcatatataataaaatccaacatattgttggaatatgttttaccaggatctagatttactaacaagtatgtttcattaacatcctaatatgaatttctaaaacaatgaaattaaacacatataaagtttcaaaaaatcttacattaggtgcagcggaataatatgtctccttccactcagatctctaacccttgtatcctgtctgtcgcagagtatcaccaagatctgagcccgaatgtc

SEQ ID NO: 342061 - DNA, 824 bp, Cannabis indica
ttctatatgactgagagtgcagttccaagttctatgagtggatgcaacaaggaattaataggttagggaatttacttggtaaattctagtttagcttattggaagctcggttgtatagcccaagggcccccatactagttgagaccatactactttcaagactcagataatttatttcaattaatcaattataattctaaaattagactatgtctagtttatgaattttcactaagcaagggcttaattgtgaagaaaagagattctaggtcttatttattaattgaaagactttattaagtctaattaataaatatattaaattggaattttatttgataattaattttaacttttaattattaaataattagttttggcatttaaatggtcagaattggaaaaaatggcatttttgagaaaataaaggaaagattgtcaaaagtggaaaaactccaaagtggggtccattagtgtggccggccacttgagtggtaatttccacttaatttttctattattttaatgcgttataaatcctaacctaaacctaagtggttgcctataaatagatagtgatggctcacacttaaagatgatgaaatttcttgccttcaagaaaaattgagccatctattctccttctatttttgaacaaaccacttctcttccttcttcatattgttttcataccttgagtgatagagtgagtgcccacactaatgggacattcgtgctgtgaagaatctagaatcaagagaaggacattcgggctcagatcttggtgatactctgcgacagacatgatacaagggttagagatc

SEQ ID NO: 342062 - DNA, 586 bp, Cannabis indica
atgcagttcaacgatcttttatatcttttgaactctagattatattcataactccacaagatctctataacacttaggggtggaaaaagctattgacatatgtagttcattttgaactctagactatacccaatacaccacagtatctctataacacacatattttgattagacatagatgtaatataatgaaaaaattagcaaatcattagaacttattcttgatcttgtttttttgttccaattaatatgttactgtagtaatagaaattgataacaataaagtttttggacatagtatcacagttacttatttaagtgggagaattttaaaattctaagcccatctttatttgaatgacacttatgatagcttactatgttatgatcatgataggaactttagaatataactgagaaagtaaatctaaccattcatatggatagaaataacttatcagaatttaaggataagataggcgaattttgcatagtctattcaaataactaaggcaaaaaattccctaatccttatgaaatatttaatggtatctctaatgatcacttaatcttaagcaagtatttt

SEQ ID NO: 342063 - DNA, 584 bp, Cannabis indica
ttaaaaaaaatataaaatataagatatcatgataaagacatgagtaaactaacaaaaattatacaattaataattaaaaacatcaaccaattatcctaactttaatgttaaaatatataatttaattcaactattatcttaacttttttttatacgaaggtgtcacataagtaaaatattcttcgccaatcaaagtatgcaagaaatttcaagaagaataaaaaactatatataatacttaaacaaaattatccattactaaatatatacacatacactacacactcccttaatacacccttcgtacgtacacaattaatcaatttccttattatttttcttgttaatttaataatacataaactaatcaaataatataaagtaacaaaagcatacaatgtttaaaatactaaaatcaattaaagagcattcatcatcgtaagcctaacgaccaaggtgttgtaatgaattgatattactcctatgtgtatgtatattagtagcttgaagtagagaacttaatcaaaatcaatattgcatatagcttaaatgattaggattttcggtctctttactttatttgg

SEQ ID NO: 342064 - DNA, 809 bp, Cannabis indica
attatttaaataatttttataaaatgatcataaaatttaaaatagatatattttaataaaataatccagatagttttcaaaaattaatgagagactttatcaactttcaaaagtttattattttttttaaattaaattataaaattagataaatgatatttatttattattttattttactagatatttaattttatattttaaaaataacataaatttgaaaagttagttgataatttggaaaagacatttatgtttgatataaacttaatttttaaattgtaggtttaattttaaattaattatttaataatttcaaaataaatatttattcattttggatttttgaaatttgattaattaattatttgatttaaattaaataaattttataactaattatccaatgttgttacatgtatgttttatttattgtttattcaaacttgttatataaaacctattattatttatctaaattgctatggttaacttattgacaaattcaatgatctgactttaaccatagtccaattgtcaatagatcaaataaataatttgtaaccctccctcacataaacaaccccaactgtgaaggtccatttgccttatttaaataattgtaataggttaattatactagtttaacctaattaaaattgattagtaacataattaattttcaaaatgtataaaatttatttttcataagattatttgaaattactttaagaaaaataaacttagtttaatgaaattaaatcaagataaactatatgtatttttttgatatttaattaaatgaagaa

SEQ ID NO: 342065 - DNA, 589 bp, Cannabis indica
tttattttttttaaaaaaaatatcattttaactgtcactatctcaaaaagaattaaagaaaaaaattaaaagtatgaagttgtaacaacaaattctaatcaagttgtcaaaactaagtaaagaaatcgtaatacaaaaacatattaagttgatattgttttgtatattgcaattaggtcaatattttgttatttttctgttgggaaaattgtggcaaaagaacctaaaaagtttactttgatgcaggataagttcccaaccttaaaaaatagcagcaatagtccctaagctcgagatttttgtaagtctgttgctcctctttctaacagatttgttaattcctccctaaaatataatgtgttgatattaaattgtggcataagtctctaaaaaatttactttgatacagataagttctcaaaaagtttactttgatgcatataagtcataatctcgaaaaattgtggttatagtccgtaggtacccaatttaataactttatttgtagttcttaaaattttcacgtgtaaaaaatgtattggttcacaacgtaaaaattatttaaataataaaaaattattaaaaactt

SEQ ID NO: 342066 - DNA, 633 bp, Cannabis indica
ggattccattggggtgggagcaaaagatgctcctaaaaaacctgtttcaattaaaagttgaagggtaaaaggacgttgggagatagatattccgaaggaagaacgacctatctccaatcccaagaaaaaacgtaaaggacccaggtctttaagttgaaacacagagttaagttgctgtttaaaatctgaaacaacatcatcattattagaggtgattacaatgtcatcaacatagattaatagggcgagaaaaatgcctttatcatttttgatgaacagtgtgtgatcagaaagagactgtttgaaaccagtagacagaagataattgctgaattttgtgtaccattgtctagaggcttgtttcaagacataaagacttttggttaactcacaaacaacatttgggggaatttgtcccttgggtttatacccttttaggagtgtcatatagacagtttcatttaaatcgccatgaagaaaggcattgtttatatcaagttggtacagagaccaattgttaatggccgcaatggcgagcatgagttttaaggtattaaactatgcaacaggggcaaaagtgtgaagataatcaataccttattttgggttaaagcctttggcaactaatcgagc

SEQ ID NO: 342067 - DNA, 644 bp, Cannabis indica
aatatttttgtaaaaattatcccatattccagtatttttgtaagtttcccaaacagtacttactctttcaaacaaatgaagaaaataaaaaaaaatacaaatacagaaatagaaaaaaataaataaataaatagaggcaagaaaatcaaggaaataaatttaaaaaataattagctcaatagaaatttctatatgaaaaaaatgaaacattcaaataatattaataataaaaaaaactataaaaaagataaaattaaaataaaattatatgggcttttatactttcggtgtaaaattatgactttattttttttcttttgtaagaagttattttatgagaaaattaaaaatatgagaaaactgagtaagggtaatcaaataccaacttaaggagggtaatccgagtggccagggtagggatagatgggtctggacaaaaagaatcaaatggtctcttttcaaccaagtctgcctatcttattcaagcccttgattgggctcctttgtgcaacattaatgctccggcattttagaacaaactttggaactcaaagattttggagcgacacaaggtccattggtggagtatcctttccaatgctctacccttaagacgcccctcttgctaagagaatgggttttga

SEQ ID NO: 342068 - DNA, 1229 bp, Cannabis indica
catgggaaagctgaaaattaaaaacgagggaattgatgcagtcaagaaatcaagattgcgtgtcttggccaaggcttttgagaatctgaccatggtggaagatgagtcagtagctgaatttcatgcaaagttgtgtgatatctccaatgaatcctatgctctagggaaaacctacttaaattcaaaattggttcgaaaagttcttggtgttctccccaaaagattcatgtccaaagtaacctcaattgaagaaacgagaaacattgaggaacttgatcttgatgagctcattgggtcctttcaaaattatgagttgtcactgtccaggtggaagaaaaccaagaaacagaaggatatagtgaaggacaaatctgatgcagtattgcccttattcatcaagaaaacaagaaaccggttctagaggaattgaatggcaatactgacgaaactgctaccttgttaacgagaaactatgctaaagtcttgaaaaagaactacagaagaaattttccagctgataaagaaaatactctcaagaaaaacaaaggtggaaacttcaaacaaggagaaccatctactgatcaaaagaatcgaggattcaagtgtagagagtgtggcggatatggccacatccaggctgagtgtgcaaacacactcaaaaagaagaaggcccttgcagcagcttagagtgatagtgaagaagaaaagaactccactgccagtgaaggctcggaagaggataagcaagtactggcgttcatggcccaaagttgtcaccaagttgagcctgaagatgatgcagtctccacttcattagaagctgatagcgtaggtcgacaaaatgcatatgaggaaatgttttcacaatgggagtacatgactaaacagatcagaagtctaaaaagctctctagagcaagtggagactaaaaaaggaaacttagaggacacggtcaaaaacctcaacaaacttgatgaaaggagaatgagatctataaactcactgctgatctgattagaaccaagcaagctctgcaattcattccccgagacacaacagctatcaatcaaaacctacagctccagaagccttatggtgatcgaacctccttaggctataagatgttgtataaacaaggtaatgacttgtcagttgagaattcactaccctcaaatgtcgatccaacaaagaaggaagatgggttaccagacatcccaaccaccattaac

SEQ ID NO: 342069 - DNA, 581 bp, Cannabis indica
cttgcaacacgctgcacacatgctatccaacccaactttgatgtcacagttcaactgcacacatctatctctaatttatatttaatatactttctatattatgatttaatgagctaattaggataattaggattttttttcctgaactttaacatgtactaaatcatatcactaaatttttttgtccgttaaatcatgttctccaaacttttatatcaaccaaatcatacccctcaaactttaatatgtattaaatcatgatccatctatgttagaatttttttactaaaattagacaaaagtttttaaatttaacaatctcaataattcaaggaaatttttaacgactttaaaaattcaaggaacataatttagtacatatcaaagttcaagagaaaaaattcctaattaaccttatattattgtacccaaaatacttcacatacttttatttatttatttaaagtattcttataattttcttatatgttgtgtaattttcacatacttaatagccgtatacatgtatgccttttaaaatatgagtaaataccattttggatcctgtgttttgcaaaagt

SEQ ID NO: 342070 - DNA, 1074 bp, Cannabis indica
agaaaaccacgcgtctggccgatacttctgatcctcaagtggctcggcttgccactctgcccgacgccgaacaggattcggccgtcccgatggaggaagggcgtgagggggacgctgaggtccaggaggttgaggagctggacgaggtacgtccgggcagtccttccgaggcggagggagaggaagaggttgaaccccctaactttggagagtacaacgaggcttggcagccactcgatgctgacggagacgtcctggttgagggcgtggactacgtcagtgaggagcttgctgaggcggttcctcataggaggcagggtgccttgggcgccaggtgggtaagtcctccgtccaagattttggaggcacgccttcgaactctcgaccaggacgggtacctgggcgagctggactgctacattcccgcccacgacaatcgtgccacaaatcgtaataagggaatgtgcgcctggtcgagggctcacgaccagcaagggtcgctgatgcccttgcacaagtacttcaggaatgtgacagacttctttggtctttgcccggcccaaattactcccaagggcattaagtgtttgtcctctctctcggtcctctacacctcccaaggatgggatgctccttccccccacgaggttgcctcgttctcttacttgaagtctacccccaaggaaggcaggttggggtgcttctacttgtctcagcaaggcttcaagtggttgagcggcacggatgacaaggctattaccaaaatagggcgttttgctgatgagtacttcatggtgaaggatccgagcatcatccggactcggtttcagcagattttgacatatcactgtcctcccctcactcttgctcttagggatagagcttagaaacttgcccggttgctgggggaagacaagaatatcatccagttgacctccgatgataatcaggtgaagtatgggctttatcctgaagacttttctcctaagtctgtggcagggaagaagaggaagtttggtgctggccggcctgaacgagctcataaggaggatgagctcattcaacttaagcgtg

SEQ ID NO: 342071 - DNA, 779 bp, Cannabis indica
tagaaaacagacgacttgttgaagttaatattttgccccgaagccatctcataagtgtacaataattctttcacattatgtgcttcttcctctgtagctttatagtagatgtaactatcatctgcaaaaagcatgtgtgaaataactggtctcctctagcaattttgaagcccgttattaaaccactttgttcatagctacgcaatagacttgagaacccctcagcacagaggataaaaagatacggtgatagaggatcaccctgacgaaggcctctttgtgcagtaataggacctaactccttacccccatgggaaatcatgtaagaaacggtacccacacaagacataactaaattgatccatcttccatcaaagcccatcctctcgagcatggcccgaagatatccccattcaagacggtcgtaagccttacttatgtctagcttgagcgccataataccatcacgaccccttcttttccttttcaaatgatgcattatctcataggagatcataatattatcggatattagacgaccttgaagaaacgcactttgagtatccgatataatggaaggcataaccactttaagcctattagcaatgacttttgaaacaatcttataaagaacattacaaagcgcaataggtcttaagtcacccatatccataggttgtttcttcttgggtattaaaaccagattagtattatttaaacccacaggaagatttccaaagctaaaaaaattacgtaccagttgtatgacatctcgatta

SEQ ID NO: 342072 - DNA, 1982 bp, Cannabis indica
gagaagaagacgaagaagatagaagaaagaaaagaaacgaaaaagaaaaaaaagaaaaaagaaaaaagaaattaatttttatttatttatttatttattttcatttttattttttaaaattaaaataataattaggaccaataatatttcgacacgtggcaagaaaacggctcagttaaaattaggactaacggacaaataaaaagtgtgaccttgaggactattgccgctactgttggaggttggggactaatctgcatcaacgtgaactttttggagacttttgccgcaaatttcccaaaaaataataaaaataagaacaaaaatacaacctcaaacaagtataagatatcataaaaggaataaaattcaaaaacatacttatacatatacacaaattcttagcagataggagttaagagactcgagtataaaagtaaaattaaaattcacagtatccatctcaatgatttccaagaaagtactctttacattccctactgactgactgtatgcttgtaataatttaaaatcaattacaacttctaaatttatccaataaaataaacaagtatctatctattctattcttaacataactcaactaactctgccacttatttggaattgacagttatcaattaggtctttaataaccagacaatatatgaattttggtaagtattccatctataggtggtgacaagttttattatcaaaatgaactaagcaagggaacacttgagtaatgtccattttaatggattgaagcacacatgaattatttttggactcatacaccaaggggatcatgttttcaagaagctaaagaataaaagtaccaagaacctataaataacattggcattaatttcttaagagctattaataactattgcgcaaaagggatcctaaataaagaaaaaaaagaagggtttacatttctgagttcatcattcttaagctctctcccctaattctcatattcacaaccaaagaaaactaataggaacttgcccactaacaaatggtttttacagatgaaaaagaaataatagagtgggagaaaataaaatgatattgatattccagggaactggaaagccttgttctctcctacaatttctgcgaacccacaaatgaactccctccctctatttattctacactaacaaaccctagctaggtccattactgatttagaggcgcgaacatgtatttttttattgtggaaaacatataagtctgtatagatttattatatacaatttcaaatcaaactaacaatatgaaaaaaaaaattatgaagaattaatgaaaaatatcaaacagcaaacagggtgccgtaagcaatatatggtttgaaggatgaataaaaggacgttgatgagatatggcttgaaggataaagggaaaacagagagagagagagagagtcttaccagagagatgttgctgcttgcggttggggcaacgacaaaggcagaggcttgctgctcgcagttgggtctcgtagatgatgaacaaagatatgaaaaatcaaaatgaaaccaaacaaattgatgtgatcaattgagaacgacaaagaacagtttgagagtgagagagaggaattggatggggtgtttatcaaacagttcaaaccgcccgcaccacactgcaattctttgcggtacggtcgcagtttgaattttatctaaactgcgcggtgtggtgcggtttgcagttttgaattgttaatatgcggttcaaaccgcaccgcaccgcaccgcatattataaaaataccaatttttatatgggaaacttacaaaaatactggaatttgagttaacttttacaaaaatactgtcacacggaatttttttaaaaatactatgttttataaaacaccagtaaaatacaaaacagaacaactcaaaacaacaataggataataaaaaataccagtagaacaccagtgaaacttaacacagtatactg

SEQ ID NO: 342073 - DNA, 1218 bp, Cannabis indica
atgcatatacactaacatgggcactttagccatttcattcacatataaatccaatataatttcagattattcatcaataataagaatgccaattatttcaatcccaaatgaatttcaggcccgaacccggttcggcccgaaacacacggttgtgactataccgcgccaacctgtcagaacacaactgaaaagacaacacagtcatactatataataatatagttccattaagcacgtaattaaattaattccatcattttacccttctcgggtcataattactaaaatgcccctggatcaccaacagggtcttaacatataattaatcaaattaattcacatatattgaattatataataatataattcctcaattattcataattatctaattagggttttgctaatctatttcttaattatagggtattacaattagtaaaataatatgcatatgtggttacatgtttagcgtacatgttagttgccatcagaataacatatcagggtatcagcgaggtttacatagagttacaccgagataccaacagatttatgttagggaaatctatagccatcagattagcatatcagggcatcaatgaggtgtacatagagttgcaccgagatgccaatagatatatgctaggctatcagatagtatgagttatctactaccacatcagtatgactagagaactgagtatcggctagattcgcagttaatcatactttgtcgagaacgttcctgacacagttagggctatggttgggtgcatgggcgcttgattataatccaggttattgctatgttgttgtttatgctttttttattgagtgttgttgactcacagttgctatttccatgtttaggtaagggcaaggctatggctgagcagccgtgagagcgagcaaatggagattgtacatgtcggggcggttaggcctagagcgtacggtctttgggacatcagggcatattttgtatagtcactagccgataaacttttgtatatatacagtaaaacttttgtaaatgggatcccgatttattataagaatattattttagtgtttataattaattaagttttaattaatcacgatttttaataaactcgtttagtagcaacgagttgcatagtcagttaaaaatcacgttaacatgcctaaaatagttagggtgttacaattctgtatcagagctgccaggttgtc

SEQ ID NO: 342074 - DNA, 1463 bp, Cannabis indica
cacagcacagttgtgccaaactgaccttataattggatatctaaatttttgtaattagattagattggattagctcgattcaattggattgaattagatgttacctaccatttgtcagagtcatataatttagtaatttttcgacaatggtcatttagcttaaagtccccattggattgactaaatgtaatccccttccttaacttgaatcaaaagggctgcagcgatgttgatggtagtttgatagatataattgatctttggtgtaagtatagaaatttgaaattttattgtcagcatagagatgatgcaaatctacctcgttattatttagttaagcatctctcatgtagaatgccacgttgtcctttgttttgtggctcgtcattatgctgagagatgaattaatttttgagaaagaagggcagaaatacgacatgtagtttataatattagtaagtatttttgacataataatattagtaacttaataataataagaagaaaagtaatttgcgacatcccattaagaaaaaagtaatttatagtataattatttatatttaactttcagttgcagataaaaataattatactaaaattattctagactttcataagtagttgacattatttataaggtaaattgtgacataaatacttaatgctttagattttatacatttaaatacctaatgtttattttgagagacaaaaatatctaatgttacatttctcctataccgttactaccacttccgttaacttatcataaatataaacacgtggatgactcaaatgcattacatgtatttattttattttaaaattaaatatttttaatatcaaaaactaaatactacttgttgaaaaaaaaagagatgcaatactaaattaccatagctgagtgaaccaatgcaatatatggaacatgattatcgaattgaagtactaatattatgtgaaatttgttatgagaactgatttttttttggaacaagtagcatttagtttctaatattaaaaatattaagttttaaaataaaataaaaataaatgtaatgcatctgaaccctccacgtgtctatatttatgagttaacggaaatagtcgtaacggtgtaagagaattgtaacattaggtatttttgccttcaaaaataaacattaagtatttcagtgtataaaaatctgaaacattaagtatttatgccgcaatttacccttatttatatatcaatttttattagtatacttaaattttataatacataaaaattaatgacttgagtaattattatgtgattattgacttaacacttaggtgacgtttggttgggaggaatgaaaatataagaataggaatgggaatgagaattggaataagaatagaatggaatcaaatttaaaatgcataaaaaattggttaaaaaaattattaatttttttcaaatcttgcattgg

SEQ ID NO: 342075 - DNA, 717 bp, Cannabis indica
tggctcttatacacgagtacgtcactctagctgcttcatggaatgacgactgtctctacaaaccaacacgagtgtttccagtgtgttttgtcctcactcatacacttcataggaaaacttcccaagagatcacaaattctaaaattacccaaggtcaagcatgcttaataaccgtggagttcttttgtaataggctaccgaaaaataagatgcgtcttgctgatataggtagtaccaattaatctatctaagccctcttcaactagctacacaatctcagactcatcacacatgaccttacttatatgatgtaggattgtacagctcctggtctctttccctttcagatcacgggactctgactgtcacaatcaccccccttttgggggtctgacatcctcgtcaaacacacttccagctaggtcaaggctttgataccattttgtaatgtccccgcttcaagcctttattaggcccttacacccacgaaatgatggctcatatacacgagtacgtcactctgactacttcatggaatgacgactaatcctacaaactaatacgaaggtttccagcgtgctttgtcctcacttgcacactttttaaaaaaatttcttaagaggtcacccatcctaaaattaccacatgtcaagaacacttaatcgtgaagttctttcgtgatgggctaccagaaaacaagatgcaccttgttgatat

SEQ ID NO: 342076 - DNA, 1519 bp, Cannabis indica
atctaaattgttctttctgattttccatcaatctgagggtaaaaagttgtactgaactttaaattttgatgtgaaatttggatctctgtcggaaacaatagatttaggagctccatggaggcaaactatttccttcacatacagttcagcgtactgatccactgtataggtaatctttactggcagaaaaatgagctgacttcgtgaaacagtccactatgacccatattaaatcatacattcctgtggttctaggcaaatagcccacgaagtccattgtaatatcatcccaattccattcaggttgggctaatggttacaataatcctaccggcctctagtgttcagctttaatttgctaacaggttaaacacttagatacgtattctaccacatcttttttcatcccacaccaccaaaataagattttagatccttatacattttggtggttcccaaatgcaacgaataaagtgtagtgtgggcttcatcaaggatctctttcttgaaatgcccgaccatgccacactaaaagcatgtcttccggttgcactctcccggataatgtttcttacaacgtgggcactcagggtaagaataaccctggcatccacttctgccttggttccctcaaaaatgcttgctctgtcccaatccaccagatgttggggtagcctttcttttcttttataaaatcaccaatatccctaccatatgcaggagtaggaagagtgggagttccatgtaacaccatactagtctaggcgtgttaacgtgatttttaacttaattgtgcagcccgttgctaatcaatgagtttattgaaaatcgtcaataagtaaaactttaattaagtaattataaacacaaaaataacatatttggattaaatcgggatcctgtttacaaaaatatttacaaatgttttactgttcaaattacaagggtttgtcactcagcgactatacaaaataagctcagctatcccaaagatcgtactcttcaggtctaactgccccgatgtacaatcttcatttactcgatctcacggctgctcaacccaagtcttgcccttacctacacatgcaagcaaaaactgtgagtcgacagactcagtaagaaaagcattatcataaacataaacatatattcagactacaaccagacgcccatacacttaatcacaatctactaactgagttaggaacgttctcgacaaagtatgaataactgcgaatccagcctatactcagtactctagtcgcactgatgtggtagcagttagttcatactatctgatagcctagcatatatctattggcatctttgtgcaactctatgtacacctcactgatgccttgatatgctaatccgatggctatagatttgcctaacatatatatgttggtatctcggtacaactttatgtacacctcactaataccctgatatgttattcttgtggtaactaacgtacgctaaacatgtatatacaaatgcaaccattatactaatctta

SEQ ID NO: 342077 - DNA, 560 bp, Cannabis indica
aatgtctaaaacccgtccccacaatactaacatactaagttgtgatttctactgagccaaacgccgcgttccaaaataccggacaccggaaatgcgaaatataaaaactgctgataacataattatgcatatctgaattcataataaataactgctaatttccaaattaactaagcgggctttacaaaaacataatgataatgaaattattttatatagatatgaatatttattttttaaagaatgcacaataaataatttttaatattttattaaaatttactaatcaatagcaaattatatataaaaatttagtttttaaaaggtaaactaattatacaaattgaggatttagtttgtcattaatcgtagtataatagataacatattattatatttaaaaaaaaaataattgtggtaaaaatactaaatatttaaagaatataacgattaaatacccatttttttttattttgcaataaaaatgtttaaatgtagttgatcattaatatttaggataaataacggtgtaagtacctaaaattttaagtttgtaagtg

SEQ ID NO: 342078 - DNA, 888 bp, Cannabis indica
ggaatgtccgaggagccaataaccaacaaaaacaaaggctaatcaagcaatttattagctcacaaggtgttggttttgttggcctcctcgagacaagggtcaaagctccaaaacttggaactttgtacctaaatgtgtttgcagggtggtgcttctcctctaatattgaatggcatagaggggggagaattgttatagcttggaacccattgagatataatgtggacattcttaaatgcacaagtcaacttatgcatttaaaagtgtccactacagatgctcactacaatagctttttaactgttgtatatgcctacaatgatcgaacagggagacaagagttatggaaggatttgaatggaatagcaaaaaatgaaagctggctcttgatgggagatttcaatgacatcctggctaaggatgaaagaattgggcacaaggtgaaatatcaagctactactgatttcatggattgcattatgcaatgtcatttggaagatgttaaagcaacaggcagtttttttacctagactaacaaacagcaaggggatgatcgtatctattccaaaattgatagagttatggcgaatcaatcttggatagacaatcaccctactgttggatatattttaccaggatctagatttactaacaagtatgttccattaacatcctaatatgaattctaaaacaatgaaataaacacatataaagtttagtaaaccttacattggatgtagcggaatataatgactccttctgttcagatctctagcccttgaatcctttctgtagcagagcatcaccaagatttgaacctggatctctttctctccttcctttgatgctgattctccttcttattggttgattttccacaatcttaca

SEQ ID NO: 342079 - DNA, 731 bp, Cannabis indica
tgcattgcacgtaacatcaaccttggtatcttttacaatatgtttcattaaaaaatatatatatatatatttctttttgatagaaatatatatatttaaatatatgtataaatatatgcacaaattatgaaataccgtgtgtttctctttagacagaatatttaagacattactacactagagtaaacactttattacttggcaaacaacatattatatgcattagaagatacatttttataaagaatgatagaatattcttcaaccaagaattaattatttacatgaattgaatatacataaaaataacttcacaaaattactttttattgtcttaatcactttttattaagaaaatttaattaaaccataataataaattaaattatatataattatttcttacattaattattattaaattatatagtacctaatataaaactaaacatgcctgccttgcacgtaattttttttctagtacatacatatgtgttgatataatctattagttttatcattgctcactacaagaaatatcacttttaccagcacagttcactactgcgctggtaaaaggaacttttaccaatgcatttcgcaaactgtgtacttttaccagtgcctttcgcaaactgcgctggaaaaaaagttaaagtcttaccaacgcacatttgcagtggctaaaatttaatttttaccagagcatttacgtgctgggaaaagttatt

SEQ ID NO: 342080 - DNA, 1419 bp, Cannabis indica
aaaaaaaaagtaaggaaaaggggaagataaactataactagttacaactatatgttgtaaacactttatgtgaaatgggtatatattaattataaaaagtgatttttttaaaaaaaaaatagaaaaggaaaaaaagaagttgatatgatctgattgtagaagataattgtgttgagagagagatagtacatagaaaatgaacaagaaacaaagagtggagagagaaatatagacaaaaatattcatgtaagtctaaatcgtaaaaatgtaattaatgaaagtttaaaaagtaatgatgaaatgatgaattgtacaaaagaaaaagatacggagcacaagtaaaaatgtaaaatactttacattttagtcatgagttgtaaatttccctgaaaataatttgtcctcagatcttcatctatatcaaaaaagagacaaatcagaaacgttaaaacttgcactcacattatacttaccttgaagggctaatttataagcattgtcattgatcttttccaacacttgaaatgaccaatcaccccttgaaagaagtttagattgtctttgaacaagaaatcattccttcctcatatgcacccaatcgtcaagttcaaataaaactttatttcgccatttgctggcttgggctgcatattgttcaatccttttctcaatgtttcatacaactttctcatgaatatgtataacaaaaccagctttcccttttccatctaagttaacacgctcagtcaaagacaacggaattaaatccaaaggagttaatgaattaaaaccatatacaatttcaaaaggtgaaaacttagttgcataatgcacactcctatgatatgcaaactttacatgtggcaagtaatcttctcatattttcattgttagggtttatgccttatatcaagcattcaatggataatatactatacaatatatgaaatacaattataagacaaataaatatgttaattatagaagtataattaataaatatttgaaaattctttacgcacatataaagatggtatgattttgtaaggtagtacaagagaattaagatcatacaatatgaataaaataagtcaatagagtattaaagtatgaaatctttaatatgaaattaccaagtacggtttgctatgcaccatactctagtgcgtgtgattttgattcaaatcacatatatggatagacatgtggtaaatgtaatgtgtataatttgattatacatgggtggaccgatatataagaacatatttcatcaataaaccatttatcatgaaagagctattcatatcacaatgatgatcattagtagatcaatctcaatcttgaatatacatgtaatgctctatcccacagggacgtcacatgtgtgattttataaactagtttaatactaatagatta

SEQ ID NO: 342081 - DNA, 1017 bp, Cannabis indica
actttcttatctaatgactatgggatggtccactcctaatcacttagaatagctatcaaacatgcacacgtttgttaacagttctagctttcttaaggtcacgatcaggacatccatgattctagtaacggtttacactaagtacataaccattccatcattctgaaattttcctatcactagggtatttcgctagaaggacttaggcaactgctagtaactaatcatagaccttacactatcatcaatatgcatatcgaatttcttggaaggtaagtttgaatacaattcaaacaattcagcttaatgatctttgaactgcataactaaatatttctccacccctatcaattcgcaagatctttaaccacttaccctactatttttcaacactgccagaaattcatgaaatttctcaaacatttcaaatttcttagcgtaaggtaaaatcttcagtgatcgtcttaagaatttaatgataactcatatccacccctgaatgtacatccatatttgaatatagatgatcttactttcaagttgacataagcatattgactctttacagagaatgaccttgataaaactactatgaacaagatgaaaatgccttagatatataataatgtggttgtggacttttgatgacttagctctagttacaataaagagttcttagaatagttcaagtggatcgtggtcacaaaatactaaactcaaattccatacataaacatacagtttgaatccattgatagaaaatggatattaaaaacttgtgaaagtcactgtattgtccaatgtatactaggaaactaaaatttaaaatttctatttggaatctacaatttgaagtcaaagacttaaatttataccaaatatgtcttgagttattattctctcttggaccaccactactaatctaactctcagtctaatttgcctaaagtaagcatatacaagtaggagatttctaagatcgaggatgtattgttgggtattgtgccctaaataaaa

SEQ ID NO: 342082 - DNA, 564 bp, Cannabis indica
caaagttaatgggcagcggttaaagctctacttgggaggtcaatttcatcaagccaagttccgccatgattctggcgccactatgaagaactcgatcaacgtctagctgtgcgtacgattaaaggcagcgctaattgggaggcaacccaagtgttcgttatgatttagatgaactatttttatgttttagcgttattttctttttctcctctcttaagtttccttgttaattttccccctaaaaaaaacccaatagccgcggcgaggggatgcgtggccgcggccataaggtccttacagaaagtggatttttctgggcctatctcgccgtggcgagcccacttctagccgcggcgagatgtcagtcacgggatttaaacccaaatttcaccacatttcaaatttcaaactttgtcaaccctaatctctccacgccgaaccccattatctactcccatttttcttcttcaaatcccattcaaaacccctttccatcaaatctaaccataaactttcatcctaaatcatcataacccttattctctcatcaaacactcttttcct

SEQ ID NO: 342083 - DNA, 623 bp, Cannabis indica
tgcgaatgcgaaatgggaatgggattggacaagtgggaataggaatgggaatgggccagggaatgggaatggatataggagtgggtcgggaattggaatgggaatgggattggcaatgggaataggaatgggaatgggccagggaatgggaatggatataggagtgggtcggggaattggaatgggaatgggaatgtgaagggaatgggaacgggaatggggatggggatgggaatgggaatgggaatatgaatgggaatgggaatttgaatgggaaaggaaatgggaatgtgaataggaatgacaatgggaatgggaatgggtatagaaatgggaatgggctaggtaatgggaatgggaataggaatgcgaatgcaaatgggaatgggaataggaatgggaatgggccagggaataggaatggaaataggagtgggcggggaatgggaatgggaatgcgaagggaatgggaatgggaatgaggatgggaatgggaatgggaatggcaaagggaatgggaatgggaataagaattggaatttgaatgggaatgggagtgggaatgggaattggggtttagggtttaggtttagggtttacggtttacggttgctgttgggttt

SEQ ID NO: 342084 - DNA, 603 bp, Cannabis indica
tctcattttcgtgagagggttcttgctaatcattttgatttttcgggggtatctcactttccttaggttgttcttctcagaccttttcctgtctcctacttcgtgagccacgatgtctgcctcgcagtcttctcactctaggttcaggttgattttgagcattcgtcccctgtgccgccctggccgcgactgtatcacactccaattcagcgttccgacgatatgcctcttctatacgacatcttaagcggcagctttctgcgtcataagtgccttctcccatagattgggcacctccgcatcgggctcttcatccctcgtcccaggattctggccattcccatgctgagttctcctcgatcttgttgtccacgtactaggacgggttaggttctccttgaagtgatgtccgaacgctggggccaccatcaggttgggtcctcctagagcgggtggtccgtcgagactgtgggttggtagaccttctggagcccatgggctatctcctagaacgatgatgagtttcttcatgtggggtattaaaattttttggattttaagcaatgaatgagagggtttttcttcaaaaggaaggagggtttt

SEQ ID NO: 342085 - DNA, 1135 bp, Cannabis indica
aaagaaaagtaataaactaatcattattattattgttactaattatctttttaaagaaaagtaataaactaatcaactaagccacatccataatcaccacttatgcaattgtatattatggaaatagcattaaataattaggaaaaattctcatttatttctaaataggcatcaatgaaactaagttaaggaaatatgcatgcttatgttgttggtgctgcttttagttaaaactcatcacatgccaagcttaagggtatttttaaaaataactttcaagtttccttccatgacacttattatgggcatcaaacgcatgttgatgtggcatatggacctaaggtaataatttttctctttaaatttttgcttcacattggggacatgtgaaattttagtttggtggaggagacttattattttagtctatttgtttgttttgttttattactttgtatgtttattttctagttttctttatttattttgttgttaattaagccaatgatataatgcattgattttgttgttattgttatttacgggatggattgaaaattgtgaactgtgtgcttgattctttgactctctggattaatttagatgcttgttagaaattatatatcgatgtatattgtaaatatttgaattgtatcataaatgttctactttggtttgcgaaatgattgcttgaataggatatatagaacttgcataatttattctcttgaggcgaaattcttggcaatgcttgtttcgaatatcattaagacaatttttttgaacgtttgagcctttcaagcctacccttattctatcatctctagtttaccaagtttgagcttgatcctgttctaatatttatggccacttaataaagcctaaaatgtgtctattcatttttctttctgttgcaccttaaattatgtcatcagcttaggaataaatttgggagagcgaaatatttgtgagtgatacttttagaaaagtgagtgattgagaagatattgtaaaatgtatagtgttttgcattactaaaaaaagtattaaaaaataaatgaaagagaatattttttgggaaaaaaacaggaaaattccaaaaagggaaaaatattacaaaattactatgggccgg

SEQ ID NO: 342086 - DNA, 1319 bp, Cannabis indica
aacatacaagttgattagtgagcaaaggtaaatcaatatataatgcgtaacaaaacagtaacattactagtaccttattttttaaccacgtactgaaattttgataatgttcatctgttggaactttattttaccaggatctaaatttactaacatgtatgttgaattaataccctaaatatgaattctctaaaataatgaaataaacacataagcgtttagaaaaccttacattgatggcagcgaaataatatatctcctttcgctcagatttctaacccttgttctattctgtcgcaaaataataacaagatttgagcctggatctccttctctcttttaggtttggttaaccaccgtcttccacactatgattgagtacttgacttgctatgtgtaggtatgatactctatcactatgactcaaattgatgaagaacaatgaataatgtgcgaaatcactatagaaaggagtctctcatctactagttgtcagagaatgaaaactaggtttggttggttaagagtgttggatgagaatgagagcatcaggttccttttatagtatttcaacaagggtttacgatttaaatatatggattaaaaaataataaaataatgagcaaaatacacaaagtggcaagccacactaataggcctcactaattacaattttgccactttatttcaaccacttatccttctttcaataatgtcatattttctgatttcattcctataaatgtcaaaagtatttatttaataattataattaattatcaaataaaattaccattataaatttctctaatttattttttaaaatacatcactaaaatattattatttttatattacctcaaactttaatatcacaccatatatgagttttttttaaaaaaattatcatgaaaaccatatatttttttatttcaaatataccttttatatataaaaaatataattatgcagtaaaatttttagttaaacgatattttaatatttttactgttaattttaatggagacttaagagagcttttagttatttttacaaaataatagattttggataaaagtttaaaattttattgttacacgaaattttttaacaaaaatactgtgcttttataaaacaatcgtaaaacaaaaaaacaaaatagtggagcaactaaaaaataactgtaaaaatacagtaaaaaaaaataaaatttacacagtattttttaaaaaaattactgccccacagttaaaaaaaataaaaaaagttaagaaactgtgtaaaattcctattaatttatactagggaactaagccgcg

SEQ ID NO: 342087 - DNA, 1106 bp, Cannabis indica
ctgtttccaccagaaatcaatgctttcgatttactgcccaagttcaacatgccaacatggaaaatgtacacgggcaaagaagatcctttgggtaacattaaatactttgaaatgcatgtggctttgcaagcggtaaaaggagttgtatcgtgcatgattttcttagctaccttggcagaggccgcccaacagtggtattttaagttagctccaaggaaattcaattcatggaactctttcatggaagagtttcacgcacacttctcctcttctatgaagctcccatatcgcttaaaggacatggtagaagtgaatcaaataccaggggagcccttaagagcttacactagtaaattcatgactaaaactacaaaagtgaaagggttaactgaagaagggaggctagctacaatcctaggaggtattgaacatataagagaattatggaaagaaatcaaaagggtcactgtaagattaatggtgaaattcatggaccacgggtttataaagcttgaagaagcagttcggcgtgtgcacacaattggatagaaaaataaccagccacattccacttcttccaatacatcggtctagcaggaccagaattcaaaatatcacagtagttcgagtcaaagtggtaaaaggtcaaataagggcaaccgatagggaaatggaaagaaaaaatacttagcaataactctgaacaacatcttctggagaatgccacaaagttcactgcttttactatcctaacagaggacacataaaaaaattttgcaacaacccagtccatggttccgcacaaaaaaccacctcccatgaagaaagacatgagcaagaggtacaccactaaattctgccactttcatgcaaactatgtgttaaaatttattttctaagatctacatttactaacatgtatgttgattataacactataatctaacatcctaaatataaatttcctaaaataataaaataaacacatataaagttatagaaaaccttacattggtggcagcgaaatataatggctccttccgttcagatctgtaacccttgttcctttctgtcgcagagtatcaccaagatctgaacctaggtct

SEQ ID NO: 342088 - DNA, 619 bp, Cannabis indica
ttgtggaccccaatattagaaattaatattagagttataatttctcaattctggagattttattaaactctaggggtattatttggcttatatgtgaaatatgttatttttgtaatttttgctcggcgacaacggaaaatgcgaaggatggctagtttgatcacatgggtaagtttagaaccttatttcttagtgggaaatatttgagagaaaataaaataccgggattagacgaggttatgaaatttgaccattttaccttagttttagaaatgcctaagttgtaggcttaagggtatttttgtaatttgctaaataggtgatttggtggctgcctagggtgtggacacctgtccattttattcagcaagtaattaattggggattatctctttatcatttgaagaaaatagaggaataagaaaaaagtcaaaaattcaagaaagctatctctttctctttttctctctttcggctgaagcaaaccagggggatttgttgctaaaattggtattttcagcaaggttggaggaggattcaagcaaaggtaaaaccctagaacccttgagcatgcttttgaagctttttctttaggttgaatgtgtgaattttgtgaaat

SEQ ID NO: 342089 - DNA, 612 bp, Cannabis indica
ttcctaggtggatgaccttttatggaattttgagatctttgtcttataccattttgcagtatcgacgactcactagtcttagcaactaagttgcctacgtatctttttataggaatcaagtcaaacatagttccaaaatctttgtgaaaagttaattcactttgaatttttgttgaggtgagtgacctaatttaggaatgctattcaattcattatggctttaaattttagtgcacttttgaattttgaggtaaaattactattttgagatttttgtgaggtaaacaacctctttttcgtgaggtgaatgacatctttgaaattttgtgaggtgaatgacctctttaataacccaagattaattttgatgagctcatttagaattttatgccattttatatggctttagaattttaccacttttagtgacaaattgagtcttgaaatctttttattgttctttaaaaaaataaaaaaaaaattatttgactgatatgttaattaatttaatataattcctaaaatttaaaaggaaataaataaattaattatttttttatttgataatgtgtaggctaattagtaatttttttcccgaactttgacatatac

SEQ ID NO: 342090 - DNA, 815 bp, Cannabis indica
atgagtgggtatcgactttcggcgtcaatcagtctcttgctgatgtagtatactacgtgttgtatgtcatcttcttctcttattaagagtgcactcacagtatgttctgttatagctaggtacatacctagctcttcattatctagaggttttgatacgacagaaggttgagccagtttttttagctcttggaatgatttttcacactcccctgtgcactcaaattttttgtttctctgagaatactaaagaagggtacacatttgtctgtggatttggacacaaatctgcttagggcaataatacgtcccgtcaagctttgagcttctttgattgttatgggcgacttcatgtccaaaagggcttagatcttgtttgggtttgcttatattcccctggcgttgactatgaagccaaagaattttcctgagcctactctgaaagaacatttgaggcatctgagcttcatgttgtactgataaaggatattgaagcattcatctagatcctccacatacccctagccttttttgttggacttaattttaccatgatcttagatctactcacaagtatgttgatttaacaacctaaatatgaccttctaaaacgataaataaaacacataaaagttaagaaaccttacagtaatggcagcggaataaagtgtctccttccactcagatctctaacccttgattcctgtctgtcacagagtataatcaagatctgagcccgaatgtccttcagatagatgtgatccttcacagtcttccaaactatgattgaggtactgttcgctgtgtgtgggcact

SEQ ID NO: 342091 - DNA, 971 bp, Cannabis indica
cgtagacctacgtgttgctctcacacgtctaattacaataaggccttagtagggtttacctcggttctggttaccgagcctaacctggttatgccttgctcgcataaccctactcataaatatatacgtaatccatacattacgttctttcggtggtttatcctggtgatatataccaggtctaacccagttatgtcttatacacataacgcttaacataaccgcatgtattcaatatttaccacattatataaaatcttagggtaataaccctaactcatattttcactggattaataatattaccatatattaatactttctcactttcataatgttctagggtaataacccaagaccgcattaaaattaaactcaaggtactagtttaccgagtctagcttaattatgcctagacgcataactctttattccaacacatttaacatggcataatattcaacatcttttaactactagggtaataaccctacatcaaataaccgctcactttagggtaataaccctaatccaggttcttaattaatcacaatcacaacatacaatatgagcgccactgcgctaaactctacgtgcatactattgtcttacctgatgtcccgcaatgacagagattccaaatccccgggtgctcctaatcaggtgccggtaatcctagtcacacaatctgggattcacaaatagggttaacccctgatttcattttcataaaatattcacatggcatttaaaattcagatattaagatagagctcaaaaagagctttccaacggtatatagaactcccaaatcggagtccgaatcacaaagttatggctatttgaagtttgcaaaaaggatctgcccataaagaaatgggcgccccgcggcatgctaaataccatgccgcggcacctgggttcaaaacccagaaaaacagcagcaagaacacgatttcagcaagaaaaat

SEQ ID NO: 342092 - DNA, 1133 bp, Cannabis indica
gctttaaactaacaactcttcaagctcataacttgagcttcaaaccaacttgattcaagtatttttctagcagctcaataccaaaaagaacatgaattttcaacctagaaaatcccctgaaatctcagccacaactcagcaataaaacccacaacaacttcatgataatcacactcaattccattaagatctaacacaaattcataaacatgcaaatctaagaacaacatcactttccatacttttcaacaattaaataaaaccagcaagaacttcaattaaattcaatgaaaggaagctacctcaagtctcaagtaagaattaagcacaacataccaaaattccaagcccaattcaagctattcctcaccaattctagttgaacattcaagagagggttagagagggagagggggtcggatataggggaaacaaaactagaatttttctaattcatttgtcaaaaaatccagttcacaacacttatctcacataaaagccaaattactaaaatgcccttagggcaatataaccttcacttaagcatacaagggcgaaaatggcgtttcatgcatatttaaacccaattaattttagattattcaccatcatttaaaatgccaaataatttcaatcccaattgcatttcaggcccgaacctcgttcggcccgaaatacccggttgtgactatgccgcgccaacctgtcaaaacacacctgaaaaaagacaacacatgcatactatataataatatagtcctataagcacgtaattaaattaacttcatcattttacccttctcgggtcataattactaaaatagccctgactcaccaacgaggtcttaacatataattaattaaataaattcccatatattgaactatataataatataattcctcaattattcataattatttaattaggctttttctaatccatttcataattttagggtattacaatttggctcgctcagcatctccaccgaaactaagttcaattcatccaagtcattctgcgaggccagttttgctaaggcatcggtattggagttttgttctctcagaatttgttcaattttaaagtaatcaaatctttccaatttcttctaaactttctctaaata

SEQ ID NO: 342093 - DNA, 669 bp, Cannabis indica
aaaaaaaaaaaaaagctactaattttagtaaacataaagtgacaagtttgattttgaatatagtaacaaattttaagtaagatacaatgatcacaataggtaagataacgagtgagatacatagaaaaattaggtgaaatacctgatgatcaggtgagatacaatgatgataacgaataagatacaatgataacaacgactttaaatgatcgagatagaaaaataatacattatgaagaacactttaattttttcctacactatcctattttatttattgttataataataaatttttaacaaacaaaattaaaagtataaatgttaaaaatattaatatacattaatttttattttattttatgaagttttactttttcaataaataaaattattaataataaggtttaattagataatataattttaattagtaattttttatttattattttaatagtaacttcatcggccgagctaagagcggctatattatctagtatatatatataaagaagagatataaaaggtgacatgtcactctaaaatctctctaagtagcattgtttgctctctccttaattatatcatttttaaattttttaataagtttataaatattattgattattcaaataataaaatatttatataaattaaaaaaaaaaa

SEQ ID NO: 342094 - DNA, 494 bp, Cannabis indica
tggtctgttttcccttgatacaatctacacagacattgaaatctgtgaagtcaagagactctaaaatgtcatcagacacaagacgctcaattctacctcttgagatatgacctaagcgtttatgccataatgacgctgaattttctttatttaatttgcgtttagtacctcgtgattccacatgcaaggtttcattataggatgcaattgtttctagcaaataaagattgtcataagtattcaaataaccagttccaataatatttgaatttaaagacaaagtaaactgattgtttccaaatgaacaacaatatccaaatttgtccaacaaagaaacaaaaactaaattccgtctaaaagacggcacaacaaaagtgtctttcaaatccaaataaaaaccagttcctaataacaatctaaaatgcccaattgcttccacttctaccgattgtccatcgcccacaaagatgtatcttttgttgggttttgtgccc

SEQ ID NO: 342095 - DNA, 1346 bp, Cannabis indica
tctggttcgtctttatgcgatatttcttctattctgaatacctcctattgaggaggcggtgcctctagtaagtaaatgacgttaactgacttcttttctgcgagttttactgctgtgttgtagcattcccgcgagtccgattggactcctcgcacagatcctactccagcgggattagggaacttcatggtgagatggtagatggatgtcacgatcttcatctccttcaggataggtcgaccaatcacagcattctatgccgagtgttggtcaattactgcgaagtgagccattgacttggctaccacgggtgcggttcccaaagtgattgggagttttatcattctctttaatgcgatgacgtctccagtaaaaccgcaataattgataccacaggtcgcagatccttctcatgtaacccatttgcttgaaggcctagaaattcaagacattcacgaaacttccattgtccacgagtatgccgtggacattatctccctcaatgttcgcgacgatgaccagcgcgtcagaatgtgtgtcggggacccacatcgcatcactttccatgaatgtgatatcgtcacattcccttttgaatagcttttccggccgttcactcaagttgttcacattggtgagtggcttatctttggcttctctcgcatatcgctcttgcgatttcctggaatctcctgcgatatggggtctgccaataatagtcaggatattgcgagtagccctcgaaccactcgcattttgattttcttctttgtcatccgcttggggatgactttcctcatttttcttgtatttgttgaactttccccgcctgattagttcttcaattttgtcctgcaaaaaccaacattccagagtagtgtgaccaatatctttgtggtatttacacaatttcgtagggtctcttttatcgcggtttcccctgattgggggaggctttttgaagaccccgttcttttcttcgatggcgtagatatggtcccgagggactgcaaactctgtataatttacaaagcgcggaccacctttactcttcggggaggactccttctttggaggggacttggctaattttggacttcgctgtctctgcgtactgcgtcttctcagagtccttcctctggaattcttccctctaggactatgaaatcgtgactgcgacactggtgacttattttgtctttgcccttctctaactcaaccagagaattttcaatcctcttatacggctccgccatagcgaagaactcgaccaacgattcaggtcatcgagcttgcagttctttctagaaatcggttcttggcaggacacctgttatcaacataca

SEQ ID NO: 342096 - DNA, 671 bp, Cannabis indica
aaaaaaatttacaaaaacgaaataataccaatgtacataaataaaatgaatagaaagcatatttataccttaatggacgttgagactcaacgttttctccgctaaaatcggtggccggagttatacccaccacctttctttataataggttcggtttggtatatagaggggaaaaaaactaaacttttttacagtataggtttaggtatagaaaatagaagattttaagacaaaaatggggtaaaatggttaagaaatgagggagaatgaggttgttttagtggtggttggcgagggttttttcgtgggtttggggctgctgtgggtggctgttcttcgtgttcagcaaggtgtgaaatgaggaagtgaggaagacgaagcagaaagggtctgatatataaccctatggcgtcggttattaggtattaaccgacgccataggtgccacgtgtcgaataaaggtggcacatatatggcgtcggttaatacctaataaccgacgcaatagggttatatgaaaaaaccttgattttccccaacccccaaccgacggcatagatatatatacattctatacctacggtttttaccaaagaactgcctctaaatatcaatgcagatattttcaccccctttagcttccctttttataaattgggttgaaaaaatag

SEQ ID NO: 342097 - DNA, 751 bp, Cannabis indica
attaaccaccaagacaggaaatccccaccccataagggtgggtcccccacacttgctaattctctcagtataaatttctatctttagtatggtgtaatctataacctaaataaaagtggcaatagtttgggctttttatcattaaattacacatatacccttttagataatacatatagtaacaaataaattacttctaaatgattgaaattaataaccaagtaaactttaatatttcaaaattattattatatataactataactatattagtcaaaaaaaaaaaaatacaccacattatagtttaataataaaatatttaagtatttgacacaagatatattatactaaataaacaatcaattttacatatcaaattttattacaatccaattaaaatatataataataatatattaagtacaattttttaaaataatcaaatcataaaattaaaaaaataaattgtatatatataatatgtacatactttaattaaagaataagttcactattttttttttaggttaatgtttttagtaagcaagagagaaaattctactaacatagaaagatgatactaaaaatgttacattaacaaatgaaagtggatctatgtgaaacaagggtgatactaggtgtagactaggtagagcagtcaccttagatgaaaatattaagaccggtcttatttgtaagtttaggtctaaataaatttttttaagggtctttatataaatatatttgtggt

SEQ ID NO: 342098 - DNA, 767 bp, Cannabis indica
tctgattaaagtttgcaaaaccaagaggtggcattgcaatcagattccgttcatgagctcgtaattctgcttcgagcttatccatgtcggaagagttaaaattgttgatcatgtaagatacaacaaatgcattatactctggaggaagactattaagtatgaattgaacccattgttcctttgataattcaattccaagtagatttgccttttggaacttcagattcatcatcaataggtgcgagtttatgcaactaccagggtgcattttcacactatagagttcatttgctaagacattgactaggagtgggtcggggtgtgggttattcatattggcactacaaatatcaataaaacagaagtaaggtttggttcaataaattcatacacaagtttagaaaataacaaataatcacatatgtttataaaaataccaaaattctaacatattttattttccaaggtttccaacaaactgatacagtgtcccgtttaggcgagagtcaaagcatcatccattgaatagagttgtccattcatctaaaatgataaacattctagcaacctcttattcgatcgaaaagagaatccgacgttgtcccgtttaggcgagagtcaaggtcattcctatttcatgagctcccaccattgtttcatacttttgtaagccctataatagtcgccaccattagggtgatctatactaaaataaacacttacaaataatacttatcttttgagattctacgacgttaaattgctaa

SEQ ID NO: 342099 - DNA, 843 bp, Cannabis indica
aaggagaccgatcgaacacagttcataattttttttatccactcatcctcataccaaggcattccatcatcgcctctaaaaagtcccattctactcgatcatacgccttcgacatatcaagttttaaagccatttttcttccattaccacatctacctttcctcatactatggagcccttcgaacccaataatggcattatcttgtatgattcttcctccaataaaggcactttggttttcagagatggcagaattcatacttaatctcattcggttagctaggcatttagacaccaccttataaaccacattacaaaggctaataggacggaattccgacatctttgtaggttgtttcacctttggaatgaggcaaataagggtctcatttatttttctgcaatctgaattgtagttcaatatatcaaggcaggcagcagtgaaatcttccttaattaagttccaatttttttggaaaaaaaggcccggcagcccatcctttcccagggcttttagagggtgaatttggaataaagtggcccttatttcttcgctggtaaatggtttcagcaaagcattattatcagtagcagttatacggcaagggactttacctctaagagcagctttaatgtctattcctccattggattttgaaaataatgtctgaaaatatttattgctacagcagcaagatcatcatccgaagtgcaccattgcccttgatcattaaacagtcccgtgatggttttttttttctctagctgaagctttgaagtggaaaaatttcgtatttcgatcaccatgtttcaaccaaagagctcgacttcgttgtctccaat

SEQ ID NO: 342100 - DNA, 636 bp, Cannabis indica
aattttattttttattaattctaactttatattattattttttaatagtgaactttaaattaataatgtatatgtttttatatggatataagatattaatttatcttttatatatggacaaaataatattagtttatttgtgattttaatttaatatgtgtacacctaagtgtcattttagaacagatgcaaaaaacacttgttgcgtcagttaaagattgtcgcatagcttgttgtgtcactttaaaactgacgcaaaatgctttaataaatgctttaattttattttttttattttttttttttgtgttttacgtcggttatataatgtcgaaaatagttttttgtgtcattttataaccgacacaaataaattacaatttgcatctacagaaaccgacgtaaaatctttattagtcacttgaaaaccgacgaaaatacccttttttgtagtagtggagaacaaaaaatagtttttgaagtttttaaaacacaactcacgtttggttagtgttttttaaaacaatattgaccaaaagtgaattggtttttaaaacagaaaacaatattttcttattttccaaattcttattgtttgtaactttgttttctaaaaactattttcaaaaaataagg

SEQ ID NO: 342101 - DNA, 283 bp, Cannabis indica
gtaaaataattccaacatcaacaccattagaggtcttatggcgcacctaaaaatattaagataacaaaattaataaaataatgaaccgataaaaatacaattaatagttaaacaaaactgtaagtatatcatgtattgaacaacataaaaacaacaatataacaacttaaaaataacgtaattttaaaacttaataatcatgaaactaaaacaacttcaattataaaactcaaatataactaataaatgtaagacctaacccaatgatatagtttttttaaga

SEQ ID NO: 342102 - DNA, 965 bp, Cannabis indica
tgtaagacctaacccaatgatatagtttttttaagagccctataataagaatcgtataataactaaattaaaactaaaaacaactaattatagacagaaaaagtgagagacctaaactatttacggttgaacaactcttcttactaaatacataaaaaaaaatatgtaaacataacaaaacaagtctttgaaaccaaacacagacaacaaaaactatacattaatcttttaagttacaacatcgacatcattatctcgtcttttgtctttaaaaacttttcaatggatgacctggtgaaacaacaacaacaaaataaattaaaagatgaaacaactataaaataagttataaagaacgttaaatcaacatagtcatttaaaatatttacataaaatctctaatttataaaaagataaaacttagatcaacaaaagtaatatcaaaataatatcacaaaaatacttaacataaagtttaaataaaatcacatttgaatatgccttatttctttaagctaatcaagaagacttaattctcttgagcatttcaccaaacacctagtaggtgtactattatatgtatatatacaaaaacacaacattcagaataacaataaaattaataaaatctatgagtaaaatagaaaaatcattgattaataagcaaataaacaacaaactctaataaaaactatcaaattcaaacttttattcttgtaattttaacaaaaagagaaaaagaagaagaaaataagaagaggaggaagaagaagatgatgaacatgatcttacaaatatcaattgaacgacaatggtggaaaggtaaggcttagagcttgagagttcagcttcaacagaaaaatcgtgggaagaaaataaagaaaaaatagttatggagacttgaagagagggaagacacattattaaaaaaaagaaaccgaatgtagtatttttgtaattataat

SEQ ID NO: 342103 - DNA, 688 bp, Cannabis indica
agtaactagttactagttaccaaatttttcagattttgctaacaactctccaacccattccaagccattctcactttattttgtatcacttatacactttataaatgacaaaattcaatccccaacaactatacttgaattatagttttaaaattcaaaaaattaagttgtgtaaccactctttacacacttaattagtgatcatgtagaagttacaaaatatgagtaactcaacctcttatgttacaatttatgtaaatattagatgtatgtaactctcaatcgcattatatacacttaattagtgatcatgtagaagttacaaaatatgagtaactcaacctcttatgttacaatttatgtaaatattagatgtatgtaactctcaatcgcattatatacattaatctcatattaatatataatatgtctcattttaatattttaatctattttatattataacaatataatataacaattaattcagcaagaatcatcaattacatatacaaattatgtaatattaatttacacaaaggaaagtaaaagaaatagtgatctatgaatagtctctaaatgcaataccacattcatttttaaacactgacatttttttttttcaaaataacttactaaatagtgaaatcactacaattttaaaaagtaaataaaatgaaaaaaaaaa

SEQ ID NO: 342104 - DNA, 1234 bp, Cannabis indica
tcaggagctcgctgaaccggggaaaatcaagattcgtgatagcgagtctatggtgtcagctcgtgaacaccttgttcattccaggcatgatccgaataccgaaaacgaggagatggccgaggactaggaggctccaaaccgagagtaagatgaggaaggagatgccgaaggaagcgagactgattcagtggacaacacgcaactgaatgagcctttctcctacgaggacttggtctcacgagtcaccaaatccgacttgaccaccttttcaaggttaaatttattgcgactcggcaccatgcgtcctcgccctacccaaagatcgcaccttccttttactaaccccgcaatcatacccttagaggacattgtagtctccattcccattcttcgatgtggagtatcgattcctttccatccattcatctccgttattctcaagcgatatgatgtgtccccttttcaactgaccccaaacagctatcgcatagctttagggttttatgcgatgtatatggagtacctgcatagggagccttcgatggaggactttagctacttttacgatataaagaacgtgggccttcacaacagtttctactgcttcagcaagtgggccacttctaaaatcaacggggtggaaggcatggtttccaatatgggcgattggaaatctaagtggttttacgtgtttaaagtaccaggaattaggactgattttaattgtcgacctagtacgtcgcacattttaacacttaattaatttttatgttaccttgtggtatagtctaacacgctcttccttattatctacagatagaccagctcgactcgtactggacccaactcccagagaagtcactgaaattctcggaagcctccctgttcaagatcgcgactggcgactattgtgcacgaccttgaagctgcgggaacacaagttaattccagagaatgctagccttcattgggagctagtgtacaaggagtcgtctgagaagcaaaaggagaggatagagaagcgtctttctaagcagacttctcgatcgacatcaggtaacatatcgcatagatatagacttatgcatttgaattcattgttattttaacttatcttttcttgtccttgcagagatgactttcctgaagcaagaacctgttctcaatcgcaagctgaagaatggaacagtgacgacttctcctgtcgttccccagaaaaggaaaagtgacgtcg

SEQ ID NO: 342105 - DNA, 476 bp, Cannabis indica
ttttaggtggtctacaagttgctactcaatcgattagttatgaaataccattatctttgaagatccattagacatcgatgtcttattggaaccgttttttgaaacggaaagtgacttcacatctacgaattcttcacgaactgttcattctccgggggacggtccctctgtggccctagaccaggataggtagcggcagcaagaggccacaatgatctgaacactttgtcgcatctcttcaatacggatacaatatcgatcatagcaatctcctttggtacttactggtacgtcaaaacccaattggtcataaacatcgtatgatgctgctcttcgcaaatcccagcatacccctgaaccttttaacaatgccaacaagcgtctattattgaattcatccggcccaatagtacccattttgagaacgtccagcgccaaagtcactaaatgggtaagtcgccaatccctaaaacaga

SEQ ID NO: 342106 - DNA, 2023 bp, Cannabis indica
caaggtctgcctctaaagtcacctgatgctttgcactgccgaagaagagggtcatatatattctctcattattcttccaactctccaagtattgggcatcatcccctcgaatcaaatccaatatgttgtcatcccactaaaagttagagtggtcattacacgcagcttgccaccgactaataacttctgatgggaaaatgtgaggtatgatgacacatctatttgggtacacttcaggataaaagtgttgtcgcctcctcatcaaatgaattaccgcatctaaatactaaaacataaaaataaaatatgtcagaaattaaataataaaagttagataaagtctttgaaaattaaaggcgtaaaaagtcttaaaaacttacatcgtctccaagccatgtcttcggagtatgtagttggaggaaccaagctgaatcgtgtctaccgaagtaacactccctcgggaacttgttcccaatctggccgagaacccaactgtgaaaagttgagagcagcttccgatcaacaactctaagtgggtccacattcacatgcgtattcgatgccttggacttcttctttatatcagtgtactcatcgaaccacctagaccgctttctttgtctccggttctccaccagttttggagctgtctttaacacatgtatctcagaatcgtgagtatccccaatactggtgatcttcatgctgtcaggtgtacaaaacatatcatcattatctggtctataatcatttgggagaatgatttcattttccggtgattgaggctcttcttgtggttgtggctgtggctgtggctgtgtatctagtgtcgaccttccaagatcttacaggagtctcattatggtcttcaaatgacccataatctcgttttgtcctttcaaaagtgcaacttggcctttcttcagagctagttgttccctctccaaaatcgtcaatctttccatcatggtagaggatactgattctcaaggctttgaagtgctgggaatagatgcagatggggaaacaccagactcatcttagtgaagacggtgcacgtggtgtagagtctctaaagattcaagctgcatccgctcgttcttccaatgtcgaggcaagcttttgggcttgacttcgcaaatcatcctgtgttggttgcccatcgtcacccaacactagttcctccaagtcaataaataaaggcacctcaccgccagtgatccaactcacaaactcagcctcattcgcttggggacataacatagagtacaccgtcaactgaaaaataaaacaaatatattaatcgatgaaaattaacatgaaataaatgtaaggcgtaagaaacttacatttctagcaaataatcatatcacttcttccttgccgagtgtcgttttcggcttactctcccagttcaccattctcggaaagcgatgcaacttcttcactgcacactcgttgcccagctcctggatggcctcgtatgcccaataatgcaacacttcagtatagccataagatgagtatttagcctccttctgactaactcccttttcaatcttcttaagcatcctattcttcacatctatgtagtctttattacaagtttctatcaacttgttgtacgaaatctttctccacgggtactcgtagaagaatggaaggttgtcaaccattcttatgacaaaaggaggaacgtcagtcttctcctccttaccagtgaggacccccataacaaacaaggtcatccccaacttgtagacatcatcaatttcggtgcagctctcaaaaactctgcgcagttggccaaagttgatggaaggattaccgttgaaatactccataatcaatcgatctgaacttcctttctcttcaatttcttcttcagtaggtccaagaaacaagtttaacccagtgttaaatgccaaaatattacatattttatagtgtaaaaatacattataaaattaattctttataatattttcatgaaactaatgcaatatatttttatattgaaaat

SEQ ID NO: 342107 - DNA, 1117 bp, Cannabis indica
aagtaatctcagttcagattatatgtagtatgacatctaagtgaaggtgttgtacataatagagattatatatgataaagactgatatgaataaagctgtctttattaaacatgtcgttaattcatatcataatgatgatcaatagtagatcaacctaaatcttgggtaatcatgaactcatgttcatgttattagtttctagaattcacttgttaaagtttctcaaagaagatgattcttataacttttgttttgggagtctaataatgtggatggctgggaacatgatctataattatagagaatgttgactttcctaacggatcgaatattggttccctttaagtgttaattctagaaatgtaaagttgtgcacaaatttggttggatctaaattatacttttcctaatgattaatgatactaaaggataaagaattaattagaagggtaagatagtattttgatcaaaactaattatgaacggacacaaggagggctaatcactggaattaattatatcaatggacactgcagtaaaacttagaaaatataattctataattactaagtgttattcgcattttcggcattggacatgtggattttaggttagcatccaagaccccattagtgggaccttcagcaaaggtaaagtgggctaagcccatctggatatgtccttccaggaacgtatcttggttctacactcgcaaagccttccgccctcaacaagccgtacttggaggacatgtctggtaccacgagaccggagagataagactgtgcgttcccaaaagacccttccggtttccctttatattcctgcacacaaatacagaaactccaattgtcatatcacaacagagcatcgtaccaagattaaaggcgaaacttcctataacaagtaatatacaattaattctgattaattgcccacaatcagtgtacgcggcccacgagtattatttactgtaaacttcccaaatgagggaaagagaaaacctattgtaattctcaaactactataaataccccacgaatcctttggattaggagttgaaatatcttgcaaactttgctcaggaaaacttgagaacatacattctgtgtattt

SEQ ID NO: 342108 - DNA, 522 bp, Cannabis indica
atttaccactagttgtgagtcacttcatatcttgatgtgctcggccttcatctccttcgctagtttgagtccagcgattagggcttcatattcggcctcgttgttggaggctttgaatcagaatttgaccgctgcatgcaggtgttgccccccaggtgtgaaaagggcaattcctatgccggattgttgatctgtggccaatcaatccacatgtagcttcgaggtcagcttgttttcagtgctgctcggctctgatgttgactcgagatcgccttctgggatgctttcagtttttcctgtgcattccaccaaaaagtcggccaaggctttgcctttgatagctgttcgtggttggaagttgatttcgtactgccccaattccaccgcccacttgagtaatcgccctgaggcatctggcttttgaagtatttgccgtagtggttggtcggtgtacacccgaacaggatgagcttgaaagtaaggtcgtagctttctgttgctaagatgaggcagtaggcgagc

SEQ ID NO: 342109 - DNA, 578 bp, Cannabis indica
atttatacagatagataccgaggtatcttaggtttatctcaagaagcctacatcaacagagttttagaaagattttggatgaaagagtgttcaccgggcattgctccaattgtgaagggtgataaattgaatatgagccagtgtccaaagaatgattttgaaagaggaaaaaatgaagaacattccttatgcttctgttgttggaagcctaatgtatgctcaggtgtacacaagacccgacattgcttatttggtcagagtgttagaaagattttagagtaactcgaggatagaccactagaaagttgcaaagaaggtaatgaggtatcttcagggtactaatgattacaaactaatgttcaaacgaattgacaattgagaagtagttggctactcagactcagattttactagttgtactgattcacataaatcaacatctagttatgtatttatgtttgttggtgaagttgtgtcctagaggagtaacaaacaaaccttgactactacttctactatgcagctcgaggtcgtttcttgttttgaggctacatcacatggtgtatggctaaagagtt

SEQ ID NO: 342110 - DNA, 1185 bp, Cannabis indica
ggataaaattatatggatggcttgaaaggcacaatcgatccaaaaattgcctaaatcactttcctagtcatgcataatttattatttcgcctcaaatagcaagcaagcaagttctagaattttccaaacaactttccacattccacaatcagcatgcataaaacaattcaattactagcaaattacctaatatgattccatgctcttttaaagcacaaaattgaaattagtcaagaatgtaatatcaccaagcacacggattttttgaaaataagtgaacttttcaaatcatgctatctacctacttttaaattgactcatattaagaaaattgactcaaaacaataaaaaactaaaaactaaaataaaataaaaatttaagtcacccccaaactaaagtgacacattgtccccaatgtgacattaaagaaaaggaaaggaaacttacctgagcgccacatcagtatggcggtggaggtggtggtggctggtatggttgccacggtgggggctgcgagaaatggtcagcatcctctgagttcattgtccacctcgaaaaagcagaattcaattcttggacttgtctctgagcaaaatgatgttgctgctcaagatatgcattgtaatacgcagcttgtgcttgatgagcctgaacaagatactggttagactgaaccagataatggttttgccttatgaggtgatccagtctatcattagtgccctggggtgtggggtgtccaatggtggctcaagttggggcataggtggcactgatgcactggggccagtatccattgggtcctcctcctcgatatcagcatcactcttttggcgttttcgtgcgtcttctggcggttctaatgatgcaaaggggaagtcatagtagatccggcgagagatggtttgcatgggcagttttaggacatctcctggaatctcaggcacaccctgttgtgagcacaacgcagtaattagggcactgtgcatcggacctgccgttgttttcatctcagcaaaatggttgatgtttctcaatatgacccagccaatgtcgaatgtcatcctggccataatagcataaactatgacacatcgctcatagtctaaggatgaagcgtgtgatgtcggcagtattctaaagttaacaaaatatgtccaggctctggcttctgggttgagttg

SEQ ID NO: 342111 - DNA, 575 bp, Cannabis indica
tatagaacgcacctaaagccttcaagcttgtgcgagaatatgaacagacaactcgcactctatagttcacatacgttgctgcacttattagaacagattaaacggttctttatttattctaatttaatattgttatatattgtaaaacggttctataatcgatcagttatgtataattaaaaggacacttgttttctatataaaggagtgatccaagatgaataaactaagcagaaatcatttgcaacagtggactaagcggactgtaatctgactgaaccactatatttccttgtgtttattttatttttccagttgttctattattttggcagttttctttaaatacccgctattctaagttgagtattcgctattcaaatacaacttttttcaatttctttaaaattttcaaaaaattatttgggctcaaaaagtcgttatcatctttattagaaagtaacatgaaatgcgaaagctcaagggaaataataattaaactcccaataaaattcatgcattaaggtgttgtattcatatgtttgaaaacaaaaggacaaagctataatagaaat

SEQ ID NO: 342112 - DNA, 791 bp, Cannabis indica
tatttacagagaatacggtatttttatattgtaatcttgttaattttttgccaattttttgttatctgtatgtaattttttttttgttattttgatattatttttatgttacttttatgtagtttttttgttgattttatgttatttttgtatttttttttttttggaaaaccgtaaaaatgtaattattttacaaaaaatgataccttatgtaattattcttaaataatatgacattttaatttaggctatttatttacaagggtaaaaatgaaaaaaaaaattgtagatatgttaaatatagtatttttttaaccaaatctttatatctttatatattaaaattgcttatctaacggtaattcttggtttaacgatgttgttttgtttcctccgttaactttaacaaaatattcttaattaatttatattatttttttaacagaaaattatattattttaaactattcgtttaaattgatggattgacttcttctaattaaaataatattaataatagaagatatttagaattttaacaatataagtcccgaactctctgtttgaaaaatagaactatataatacaagatcgaaatttcagttgattattctcttcttctattttttttttcctgatgaagtgcgattttgggcttcagatctcataccttctttctcctctccagatctttcgccaccgttgatggcggttcagccctctccaaccagcgtctcctccaatagctatgtttgttgggttttatgccctaaataaaattccatttcaat

SEQ ID NO: 342113 - DNA, 502 bp, Cannabis indica
tggctgtgaaggtaagcgtaggattcttgatggccagccatggcattttgcccaaagtctaaccatttttgctgctcctgattcctctttccctattactccggatcaattgcattatgtgcctttttggattcagatatatggtattccgtttaggtgcaaatcgtatgaattggccaagctcattgctactggggtgggggatttaattcaagttgacagtactactgtcaaagatggaactggcccgtacttgagggttagatttctgctagatgttaataagccaattaggaggggtattcacattaggttccttaagatgggtagagaatttactaagtggctggattttaagtatgagcgtttatcggatttttgtttttactgtggtaaactcgaccacactaagaaatactgtcatgcctatttgcaaaagtgtgatgagtctcttgtgccacccccttgcccttatgaccttctccttcgtggcaaggaaaaa

SEQ ID NO: 342114 - DNA, 591 bp, Cannabis indica
ttgattgatgtcattcctcataaattagtcgtcactagccttattaatcacagcgtaatagctgcaaaagaggggttacgccgtcagtcatatcgcttatggtagttccaatacattttctcccatgcggcattaaatgtgaggcttgcttagtgccttcggttgactcatcaatttcatggcacgtgctttaggcacgtgagctgcatttatgatagtcataattaacatttatttctttttgtaggaaactattcacttcccgtccattaatgatccgacgcatttaatcggtgtcagaaaagtactcaagcatttttaaccgtcctaatgagcatttatcccaaccgttggatctgcagaatgcgaatcgattgcgattcccaccgtacgatggcgcctgatcacagctgctttgcacccgttctggcctataaaagcaagcctttctccttcattttgttactttcatcacttcgccatttcttctcaagaatactttcgagagaaaatttcggaaaccgtagatttcttactgctatttctccgtcgctatcaatccactttttaccgtcgatcaacaccaacccc

SEQ ID NO: 342115 - DNA, 825 bp, Cannabis indica
aaaccaggtttagacatcattagctgtattattataaatttttttcattagcacaccacaccttgtggtgcttaatttagaccaagagggtctcatcccaatgcccaacccttctcacctgcgtttaattgggaaggagtaaaaatatagaaatagaaataagaattagaatagaatggaatggaataaaatttaaaatatataaaaaaattattaaattttttcaaatcttgtattagaatggtctttctttccattttaaagaaagactcttctattgaaatgatatttcaatactttaaaattcaaccaaacaaatgaatggaataaaaattatttcctttccattccattctattttattacctccaaccaaacgccacctaaactaaacttagtagcttattagttcttacatgataatgaaggtaattgttaagtaagttaagtgtaaccacaccattcttatcctctttgtgatgtttgcttatgtaacaatttttttttgggggggcttcatgtaacaaaagtttattgttagagaactatggtttagttggattcttaaatggtgatgttggcattttgaatttttaataagataaggcaggtggtgatttgttgtttattgtttaatattccattatttggttactcttgcatcactatggtgggggttgccaaccaatttttctagctggtgcatgttataataacaagtattagggactgatttctaagaaatagttgacatttcaatttggttccaatgaacaacctcgaacctgacaagatttcatgttcaggagttttggcgctaagaag

SEQ ID NO: 342116 - DNA, 553 bp, Cannabis indica
catctcaccaaacaattcattcagaaggtactcatatatatatatatatatacatacatattatcaatgtgcttgtgttaggatctccttttttcattcatttcactgtgcattattcaatttatacatataataagttttattttaatgttgtatacacgtaaataagtcaagacctcagccaatattgttatttaagagtgtgctgattttgtttgtgtaaattatttttatttcaaaatatattattattaggtttactattcaatggttatatttttattgtaaccatcatgttacatttttttttacctgtaatagcaggttactaataggtaaacattctttttttagaattaattaattataattaactattttcttaaaataattaattaaatatttaataagacttcttttagcaattaatatttataaataattttttttatttatatttaaattcttactctaattattttaataattaagccattagattataatatttgcaataaaatttattttttttacaaaaaattaaacttctttt

SEQ ID NO: 342117 - DNA, 536 bp, Cannabis indica
ttaattttgtttttgtttttgttgctattctatttatacggttaagtgactgaccagtcatattatttactatagcatgcgccatgatgttgtcaatcaaggaaaatttaccctcctaagggcacaatttttaataggaaaattgttaataaacaccttaaagtgtttaacaccatgcacaataatatgacactttataattagttagcagttttttatattaatttttaaattaaaatatgtgtcaggtcttgacaccttaaggtacatcttaacttttcttattagatttaggcctaacacaattataaaccactaggttgtctttacaagtcacactccctccgtgggctgctcaagaggactaaaggcccaaaaaattaagtatctgtaaccaaccatacaagctattatgagttctacaacccacaaactctcgttcacttgatgatttaattactcatttctaatcttttatttgatcaattatatattattggtatgggaagaattataataatatgataaacttatgc

SEQ ID NO: 342118 - DNA, 1172 bp, Cannabis indica
gcgaatcccgtactagtgcccaagccgaacaagaaatggtgagtctgtattgatttcacagacctcaacaaggcgtgcccgaaagactgtttccacttccaagaatcgatcagcttgtagatgcaacaacagggcacgacatattatccttcatggacgcttactcaggctacaatcaaatcaaaatgaatccacaagaacaagaacatacaactttcctaacagatatgggtccctattgctacaaagtcatgtcgtttggtctaaaaaacgctggggctacgtacataagattggtaaacaaaatgtttaaagattagatcgggcgaaatatggaggtatacgtagatgatatgctcgtaaaatccagaaaggatagggggcaaatagacgacctggacgaatgcttcaaagtcctctgaaaataaaacatgaaactaaatcccttaaagtgttccttcggagtcacctcgagaaagcttctaggcttcatcgtcaatgctcgaggaattgaagataatccagaaaagattcaagccctcttagatatgaactcgccaacaaaaaccaaataagtgcaaagcttaactggttggatcgtcgcgctcaacgaattcatttcatagtcaacagaaaagtgtgtcccattcttaaacatcctgcgaggaaacaagcagttcgagtggacagaggaatgtgaaaaagctttccaagggctaaaggcacaacttggaaaacctcccgtactctcaaaacctctagacggcgaggaactgcgaatatacttagttgttacagaacatttcgtgagtgccgtgccaattagagaagagaatgatctacaacacccagtctattacatcagtaaaagactcattaaggcagagggccgatattcgttattagaaaaactcgcttactgcctcattttagcaataaggaagttgaggccttatttccaagctcatcctattcgggtgtataccgaccaaccactacgccaaatactacaaaaacaaaatgcttctggacgactactcaagtgggcagtagaattgggtcagtgcgaaatcactttccaaccccgaacaacaatcaaaggccaagccttggcaaactttgtggtagattgcacaagcaaaaaagaaagcatactagaaagcaaccccgag

SEQ ID NO: 342119 - DNA, 618 bp, Cannabis indica
aacccgactcttctttttagtgcgagccatagcgttcagcatggtaggtagttttgcggtggttatagcagtctcggccaagggaaacccccctgacaggccgatgggcacccctactggaatattgacctcaccaaagggaagagtgtatgtccactctcggggcagataagatcgtatccctttttcaagctcccaaatatgcctgttgtatgcttcaccacctattctctctcggtagaggtggtcgggcgtctctgacacactactaagcccctcgtccccagacgagttgtgtgggggcgacgctggacaatcttcaaacaaaagttgaagaaggtcctcgtctactcggtgttcacccccccaataatcgctataacgcatctgcaaaaaggaaaaagcgaggaggtgaatacaccgagtaatgctagtaagctatccatgatggactcacctactagtacaaaaataaaaggagaagagaagatatgcacaataaaaatttacagcgagataatcatctaagcaactaaatgaaaggagcaataatggtcattacaacgcttagtattcttactaagtgtaaaaagtaaaaataacgattggctccaaatc

SEQ ID NO: 342120 - DNA, 501 bp, Cannabis indica
tagatccatctaatattttaggtacagtatatattaaattgaattggatccatacaatccaaaaaaaaaagagtaaaattttaatgttaatttttatatacatatatattttacctataacaatataaaatataattactcatccaaactaaatgaaaatactaattaatttgattggatgttggatgtattgaattggacaccccatccaacatccgatccgatccaattggatattgaaaaatagcatctaatccgatctgatcacaattagatatccaatatttgacggtctattgtaattggatcggtcagttatcattaaattggatgatttatgaacacccctactaaaaaagaagcatctttaaattatattttgagttatattgctgggatttgaccccatcaccccaaatacacactccaatattctttatatggccacttgtggagtggttgtgtatttttatgttagaaagttttgtttttttttttttt

SEQ ID NO: 342121 - DNA, 506 bp, Cannabis indica
ttttttttacaaagaataagtaattgatacacaataagaaaaagaaaaaaaaaactatttaaagtattgctaccaataactaaactaaaatttattaaaaaaaaaataaagccaaaataaaagtgttatgtaactgagattttatttgctataggtttttttttttgttcatgtgttacaaatataataaatgaattaaatgaatattagtttttgctttgaaatgattttttgtttttttttttcttttttgaaacggatttttttgtaagactttgactaatatcatttttacttattggagtaactgtaacatacaataaatttaccttcacatgatttgtatgtgaaaaaatattgtattaatatatatatttatatatataaacaccatataccatgtactatgtatcatatgtaacagcccattgtttagcccacaataacaaaaagtaaaaatattagataaaaaaataaaaagtaaaaataaaaaatcttctacctat

SEQ ID NO: 342122 - DNA, 1001 bp, Cannabis indica
aattaattactttatactttttttctcgtacttttttaatgtttcccctaaaaaactttttcgattaaaaaaacccatatctttgcatataaatcatattaaaacacataaaatgtctaatttaatagtgaatatagcataatgtagtaatacattgagaaatgtgccagatattattggtgtaatttattagtgtcacatattttaaataagagcattactattaagtgctagtagtatttttatagaaaatattccacgattagttagtaatattttgtaaaagttatttttttaagttatatgagactcaatacttaattacaccgattgcgatttaacactgaggagggaattagacaccaattaattatatcttttagcaattctctttaaataatgagtatattcttatggggcactaaggtgcctagtatgacatgacgttttataattagttagcggttctctataatatttattaaattaaaataagtgaaatctgattaggggtgatcattagactacatccaatatttttaccatttaagctgatccgatccaattaattttagtcatccaatcgatccaacatccactggatattgaatgtagttatatctactggatgtattttatttctatttattggtttaatttggggttattcaatattttagatacctagaatttttttgatcggacccatccaatattttaagtccagtatatattgaattagactggattcatctaatccaagaaaaaaaaaattaattttaatttttataagagtaatttgcggcaaaacctccttaactatcaatttacttgcaaaaaaccatctaacctcatattttggtgggaaaaccctccaaagtactattctgtttacattttaagatgccgtctgtccagttcctaattttgtccacgtggcaatgacaagtcactaaaaaattatcctatgtggccatattttacaaaataaaaataaaact

SEQ ID NO: 342123 - DNA, 555 bp, Cannabis indica
ctagcatcttacaataagtttcttgcactagagtaaattacgaagtatagcataagccataggtttagaaaatgtcaaaccattaatactaggatcaggaagttttgttaagtccattgaatagacttatgatcgaaatttcctttcttgtccttgtaatagaaaacattttggttactccatatgaatggttttaaccatagttctcttggctttgcttcttagtttcttattcttactatccattacatgtttaaactaacaatggattttatcacaagtgtcttccaagtcataacaggacgagttccttgaaaccctcccacttcaacgaggtaccgtgactttctatctaagaacataagtggtattgacctcatcagttttgttaagacaacagaggcagtgggaccatcttatagagaataggataatagaacactttggaatcaagaaaaaaaatatctcctctactttgctactttcagatttagtcactttcttagaaaaatagtatttggtgaaaatgaacactttcttatctaatgaccatag

SEQ ID NO: 342124 - DNA, 436 bp, Cannabis indica
atttaaaggttttttttaaaaaaaaaaaaagaaaaagaaaaagaaaagaacacatataattaatgaactttgaatatacattgaaactctaacaaaaatttctaaaaaaaaaaaggacaataatttaacttttatatgtaaaagtttaaactatcttacaaaatgttaggaaaaatgcataacttagttcattaaattattaatttttagaaaatagaaggaatcaaaattacaaaataataattttaaaatatcaatatactattcatcacttattaaatatatatatatataaaatgggacaaaattttcaaaataaataaaaaaaaaatatgagttttgaggctaaacaataataaatatataaatatatatttgctataaataggagttttttttcaataataaaagttatttagtaattcaattagtagaa

SEQ ID NO: 342125 - DNA, 539 bp, Cannabis indica
ggcatgagcaccagtgtgtactgagcaaacttaagaactgctctatgaccataaggcctctcatactggacaatcatgtcctacatgttcctaagttgttacacttagttattataacgtagaaagtacgttaagtgtttcaagggctgtttaacgcccaaatgtgacttccactagcggtggttgtagtatagatcgggcggtcgattccacaggaaggtgattatggacaaaagcgttagtagaaaaataaaaacaaaaggttaataataagtgataatagtaaccaatgattttgtgatttttaatttgataataaatattaaaagaaagcaaatagatgtgtaatcaatagtaaaagagagaaaggcttcaagaatcatccatatgcttgtttagctattttgtacctttgattcactaagttgacacaaatgatgtaacattaaagttcattatattttgagtatacaagttcttaaaaataaaagaaataatttaatcttatgtagaacctagaaatgacattatacatcaag

SEQ ID NO: 342126 - DNA, 966 bp, Cannabis indica
atttaatcaaatccgacccgatttattcgaatcggatctgatccgacctgactcttttgtttttttttttttaaagagttttaatattaacttataattttatatccattttaattttgtacttagtattaataaatagaatactatgtttggtattgacaatgtattaatagattgtttaaagatccgggttcgggtccgggtcccaattccgggtaagggtctgggtcccgggtttgggtttgagttcgtgtcccgatcccgatcctggctcccggtcagggtcagggtccgggtccgagtccgggttcagatcccgggtcacggtccgggtctgggtcccgggtccgggtctgggtctgggtctggtcccgggttccacatctcgggtcccggttcgagtccgagttccgggtcccggtccaggtcccagtcctgagtcccgatgctggtctcgggtcccaggttcggtcctagtcttgggtctcgggtccggtcccgggtcccagtttgggttcgggtttgggtctcgggtcaacaaaagtagttaacatatttaatataaattatatttgttgacgtgtcaaactgtgattggtttaatagagtatgtcaatttttaaccggggatcttgattctttaatatttatccatattcttttttattcacatggttgattgaaaaaaaaaattaaaaaaagggtatatagaataatttttacaaataaaataaggatggttgatacaatcactaataaaaattactactgacaataatttagtcacaacataaattttttgtgactaaatgtgacttttagtcacaaaaaaaaagttacttgtgactaaaacataatatttagttacaagttgtcactaatttagttttagtaaaaataaatattgtgactaaaaacacatttaattacaacaaattgtaattttttgactaatacttttagcca

SEQ ID NO: 342127 - DNA, 755 bp, Cannabis indica
caaaaattattagaggctaactggagtgatattcaagttgaagatttttgtttttaatattattattactattatttaaaagtttcaatacctataattttactttatgataattgttttattgtaggaatatattgttactgtgagagcaaaaattataagcatagataatatatttggatggtattatatttcatgtaaatcttgcttgaaaaaagttgtacctaaaaatgatattaattggtgtgacccttgcaaaaagattcggaatatcctattgtgaagtaagaaatttatatttaatttctcaaaatactaatttattatgttatttatgttttctctattttttgtttcatatttaattttttctctctacttttttcaccctattatatatgttcaaaatacatatcaaagtcaatgacaaaactactgaaacaactttgatcttatttaatgaagtagctgaaatattactggacaaatcagtaaataaattggttaacaagttgtctctaaacaatgatgttcctatatagaaggctttgtggaaaagattttgtttacaagcttaacttaaatgagtacaatttgaaagaagggcttgagaattttactgtgtaaaaattttttgtgacctggatgaaaaattagaacaagaatatgaatgaaagaatgaaaaaacaacaaaaatgatcaagaaagtgcattttgaaaataacatatcaaatcatttagaagactctgatgaa

SEQ ID NO: 342128 - DNA, 845 bp, Cannabis indica
ttttgggttcaggtcaagatttcagtctaggtccagatcatgctctgggtgtgagttcgcgtcctgggtcttggtctaggttgggtcggagtcccaaattccaatcccaatcttagtctggattcatttctgggtctaagtccttggttctcatcctggtctgggttcgagtttggtttcgggttcgggtcttgctttgggtgtgattctaggtgtgggtttgggtttgggtccgagtttgtgtctgggtttgtgtctaggtctagaccccgatctgggtctaggttcgggtccagatccaagttcgggtcccgagtgcgggtagaagtttgggtgtaggtcaagatctcggtctagatctggtccagcattttgatcccagtctggatcttgatcctagtcaatgttcgtattaggatcgctatatgggtcaaagtctgtgtttgggatcgggtgccagatttaagtccaggtccgggtctctgttccgttctgggtacatgaccgtgtttgggcccgagttccagtctcagtttgggtctcaggttaggtctgggtccgagtcctgatcatggtcctagtgttgttctagattcttggttggacgattcttattcaggttctaattttggttcccaggtctgggtctgggttcgggttttgttctttgtgtgggttctggtcctaggctgagtcccagatctagacaccggctggtggtgtgttccaggccccgttacctgaatctttagtcaagatctggatcactgtcacgggtctcggtctagttctggttcaggtccgaagtgccatttttgagtttgggtttgggatcgagactgggg

SEQ ID NO: 342129 - DNA, 569 bp, Cannabis indica
caccaaagccactctaccccctgtcaaaaacgccttaaaccaatcggcgaaagtagcttctgcagaaaaatgcaaccccacacctgacctatgccaacatgattgcgcaaaatgacaaccaaccaaaacatgaataatggttccaacttcatcagaattacaaaacacacagcgaggatcaacaggaacatgttttgtacgcaattgggtacgacttgggagacaccccaaaatagctctccaagcaaaatgaagaaccttgggagggattttaactttccagagaaccctccaccatttagactctaattgaataccccattctcctttcagttcttggagatagcagtaggaactcttaattgagtaaaacccattcgactctttaccccaaaaccaagaatcaacattaacattatcacttagaggaacctgcgttatcaaatcaacatcccttgcctcaaacaaatcatgtaagacctcaagatcccattgcttatgatcgatatgcatcaactgcgagaccgtgctatgagccaacacaggatgtctagaaatgacacaagggt

SEQ ID NO: 342130 - DNA, 768 bp, Cannabis indica
agccaagggacattaagcacaggggtagacacatcaggctcgattctccttctagcaccatcacggaccagttgttgtgattcaaacacactccgccaaataaaacttgggttaggacctatctcagccgtaaggaaattaccgtttggaaagtagcgggccttgtaaatacgccccacaagagagtcttcatacagaagaagatgccatccctgctttcctaacaaggaaagatcgtaatcctgcaaattacggaaaccaaggcctcctgaattcttgcttctacaaagtcgtcgccaactaaaccaactgacaccttttgttctattattagaggacccccaccaatactttgacattaagctctccaggtgtgaaacagtcttaaccgaaagaagaaacatagacattgcataggttggcaaagcttgagcaaccattttgagcaaaacctcacggccagcctttgataacagacgaccttcccaactctgtattcgcttgagcattttatctttgagaaaacccaaaattgcgtctttattcctccccatagtacaaggaagacccaagtaagtactttgttcatcagccatagacattctcagcatggagcacattctttcacgaataacaagagaagtattaaaactgaagaaaattgaagacttggtaaaattcacctatttttatgatactttttaatatatatttttatttttaaaattatatatgtttttttttcaattggaaaaaaaaaaaaaaaaa

SEQ ID NO: 342131 - DNA, 612 bp, Cannabis indica
ttaaataatatataaatattagggaaattaacaaatttttaaatctgaccataatttaaaaaattaaaataaccaatttttaaatttaaacctcaaaatatcaaaaaattaataataatctattaaaaataaatattattaatttaaaaaatgatatttaagtttaaatatattaaaaaataatattttattttaattttggggtttgaaaattgaaaaaattcgaaatccggaaaaaatcccacaaaaatcagatttttgggtgaaaaaaatgttgctgccagcaaggctgcagctgcatcccacgagaggctgctagcaggcctcagtgcgcgcggacgtggagattagcagggtgtacgtgcgggaaacttcggtaggtgtagcatcagacatgggcggatgcagcatcaggtgcgcatgtcccctgtcttaagcgagcgtgcataccgtgtcttcagacacgattcccaggcatccgcgcgtgtggatggtgtttgtccgagacacctagtgcgcatgagcaccatctcgacaccattaacacccgattttcaaaccttcataactttttcaatttttttttttgatgaataaggaaacttgtattgc

SEQ ID NO: 342132 - DNA, 670 bp, Cannabis indica
attggtgaaaattccctgtttgtgttgactaaagaggctcctgagcagccaggtgagaatgcgaccaaggcagtcaaggaaaagtttgagtgttggcagaatgctaacaacaaagctcggtactttatgctatctagcaaggtcgacaccttgaacataaggtttgccaatactctcacggctgcagaaatcatgaaccaggtaactgaactgtgtgggatggcgtcaattcaaactcgctttgaagcgaccaagaatttcatcaatgcacggatgaaaccgcatcagaacgtgcgtgatcacctactctagatgactagttatttctaaggggctgagaatcatagagctgttatagatcagacaactcaagtgagtttgatgttgaatagttttactccagcttttctgccctttacatcaaattatgtcatgaacaagttggagcttgacttccacgagttaatcaacaaccttcagacatttgaaaatttgattggaggaccacaaaaagaaggaactaaagctcctagttctagcactgctaatgccaaggctgaggcaaacattgcctttgctttgagacccagcaaaaagaagaattggaagaatagaaagaagcctctaaaagattttaaaacagttaaaaagaaaaaggctgctaatccag

SEQ ID NO: 342133 - DNA, 1007 bp, Cannabis indica
atacatatttatttatagtaaaactttattataatcaatctatattgaattgaaattacttaaaataatccaattcagttattatgacataattattactattttaatttccaaaaggcaggttgttaaaattctaaaaattgtatcattttaagttaccataaaaatatttataatgataccttcctatacgacatagattacaaaccaaattctataaaatttgacttcccaaatatatctgaacacaataaattcgcatttgacaattagtgttcccacctccttttattacaatatcttcgtatttattattcttcaaattacttgattaattttaaataataatattagaatctgaataataaattccaccactttccctttttgctaataattcctaaaaatatgaaccaaccatagctaaaagctattatcgtttaaacttaatcctctttaaaccttatttcacttgaaaatatttttaaaatatcactttaaaattttctttacatcataccttaacttaaataacctttatattccaactagtaaaatttgtctagtacataacttgttcttcctttcttcatctccttcgtcttctttcaaaatcaatgggagtccagtcgagaccaaaatgaaagcgaaactggatcctagttttgatttttctcacccaatttctattttgcaaagtcttcttactttgtttggttttatctgttatattgatttcattttctcttttttaattgctttatgtttttcatttatgtattttgagtttttaatctgtttatgtatttaggtcgttgatgaagatggcagtgatagtcagatgtgggtcaagaagaaggatacatcaaatcctttattggtttggaccgaatccttgattgcgtggcgaattttttgattttgaattaaaatttcctttctttttagatgtccatatgagttatgttgttgatttattctgattttatttctgagttagtgaaagg

SEQ ID NO: 342134 - DNA, 1357 bp, Cannabis indica
ttttttagggttttaattattggtttagaaatcaaattttttgattttctaagcatagaaaatcaaatttccctattacaatgacatatgtgatataggttttttatttatttaactaattatttttattatttttcaaactaatatttatatctttaacaatattagttttttttaattctttttgttctaattcatatttttaaaaaatattatatataaaaaatatcatttttagtaacaatttttttaatcacaacataatttttttgtgactaaatgtaacttttagttacaacaaaaaattacttataaataaaacataatatttagatgttactaatttaattttagtagtcacaacaagtattatgactaaagacacacttagtcacaataaattttaatttttgtaactaatacttttagacgcgaatcttttagtcaaaacgtataaatgataatttataattaaattataatttttttactttataaaacttgtgattaaaagtaagatttttatagtaaaatatacatattaaagaaaaataaattatattttaaatattataacaaaaaaataaaataaaaatattatatgaaattttgttatataaaaataaaaattatacatgatttaaaaaattataataaatttaaaaaatattaaattaattcaaaatgataattagaattgaattaggaatagtaatagtataaatacaaaactatacaaaaaatcggaagttaattccatgaaaaagcatgaaaaatcgaagaaaaacgaaaaaattgtgaactgtacggacagttttcgcgatcgcaggaaaatttcagcacagccccgattttttcaaatcttcaaaaaatcataactaattcaaataaaatcgaaattgagttctgtaaaaggctaacttgcttaattttttccatactatccaataaaaataattccagaaacagaatcgcaattatttttcacgaaaatttacaaacatcaatcaatcatcaaataacactcaatacaacatgataccatccaaaaacatacaaacaatcgttttaaagtccaaatttcttgcaagtaaatcaattaccatggctctgaggccagttgttggaaattattttaccaggatcttagatctactcacaagtatgtttattaacatcctaaatatgaactttctaaaacgataaaataaacacatataaagtttaagaaaccttacattgggtgcagcggaatataatgactccttccgttcagatatctagcccttgattcctttctgtagcagagcattatcaatatctgaacctggatctctttctctgaatctttgatgct

SEQ ID NO: 342135 - DNA, 603 bp, Cannabis indica
acaaaatcaagacttttttgcaagttatggaaactaaaggttcggcctctgtccacttttttgcaagttatcaactgctactacttcgtactttgctcctccttgccctgtgggtaatgccccaatcaggttaattccccatattgaaaatgggtatggcgaggtcatcattcttaattctgttggtggtacgcaaggtatatgtgaaaatctctggcatttatcgcatctcttgacaaatttatgtgtgtcttatttatcattggccaataatatccttgacgaataatctcctttgataaactttgccaacgtgcatgatctccacaaaagcctttgtgaatttttttgactatctcgtttgcttctgttggcaatacacacagtaagagagacattgaataaccccttctatataattttctttggactattgtatagcgaggtaccgaatataagagtttgtgccacatttttgtttgtaagaagttgtccgctaagtacatatctcagtatgggtgtcatccgtgtaggcgaggcatctatcttctcaacttcttccttttcacatatacttgggtcgctcaaaacttccaccggtac

SEQ ID NO: 342136 - DNA, 588 bp, Cannabis indica
acataataagatatctcattcacattgttataaaaagcaacaaacaatatcttcatgtaatcgggtagctgatccagttcatttatattccacctatataatacaaaaataaaatagagtaaaattaatgttatgtatataaaatttctatgagaaagataatagttttaatgagagaccaacctctcaattgcctctagaaaaagctgaagctcatctagtgtaccatacacatcatatatatcgtccatgagtgttagcaagagaccaatttttgtcatcacagttctaacaaatccaaattctgcctcatatttcaatgccactgcagaatagaaaatttccactactctgtctctagcaaatggtagcctttctgtcaatctagaaccactccaccacctatatatacatataaaaatataagaattactcctcatatttatgtagttgcacactaattattaattagaagaaactacaaatgtacatttagtagtgtctaataataattacgtaccttgaaatatatttgagctctttttggtatgctgactgaacgaagttatagtcaagtttagcaaagtc

SEQ ID NO: 342137 - DNA, 1018 bp, Cannabis indica
gggacacatgtcaagcgcgactgttcgagacttagcactgggcgtcccttcggttttcgacttataaatgctctgataattaatatttcgaaatctaattttctctctccacggctgacggctgcacttgattatttttgatttcccatattcgcttttaaggatggaaactgaggcatctaaggttcctttgagataattacctcttttcgtgacttgcctataaataccaacagcattggcacataaactcattttcatctcccttcttttctaagtaagcttcagagcaaaaagagaaattcttggcttcaaagttgccgaagtgccttcatacaaactgctcgttggattgacggtgcttcgaactcagacatctgactctcgagtaagtttctgatttcctttatgcttatctttgcatgtttacatttcgaatgcatcttctactgtgctgtagaaaatgtttaggaaaccctaggtttagaaacctctgcgattcttctttatcatgtcttcgtccgattttacagccataatgcttgtttctgaactgcataacgtccatatttcatcttgcttattctaagcctcatgaattttttttccctaactcaagaaaatttttgacttcttgagttctgacttttcttcaaacatactcgttctttaatctgttgagtactcctggtctgcatatttgcttatttattgttcgatattccaaccaaacactcatctcgtgtgttgtcttttgtagattaactcaggtgagtcttgggaacgcggacatcggattgacctggacttgcttcaacttctgcacgaggatcatcctcgtctttgttctagcccaccttcctctactaaagggcattctccaactcttgtacctagccataggatgatggctcgtacaaagaaaactacgcatctggatgacgcacctgatcctcaagtggctcggcacgccactttgcccagcaccgaataggatccggccgtccagatggaggag

SEQ ID NO: 342138 - DNA, 664 bp, Cannabis indica
gaatttatacattaaacataatcatgaaataaatcatatcttttattaattagtaaattattgaaatagattttatttaagacacaaaatccaacatttttgtacactggttctcgctggagtttagcgtcttctagggttagcttctactctcgtaattttacaactgagaggccaggcagtgttacaacgttgccacccacctacccgtcctaatggtccgtgaaattattgacccaggaatggcggaagaagatgagttggatccccgtgtgggatccggaaaaattgtagaacccatggagggcgtcgaggaagtgtcagtgtgtgacctcgaccccaccaaggtcctccggctaaaaaagagtttagaaccggaggaaaaagaaaaaataataaagactctaagggctgccacggatgtttttgcgtggtgtcaagaggacatgaccggaataagcccccacgtccttaacgtcaacccagacatgccaccggttcaacagaaaagacgccccctcaactcggtgaaggccaaaaccctagagaaagaggtggacaaattgctaaccagtggcatgatccgggacgtgtattacccagaatggctggctaatccggtgctggtaccaaagcccaacgggacttggcgggtttgtataga

SEQ ID NO: 342139 - DNA, 731 bp, Cannabis indica
tttttatgtgtattaagcaaaaaaaaatgcaaaaataggtatttggaaatgtttgggacaaggagaaaaaggagcagaaaaaggcttattgctgactggcattgctatagcgtagtatttattttttggattgcttgttacaactctggacccttgttttagggggagtttctttgtttgtggtttgtgcacttttctgtttaaaaagttgttttgtttgtggtttgtgaacttttccatttaaaaagttgtcttgtttgtagtttgtgaacttttctgtttaaaaaagttgtcttttttgtggtttgtaatcttttccgtttaaaaagttattatgttttatgtgttagagtgcgttcatgcaggggagttttttctatactctattgtttttgtttctaacacttgatgtaggttttctccaaataaaatgttttgtcaatcaattatgtgccaaagggggagattgttaattccatttttgatatatttaattgacaaaaatattttattaatttcgattgtggtgtaaatattggtttccatattttgtatgtgaatttaatctatctttggaagaaaaattgtctgctctcctagttatgcaatataaggtaaaaagggtaagtttggttactcatttcttttctacctaaccaactgttatattctgatcttgtgtgcattttccattttttatcagatttcttgaggagaaaaccggagctaaa

SEQ ID NO: 342140 - DNA, 613 bp, Cannabis indica
aaagagttttatttagggcataaaacccaacaatcattgcaatgaaagggatgatcaagctcccgattaccttgggaaccgcccctgtagtagccaagtcgatggctaacttcgcggtaaccgaccaatattaggcattaaatgtcgtgattggtcggacaattttgaaagagatgaagatcgttacgtcgatctatcatctcacaatgaagttccctactcccgctggagtaggttgtgtgcgaggagtccagtcagactcgtgagaatgctacaatgcaacagttaagctcgcagagaagaaatcgcttaatgtcatctatctgttagaggcaccacttcctcgccatgaggtccttaggatagaagaagtgtcgcataaagacggaccggatttggatcctaggatcctcgattatgccacaaccgcccaagccgcggaagaaactattaaggtacctatcgattcgtagataatagtttttgaaaattggctctaaacttacttttcagcagcgagaaaaactaacgacatttctcaaacaaaatcttgatgttttcgcttggaaacattcagatatggtcggaatatctccacaggtcatgtgtcatc

SEQ ID NO: 342141 - DNA, 745 bp, Cannabis indica
gaggcaaggagaagtgggaacaaaagctgaaattgggccaaatagctgaagcaatgctaaagcgaattcagcatcctgggcagtgacgtggaaagacttgggaacacggatttttgctgtccacatcagcaggagcgtgtttgttactaaaaatcagaccagctggaggttgtgtaggaggaggactaaacctagtgggccaaagcgcaaaaggattgggattctatttttagggtgtgatttttgtacccttttgacccaacaacaaagaaaaagatagccaagtacaccaccatcttgaatctaacgtgagcagttgcaattttttggaaggagaagtaaatgcagaaggaaagtacaacagaggaaggaagagagggggaccaagcttttgtgtttgatttttcttttaccctctcttaatatttttctttctctttctcttttcttgttgcttgtacttagttattaaaaactttgttgaactgtaaaacccggcagcagccatggaagatagctttttaacttggattttagttttttgatttaaatatgggctagacttttgaggcttgaatgactatgaacttctatgttgggtatgattaatttttaagcttactttaacatttttgcctttgttcattcaagtgagttttcattttatttgatcgttgtttcttggccatgaataacaatttgataagctcgatcttgttccaaaagggctagatctagtagttca

SEQ ID NO: 342142 - DNA, 503 bp, Cannabis indica
aataaaccgctcactttagagtaataactctaatcccggtttctagtttctcacatatatcacattccatataagcaccattgtacatatctctacatgctaactactatcttacctgatgtcccgcaaatatggagattctgaatcccccggtgctcctgaccaagtgagggtaatcctagtcacaaacctagaatacacaactatagggttaacccctaaattcatttctacaaattataaaattggcatttaaattccagatattaacatagagcttggaaagagctttccaacgatataaaaaacatcccaaacggagtctcgagtcaaaagttatgaccaaaacaaaacccaaaaaaaacacaacatggtgccataacatggccgcggctactgggtttaaaaatatgaagaaaagtgggagagggtgttcagctacggcaaaggaaaaagcccaaaaattttctttttaagatgaaaaataactcttttcaatctca

SEQ ID NO: 342143 - DNA, 714 bp, Cannabis indica
tttagtaaacctactacaattagggtaaatcggcttttcagcatattctcacatagtttgaaatgtttcaggacaaacttgagattcaaactctgcttcgttaatcatctctgcgatgtgatcatcttcatactccactcagttttaatttattggtttttggcacactctgcgttatatgtatttgtagtcccgagtatagtttaaggaaagatatgtatgaataaaatgcataaatttttcatatttaattaatggtcttgttgatacaattatttcgagcttattaatttggcatttgttattttttaatgaattccatattttcaaatgccaacacttgccaaggataagccttggtattccattgaacaaggcaatgttcatttcactgttatatcaactgagcataattggaaaaaaaattctgaacaggtaattatcaatcttcataataatattctgttgtactcttctaatattttactaattcagtaattatcttttcttaacagtacctatggatgaaaaaaggtcatggcttttatcaatagagctaaaactccttggctaatatttatggggtaaataattagctatcaatcattgaaaaccaatatttgattataagtacaaatctaatatgtactcttttaactcatattatttctaggcacagaccaatgtacaattcctcaactggactgtttagtg

SEQ ID NO: 342144 - DNA, 732 bp, Cannabis indica
aaaataatttccaacaacaatttggcgccgactgaggggccctgacaaactgaatcaagagcaaaggacacatattcaataccatagccaatttggaagaaggaaagattgacgttcaagcccagatagctactctcgtatctcagatgagggaaaccaaggaaagcctcagaacggtacaagaagagaataaagcatttcaggaagagaatgctctgctgaaatcaaaggtggagatactaaagtccgctcaacgtagtacgacgatgtctcagtcaaggtttcacgttccaattctatccatgccatcccttgattccactccgactacaaacgtaggccaacatccagcggtcatgagaacaccacaaaaccaaacaacacaccagcattcaaccacaacgactattagagcagatggttcggtacaagggggatctactctaacacatggaccctctttggtaggtgacgagactatgaccgacgctcaggtcacaacagttctagacagaagcgttcccgcaccaagcacatgacaactcaagacctccgacccaatcactacaagtatttttatatctaatgttcctattgttccatctacaggtcaagtcgtcgcaatgacacctgaggagatgatcgaacaaatggtaacaaggaagctggaagggatggaggctatgattcatagaatcccaggagtccctgcacctatcaaaaagagcttac

SEQ ID NO: 342145 - DNA, 501 bp, Cannabis indica
caaagttcaactcattatctatacacaaaaagtataatagaatttgtcaccctaaatagttcgaagacctatttataaatataccattttctaaacgatgagggagagatacaccaactctttctcttttctttgttgatacaaaaattattcatgttttatattagaaagatggttggcatattttattctcatcatcctcctcactttcaaaacaacactaaactaaacaaattctgaagacttattaaacttgtagaaaaagctaacaaattttccaaatatatgattaacattcattaacacaaaagacttattcgtattttctaaattatcttactataaaattagatacatagagtaatacaatgttgtcaagtttcctctaaaattttaaatgtaagtataattatttgatatatatactaattaatttggacttcatcacactacaaaaaactgctaattttagtgacaactttttagttacaacataatttt

SEQ ID NO: 342146 - DNA, 513 bp, Cannabis indica
caaagttggacccgcactcaggacccgaacttcgacctggacccaacctagaccaagatcggtgtcaagaccttgacacaaacctagacacagacttggacccgaactcaaacacccacacctaaaattagtcccaaagctagaccgagacccggacccaaactcgaacccagacttggatgagaaccaaggacttaaacccagaactaaatccaaactcagatcgggatgtgaacttgggaatcggaccaaacctagaccaagacccaggacgtgaacctacacccggagcctgatctggacctagtttaaaatccggacccgagccaaaacttagaccattacttgaactccgaccctaactaaaacccaaactcaaactcaaaattgcaaagggaactagaactgaactaggacaagcaccaagatcaggacctaaacccaaacccgaacccaaatcaaaacccagagaaagacctaaacccgagccgagactaggactcgaacccgaac

SEQ ID NO: 342147 - DNA, 819 bp, Cannabis indica
gataactaatcagattgtaaagagttttatttagggcataaaacccaatatttccctattatcaggttatggtacagatcaaaaccattgttgagtttcttcctggtgacgtatcgggcgtaggtacgggcgttagtgacacatgctaagtaccgggtgtaggtacgggctcaacttattagacgatgtgatatattagtgccaagatgtggcatgggctcacctgattaggtggtgcagtgatattatatatcatgttgcattatgacacgggcttgcctgattagacaatgcaaatctatgagcatatctatttctatgcatatggctggttatattacctactgttgaatgttatgtttcattattatatgataatgaaatgcatcattagctatttcatgaatccttctttaatacttttctttttgagtctatatgactcacgggtgctctgtgatgcaggtaagagcaaggaaaagctagaacaactatgagatgatagtcttctccagcaatgtacatatttatcccaccgacctgtgtgctgagttcccaggagttgttttggattggatgtatctactgtattttgaattttgttgtatatagtctttttggtagaccttttataacagtgatccccggaacacttttttgctatcgaatgatgtccgtttttagtgatatattttagtcaagcaatatcttattacgaataattctgataacttcgggcaagaaagaggcattcccctattatcgagatggtgggatttgattattattttttttattgaatttagttatttatatctt

SEQ ID NO: 342148 - DNA, 613 bp, Cannabis indica
atcaactagtgatattgacttcgaaagatacaacggtaagattataatatcttaaccaatatcaatatcggtccagtccaatgtatactccatacattcgaagctagtatactttgccaatgttctggaaagaacacaacacttattgtaatatctaggaaaataaataatatttaaatagacatattttattaaatatgtaattattttggtaacgaagtaaggttatgatcttgcttagggtaattattgagaatttactcaatgaaataaatagcataatttattaattacggagattatattgggatatgtgagtaccgaggatatcaatttcgaaataaaatatttttcgggcccgacaattgtggaaatttagcaatgtggttagtaatgtcacgacgttaatggaagaattattcgagaacatttccggattaggttagaattttattagaatgtcgggttgatggattagtgaaattaccaaaatgctgtaggttattttagagattatttagcttttagggtaatttaattattctttaaataattaatcttttatttttttattttatattatttaggggctgtgatatttgttttttaaaaa

SEQ ID NO: 342149 - DNA, 1099 bp, Cannabis indica
cctttccagatccaagtcagtggtttgggcggtaaggtccttgaccaattgggttaactcgtccaaccgagcctgaatcaccggatctgtggctgtttgagcaatattggcaccaacattcgcttggtccccttggtctggctcaggtgggttcactatgttggaaccacgattgtctctatttctgttgagggcgtcccgcaggtctctaccccctcgggggcctacccgttcaaaaactgaccctgttcttggccttcctccagcgttctgactatcagcccttccatcagctgggggtggtacttggtcattcctacccctttggggtggatcttcaggttgatgttgcctattaggggcatacggccctctggcttgataacccctcatcatcaccataaccgtcagggtagtttggatggtagtcactgttgacctcagggtcttctcttctccctctggacctactatttcttgggcgatcattgccatctcgtggttggccacgttgatcgcggggttgccactccctacgttggggtgtcctcccactatttctgccacgatcactattattgtttctagatccaccactccgccttagacggacattgtgggagtcatcgcgtcccatatgatgaccgggtaggacttgctcatcagccgggggtggtcgattattattgcggggaaccctgttggaggggtgactcctagtcttttcttggttccttgggcgctcttcaggtccatagaccaccctctccctctggttccttggggtagggacctcccgagggtaggtttgaggtatctgttgattgttggcatcagtacccatcccttgagtgttttggttgaagtagcttcgtattaagtcggcaacctcttgggtgcgacgatctaggtcgtcttggcgcctcctcatctcacgagcatgatcttccagccaagattggaattctctcctttgattagcaagactttcagtcagggcctctcgagcttgattttgctcttggtgcacagtttgaaactggccttgcatctggcctatcgcatctcgcagttgatccatctcggggtcaattccctc

SEQ ID NO: 342150 - DNA, 622 bp, Cannabis indica
tttgatattatactgggaatggatttcttatccaagtactcggccagtattgattgtaagcggaagatggtaatcttccaaccagagggtgaggaaccgtttgtttttgttggattgatatagggatctcggatcccaataatttcagtagtaacaaccagggaattgttatgagacgggtgtcttgtgtttctggctgtggtattggataccactgagcctgaatcaatttgaccagaggacatcaaggtggttcggaaattcttagatgtttttcctgatgaacttccaagtttaccaccccagagagaaattgattttgttattgatttggcacctagagcaaaatcggtttctaaggcccttatagaattgctccagtagaacttaaagaattgaaaattcaactttaggggttgcttgacatagagttttcacagcctagtgtgtcaccctgggaagcccatgtattgtttgtcaagaagaaggatggatctttgcgtatgtgtataaactactgggaattgaataaactaacagttaagaacaagtatcctttacctaggatcgatgacctttttgatcaacttcaggggaagatggtcttttcaaagattgatct

SEQ ID NO: 342151 - DNA, 562 bp, Cannabis indica
ctccctctgcttggcctcctcctagaactttgcctccgcaagggcctcccttcattgagcctcctcatggaacgcctgcctttcggtagacaagtcccgaaggatcctcacgacctcttctatgcccccgaattcggacatgacgaagccatggtcaatcaaggtcttggagaggcggccggtctctacagtaatctgaaaaaagagacaagagtgagattaggtgccttagacaaaatatcaagggaaggaataaatcacaagtacttaccgcaaccacggcagagctgatgtcttgaacctggtagacagagttcagagaggtgcaagcggcatatcttttaggcgagaactgagttaggtgggagacgaactggctagtcatctccgaggcaaaggggccaaggtgtgcccgacaaagcggttaaatcagtccgtcagcggatccatgttcaggttccacggattccggaaggcgtcctcgttaagagtgttctcctgctcctcccgtaaaattttcttcaaggcctccaccttagcatgtccctgttggaaattattt

SEQ ID NO: 342152 - DNA, 589 bp, Cannabis indica
atgttgctaattcaattttaattaggttaaaatagtataattagcctaatacaattatttaaagaagacaaatgagcattcacaattggggttgttcatgtgagggagggttgggtttagtcatacccactactaatagccccctaactctgacacaaggcccgaaggagacgaatttagcctttcattaaataattgttatccattaaataaacccaatactaattggacctaaataaaactatcataaggtgatatttttttctagcaacctagtctatttaaatatctagaaataaatgggctttctatatgcatctaagcccaaaaacaaacatataggctcataaaggtcaaattcatttggatgagccctatcatgcttctaggtttacatagatgaaagaaatacaaaatttacctgttacaaattatttataagatctattgacaattggactatgattaaaatcagatcattggatctgtcaacaagttaatcatagcaatttagatcaaataaataataggtttgttaaaaaaaaaatttgaataaacaatataaattaaataaacaaacattgtccat

SEQ ID NO: 342153 - DNA, 652 bp, Cannabis indica
ttctaattataaaattgaaaagtaaaaacagttttattaaacatgtttttgaaaaatatttttacttttttacttttaaaaacaaaaaactaattaaaaaagtgttaccaaacgccaccttagttttagtcataacgtacaagattgtaactaaaaacatatttagttcaataaattgtaatttttgtgacgaatacttttagtcactgattttttaatcgcaacatagaaattattattgataattggttacaattttttattttttattttcaatcacatattttattgtgattaaaagtgagattttttataataaaagtaacttacgagactcttaagggtattataagagttgtttaattaatactataaataggtcctatatgactttaatattagttttacatatctttatatatatatatatctattctatataaagtgtgcctatataactgaaattcttggtttatgagaaattcatgggtgactttttatttttatttaataaaataataaaatattatttacatataataaaataataataaaacaaatctcattaatatttgaactgatatttgatgctaaatattcgagaatcacaacccatttaaaaagaaaacaatttgatactctgagactctca

SEQ ID NO: 342154 - DNA, 858 bp, Cannabis indica
tgcaacagaatgcaccaagtgtctgtggtcctaatgtaatcaacacacaattaaatttattaggatatttttctcattctgttattctttttttaatacgtgtcaaggtcttagaggccattctttaattttgtacacgcctaaatggctatataaagaaatataatgcatcaactacatttaagttgaatattcctaaaaacctatttctcctattttcctcacttggtgttagagctagaaaaggccaacgcttccatgtctacaggaaacgatcagactccaccaactacctctactactcagagcgatgcacaatcaacaacaaccaaacaaagttcttcctctgcttcaagcagtcatccaacactttttctccctttagaagcacactcaaccagcctttcattgtgaagctagatggaaacaacttcacgctctggtaagccatggtgtctaccattattcgtggccacctcctaatagattcctaaatagaaccaagctatgtccatcggagttcatactgctatgccaaatttttcactctgacgtggcatcacgagaatggtgacacgtggagtccacttgaagcatctgctcgggaagatagatcgagcaagatgcctcattggcacatccagaataagatattcagcgatccgtacagagcactcaacacttagcggattcagccttcgcatcatgagtcatcagctcaatccctataactcagggatcaacttacgtggatacgacgtacacacgatcccactatcagtgtattcagccttaatcccacgatccttgcattcagcattgatcacacaatctttctgtttatgcgcattgtaacga

SEQ ID NO: 342155 - DNA, 618 bp, Cannabis indica
tataactactatttatgaaagtttttacattttattttatagatgacaactgaagaaatgagggatttatataaaaatgttaatgataaaattggtctctataaagattaattttaataaatattatgtggaggtgaaatatatgccttaaattataatgataaaaagggaggtcacgattcatatgactaattgcttctatatggaaatgtttatttatcttacgattttgcaataattaaaatgataaataccgtatgaagttggttgtgcaatcgtgtaatcgttataattatatcgtgtcccgtacaatcattaaaatcattaaaaaattaaattaatttataattatttttttattttagaaattcatatattaagtaatttttttattaaatgagtatataaatatattagataaatatataaagttaatttgataactcaaaataataataataataataataataataataataataataataataataaagattataattaattgggcaatatcaactgataaatcagccatgtatatttagacaaatcgaaatgaatgtaagattactttatttataatttagaagtatactaattatgtattttttt

SEQ ID NO: 342156 - DNA, 588 bp, Cannabis indica
caattttcacacttttttttcacacacatacaacaaacttcccatccaaattcccccaaactatagatctacttatggtataattagggttaaatattttggatatttagggtttatcttttataggctcatatgtgtataacaaagtataggttaaggctcaaaaagggtaaataggataaaatttaagggatggcttgaaaggcacaatcgatcttaaaattgcctaaatcactttcctagtcatgcataatttattatttcgcctcaaatagcaagcaagcaagttctagaatttatttcaaacaactttccacatatcaaattggcacacataaatcaattcaattactagaaaattacttaatacgattccatgttcttttaagtataaaattgaaattagtcaagagtgttatatcaccaagcacacggatttttcgaaaaataaatgaacttttcaaattatgctatctacctacttttaaattgactcatattacgaaaattgactcaaaacaataaaaactgaaaactaaaaactaaaatgaaataaaaatttaagtcaccccccccaaactaaagtga

SEQ ID NO: 342157 - DNA, 424 bp, Cannabis indica
caaaaatacaaaaaaaatactaatcacaaatataatcaacacaacacacaatgtataccaataatcagaaaataaaatataagtataagttttgaatctagaaacaaaataattaaaaagtaacttaaaataaaaaatatgcaataacgtaataaaatggaacaaccctattacagaactctcaaaacatgtaaaactagtttcgaacccttgaacccggtgaaaccagtttcgaccctatgaaaaatcataacaaaacataaatgataaacaatgaagtcaactgaaacccgtttcatcagtcaatcaaatgaagtaaaaaatacacacacacgaataaaaataaaaatattgatcacaaatataataaaaaattacacaataaaatttcgcaaaaaaaaatatcacacaatgcacaacacat

SEQ ID NO: 342158 - DNA, 1395 bp, Cannabis indica
ttggtcgaataaaaggttgctaaaatggtgtccgttttagatgagcactactctattcaagtaatgtcatctttgactcttgcctaccgggacattgtatttcattatgttggaaaacttggaaaataattaatatgtttaatttttggtactttgcaaacatatttgctttacttgttattttctgaacttgtgtatgaattaaattgaaccaataatttatttctgttttttgatatttgtagtgtcaaagtgtacaacccacatcccaatcctcatttagaatatgcctatacgaatgaactccaaagtgtgaagatgactcctggtcagagtatcacttcacacttgctcatgatgaaaatgaaattccataaagcagctatgctaggaattgttttatctagagagcaaatagttcattttattctcaacaactgatcacttgagtttaaccaatttgttgttaacaattggaactcttccgacatagacaagctggatgctgaattgcgtgcttatgaacggacattgttacttgcatggaggtccttctccagaaatgcagataagggcgaaaagaaagttgaagatattgagaatgattcctccgacaatcctactacttcaggctcagttgagaagaatagagaaagtgattccagttcctcaaattatctttcacaacaaattgaaccatcaataagaacaatccaagaacagttaagtaaacatattattcaatgttctaatggtgagcagaagggacatttcgaatcaaaatgtctcagatttctcaacactaagatgaatggtaatgctttagtttttgaatcatgtgtttaagagaatgacaaatccatatagattgttgattctagatctactaaccatgtctggttcattgcaattgcttgaaaattggaattatttaaaacccagagagttgacacttaaggttggtaatggaaaaatggtatcggttagagttagaggaaaagcaaaaaactcaagtttgagaacagaattttgaatttaggcaatattttttttattccaaatttcggtagaaacttgatttatgtttcatgtttatagttgcaacaatacaaattgaattttttgagttctggttttatcatttctcgaaatgacattcaaatttatgttgcatctatggaacaagggctttatgttcttagactatattaaccatttgggcttaataacgaactgttcaatgtagctaaacctaggaaccacaaaaaacaaaagatcaataatgaagactaaacatatctatggcacttacatctttgtcatataggctatgatagacttcacaggtgaaccaaaggtggtccattgaaaaatgtcaccatacgtgaattacca

SEQ ID NO: 342159 - DNA, 700 bp, Cannabis indica
ttaaatatctcatattttcttttttaaaatataagtaccgctgtttggtcaagttaacaactaaccactataaagcttagttgcactttgtgagtgtaacccattatttcaaatttcatgacttaacttagtaatgccgccttaaggtcaatattataataagatacatctcttcctattatcttagtcaagagatcaatcttgaacaacagtatagaccaatacctttcttaactggacaaaataacgtcgtctcgaggccaatctatattccttcggtgttgaccaataataaagactgtaagttacattgacatgtactccttctcccactcactattttaggttaatgtgtttattttattaattctcaaaattaatacatattaactactttaatgattatgattaatttatttataataaaaactttaaattataaataaatttcccgtcataattattaaatctgaattaactttttaatttatattttaaaactagtttaaatgaataggttaattttaaattaatcttagccaatttgcatgattttggtttcaaaaacggtaaatacataaacacataggacaattctaatatatcatgtttttactatgagatgcatgataatctaactatgtggtatttctatatatgtacatgttattacactacatgagtatgttattaatcaact

SEQ ID NO: 342160 - DNA, 625 bp, Cannabis indica
tttaagttgatattgagttctggatgctggttttgatgtgttgtgatggaattaaacaagtttgtgtttggaaactcaaacttagatctttaatggcatattttgattctaagtatttttcttagttctattgcttggaatatattgtggaaggttattttagatactctgaaaggtttggtggcatttggataagttttgagaaagtttagagttgtttggggaaacttggtgcaaattggttaaccaatttaccaagttaaccagtttgccaagatctgtaaaagtggttaaccgattttggtagattccctaaaaaacttgttttctcaattcttgcccattcaatgccttagttgggtgtttccctgtttcctaggttattgtagttcctattaagaataaaagaaccttaagttatagtctcgggtttcccgaattagggttttgacgtatgatttacccagttgtgtcatgtgattagggcatccatccagcacgagattgtccgttcaggtcggccaactcagttgaattcggaaaggaggtaagaactgtgtataatatgtaatatgaatatgcgaatgtatatatgtgttaaagtatatgcatgcttgttataatt

SEQ ID NO: 342161 - DNA, 612 bp, Cannabis indica
gatggaattaaacaagtttgtgtatggaaactcgaacttagatctttaatggcatattttgattctaagtatttttcttagttctatttcttggaatatattgtggaaggttattttagatactctggaaggtttggtggcatttggataagttttgagaaagtttggagttgtttggggaaacttggtgcaaactggttaaccaatttaccaggttaaccagtttgccaggacctgtaaaactggttaaccgattttggtagattccctgaacaactttttttctcaattctagcccattcagtgccttagttgggtgtttccctgtttcctaggttattgtagttcctattaagaataacagaaccttaagttataggctcgggtttcccgaattagggttttgacgtgtgatttacccggttgtgtcatgtgattagggcatccatccagcacgagagtgtccgttcaggtcggccaactcagttgaattcggaaaggaggtaagaaatgtgtataatatgtaatatgaatatgcgaatgtatgtatgtgttaaagtatatgcatgcttgttataattgtaacactaccaacacttgtacggaaatggt

SEQ ID NO: 342162 - DNA, 590 bp, Cannabis indica
attggactctaaggtccatccccatctatccatgcgttggcccgaaggattgcctcctttcaaaatagcagagacaatgtctctatcgaacaatcttctcagtttagaaatgtcccacgagccagaatctgtgaggagatcagctacccaagtcaaatttggcgggatttctcccattggtttcggaatgaaaccttttaaatgaggaatccaaggatccctccaaatacaggtgtctcttccctgacccactatcctacaagcccccttccttagaattgcattagctttgatcacattcttccagaaccacgagtcagaatctttatacttgcagttgagaaattcttgtcctcgaagatatttggctctaagaactctgcagcatagagattgacaatcattcagcatcttccaaccccatttggccaagaaagccaagttcatttctttcgttttcctaaagccaaggcctcctaaggacttaggaaggcaaagtttatcccaagctcttagatgcaggccatgatttcctttctcaaaaccccaccaaaaatccctgacaagcccatctatcctcttagccattc

SEQ ID NO: 342163 - DNA, 531 bp, Cannabis indica
aaagtgttaaccgattagcccttattttatcaaaaccagatgcttcgggaagattgataaaatggtcaattgaactggggcagttcgatataacataccatccttgaacatccatcaagggccaagccttggccgacttcttgatagaaggtataactccagaagaaattccacctgttcaacgagatgcggaaacttggaagttatacgtggatggtgcatccaacgagcagggttagggtgcaggggtaatattaatatcaccagaaggctttaagtttcacttgggggcaactatacccgtacaaagcattggtaaaaataaataacaagcacgaaaaaacaaaaaaaaatatagtttcacaaataatgatcataacaaggaacaatattcattaagaaaagataacaaagcacgataaacccaggattaaaggctgcccggtcagccagttgtcttaaaaatgagaacatattccaagtttaaaaaccgcttggccagtcattttgtctcaaaagaaggcctatagg

SEQ ID NO: 342164 - DNA, 608 bp, Cannabis indica
ttgcaacaaaaaggaattattttacattttagaaagaaaattctggattattttctcagctcttggctgaaccctattctccctctcccttcaatcttttcacttcaaatcttcctctcttgtgtgttgttgagcttgttggagcttgggggattttggtgtgctttgattgtgagaactttgaggtattttccagctcttatttctgaattttattgctttgattctgaaatgaaataggtatgaactcatgggttatgttcttgaattgcatgcttatgggttttagattgtttatggagttgtaaccatggttgtgttgtgaattataagattcactttgtgtatgctttgaatggaaaatttggggatttctagttgatgaatttgagttagaaaaacatgctgaattttgatttattttggtgacttccttttgtagcttatttatgagttcttggtgattttgctcaagttggagctttaaattttatgttgtttcatctgaaattttgatgtgttttgttggtgttccagtataaaaattatgtatgttaatgcctatttaggtactttttatttgtgaaagatttgggtgaagcagccta

SEQ ID NO: 342165 - DNA, 966 bp, Cannabis indica
tttttttgtattaatttgtcactaatatgcctacttttaatttgtattccttatgtttttgtgatggttatattatagattatggtgttttcatttaatcttgatctttttattttttcttactgttttttatattgttttttagtttttttgaagttgtttcttggtttttttaactctttttaaaaagaataactttgttttttccgcttttttgtttgtatttttttatcaagaattttgttgatttcaatgacgaagccactcaaatagatgttgaggctactgttcagtcgggtgtgaaagcagttgagattatggtagtgttgttttttttttttgatttttttggttgtttaatggttgtgattgtttagatttttatctaattatcttttttaagatataaaaacaaatgtcttcagggggatttggtggtgattctggtaaccaggttccagattgaaatgttgagcctacggatggtcatggtgtctgtgttgaggtatggttgttttaccatttttgtccagttgcttaacacttgttgtattaacactgactttatgttttttcccctgtttgtttttatatatattattagatgggtacaacaggtgtcattgttgattctaatattcaagttgttgaagatcatccaattcttgttgaagaaactcctcttcttcacaagaggaaatctaagaaaccaatagctttaacatatgttactttttatgtttagcatttggatatcattttttactatctacgaaaaaaagaaaagtatgcaaaggaaatgaaggttaagtttacaaccactgattgcttattcaacaaaatcattaatgcattgtatgaaaaatttgtggtaaagaaaaaagataattctttaataactgctcagcatgccattgctgattatatcagaggtaaaaaaaaatttgtgtggtgcaccttggcatt

SEQ ID NO: 342166 - DNA, 1289 bp, Cannabis indica
gctgtacggatggtatgcagttgcatactcatccacgcgcgccacagggtgtcatagccgagaaaccttggccctgggtgtgtccagcatgattttcgtgggtggaatggggtttcagaaaccccatgaacgtgtttctcggacaaaacttgtcctaacacgcgtctggccgagggaatgggcgatccgcgcgtgcgtgggataggtgatcaccctatcttttttcaaatcttcaaaaaatcacatctaattcaaataaaatggaaattgagttttgtaaaaatgtaaattgcttaatttttttctaaactatccaaaaaaaataattccagaaacgaaaattcaattattgttcacaaaatttcacaaaaatcaatcaaccatcatacaacccacaaaacaacatgaaaccatgcaaatcacatacaaatcgttttaagtcaaaatttcttgcaagcaaatcaattaccatggctctgggccagttgttggaattattttaccaggatcttagatctactcacaagaatgttgattagcatcctaaatatgaacttctaaaacgattataagtaaacacatataaagtatgagaaaccttacattgggtgcagcggaataatatgtctccttccactcagactctaacccttgtatcctttctatcacagagtattatcaagatctgagcccgaatgtctttcttgttgaatctggattcttcacgatcttccacactatgattgaggtaccacttgctgtgtgtcggcactactctatcactaaggggttcgaaacaaacaaagaagaagaatgaaagagaggtggcggctaggtttagaaagattgctcaggtttttctttgaaaggaataagatgcatcttaatttcctgaagccatcactatctatttatattatgccacatagggttaggtttgaattatttggcattaaaataatgaaaatattaaatgataaatcctatataagtggccggccatggcttgtggatatgggccccacttatgcaatttgctgttttatcatttctacatcccattttctcaaaaacgccaattttcaaattcaaccatttaaatgccaatttcaattatttaataactataattaatcattaaataatattgtcattcattacatttattaattagactaaccaaagtctcttaattaacaaatataccctagaaactctttctttacagtttcgcccttgcttagtgataaattcacaaatagacatagtctaatttgagaactataatt

SEQ ID NO: 342167 - DNA, 715 bp, Cannabis indica
agttaattatataggcatgtcgtcttttttttcaaaaaaaaaaaaattgcatagactccacaatcgaattgatcggtggtcgatgctaatgctatcatatatactcaacttgaataggtaagaaacgaaggagacacattaaattccaacgcaaaccacaatatcatatgtgctcgattgtgggaaataaacaaaatatatataaaagaactggaaaataagacattttagtttaattttaccagtggtatgggcgagcaagagagagcaaaatctgattgactaacgattttgatgatgagattagagcctcttcaacttcaaagttgtgttctgaataatgagaatcgattttttatgatggccataacgatgaagaagaatatcaattgcatttattaatttggcaaaataatttaaccaatttgctataaactgcatgattagcattgacccatcatcatcgtatcctgcaacaaaattccaaaaataaaaggtgaaaactatgtgtttaacaaaaaatgatagtattctataacaaaaataccataattttttccaagttcaattataacattccaaaactcacgacatattcaagaattttttccagaatttttgaaactcattccaaaaataaaaggtgaaacccatgtttaacaaaaagtgatagtattctataacaaaaataccagataattataataataaaaat

SEQ ID NO: 342168 - DNA, 940 bp, Cannabis indica
catgtctcagaagatgcttgacgttctaaggaagagaattggcggaagttccagcgcatctcctccagccaagaggtctaaaggcgatgaggggtcctcctcttaggaaaaggcgcctgtcggggaggtcattaatctttcggaggagctagcggttgcaaacccctctactctaaaagttgccaagtccaaggagtctcgaggagggagtttggacaggcctgaacaaccgaggagtgggtctgagctgactaagagtggagccaagccgatgcgagcccctactccacctttaccggtgctttcagaggctaagaagggcaaagagatgctcacccactatatgaactggttggttcctgaggttagtgagcaactgcctggcgttaacaatgactcttctctggagctgctgatgggcggagtcctaaaggaattcaccagggtaagtatttcttgacactttcctttaattttccttacttggctgaaatactaaagttttttctttgtgcaggccggtcagaagtttgcctatacatactcccgggctaagtttgctgcctccaggaacatggctctttcaaacaccatgagggcggaggtggacttggccaagaaggacgctgacgacgccagggtagaacttggagctgttcgaatggagctgggtgaagccaacaagaagatttttaccgcccaaaagaagatagctgagctgactaaggatctcgaggtttctgaccatcttgaagagaccatgagaccttatctgctgaagtgaacagtcttcaagatgaaaggacttctcttcgagcggttctttgtcaggtggaggaggagaagaattttaaggaggaggagctgacgaccaaggtgacgaagctgaaagagaaagttcatgctctggagacagctggtcttgagctcttctatgact

SEQ ID NO: 342169 - DNA, 1503 bp, Cannabis indica
taaatctaggctgaagttccaatgcttcataatttagggatatttggacgagtctgagtacatatttttaaagcattgaaacatggaacacatcatgtacagctgccactgctggggcatagccaacctgtatgctacttgccctatcctctcgaggatttcaaaggtccaatgaacttggctaagttccttttaccaaagcatttaatacctttcatcggtaatattcggagaaatgccatgtctctgatctgaaaatatatatcccgacgctttggatcagcataactcttttggctgctctgagctgagcattcgcgctctaattttgtcaactgcctcgcttgttctctgaacagcctcgggaccgaagaactttctttcacccacttcatcccagtgaataggtgctctacattttcttctatataaaagctcatatggggccatcccgattgttgcctgatagctattgttataagagaactcgatcaggggaaggtactttacccatgatccctcaaagtcaagcacacatgcccgtagcatgtcttctagaatctgaatagtcctcttagatttcccatccgtctgaggatgaaatgttgtgctaaactttaattgagtacccatagctcgatgtagactctcctagaatctcgatgtatattttagatctctatccaaaataatggactttgggacaccatgaagactaacaatttctctgacatataactcagcatactgatcaatcaagatttttgtccgaacaggtaggaagtgcgctgactttgtaaaccattccactatgacccacacagagtcaaactgtcccgtggttgtaggcaaacctaccacgaagtccatagcaatatcttcccatttccacttaggtatgttcaatggctgcaggaaccctgcaagcctctgatgttcaacctttacttactgacaggtaggacacttagcatcatactcagcaatgtcattcttcatgcgtggccaccagaagatggcctttagatcctgatacatcttcgttgaccctggtgaactgagtaaggagttgtatgagtctcatcaataatctctcttttaataccatcatccataggcacacaaacacaattcctgaatcgcaacattctcatttcatccactagaaaaatcactagccttcccagccaaaaccctatcttgggtttttaccaactctggatcttgcatttgtgcttctctgattcgctctaaaagagtagattgcagggtaatattagctaactgccgtacaaccgactcaatcttagctcgggtcatctcatttgctaactattgggagatttatttcacggtatttttttgactttgaccctttctggtcaaggcatcaacaaccacgttggctttaccagggtgataaaggatctcacaattataatccttcaccaactctagccagcatctctgtctcatattcagatctctctgggtgaagaagta

SEQ ID NO: 342170 - DNA, 522 bp, Cannabis indica
gttacatcccaccagaaattgaaaatctacaactcttgtcaacttttgatgtaagcaacaaccaattatcaggagtgttgtcatctaacatttccagactgagtaacttggagagcttaagtgttttcaccaataatttcactggtatgattccttcagagattggaaacttgaagaaacttaaaagattggatctttctaagaaccatctcactggtccaattccaacctctctatggaacctaagaaatctcatctttgtgcgaattttcgaaaataatctttttggaaccattcctcaagagattggaaatctaaaacttttgtcaacttttgatgcaagaaccaaccaactatcaggagagttgccagttaatatttccagtcttagtaacttggaggtgttctctgttcataccaataatttctctgggacaatccctagagactttgggaaaaataatcctaatttgaagatcgttatgtttggaatcaacaatttctttggacagttgccacaag

SEQ ID NO: 342171 - DNA, 1029 bp, Cannabis indica
attaaaaaaaaaaatataaacttaaataatttttaaaaagtattcttaatattttcttaaatttctttcttcacattattttatgttaatttcaatacttattttgatttcattttcataattttttctaactcatgtatattttgtttttatttttttctaagaaaatttcatataattttttattttaatttttttgccataatatttaaaatataatttaatttcgtttgataagtatattttttaagaatatgaattggaagaaaaatgttaaaaaaaattagtataattaaagatattaattttaaataaaataaaaattattaaaataaagtgtctttaaaactttttggagtgtaaataaaattttctataaataaaataaccctaaatatatatgtgatatgtatattatatagtacccaccaaccaagtagatacacatttctgaaagactgaatctttttttaaatagtagttagttttgttactttattttctcaacaaacttaattaatgaaaaattggaaattatatctaaatatttactaccacacaggccaatccgtacaactaattcatcctttacacattaaatatacatatctataaaatattctcttgaatggccatatgctctatataagtattaattatattagtaagccctagcaatagtgtgaatcatgtgtctatataatcatatacatattaattaagagaaatcttaaaatgtatcggtagtgtttagtactttttaaggagttatatcgttattagtgtaattaaatacgtatcgaatcttatataatttattgtaattacttttatagaatatcactaaccaatcataaggtatcacttctgagtattgttattagacaccagttgtacttagtacctctagacttgtcatcttgcgattggctagcgatactctctaaaaaattattatattaaactatatggacctgatacttagttggaccatagcgatattgacacatataagaatgtgtaaggtct

SEQ ID NO: 342172 - DNA, 700 bp, Cannabis indica
ttttatatttgtacaaacacgtggcaagcatcagatatatatgaccctgttgttggtttatcactttttaaggtcaatagtttggtgctttcattgagagcatggatattgtaatctgatcaaatgacatggtgaacacaagaaaatctctcgttgcaccatctgtatctttgtgtctcccttaagacccacaaattgcagatccaggcacttaggttccattcacaactggaatccccatgagcactgcagatgtggtaaatcctatcaccaaaataggcgtcacaagtctgggcactacagctagccaaactaatatgagcaccctggtggatccaagtggtaggaccctgcctctaaaagtagacccatcattggaacctcccactaaaggaaggacccaagagcgatagccccctgaaacaacaattggatctcgtctccaactctacgctagagagacatgcctaggagttggtgagcctacaattggcgagccccatctcgacctaggagaagactttgagttagccagatcagagaaggtctaggccatcctggcctaactgaggaaccaccactactgattgcgatgtttttgctgaatagagatatgaatgtatgagatggatggatgaccaagagtacatccttcgatctcaccaaggagagttagatcgtgttggaatttattttacta

SEQ ID NO: 342173 - DNA, 1097 bp, Cannabis indica
acctgttgttgagtgggagtaatgagttggtatctgtaacaccctaactagcataggcgtattagcgtgattttaaatgtattgtgcagctcattgctaatcaacgaggttattgaaaatcgtgaataattaaaatttgcttatttaattagaaaattaaaatattacatatataaaattccaggatcgcgtttacaaaatacttttataaaagttttctatacacataaacaaaagtttgttgtccagcgactatacagcaaaagcctcgatgtcccaaagatagtacgctccaggcctaaccgccccgacatgtacaatctttacatgctcgtactcacagctcctcaactttagccttgcccttacctacacataaagataacactgtgagtcgacagacttagtaaaaagagcataacatataacatacaaataacccaggttataacctagcgcccatacacccgatcctaaccctaatccccgtgtcccacgcggtactgagtctagaacgttcatacgacaataatatcgaccataatgtcagcctatactcaatatgctagtcatgctctggccatattgatgtgacaacatcgatcagtattttagccaacatacatttgtcagcaattagcacaactctatgtatactattactgctatcaatgtaatctaacaggcaaatacaacatgtatgctaaacatgtaataacatatgcattatattatactaatcttacctcaattttgaattcaggtgtgccggtcaacctgagtggaacaacttctctgcgaattataggctcctaaatcacatcgataataacactcataagtgactcgttaaatcacaaccgagacttaggttttaaaccaaaaaccaatctactgcaacttaatatggaaataccctaaactaacagggaaccaaccaactaaaaacctgaaactaatgcgaaacgacaagctgaatttttgggttctccctactgcaaaatccgggtaaccggttttacccagaaaacctacaaagcttcaaaccctaaccaaaacgattccaaaccaattaaaaccttccagacctgcatatt

SEQ ID NO: 342174 - DNA, 748 bp, Cannabis indica
caaaggccccggctaatggatcagcccattacgttcacggaagaagacgctaaaacagtgcatttccctcaccatgaccctttggtcatagagactcccattgccaataagatcatggccagagtcctgatcaacaaccggagttccgtgaatctattattcaaggaggccttcaccgcaataggcctaacggacagagatctctcaccaagtggttcccaactcacagggtttaatggaactacgcttatcccaatgggaaaagtgaggctcccagtcaccttgtgcccggacacaccccaaagcactttcaagtactgcacctttgtggtggtggactgtccaacaacttataatgcaatcctcggccgaccagccttggtagattttggtgcggtcacatcaatacggcacttgtgcctgaaattccccacccaagaagctggggtagggacggtgaggggaaaccaaggggaggccaggcagtgttataacgttgctgcccacctgcccatcttgatggtccgagaaattattgagccagaaatggcggaagaggatgagttggttccccgcgtgggatccgaaaaaattgtagagccaatagagttcgttgaggaagtgtcagtgtgcgacctagactccaccaaagttctctggctaggaaagagcctagagccagaggaaaaagaaaaaataataaagacactgagggcgccacagacattttcgcttggtgccaggaaga

SEQ ID NO: 342175 - DNA, 895 bp, Cannabis indica
taaattaaatatttttgtccaaaataaaatataatgacttctttttaaaattcttttatttcaatagtataaaaaatattgtattaatttctactcattttagtttactcataatgttaattttgatatcatatctattgagttatattttgaacggtattattttgcttataatattacttcttaacaattttctttttcaaaattatattttcaccatattttatttattttgtacataaaggaaagtgatattatgttctcaatattttatcagtttgttagtgtattttgttgtgttatttttttttaaatgtatagatttttggagacattaaagattattagaggatcaacgaatataaaagataagtttttcttcatattttaattcctatataagtatatatattgaaattttagtttttaaatttggtttattttctataagttaatttcttatcttatttatctattttagtattttaacgtaggttgtttatctatatttctaaacacgaaaagttcacatattgtagaagagtgctgatctcattggttacttcttagtcattcaagcagaagctttagtcttaatgatagtgctggattggttttacaggtttttctttctctttgttatgtggagtctgattatttagctttggtttctatttttcaaatgcgctctttctcttgaaatgagctaggatttttaggttttttgctagtttgctttccaattttcttaaggcatccttagttcatgttcgtttctcatgaattagttgtgcacttagggtggatggtgaattagcttagattgaggattattcatcttttcttattcatatatgtattaaactcttggttgttgttaataagagtttatttt

SEQ ID NO: 342176 - DNA, 1579 bp, Cannabis indica
gtaaaataatttccaacatggaaatcatacagcagacctcgcagagtgctttgagatattgaaaaagtacaatgtgaagcttaacccaaaaaagttttcctttggagtctccttaggaaaatttctgggattcatagtcaacgcgaggggcattgaagcaaatcctgagaagatcaaggctttgatagatataccatcaccaattaaactgaaggaagttcatgccttaataggaagaatggcagctcttaacaaattcattttgaagtcaacggataagtgtctaccattcttcaatgtattgcaaggcaacaaaaaatttgagtagacagaagagtgcgaggaggcttttcagagcataaagaatcatttgtcgacacctcttattttggcaaaactaataactggagagacattactcctctacttggttgtctcagaaaatgcgattagtgtcgcgatagtgcgagaagagggaaagcaccagcaacctggttactatgttagtaagaggttaccggaggcagaatcgaggtatccccctcttgaaaaacttacattatgcctaatccacgcatctcgtaagttacagccttacttccaagcacatccaattgaggtgttaactgatcaacccctgagaaaagttttgtcaaaaccagatgcttctggaaaattgataaaatggtcaattgaactggggcagtttaacataacttatcacccacgaacgttcatcaagagccaagcattggcagatttcctaatagaatgaataactccaaaagaaaatccacttattcagcgagacatagatacgtaggagttatacgtggatggtgcatccaatgagcattgctcgggtgcaggggtgatactaattttgccagattgcttcaagttttactatgcctaagatttcaatttgatacatcaaataatgaggctaagtatgaagccttgatcgctggtttggagatagctaaagtgatgaaggttaaaaatcttatatgccatagtgattcgcaattgattcttaatcaagtactaggagaataccagtctaagggcttaaaaatggcaaagtacctagagaaagtttgaaagaccttggataagtttaattatttcaaaattgagcaaatacaaagagaacaaaactctaattctgatgccttaccaaaactggcctcgcagaatgaattggacgaattaaacttggtttcgatagaggtgttaaacgagccaagtatatatgaggaagaagaagtcgagatgatagatagctcgcctacctggatgatacctataattaactatcttctcaacggacaacttccaaatgacaaaaacgaggcacaaaaactcctgtatccagtgactcgctacacgatagtagagggaaaattgtatagaaggggctattcaatgcctctcctacgatgtgtctttcacgcagaggcaaacaaaatcatcagagaaatccatgaaggcttttgtggggaccatgcaggttggcaaagcttgtcagaaaagatcattcgacaaggatattatggccaactataaataaggacac

SEQ ID NO: 342177 - DNA, 515 bp, Cannabis indica
taccgtgtgctcatgcgcttgctgttataaaagagatgaacttgaatgtttacaactactattcaggctattacacgacaagaacatggcttgaaatgtacaacggctcaacatatccggtacacaatcacacaacatgggatgtaccacaaaacataaaagatctcattgttctgccaccaaacctgaaaataagatccggaagactaaggaaacgaaggtttttatctgaatgagatacaaaataacaaaacaggtgcaggaaatgtggtcaacacgggcacaactgaaagacatgcaacaatcaagcaataaaatagacacagatgaattatttgaattgtttaattctgtgtgagagttcaaacaggttgatgtgttatattctatacacaagggattttttttttttgaattttaaacagtttgataatagttgcaaaatcattttgttacagttttgacacttcttaaatatttagtacaaaaataacttctttattacagttttaaaa

SEQ ID NO: 342178 - DNA, 273 bp, Cannabis indica
taaaataatttccaacaaatggagcttcatgattcgttgtttaagtggactggaattatgatctaatttgtcttttttatgtttaggtttctaatatttttagacatgtttattcccatttcttgcttttattttcatttgagtgttcatacccacttctcactgtattataaatattacagttaaatttttttttactgtatttgttatccactattttttatgaatgttttagtttaaatttgtgtttaatattgtaatagattttaattt

SEQ ID NO: 342179 - DNA, 751 bp, Cannabis indica
cttccataaccaatcaaaaaaaattggttgttgcagaatgaccaacacctaacgcagatctgagccaacacgaatgagcaaaggagcattgaaccaaaacatggaatattgactcttccccacagttgcacaacaaacaatgtaaatccacatgaacatgattactatgaagttgagtatgtaaagaccgcttagtttaatttggaaattagtagttaattaagatttaattacgaaaattgtttatagatatttaaataattatttatgttgttatatttgaattctgaatgcattttatgtcatttagtgaaatttcataattttacattttcggtgcccggtaacatggaacgcggtgtatggctcagtagaatcacaaattagtatgttagtttagaggggcagtttatttagacattgggaatgtcgggattggtcgggaatttagaatttcccaaaataccattagtacccccttttgtgctattttagtgtggaggggcaaaatggttatttttccccaattatgttttgtcctttagtgagcttattaattggtgattatatgatttatgtaatattgtcttggctgaaataaaggtgtaatatgttatttttcattatattgaaaaatcaaagaaaatcaaaaatcccatttcctctcaaagctctctctctctctcccctttcggccctcctgagcagcaaggaattgggatttttcttgtgtttcaagctgattctcaag

SEQ ID NO: 342180 - DNA, 540 bp, Cannabis indica
tttgtcttgtttgaatcgttctccgcttgtacttcattcatttgaagaaaaaaatcatagtagaacaacgatataaaaacataaagataatagttgttaataggttttttaactgttaacaactatttaacaacgatataaaaacataaaaacaattgatgaacaaataattgtatattcttgaatattcaacttcttcgagtgtttacttttggtttttttttcttattgttttgtggttgattatgttttcaaagtgtcagtatcaacaaaaataacatcttttgaaactgatcccctccttgcagtagataaaagttgtttagttgttgtcaagttgcttcacagttgagtgtcatgagttattttcacttccactcatattgttgcacaccattgcttgggtggcttctataagggttgttattctgttgttactgtgtagttgaatgtattcacacacaatggatatcgtgtgaaatcaattttcttcgttaataactttatgtaaaatagaaaacttttgtcatccttgattta

SEQ ID NO: 342181 - DNA, 791 bp, Cannabis indica
tttagaattcatattaagatgttaataaaacatacttgttagtaaatctagatcctggtaaaatatatccaacactaagatcatcctataagtgattgaggtatgtttacacgttataggttgtggattttattaatttttattcgttttgagattgggttttgcatttctgtggctgtagggattagacaaagattggggtgtgtttagggtagggttttgagtatgttggaaatggttttaagtggtttctatggctgcttgattgagtttggtttgttgaagacaaagttgagttttgttcactttaatgtgtgaatttgatttaatgattgaattgttgggttttgaagcttggaatatgttgtattatggttattatactgttctgtgaagtttgggaacaattggttaggttttgaaaaagttttcggactttgaagagctgaaatttttgagtttctattgtagtgagctggaattccggatggtacagggctgcaccaaccagaattcgagatggtcaattttcaagaatccccaatttttcgtattttagccatagcttttcacttgagtgtatgttttatacattctatatatcgtatcgaagcttatgaagagctctacagtataagacatagattagagccaaacgatgtattttattttagggtgtttccattataagattcggtagaaaccctaggttactttatgcgagttttagactgtcacgccctaacgctaaggcacgctacagtgctttttcgattactgtgcaatctttg

SEQ ID NO: 342182 - DNA, 892 bp, Cannabis indica
  modified_base (469)..(469): a, c, t, g, unknown or other
catgatatcttcactaatcagcttttaacacctttcagtggggttcttagccccgtcgagtcagctctctcagacagaagttgacatacaaatgatatcggctgctgaggttcactttgtcaccaagaactgcaattttcagatggagtattatgtcttcaagtgcaagaatgacgaggcttatattatcaatctcgaaaagacatgagaaaagctcttgctcgctaccaaggttattgttactatgttcccagcgagacatcccagagcaatacgatttacaacgtatttaatacacgtttatattgacccggtaaaagcgaacctatcacagatgtgtgattttcaaatattaaccacatttattttacgtggtatgtaatcaaaccccacgatttcaggggataattgttgtaagatatccgtcaaccatcaaccatgtaactgaactccaatcctaagtaattanaaagggagcagcagaaaatactaaaaaaggaacgaaaaatcatcatgagagaagggcctcagagagatataacaaaaataataagatagactcgtgaactcatgaacaattgaaaaattttaactgcaaaaccacgtaaaaacctttgtgttcttattttttctttaccatttttaatttatgtacaagttaaccataactaaggctcaaatatagttaacgaaaaatctgtgttaacacattagatgaatggtttataaatcatctgcttatgatgtcactctaatttctcttatgaaatggatggtgtagaagattatattcttgatattctatcccgaaatgatataattcctcgatcttagaaatctcttacttgttgtgcttacattaggcaatctatacttagagttagattagtag

SEQ ID NO: 342183 - DNA, 766 bp, Cannabis indica
tcatagggactcctcatctcggtttgcacttcagaccatccactctctcaacattgaatgatactctgatgcagattgggcctcaagtcttgatgacagaaaatgaataagtagcttctgcatctttcatggagggtaacttggtaaattggaattctcaaaaacagaaagctatagctcgatcttcaagagaatctaaatatagagctctgtcctctgctgcaatagaactggtgtggatctactcttaactaaatgagtttggcattactctcagcacacacctccagttctgtcgtgtgacaatcaaagtgcccaatctcttgcattaaatcctgtctttcacacaagaacaaagcatatagagcttgatgtccactacatccaagatcaaattgctcagaacaagctacaagtctgctatatacctactcaagatcagactacagatttattcactaagcccttgtcttcccctagatttcagtttctatgtaacaagatatacttagagcattccaagtatagcttgagggggtattagtgaaggtagttaggtagttaggaattagttatttcactgtacatgttagttatttgtgagctcctttttcctaagtgtattttgttagttgtattaagcttggtccgtatatatataagactttagagagtctgtgattttaacagagctcatttcatcaatctcaagtgtaatacatcaaaatataaatattaatttttatatttacatatttagttttat

SEQ ID NO: 342184 - DNA, 658 bp, Cannabis indica
aacccactgactgtaaggtcttaagcgaggaatcaatgtacgaactgatacttagtgtacaacgagaaaccatatattgctaaaggagaatagcgaggcaccggagaaaagtaacacataccctaacttgcaataagcaaactaagtataaaagtcgaatcggctcgaagagcaagaatgcaagatgaccatctcgctacgaggaagctccctatagtccatccaactaatagaagcgaggctcataaccctggcaggttaaaagatttccatatacccgcaatcgacgtaaagcatatcaagtcgacctcgaaaagaaggatggtttcagctcgcccttggaatcacttcaatctagtttctgtcaagacatctcgagattcaactattaaagacgtgtttaaaacacgatatttctgacccagtaaaagcgggaaaattacaactaaatgattttcaaaatcatacaccacatttacatttcataatatgtaatcagatcccacgattttagggataatgactgtaattatattttggtcatctttgtacttaactgccactatgcaattataaatagtggcaaacaatctcaaaaaggggacgaaaaaaaaactcttacgcgagaggccctgaaaaaaaacatactcagaaatct

SEQ ID NO: 342185 - DNA, 341 bp, Cannabis indica
ggcataaaacccaacatgatgtgtgtgggcacttactctatcattatagggttcgaaattgaagagaggaagagagagagaaggattcattggtagagaagatggctcaagtttttgactgaaggaaagtatttttatcatctttttctttgaggtcatcattacctatctataggaatccaactagggttaggttagaattattttccattaaaatattgaaaaaataaatggtaaattagcccttaagtggccggccatggatatgggccccactttgcattttgcaattttttttaactatttatctatttttttcaaaaatgccatttttctaattc

SEQ ID NO: 342186 - DNA, 488 bp, Cannabis indica
ttaaaaaaaaaagttgtcaaaaattaagctcagggtcttatttttactattttaaaaaatacaggattcattttgtcatttaacaaaacacagggtccaatctataattttttacaaaacacagggtccaaaatggtatttactcattttttttttctttccttttcatcatttcagaacgtgatcacttaaggaggaagaaatccaataggaatcaaccaaatagtcgatgaataaaaataaaaaattatttcagatggtgataactgagaaagaagagcaaaaaggaaaaattaattttgataaagccctagatacttgaaaaagaaaaagaaaaaattaattaacacaaatggtagaaaaaataaggcagatgtacaataataagatttcagttgagaaatcatgatggtacgtgagagagacaaagagagaacactgttaaaaataaacataaaatacaaataagttaaattaagaataaacac

SEQ ID NO: 342187 - DNA, 876 bp, Cannabis indica
ggtgtcattcttgtagtttcatacttgttacactcatcgatagatactttttccacgacagttggaaataaacatgaaatctctttaaaagttcttctatgtataaatatttaatgatctattttgactacctttttgtctaacgttcacttcttaatttcctttatctatgcatttgttgcacttgtcatgccttcccattttctcagataattaatagtctttggttccttttgttgtctgattcttgtatcactctattgtattttctttgctaatctcttctattgtgcttggtcctccattactcttttcaatcaagtcgacttgattatgagattaactagtttttcttactaacttttgtgtgctttggtgttatattgctatagtggtgaagtctaaagctgtaatgttgatatatatgttcaatgattacttattttattatactaactctctaggtatcacatcagttcatatttataatacagtatatttttcttgacatatttatgtcttgcatattgtagacctttctaattcataaaatgaatcccaacttcttaattacactgttaagacctccaaaaatctaaaaccaacttacattccaatacagaccatttacttttagttaactaagattacaccatatgaaaaatcgagtttttgcatatgtcaataatatatacaaaaatatacaactgtatacgtctgcagaaactagttttgcaatgacaaaataaaataggcagaatataaaaatatttgcagaaatttaaataacttgacacaagagatttgtacgtggtatcattgttctcccgaacactcctagtccacgaggccacgcccagagaatgaaatcaatta

SEQ ID NO: 342188 - DNA, 548 bp, Cannabis indica
ttactttttggcaactacttctgtgatagtcaggaagtaacactagtagttaattaaattgttggtacaatgccaaaaactgtattgaacttttcttagactgaatatgtattgttatcccaatttttgtactttgacgtggcgtcacgtggaatcaactttatgtaccagctcgcaagagatatgttgaacagagtaccacatatattcgctcggacgaagcctgcttaaccgagcagtgagcagtccaaacagcacgccatcacttagtagtttcagctttcgcatcgtgagtcatagaaaggatccctataattttgggatcagatcatagagatatggcaagctgtttgaaatccctagattagtgtattttgtatttattatgcaatctttcctattatatcaattgtaaccagaagggaaactcttccgtcaaagcttatagccctataaatagtgattcattctcactggacaaagggtcaaaaaacttatctaagaattcatattcagagataatactgtaagagctctaaggaaaggga

SEQ ID NO: 342189 - DNA, 756 bp, Cannabis indica
ccaaaagaggtatgtgaaggaaataaaaaatgagcagtcggtatttgctctagaaccttctaagaagctaaaattgaagagcctccaatcatattatcaaaaaagatgaaaagaacgtgaggtatcctcacgtctatccattggtgattagtttccagcttgccaataaaaggataagtgaacatccttcacaaggaaatgcggaagaagatgggactcgaaaaggcctaactgaggccttacatggtaaatctgtgcggcttcactggtgatagtatcgccagtcagtgcataatcgagcttgcgttaaccttgggagaggcacccctatccgccacagtaatggaagactttctagttgtcgacctgccatcggcttacaatatactattgggtcgtcaggcattgatccgactgggggtagttcgttcgattaagcacttatccctgaagttttaaacaccaaagggtgtgggagtggtgcgaggtgatcagatgttagctcgcaattgctaacgcatagagctacaacatagaaaagccgatcatcagttaattgcagtcttggcagaataaagtggaaagaaggatgaacatcttgatccttggattcatgataaaagaaacttattaaaaccaattgaaaaatattaaaaaacaaggctaaatatgaaacctgcgtcgctggcttcaagatagtcgtgttggaatttattttaccaggatcttagatctactcacaagtacgttgtttaa

SEQ ID NO: 342190 - DNA, 525 bp, Cannabis indica
tatattaaaaagaaaattaagaagtagctaaaattatatttgttccgtaaatgagggtaagaatgtaacttcacaattattatttttttgattaatttattaatttgggttgaatttcttaacagggttgtaaccatatcttttgtttgtatggtaatagggttaaaaccttgaatggctttgtctgaaatatgactcacgaccctttgagcaattatagcactgcagttactttgtaacagtcatttcaaaactctctaaaattgtcatttttaaataaatgactcagtttaattacaattaaaatcattcccgaattttactttctcctttaaaagtatatacaagttcttggcacttattagtctaacaattcagtcttatccttacatatacagtaaagaaaatttattaatatttaataaatctattaattactaccgactaccactttgtataatattttaccaagtatatatcaaaatagaaaaaagaaaatgagtatttgaagccttaaaatagagt

SEQ ID NO: 342191 - DNA, 657 bp, Cannabis indica
taatagctttttatggaataactcattaattatgtaagtatcagagtatatttgtaacctgctgactgtaaggtcttatgcgaggaatcaatatacaatctgttgcttagtatattagtgagaaaccatatgtcgttgaatgggaatagcgaggcatcaagtacattacatctaggaagacgaaagcagcacatgtcaactgcaaaagcccttaatgtataatgtacaaactaagtgtaacagtcaggttggctcgagacctagtaagcgaggtgtttatctcgctattggaaaggcttcctgtaacttcacttagtttaacttcagtaaggtttacaatcctgacgagtcagaagctaacattcaaacaagcgtcgaagaactctttgtaaataagaaccgtgatcatcaaaagacgtgcaccattgaccttgggaggaaggccccaactcgatcattttgacccagtaaaagcaggaaaatcacagctatatgattttcaaatcataaccgcatttacactacgtgatgtgtaatcaaaccccatgattttaggggatgattgatgtaaacagattacagtcaactttgtaattaactgcccagtatgtaattataaataatggcaagcaagataaaaaaaaggacaaaaaaaaa

SEQ ID NO: 342192 - DNA, 516 bp, Cannabis indica
agctggttggctgatttggaaatcagttagtagatattgaatccatgttatctcactgctggtgcttgcaagtgcccgatattcggcctctgcagaacttttagaaacagtagtttgtttctttgttttccacgatatgaggcagtcgcctataaatatgcaaaagccagtgacagagcgccttgttgtggggcaagcagcccagtccgagtccgagaaccctctgaggtggagtgatgagttggagttgtagagaaggccctgtccggggctgccttttaagtatctgagtaaatggtgcacggcttgcatatggggagtgcgaggagatgacataaattgacttaaagtatttacagcgaatgtaatgtcaggacgtgacaaagtcaagtataggagccttcctataagctgtctgtaagtagaggggtcatcgaggaggtgtccttcttgatcatcaagtttagttctcgggtccattggggttttggcaggcttactgcctgtgtagccagt

SEQ ID NO: 342193 - DNA, 635 bp, Cannabis indica
tatataatataatttcttcttttaaaacaaattaagtaaaatggataactcactcataaaaatgagtatatttttgtaaaatataatataaaaagtatttttaattaatagattaaaaaaaatatttctcaatttattccgtaggatagtttttttagatttaatatcattaaagtgggtataaatatgtaaagattaaatcaaattttcatcgttcaatttaagaatttgaaacatttcttggaatatgacaaatctacaacaacaataattcctttctcttaaaagagtatttgagaaaaattaatgacattttaagaaggttaattaagattttttttttactttctaaattttaacatgtattaaatcatgcccctaaatttttatgatcgtttagggattgttaaatttaagaacttttatctaatttcattcaatcttactaatttgataattgtcatgtcctaaatcatgctccctgaactttaatatctactaaatcatgctcctcgaattttgacacgtaccaaattatgtcatctgaattttcatctatgttagactttccttattaaaattaaacataaattcttaaatccaacaatctcaatagttcaaaaaaaaaaacttaa

SEQ ID NO: 342194 - DNA, 987 bp, Cannabis indica
tctaaaatttaaagtcaaagacttaaatttataccaaatatttcttgagttattattctatcttggaccaccactataatctaactataagtctaggttgcctaaagtaaacatatacaagtaggagattgttaagatcgagcatttatatcatttcgggatagatgtcaggaatttagttatctgcgccattcaatttcatagaagaaaatagaatgacatcataagcagataatttataaaccatctatccaataatatactattaagcaaattttaaatgaaaaatctaagaggaagataaaggataattttgattaaaataagaatacaatgatgtcatgtttaggtaattcttatttttcatattgtaaacactagtctaagctataatctttggatgtacaagtagatgttgcatttacaaatactaatctgtttagatctaacactattatatttgtctaatggatgacaatcctttgggatttgtcccattaaaagcaacaagttaagttagaccaacaatgaagatttgaaattatactacaacattaataacataaaataacatggttcaatataaattcatgcacattcagaaattatcatacatttagcaagtaagaaagacatgtgaaagtacaaaacaaacacaccttaaataatttccacggtttctaacaaactgttacagtgtctcgtttaggaaagagtcagagatatcattcattgaatagagtagtcaactcatctaaaatggagaccattttaacaaccttttattcgatcaagactagaatccggcattgtcccgtttaggcgagagtcaaggacattctatcttctgagcttccactattgtttcataccttgtaagtcttactcttagcagccattattggggtggacattagtaagaataaaacacttacaataatacttatctttcgagattttacgacgttaaattactaatgaacgttc

SEQ ID NO: 342195 - DNA, 641 bp, Cannabis indica
tttcttttttcattgaattgataattatgcctcacaaaatccatgtattttaccaaattacaatctagttttgactaatcgaacaagatttttcctttctcttgagtaataaaacaaagagtttagtaacagtgtataaggcgaagacaaatgggaaagaaatgggtaacacaacaatagtaacccactttttcaattgcgcaactattttcacccccctagtttattgtagtttgagtagtaatatttttaaaactagtgttgtttgctgacttcttgatttcaataggcatacatcaatctttttcacttgtttaaatttagctcttaagccactagtgacaagattgaggtcaacatgaaagttattttctctactgatgataatggattaaaatatcgaacacatgcaaaaggaccacttgattaaaattagattaataatttatgaattgtgccgtgtgatctatatattaggatatcactgaacaaatacttacatatattatatgagcaacaaggtcaaattatataatcatggtctcttgaaaggttaagtcttaattttatttaagtgttagaaattgtccattttattttttattttgaattttaatttgcaaatggttgttagcttgctt

SEQ ID NO: 342196 - DNA, 509 bp, Cannabis indica
caatggtgaagatacgactggccatcatgctgtgtcaagacacccccacaaagcaccttcaagtattgtacttttgtcattgttgattgcacaactgcctataatgccatctttggacaactagcctcagtggaatttggggtcgtgacctcaatctgatacttatgtctcaaatttccaacctagttcatagaagtgggaaccatccacgaaaactaagctgaggctaagaaattctataatgtagctacaaaatcatcaatcctagtagctaattagggaaaggatagggaacaacaatacaaagaggacgagctaaatccgcgtgtgggggcagataaggtattggagcccatggaagaaatggaaaatattcaaatttgcaatcaagatcctgttgggctttgtgccctaaataaaactcaattttaatataatcttttcttatttttttttttattttttttttgaaaatgaaatatcaacttcattgaaatgattagcattca

SEQ ID NO: 342197 - DNA, 697 bp, Cannabis indica
ataagatattaagaggtaaagatgtacattaaaaacatatcatccgaaggattaataacgcaaggagatccactttgcagtgtcattagtagtacctactcacaatttaaaaattggttcagattaaactctatttgtaattaaagtgattagagtccagttaattgagcaagctatgcacctttattggagagtatcttgagaaaggagcatgaccatgagcaagctctgttgcagtagttataccaaaagaccagatatcaactctgcaccaaagtggtcaactatgttagaagtcatcacctcctctaaacttctagaaatttctagttattacatatttgttagttaatttaagacaaagcccattgtaattaccaaagattagtagaaaagtctagataaatgtaagaaatgagtagaaaataattttctagaaatttttagaaacaatagtcactagatgtttctagttatttgggacaagcccaatgctagaattctctagcaaattgaagaggcttcatcaaccaaccatgaggcactataaatagacccttggtctcatggatgtgggtgcacaaaacaagtgaagtcttagtgtgtgctaagttatctatacacaagtgtgtgtgtgttcttaataagtgtctaaatacaaagtgtcccaaaagtgtgagttatatataagtgtgta

SEQ ID NO: 342198 - DNA, 882 bp, Cannabis indica
tgacttgtaagtgtccatcgacgcgtggaggtagcaaatccttgttgttttgaccttggttggtcttgacatacttttgcaggtgcggattgtttttctttattagaaattcattttttcgcttcagattgtaacattctgttgtatcgtggccgtagtctccgtggaaccgacaaaattttgtcgtgtcccttttgttggtgtctttcttcatgggcccgggcttcttgtacggaattaacgactgagttgccatatatacactctctatatcttcagttagaatagtgaatgcagtgtgtttggcattgtcgcggggaatctgtccgtatttatcagtgaactttcctttcttcccgtttccttgcttgtggttgttgcttgaacgcttgccacttgaattgttggaatagttaagaagttgggtggatgttccagtgaaaggagccttcgttttgccctacttttgctcaccttctgctcgttgaatggtttcttcgagcttgatgaagccttcggctttgtcaaggaaatcactcattgagtctaccgacccgttcttccgtatatccttccaaagttcaccaaggacttcaatgcccccagtatcgcggataactttccatcctcagttacccacaaaactttggtcgattccatcatgaatctactgatgtattcccggagtggctcgcctggtcgttgctttacttcgaccaaatctcccaaatgcaatgggagctgaggcgaggaagagaattgcgcatggaattcctgaagaaaaggttttccatgaactaaactttccaggagcaaagttgaaataccattgctgtgcggcttccgacagagtggcggggaagattctgcagcatacatccc

SEQ ID NO: 342199 - DNA, 830 bp, Cannabis indica
agtcgagtactcgccattctaggttgaatactcgcacttgtcatttccctaaaaattatcttttatatcaattaaatagtactttttggtgttgcgaaattcactcgacaacaatgaggagtttgctaagttcttggaaattttcagaagaatcaacatcaacattcattttattgatgcattagagtagatccccaattatgttaagtttatgaaggaggtgttgacaaagaagaagagatttggggattatgaaactgtgagcttaactgaggaatgtagtgccataattaagaaaaagttgcctcaaaagcttaaagatccagatagctttttaattccttgtgagattagtaatttaaaatttgagaagtcttcatgtgaccttggggctagtataaatttaatgccactttcgatattttaaaagctggatattggtgaagcaaagcccatgtaataccctacaattatgagatttgattagcaaaaccctaattagataattatgaaatatggaggaattatattattatataatataatatatgagaatttatatgatttatactatgttaagaccccgttggtcagctaggggcattttagtaattttgacctgataaggataaaacaatgaaattaatttattaacgtgcttatgggactatattattatatagtatgcctgtgttattttttcaagtgtgttctgacaggttggcgcggtatagtcacaactgggtatttcgggccgaattgggttcgggcccgaaatgcaatattggattgaaatattggcattatagttatgtgtgagaaatctaaaa

SEQ ID NO: 342200 - DNA, 507 bp, Cannabis indica
atatttagggtgttaataaacacacttgtgagtagatctaagatcctggtaaaataatttccaacagtggaggcactgctgagggaccctgctgtcttagcctctaaatttcttcgtcttgttggtggatttaagcttgcatctctacaaacctttgctcccaatcttgaggagcttgtggtggattttcatgtccacgtccttgaaatcttcaatggcctctgccgcgtccacggggattcggaggattttgaccaccccgattgcccccgatctcgaccatgttaccatgacttatcatgttttgctaggcgtccatattataggagttagcctgtgaacccataagtcaggtaggtcagacaatgattatatatgttctaagtaccgcacttatagattttaaggcaaggcattctaataaataacatatggttatcatgctgttgctataatttataatcactacgcaagtatatgcagtcaagtagtaaactcacacaggtg

SEQ ID NO: 342201 - DNA, 1045 bp, Cannabis indica
tttgtgtataaaagggcggctcaagcttgtcatttttcacaaagtcctggttctctggtgagatccatcttgagaatggatcatctctttcttgctacaatgtcccttctgagttcagaagttcaccctcccaaactcataataccaggatgcaccaaccatttttcatttgttcccaaggacttcaatcctcaattggaaccggaaacaatggattccaaggctgaggagcttccgaaaatccaaatcaggggagtcccacagcccgctatgggagatcttcacaactgatctttgcaggtgagtatcatcccttgtgaatggtggtttaagttggtttatacataccattttgtatgttttcttttttttctccattaatcttttttcttcgtctccacaggaatagacatagatcttgtgagcgatcttagaggtcctcttctagttgacgaggaatcctggaagaaggttggcatggtttcggatggacccaggagataagttggtgtggtttctatcagagaatccagccaaccctaggcctgcactagaggacctttgcgccagcctctttgtggtatagaggagtttcctaaagctaaaaaataggtcttggcttcaagaaatgggatcttctgatgatcaggagaatgaggtctgtgcagagatcaaggctctctacgtgcagacagtctttctcaaactacatgtagccggtctttctccaagctatgtgtagtctgtctttctcctctcatccatgtttaggaagatgacttaatggtttgcccctagtggcacttttttaaagacaagtttgtaacccgacttaggcttttttcttatcttaaatgccttgtactattttcattcgaacttaatataattgcatttgcttgtttttttattcacaatgtaaacaatcatattttgatcaaatgtatagtacttttgggtttttccattgctcgtaatcttcctatttaagtagttagtaatctactaaactttttgattttcgagcagttgtcgattctgcctc

SEQ ID NO: 342202 - DNA, 613 bp, Cannabis indica
tttagtatcttttaggtaaccttgttagcttatataatcacattattattagtatttttagtacgttttcagagctgaaaaaattcataaacttttaattagaagcaatagagaaggaaatcaaagcagtcaactaagtacgaattttggagatcgaagccaatactagaggcattttttagaggattttcaacattctcttcttctcttttctaagattaatatgtgaatttgctacaatgaacatgagtagctaaacagttaattagggtctagatggagattgtttgatattgatttatggttctaatatgattttattttccctcaatttctttgtattttatcattcgtacttaattacttttaattgcttggccatcaattaatttctttataattttgatgcgagatctgagaagtgagtgtcaattatgttatagtgaaatagaactgaattttgatataggacgagagtacctatatggtttagatagcttatagggtttctatgtttaatgcctgttacatgtttaatttattacgagagtagaaaatttgcacgtaattgaggtttatatattaaagaagactataaattaccttagtaaac

SEQ ID NO: 342203 - DNA, 1112 bp, Cannabis indica
catcagagaaagcttggttcacgattcagtaagcccggatttgtttagtattttaaataattatgaaagcatgctaggaaacatattagaatataattatttattttaagtgtgtagcctttaagtccataagaacggtattaagtttttagatcgctgtctaacttgcctggcttatgggttcgcatgctaagtcctataaaatggacgcccaacgaaatacgagaagtcagggtaacatggttgagaccagaggcggtcagggaaatctgaatccccagaatccccgtggtcgcggccgtagccatggtagaacccagggtggtcatcctgtaaatcaaccacaagctcctcctaattgggagcagaggtttgcagaaatgcaagatcgaatccgctagcaggatgaagaaatttagaggttgaggcagcagggtcctcctaccgtgcctcctcagcaagttgctcaggccgttgcagttccattggtgccagcagaacaacctgttgttggcaactgtatagagctgctgtacgaaaggttctgaaagcaagcacctcaagtgtttttgggaggtcctgatgtgatgaaggctgagtagtggctcaaagtaattgagcgtattctaaactttatgggagtggttggtaatgatcgggtgacctgcgccactttccagttccaggaggacgcactcgtgtggtgggagttgataaccctcactcgggatgtcacagttttgacctgggaagaattcaaggagttgataaccctcagcaagaagttgtttcaacacaaaagaaggagagaaagagatccaggttcagatcttgataatactctgcgacagaaaggatacaagagttagagatctaaacggaaggagtcatattatggtaaaataatttccatcagtattatctcaactagtgaagggaccatgggcctatataaccgagcctccaattagtagatctagaattcaccaagtaaattgcctaacttattaattcctccttgtgccactatagatttgagattgaatagcattctcaattatatagaatgctctatatgtaccaagatacaaatatgttatgattatctattg

SEQ ID NO: 342204 - DNA, 908 bp, Cannabis indica
agaggagaccaacctttgagtttggaggccagccttttttaagttgaggacatctttgtacattgtttccttgaagaggtcaggttcccttggtcgaacggagtctccttgggtccggaagtcacttcttggctggccagcttatgcacagaccttggccgccttataggctcaccctggccggcctataggctcctcttggccggccaaggatgttggtacaactccttgtgggcttgcttcacttccttcagtcgctacttgacgattttgctatatcttgcacggaggctctgttctgctattggcgtggttgtactccacatgtactctatctttggcttacatggacatgtcatgtcaggtggacaaaatggataacaataagtactttgtaaattttattagactcatccctacggtgactaattagagttaaatttataaatatgaaacaatggtagaagctcataaaataagaataatcttgactctcgcctaccgggacaacattagatttttattttgatcgaataaaagattgctaaaatagtatccattttagatgagctgacaactctatttaactaatgatatctttgactctcacctaccgagacattatatatcatcaagttgaaaaccttggaaattttgtagatgtgtttgttttatattttaacatgttcttgttatttactaaaagtttactaattttcaaatatatgtatgaatttgtattaaacctatattgatttatatttattgatatttgtagttttcaatatgactatgaacaacccaattgtgtcactgttgattgacacaagctctctagagctaacttgtcaaatggaaagagaacattaatattgctctcatagatgagaattcactgtttgtgttaa

SEQ ID NO: 342205 - DNA, 487 bp, Cannabis indica
gattttcataaataaatttacatggtccaattaagtcaaggattggggtggtgtgcgcaccgcggtgcgagtgtggtggggaggaataagaatagaagccagggaaggagtgagggatctactttgacaaacacgatacatccaagttgaaagcttcatgaattggggtcgggtgtgtctgtgtgtttgtggtggggatggggataaagagaggccagggaataagagaagagagcaagggaaagagtgtttgaatacaagaatttgctactaatcgtgtctattgtcaaatgaagaggtgaaagagttgtgagccccacattttgacttggacccaaaaagaatgatgagacttatataacaaacatattttcagaatagagagaagtaaaaaaaaatgcaaaaaatattaaagtcacctcacctcaactctatcaggatcagcatccacatctgatactccctctaaattttgctctaagatagc

SEQ ID NO: 342206 - DNA, 530 bp, Cannabis indica
tatctacaccaactcataaccaaattagagatggtggttactttgggggtggagaaattattctaaaagagtgtaaaaacccatttataataatttaagctccatcactgaagataaataactttgttgtttcgaaaacactggaaagttattcaattgaagaaaattctacactgtgttatctctattccattttggatagaatgagagatatgtcttctgtttattcagatgcacttaataagtagtaaagaattcagtatccctaaatgagtaatgcatatagtaaataatgttacataacggaagtaatggtggagaaagcaatagcttaccacaaacttacaattcctgtaatttgggtttagtcaaatatactacacttgatcatgatatcaaacaattgattgattgaaaagcactacttgttttatgttagtgcaagtgggagtttgtcacgattttatgccctaaataaaacccatttcaatctaatctgttttgttatcaataaaagattagaagtcatt

SEQ ID NO: 342207 - DNA, 830 bp, Cannabis indica
tttactaatgtaatagaccagatttatgttgttttcctctttgattagtacggcacttacagcatgctctgtgatagccaagtatatcacaagttcctctccatcaagaggtttcgatagtacaagaggtttttcgagttgcatttttagctcttaaaaagctttttcacattcctccgtccactgaaattgtttatttcctcgcaggatgttgaagaacggaacacacttgtctgttgattttgaaataaatctgctgagtgcggtaatctgaccagtcatactttgaacttccttggttcttgttggcgatttcatatccaggagggcttgaattttctctggattggcttcaatttctcgggcatagacaataaagcctagaaacttagccgaactgactccaaaggagcactttaagggattaagtttcatgttatacttcctgaggactttgaagcatttgtctaggtcatcgatgtgcctcccagccttcctggatttgacgagcatgtcatccacgtagacttccatgttttgtctgatctggtctttaaacatcttatttaccaatctttggtatgtggctccaacatttttgagaccaaacgacatgactttatagcaatatagacccatatctgttcgaaaacttgtatgtacttggtctggtggatgcattttgatttgattgtaccccgaataggcgtccataaagctcaatatttcgtgccctgctattgcgtccacaagctgatcgattcttggaagtggaaaatagtctttggggcacgccttattaaggtcgtgaaatcaatacaaactcgcca

SEQ ID NO: 342208 - DNA, 748 bp, Cannabis indica
gtgacccaaggagcatgcgttttgtagcatgaccctaaagttactgggaaacacccaccatttcgagcaaatctactagtcgaagaatacgcttatattggaacaggaaacactggcgtatgtcgcaaatggctgggcatatcgcagtacctcaaggaacatacgatcgcacgtatgagcattggaatacggcgacacgcccaccatttgaaagacttaaccaatgttcccacaacaaaatatacagagaatataaaaccctatgttctaaaacaacgactaggaatgataaagtctctgtaaaacctaaaggaagcatgtatgccagtattcgaagtgttcatccgaatacccgcgtgtattcaagaaataagcaaataagaaaggtgtgactattcaaacttttcttcctaaagttcacggttatacaaatttcaggtctatttttctaagattatccagttctacacagaaaaatacagccctatatatattccctacggacatacatgttcgaacctctcaaaatgtcacaaaaacccagaaaaacaattttcaccttttcaaaaaaccaagtacacaagtggattagaaactgacctttagcttttctaattgctccctgtaattggtttcggtctcttctgaagtcttagagagacgggaagaaaagtaaatctgggtggagaatggatgaggatttctacaaatttcagagaaaaaggggaagaggaagttaagaatgaga

SEQ ID NO: 342209 - DNA, 531 bp, Cannabis indica
taacgcccgtatttaaaaacttgctaaactaaaattgatcttatcatattatatttatatagtttataagtctggatcccgaatataaaacagctttgaaaaatacatttaaatatataaagttacgtaataattgttttttacaaaatacagggcagctcaaaatgtcataagatcgaaaccctccaggttgcactgccaagatatgtacaatccttgccaagctctaacacactgctcctcctgcttagctttttccttacctacacagggtagcaaactaatgagtcgacagactcaataagacatgcataacatatatatatataagcaatgctatattggctttatccttaacccgtcctaagcccaacaactgagcttagcaaatggttaagaacgttcttaatggaagtacgaccgatgtaccatatacactagagcaccgactctgtactcgtgttggtaaagccgaccactgtaccatatgcactagagtaccgacttcgtaccatatgcactagagcacta

SEQ ID NO: 342210 - DNA, 1207 bp, Cannabis indica
atctatttattaaaataacataaaaattatgttatcgttgactatataataatacatctctataactatgataaagtgttatgtaaagtaccctaacctacgataacatagtcggtcttagcacgtcaaaaagtattatggtatattttattaacacatttctggtcttattaaaagcactttttcttgtagtgttcttacaagggtcaaagtgtgatctttgactaccgaaattatggatattacatatctgccacggcctaggacttgggtcgtgatagaaaaatggtattggagcaccgggtttaattaattaccttgtattgtgtcaccaaatagtttagatttattttaaataataatagtaataagtaccttgatatttatatgtataaggcatatttatattattagcatccaattctcactaactgattaacctttggttctcaaacctaagaaaatgcctctgaaaggaaggaacacaaggagaacggttgtagaagatgcccctccaattactgtcgaacctccacaagctaaattccctatgaacgctcttcatgaagccttaagagcagttcccgctcaacatatgaatcatggcactcgacagagtcatcaccttcagatctttcatcggatccaagtgcctgagtttgagggtggacaagatcccatggtagcagaaaggtggttgaggaagataaagaaaaatttcaacacaataggaacacctaaggaataccaagttacttttattgtgtttaagttagagggtggtgtagcagattcgtgggagaccttgtccaggataatggagaatgatgggatgacttggcgagattttgagagagtttttaggcaacaatatattagtctatctcatatgagggctcttattagagtattcgatggtttaagacaaggggatatgactgtgaatgacatttacatgaggtttatagagctatcctcttatgcatatcctggtgatgttgaccaacccttggtgattaaatagtacatgcctcgtttgaggcctgcgatacgtggtccaatagcccctttgacctttaacaacttgtttaagtgtgtgatagcagccttgcgaactaaggctcatgtagaaggagtgagaagaagaacacaagaagaggaaaaggaaatgaccaagaagaatcaaggacagtggtcccaaggacaa

SEQ ID NO: 342211 - DNA, 1798 bp, Cannabis indica
atcgtctttttcaacatccaaccgccaatacgatgcgacaaactcgtagaggtatgattgatctggcaaattcacagacgctggatcctacatcgcagaacccaaggagttaagggttctgcatgttattaatcctggatagccggcaagcgtggggaatggtgaaatagttcctattaatcgaattgcgcctggtctgcaagagactttgaataacagttctgcacccaaccacggcacccataatacgactattctacctggaagcaacgccaagatgaccatcagagacgccaccgaattacaaaatctccatgacgcgctctgactcatgtaggttcataacaacactctgcatcatgatcaggacgaactgtgtgctgcggtaaatgtcgcattcgatgaacaaaggcgtatgttcgccgaattgagagataaagagatggaggcattaagggctcaccatggagagattgaagatcgtagtgggcaagccaccgtgctgatatgaagagagcctaccaaattgtaggtcagcaatcgtcgaacgtcattcccctcggagaaacgaaagaggacccaacgatgaatacttcctagactactaatggttaggcgccaaatccccggtcacgagttcccctcatgggcccagcggtaggccagcagaccttatctagtacttcatgaggaggagtcatacctgacggctccaaccagattaatggtgccattccacccgtcaaccaagcgaatcaatcgctaaggcaaccaggctcttctttgttcgaaaggttgggagcaacccatgatctaaggaacgatctaaacaaaaggaggggaacggacgaacagaatattacgatgatcgtgcaacctggagcccgtacttaaatccccgctcagaaagatgctgacgtaatccaagtcgaccagaatgccgagcaagttagcccagccgtacaggcccagcttgacgaactgaaaaatatgtttcacggcatggctagacaacgtaataatgatcttgagtaggaccgagcacgcaaaactcctttctcaccatagatcaatcttctaccgctgccccacaagttcaaaatgccgacgtggaagatgtatacagggagagaagatcctctttcccatctcaagtactttgaaatgcaaatggatttgcaaggagtatggggggatgtatgctacagaatcttccccgccactctatcggaagccgctcagcaatggtatttcaagttttctcctggaaagtttagctcatggaaaaccttctcttctgaattccatgtgcaattatcctcctcacgccaactccaattgaatttgggagacttggtcgaagttaagcaacgaccacgtgagccactccgggcatacatcagcagattcatgacggaggcgaccaaagtttcacgggtaactgaggatggaaagttatccgtgatactggggggcatcgaagtcctcggtgaactttggaaagatataaggaagaacgggccggtagactgaatgagtgatttccttgatcgagccgaaggcttcatcaatctcaaagaagccattcaacgagcggaaggtgaataaaagccgggcaagtcaaaggctccttccacttggacatctgcccaaattcccaactacgcaaataattcaagatcaagtggcaagcgttcaagcaacaaccacacgcaaggaaacgggaagaaaggaaagttcactgataaatccgaagagactccctaggagaatgatgccaaatatactgcattcacta

SEQ ID NO: 342212 - DNA, 1678 bp, Cannabis indica
aatttatatggtatttttttgttattaagtcttttttatggtatttgatatgtcatatatatgtaaattaggttttcaaatcccatatttaatgtttttatttgtttaggtagttttatttgtcactgatactagaaaagtcaccggagtttgctgtcgatataggaaaaatgaccagagtagtggtcggtgtcagaaaagttgtcagagttgctaccgatgccagaaaatttgttggaattggcattgttgctagaaaaatcactaaaaaaattacccaaaaaactggtttcttgaagaaatcgctttcttggtgatttttccggtggtaatgccaattttgacaacttttctgacactggcagctactccggtgaattttctggcactaacagcaaacgtcagaaaagtcatcgaaattggtttagtcaccaaaaaaattaccaagaaattagtttcttgatgaagaaaccagtttcttgatgaagaaacctattacttgatgaagaaaccagtttcttgatgaaaaaaccagttttcttggtgattttttcgacgatttttctgacgacttttttgacaccggaagctacttcggtgactttttcggcatcgacagcaaactctgaaaaattcgtcagaattggcattgtcgctaaaaaaaaaccagaagctggcttcttcatcaagaaacttggtggttttttgtgacttttctggcgataatgccaattccgatgacttttttgacgctggcagcaactccggtgactttaccagtgccggcagaaacttcggcgactatgccaattctgatgacttgtttcagttatctttattgtttagcatttatatttcgttataatttttcatagtgtagaatgtggtttcacaggatctataagttcaaacctagttttacaggttttaagggttctgtaatgaggctttctttttattattttttttctaggtttgaaactagttttcacacttatattttattttagattattgttgtgcattgtgtgttgttttgtttatatttatgagtatttttttttgtatttttttctccatttggttgattgatgaaaatggttttaattatttttattgtatatcatttttgttttgttttcataatatttattattgttgtgtgacaaaactagttctttgataaagaaaccactttcttggtaaagaaaaccagtttcttgatgaagaaatcactttcttagtgatttttccagtatttttgctggtgacaatatcaattctgacgactttttcgtcgccgacagtaactccggtgacttttccggcaccgacattaaactccggaatagtcatcgaaattggcattatcgctggtaaaatcaccaagaaactcgtttcttcatcaagaaaccagtttcttggtgattttatctgtgattttttcggcgacaatgctaatttcgacaacttttttggcgccgacggaaactacggtgacttttccgacaccgacagctactccgacgactttttcggtgccggcaacaaactccagtaatttttccggcacgagtgacaactctggcgatcactgtagtttcatttgttttattctttttagaaaataaatatgaagggaattttaatattttttatggtaattcaattaaatttt

SEQ ID NO: 342213 - DNA, 1336 bp, Cannabis indica
tggagtttgctcttcatttgatttttcataattatcacttagtttaaatgaattaatgataaaaattaaattatattttatctagaccagctaccaagaagaggacatgccacctatccataacaccacaatgaccaaaataccctcactaacatgcttaaatggtaaagtggtttaagggtaaaatggtccaacaccataatcccgcctaatctcgatattcaaaatatctaaaatattatttccctttaagaattaggctctaaacttacacatgtgaccctaatggccatccattgcatattctatcgtcaccgagcaaaaattataaaaattgcataatttatatctaggataaataatactattagagtttaataaaatctccaatattgagaaattataactctaatgcccacttctaaaaatgaagtccacaacaatacaaaattatatataattataaaatatcaataattaatgctaattgtctctactaatctataatttaacatgcgatcattacagatataataataataataattgtaataataataataataataataataataataataataataataataattgtgttaaatataccctttaacactataataatatttaccaatattattatactaaaagtaataatcacaatcattattattattattcccactaataataatatgtaccaaaatcaaaccaaatcacatattcatttaataatacccagatatatatatttattaggcattatgcacatgccaataaaaatcaaatattatatcatcacaaaaacctcatacatatttaaacccataaatatgtaaaataataaaaatactctcagctaaaaaaattacaaaaataccctttctgagttagcgaatattacatggatagccaaactaaactgaaccgatccaattatcatctaatggccatctaattatatttatatattttttaaatacatttataattttatatatttaacatattttatttaaaaaaaaatatagtaattaatttactatatatttgacacatgagattaaagaataaaaaccttagctctaaattattgattctcatgttcctaaacgctaataaaattggttgtgcgtattgaataaattcattttttttggctagttttattatgggattgtgagaattagatttgactaaactattatttattatgtatgttggtattattaagtttttaaaatttattagttttttatatatatatttttctttttaatgaaatcaacttaaatggtagtttattggagaacattgtcccacatagatt

SEQ ID NO: 342214 - DNA, 949 bp, Cannabis indica
ctatacctagccgaaaccactctctctctcttttcctctcttctaaaccgaaccctatagtgaaagagtgagtgcccacacacatcaagtggtactcaatcatagtgtgtaaggctgtgaagaatctagtttcaagagaaggagattcggactcacatcttggtgatactctgctacagaaaggatacaagggatagagatctgagtggaatgagacattatattccgctgcaaccactgtaagatttctaatactttatatgtgtttatttcatatcgttttagaagttcatatttaggatgttaataacatacttattagtaaatctagattttggtaaaataattccaacaaaaagacacaatccttgtcctaaacaagacatggtaggcacatgtccctatgaagttaatttgtctttttgggttaattaattcaatcagataaatatttaaatttaaaaagtagttaaagatatttcaaagtagttgtgatattctctcgagtagttaaaagattttctcataaatatcaataactgaatttggttatcgatatttatttatttaaataattaaatttgatttaataagtagagatttagctactataaatagaagcttaatttgagaaatcaaaagagctttttacattgctattttcgaaatatagagaagaaaaagaaataattttctctctcaaattatttttcctcatgtgttaagaattaacaagaacacattatatactttatcctaatagcacatactactccttgtgtgtagtgaatcaatttagaagacactggcgtgagttcaattgcatcatcctcatcatttggaataaagaatacaacatacgagaagtttcgaggataccttgatagtcatcaagaggtatatgttttaaacttacattttatgttttgatttaatgtacacgcatctg

SEQ ID NO: 342215 - DNA, 535 bp, Cannabis indica
aatatattaaaaaaaaatacaattataaattataaattacaaaaaaattactaaaaatataagataaaatactaaacgggttcccgtcggggcgagaagtgtgatcgctatccctgttccgtttaacattcggggacaaaaagtaatctcgtccccgtcctgttccccatttagacgggaaatctctgccccattaaaggcgagtcccggcgaggctccagccctgtgaagaaaatgtgcatccctactcttaactatttaatcctaagtttaaattttaaaagtaaaactattcaaactattcaattaatagtaaatttagggtgttattcaattaacaattaaccgtatatatttggtacacttaatatcattagttaaaataatattataaattttgaaataattttatatttttaaaataataatattaagtgtaaaaaaaagtaaaatgaaagtagagttatagttaatcttaaagggaattttgattttatatacttaaaaaattaaaaaattaattattaaaccaaaa

SEQ ID NO: 342216 - DNA, 755 bp, Cannabis indica
catgatctcagagatgatctaaaaagaaggagagagttagacgaacaatattttccaccagccactcagcccggagcccgcgctcaagatctagttcaaagagatcttgatgtggcattggtcggccaaaaggccgaacaggttcatccatcagtgcacacacagttggatgaaatgaaaaacatgttccaatgtctggccggtcaaaagcacaatgatctcgagttagaccgagcgcgaggacccccttttactcaagagatcaatgttttggagctgccccacaagttcaagatgccgacctggaagatgtataatgggaaagaagatcctttgtcacatctcaaatattttgaaacgcaaatggacgcacaaggagtttgaggagatgtgtcttgtcgagtttttccggccacactctcagaagccgaccaacaatggtacttcaagttaacaccgagaaggttcaactcttggaaagctttctcctcggaattccatgcacaattctcttcttctccccaactcccattgcatttggaggacctggtcgaagtgaagcaaaggccaaaggagcctctctgagcctatattagtagattcatgacgactgacaacaaaagttacattgttaaccgaaaaagggaaattaactgcaagactgggggcatcaaagttctcggagaactttggaatgacatcaagagggatagactagtagattctatgagtgacttactcgatcgtgtaaatgg

SEQ ID NO: 342217 - DNA, 948 bp, Cannabis indica
gttcgtgtccttgtcagggtctggatcctggtcgttgttgcgagtctcaggatccggtgagcgtttaggaccaggtcaggtacaggtcccggtgagcgtttaggaccaggtcaagtacaggtcccggtccatgttcaagtcttaggtctcaggtcccagtcctagtcaaggtctccgtccaggttttggtctgagtttgagttatggtttgggtttggttatcgtcttaggtctgggtcctagtcacaattccagttctgattcagggtccgggtttggttcggtccgggtctcggtccaagttggtgtcagggtaccgagtcttagttcgagtttggttacgggtttttcggatctcggtctggatccaggtctgagtcaaggtccacgttcgggtcttggttgtgggtccctagttcgtgtctaggtctgcgtctgcgtctgggtctaggtcccgtgtttcaatcccggtctaggtgtgggtcggtatttgggtccgtgtatgagttcgtgtccatgtctacgtctgaattccaatttaggtcaggggcttagtctgggtctgggctcgactcccgagtttgtgttaaggtctggttcaagtctcagtccgagtctgggtccgcgactgggtctgagcccaagttctggggctaagttcggtctagttctgggtccgggtcaaggtccaggccacggtcccggtcctgttccatggtcctaatcaccttcttgttcaagtttcggttttgggtcctagatttgggcctgggtctaggtccttgtccagcttcgggtccttgtccgagtccctgatcaagacatcgactatgggtcttgtccaagctccggttctctgatcacgggataagatctgcatcccaatcacgggtcctagtcttgtttcaattctatgtcccaagtcagggtcttggtttgggtcttggt

SEQ ID NO: 342218 - DNA, 738 bp, Cannabis indica
acccgaacgggtactcgaaagggcctatcatggatgctgaccgccctaaaggattgtggaagtctaccttgtctacgaactcgaatcgtccaacgacggttatgctttttctgacacaggatcagatcttgtcccttgtgctagacgattattccagacatttactttttaaaattaaactttttggagacacacatccattacgtacaagtatcccttattgtccaactgcttcaatgcacgagcacaaattcttccaaggagctcaacaatcagctcttttttgcatgtattttccctattagtgggctttttatagaaaccctgggcgggtcatggacatgtccatacccggcctttaacctataaatacccttctagttccatacgaagggatgatcacaacctagatagttaaagctctactaatattattctaagctttcctcttcttcaagagaaacatagaatacagagttagggtttcttacataaacactataaaaacatcaaatacgccatttgaagctaatagactgactcatggactagaattaattaacacctgaattacgtaaaaatcttcatcgtctttactactgttatttattatttcttaggctcttaaatatttagttttccaaaatctcagtaaacacttattaatgaccgaatatagttttactttgattataagtgtgtccatcctacaagtaggtgaccactttatttaatttc

SEQ ID NO: 342219 - DNA, 519 bp, Cannabis indica
ttaaatatgccaaaaatggaattaacattatataattatgaagatagctttagataccaattgttagtttttatggtacatatgagagtaataaaagtagaagcagaatttgataaaaaaatagttttatctaatatgaactataattctaaggatctcaacaaaatgtatatatatatattaaatctaaactactaaaagaaaggttatacctcttgaagcctatcaggttatccttgtttctttttgtataactatcgatcatccaatctaagaactttattgaagaatccacatcttaatcttccaagccagcctcaacactcaggaatagagtgggcatttagatcttattggatgaacacatttaggtattatagtgtgtactcaactcatgagacactgtaataaaattagagtttttaatctcaaacacaccagtaatggtgtggattcgtgtgagatgaagagagagagagagagaggagtgagacaaatcaatcctattttctctctaat

SEQ ID NO: 342220 - DNA, 495 bp, Cannabis indica
tggcattattttaaatgatgtggcatgccacctgttgtctagtgtccaagataacaacaaggtacctacaaaatgtctgaaagtgtaacggaaggtatttatgccgccaaaattttaacttaggtattaaattaaaaccgaatgataaacttaggtatttatgccgcaaattactctaaaattaatattttttttataattttaataaaaacattaaattttgtgattgtgcattggagcacaataatactaatggtgcttttggtatgtgatttagacttgatgggactagaaatgttaaacttaatccatgtttggtaaattaaattttaatgactaagaggtttgtatttccaagtggatcttattttttaaatttaaatggtggtaatgttaattctctccaacacttggcttttatattctctgtaaagtcttttgtttgcatatctgtaaagtcttttgtttgcatatttgataaaatagacaaaaata

SEQ ID NO: 342221 - DNA, 810 bp, Cannabis indica
tttttttttgtaaaattaatttaataatttacttctctaaacattacgttcgtaccatttttaattctaatttagagaaaacatattttgtcttgtgaaccacaatcaatattcttacctccacttttctttcttaccaaattatacgtgctatttcttttcttcattctttttcacaattctcttaaaacttttcttctataagagcaaactttattaagtcaaaactgcctcaaatttttatcgtcattctaaatgataataagattaagactaattaatccaacacattgtccacataccataacttccttatattttatatgttgcattatattatattatgttaaatttttttagtattatttaatacaatactatgtttgatattgacttgtattaataaatttagtaaaattataatatattttcaataaaactcaatcacaagtcaaatctaagttccgatctaggtacgagatccagattctttgtaaatattgtaatacaaagtaatactgaccatttattatctattaaataatacaactagaaccctatacgtatatttattgctgtattttccaaccctagataaatatatgtatatatattagggatggcaattatacacgcgagttcgggtacccgcggatactcgcccctaatggggcgggtacgagatagactttcggaggcgggggcgggtatgggtttaaagattcatacccgagttgtaggggtgttcacaaattatccgatccaatccaatccacacgatccaatccaatccaatccgcaaaatgcgga

SEQ ID NO: 342222 - DNA, 576 bp, Cannabis indica
gacaacttttagtacacatcataaattttttgtgaataaatgtgagtttagtcacataaaatttacttgtgactataacatagtatttagatacaagttgtcactaatttagtgttagtaacaagaagttttgtgacgaaaaatacatttagtcaaaataaatttaatttttgtgactatacctttagccacgactttttagtcacaacataagaatgataatttataataagtcacaacttttgttgtgactaaaaataaattttttaatagtaatggttaaaatcagaagacacttggagaacatctcatcacaacctttccaagttagtgcctgcagcattccaacctgttaggttggtgcatgtcgcactaacctgcaggaactagtgccgagaagcattttagacctagaaataatatgatgtacaaaacatataggccaacaagtatcaatgtacctgttggggataattttactaagatctagatttactactgtaataccctagagttacaaaatggattagcgaaatcctaattagatgattatgaataattgaggaattatattat

SEQ ID NO: 342223 - DNA, 593 bp, Cannabis indica
atatttcaggcgatccatttggacatcggaaaaatgcttgttgggcactaaccgagcactcacaaagtacagccatgtttttgccaccgggttcagctcacaccggtatagaatatttggcgacccctcggtgccatcattgtcatggaacctcaacccaggaaatcccactgtctctgccacatccaccatatcaaactgctcttcctcctcaataattcggaggcgttgttcctccctagtgtaatctgggacagagaacatcacattgaatgcatcagcagtggcgggaactttctttccacgcaccttcacttccccattccggcggtcgggccaattcgcaaggaattcacaggccatagtaacattagcccgaccccgagtatctacaaagcttccccacttcattctttctatttgagctctgattgtttcaaaccgaggttggcgcctcaagggattttccgggaattcaataccccgatcttcaatataagccctattctttacctcacgaagcgattgtgggcctcgatatttccaaagcgggttctataaaaacccgttggtggtgggtttgaagacgaacc

SEQ ID NO: 342224 - DNA, 1162 bp, Cannabis indica
gtaaaataattccaacatggacttcaatgaaattttttctccagttgttaagcaaacctctataagggtcatgatggctaaagctgctagagaagaactacacattgaacaaatggatgtaagaactgccttcttacatggaaaccttgatgaagaaatatacatgcaacttcctgaagggtatgaatgcaaggatcctaatgaggtttgtctacttaagaaatctctctatggtttaaaacaagcacctaggcaatggaatttaagatttgatgaatatatgaagaaaatagggtatgtgaaaagcaactatgatccatgcatctatcacaataatcagatttacctattgttatatgttgataatattttgatatttggtaaagaaaaatcagacataaacaagctcaagatgcaactcagtcaagaatttgaaatgaaggatctagaaaatgctaagaaaatacttggaattgacattcaaagaccctcatcaaatgttataattttgtctcaaaagagttatctacagaatgtgttagataagtttggaatggacaactccaaaatagtttcaactcctctagctcagcactttaagctgtctaactcacagtcaccggttacagatgcagaaaaagagaagatgatcaaaattccctatgctagttgtgtagggagcttgatgtactcaatggtctgtacaaggtcggatttagctcatgcaatgagcatgaccagtagatttgttgccaatctagggaatgctcactggactgctttgaagtgggtaatgagatatataaaaggaacactgaacatagggttaagctatgatggcactagcagatacaaggagttggtaactggttatgtggattcggattatgcagggtgtttagacactaaaaaatcattaacatggtttgtttttactgtctatgggggctgtgttagttggaaatcaaacctacaaaaggttgttgctctatcttctacagaagcagaatatatggctgcaacagaggctattaaagaggcaatttggctcaagggattgacaagtgagcttggcatcaattcagattatgtaacagtgcactgtgacaatcaaagagcattacatctcatgaaaaatcccatgtttcatgagagaactaaa

SEQ ID NO: 342225 - DNA, 503 bp, Cannabis indica
taacaaaattatatacaacaattaatatatatatatatcatgataacaaaattatatactatcattgtaaataataaaattaaagttaattaaatattatttaaaataaataatcatacaatcaaaatatataaaaataataattaattatatgtagcataccaataaaattagatacatacattaaaatatttttattatgctaataaaattttataccactattatacacatcaatataaaataaatatcatctaagaataataatataccatactataaaataaaaatataccgtacaacaaaatttatataccaacaacccataataataactcatatatacaaaattaaaaaaaaatcaaacataacttttaaaataaaaaagattttaaacaaaactaatatagatataccataatcaattaaataaatttgctttctaaattctaaaaaaaataaaaaaaaaattaaaatagtatttttttttttaattagttgac

SEQ ID NO: 342226 - DNA, 708 bp, Cannabis indica
aaaaaaaaaataaaaaaaaaaaaaaacttttaaaaatatgggaagatatcatttttatataaagatgaatgaccaattaaaaaaacttttaaattttgtgttttcttttttacttttttaaaaaatgaaacactaaaataaataaaaaataatctcgattgtaaatgttatttttttatagaaattaaaacggattttttacaaaactatcgtttgttttttattagatatttattatttcattaaaagcagcagaaaaaaaaataatttcatcaacatcatcctaacaaaaaaataatataaaaaattataatctaaaaatgatacaaactttaaaaatcagtttcatcaacattaaaagaaactaataatttcattaaaaaaaataaaaaaaatagttgtatcaacaagataatgaaaaaagatatattaaaaaatgatattaactttaaaaactaattttatcaatattaaaagaaactaattattttattaaaagaggcaaaaaaataattttatcaataaaaaatacacaatgcctaataaccaaacttttacaaatcatactaaatttaatatcagtttcgaacatattaattttatataaatacttaataaccaaacttctaacttcattctctatttttgatatttaattttttatttgcttcctcaaaacctagagttgatttaagtatacaatatgca

SEQ ID NO: 342227 - DNA, 820 bp, Cannabis indica
tcaagaaattcggggctgggtataagttaggattaggatctgttcttaggtttggtctaaagcttgtataggtttgagtttgctgaatataagggttgcttaacttcgaaatgagttgaataaagttttattagttctagttcacttgggaatacaattttgagtaaatggatgagttgtggtgttttgatgcattggttatgttgtgtttatgatattatattgatctggagcagttggacaggtttggtttagttttggttcgagtttggaggagaaaactcttggttgcaatcctgccagaaccggtcgaccggttggttctggtgtagcagaactggtcgaccggtttgcttataggggaaaattttcagtttttgttagggccgattttagagctcggggtgatttccgtgtctggtatagattgtttggaagttataaaacctattttggagctaatagaagttaatgttcactggttatgggaattagggttatacccgaaatgattgatttaagttatttattgaatgttgttgtcgtgatataggacccgggatcgtcaagctttgattccacctaggtcagcatgtacgctaaatttctggactgaggtaagaaaagtattaaatactgtataaggttaatgttatgattgttacagtttcgattaagatcgaaatcttgttatacgttgttgtgacttaatcctaatcgaggttaacaatatgtattggatgtgactcgattatgatcgagggaaataataggaaacgattattatcgtttgactcgattatgatcgaggggaaatatt

SEQ ID NO: 342228 - DNA, 1002 bp, Cannabis indica
catctcgtttgttgtcttttgtagatgaacccaggtgagttttgggagagcgaacatcgaatcgactaggacctgcttcaacttctgcacgaggaccaccctcgtcttcgttctagcccaccttcttcaaatcttgtacccaaccataaaatgatggctcgtacaaagaaaacaatgcgtctggccgacgcatctgatcctcaagtggctcggcacgccactttgcccagcgccgaacaggatccacccgtccaggtggaggtggatcgtgaaggggacgccgaggtccaggagattgaggggcaggacaacattcgttccgacagttccttcgaggtggaggaagaggaggaggtggaatccccaaactacggagaataaaatgagggtggggagccagtcgatgctgacggtgacgtcctgatcgatggcgtggactacgtcagtgaggagcttaatgctgcggttcctcataggaggcaaagtgccttgggtgccaggtgggtgagtcctccatccagggttactgaggcgcgcctacggtctctcgaccaggattgctacctgggtgagttggtctgctatattcccgcccacaacaatcgagccacaaaccctgaaagggggaagtgcgcttggtcgggcgctcatgcccagcaaggggcgttgatgcctttgcatcaatactttaaggatgtggaaaacttcttcgacctctgtccggcccagttcactcctaagggcattaaatatctgtctgccctctttgtcctctacgcttcccagaagtggggtatgccttctccccacgaggtcagctggttctttgatttgaagtccaccccaaacaaggcaggccggggtacttctatttctctcaaccagacttcaagtggttgacgggcaccgatgacttggccatcaacaaaataggacgttttgttgatgagtacttcttggtggatggcgtgggcatcacccagactcggttccagcagattc

SEQ ID NO: 342229 - DNA, 593 bp, Cannabis indica
aaatattatcctcttcacttgattgtgggattttgggaaattccttttacaaagatgactacttttgctctaaattatttatcatacaaacaaatttgatattgtttttaggataaatatcattttacacgttgtattttgtaaaaattattgattgaatcatttattttgttaaatgacaaattgaattttatattttttaaaatagtataaatagtacattgaactgattttttgtcaaaataaaatttaatagtaatctgatctaaagttgttataataaaattgaatacattttatgtatctgttggtgtgctagaatttgtcttcaagttggttatattaaaaaaatatatatatatattaaaaattgagttcaggatattattttgtaccattttgaaaaatacaggatcaaatttgttattaacaaaatagaaaatctaatcggtaattttcgcaaaacacaagttcaaaatattattagttttatttagggtaaatagcggcataagtacccaagtttaaagtttgtaattggcataaatccaatatttatttttagtcggcataagtctcaatttttgtaaaac

SEQ ID NO: 342230 - DNA, 1165 bp, Cannabis indica
agatactttttacaatttctctttcagtgtcccattatgccacaatggaaacagttgcctttagcattactgtccttggacttggggctggctttgttcttcttggccttgggtgacttcttgcctttgggcttgccaccgctgttgtccttattgttccacttcctttttcttatcagaagaagtagaagagttggatttcgcttcaataatgtttaattcaccttccttggacttatgcttgttaaggttctcaaacacgggcaactcgttcaacaatggagtcatgttgaactctagcttgttcatcacatagtttgtggtaaaagccttgaagcaaggagatagcaacttaaggatcatagttacttgagtccactcctcaatgattgccccatgtgtctctacctcatgcattagctcaatcatgtgcaatacaagagatagaacaggggcatccttctctatcttataattcatgtagctacaagtagcatcatgtcttgtatgattagactgcttcccaaacatgggatgtagaaaatttattatttgagatgcattctccatatcttcatgcatcttacacagaaaattatacatgcttacaagcatgaaatattttgccttgttgttggattgaattcaagcatcatatctatcccaaacatttttcgagacatttgcagtaggctcctttggacgctcattagttaggaaaaatttgtgattctaacaaactagcattaaatccagattcgatttccattgataaaaattatcaccatccagttttccaagtgctagtaaagtagtaagagacaattatgcatgaatattaaatatcattttggaattactataaacatgatgcatgagatcatacaagtaaaacacataaaatcttgtttaagttatggcacgataaaacactttgacgattgatcgacgccttagggtcggtgtcgagtcaatttcattaagcctacgagacaattctcatctttattattttaaaacctaaatatctcatatttccttttcaaaatataaaataccgctttttgacaaagttaacaactaatcactatgaagcttagttgcactttatgagtgtaacccattattttagatttcatgacttaacttagtgtgtcaccttaag

SEQ ID NO: 342231 - DNA, 482 bp, Cannabis indica
aaatgagtttgtggacaaatgctcacttgtatttataggcagacaacgaaaaggggtaatcatttcaaaataacctcagacgcctcgattcccccctaaagcgattatgggaaatcaaaagtaatcaagtgtagccgcaaccatggtgagagaaaatcggatttcaaaatattaattgtcagagcatttattagccaaaaaccgaagggacgcccagtcagcctcacatcgagtctcaaacaggcgcacctaacacgtgtcacctattcaaatgcaaagacagctaggatgaagtctacacgcaactacggaagtcccgtacagacttggggcaaatgttatcccaatttttgcactctaacatggcatcacatgatggtgacacgtggaattgactccgagtatctattcacaagatataatccgaacagggtacctcatatgcatgctcgaggcaaagcaattagtaatccgcgcagagc

SEQ ID NO: 342232 - DNA, 524 bp, Cannabis indica
cactattcactcctctctcattttttttgttcaaaagtctaaccttcttcaagtttgagagtgtgtgcttcctagggtttcaaagaagaatggctaaaaccataaatgctcaaccgcctaagaagccctctcgtggctctgcttctgcatctctgatcaccccacctgcgccatttgctccagtgaccggagtccctggtttttcgtctgcttcgacaacctctgccagaaattcaaagaccgaagctcgaaagtcgacttacaacctcgattctcctccagtcattgcctctccgattgctactctaactcctggcttggtgatcatgatgaatctcattcatccaatcactcgttgtcaaagtcttcctcttcaaatggtgctccaaatgtcaagaaagcaatagtgcccttgcccacggtgcgtgtgggaaatattttaccaggatctagatttactaccatgtatgtttcattaacatcctaatatgaattctaaaacaatgaaataaacacataagagt

SEQ ID NO: 342233 - DNA, 712 bp, Cannabis indica
cggctcaagaagaagcaaagggggaaactgaaatttcatcccttttcaacctaaattctgctaagaatcaatcctacttgcagcatagattggtaaggtgagttcttggtgttcttccttttattttctagtgttaatgaatcttttggtgaatcttttagttagggattttaggttttcaggggctgtgaggttagttagggttagagtaagcttctaatttagtttttaagcttgttttgaattggattgattagaaataggggttgcttagcttgtattagattggttaaagctttatattcatttgagtatgtaactttgtgtagatgattaagttgattgaattactgcattttggtgtttgggatatgttgtgattgtgatattgatttgaactggagcagttgggcaggcatggttgggttttggttcgaatttgaggaagaaaactcttgagaattggtctgcccgaaccggtcgaccggttggttctggtgtaacagaaccggtcgaccggttgtagtagaggggaaaattttcgagttttcttcaggtttagctttggcttggagttgtgcctagcatctgttttgggttacttaaatattggatggcctatttttagagtgttggggattaggaaattgtctagttatgggaattaaggttattcccagaattattggttaaggtatttattgaatgttgt

SEQ ID NO: 342234 - DNA, 881 bp, Cannabis indica
gacccacacagagttgtattatctcccgtggtcctaggcaatccaaccacgaagtccatggcaatgtcttcccatttccattccgtaagattcagtgattgcaacaaccctgcatgcctctggtgttcaactttcacttactgacaagttaagcacctcgcaacataatcagcaatatcattcttcatacctgaccacccgaacatggacttgagatcttggtacatcttcgttagtcctagatgaactgagtaaggagtcgtatgagactcattcaagatctcccttttcatatcatcatccataggcacaaaaatatgattcataaactgaagcatacttgtgtcatccattgtaaaatcactagtcttactagcccaaactctatctcggaatttcattaactctggatcttgcaattgcgcttctttaattcactccaaaagagtagtttgcagggtaatattagccaattgccctacaacgaactcaattttagctcaggtctttcatctgctaactactgggagatctgcctcagtgtatttatatgactttgtcctttttttactcaaagaagatatgttacgtgtctgtgtgttacatttcaaaggatcccggagcaagtatctaccactgatagagttttcatacaacaatagttatcaaagtattatagggatggctccttatgagatgttgtatggcaggaagtgttgatctccaattcactgggatgaaactggagaaagaaaatacttaagcccaaaatcagtacaacgaaccaataaggctatagaaaagatcaaggctagaatgcttgcctctcagagtaggaagaagagttatgcaaacccgaagcacagaaatgtagaatttca

SEQ ID NO: 342235 - DNA, 787 bp, Cannabis indica
cgggagatcaaacctaatcgttaaatttaacagaatattctttatttttaagtatattctgttaaaccaagaaatgccgttagataggcacttttaatatataaagatatatattttataacaaaggtgtaaatataattatgttaagaatcatgaagttccattttaaaattaattagttcaattctctaccatttattttatgtaagacaatgtctacaacaaactatatattagtacactataaaaattgatattcacttcctaaaatttagaagaaaaaattatttatataaatatatatatttctgtaaaaaaaaaaaaaaactatattgatttgataaaagtttaacatgtaagaaaatgtcataggagagatgttatatatttcaaaagataaagaaaaataaagaacaagaagatagtagtatagcgtggaaagagagatgtaccacggtaaataaataacaattataataatgtgaaattgagtggttatatagaatccaaatagaatcaatcaatagaaggaggaattcgatcctttaatggaagaaaaagaagggaaaaaaaaaaaggttaatatatattatatttatatattattctattggttggttaagagtgggtgatatcattgtttgttcacgtgatcacatttgctagaagtgtcactccactggccactctacttgcctttgtttgagcatttagttcttgcctttgcgcatctaaggcatcttcaatggaaaaatctaaatttagtgttaaattaacatttaaaaac

SEQ ID NO: 342236 - DNA, 1023 bp, Cannabis indica
ttttcttgagttttaagaaaaatatgatagttcgcatgcttgataaattgatgatgttgctgctgtgtttatgttatgttttctatagtttcaaaatgtttaattgagtggtataaaacagattttgatgcatgttagttggatttaactatgtatggagttttgaactcaaaactttggttttcatggtaaaatgatgagttttgttgctgtagttgctgctattgtttgattgtgttctctgtggttaaaatctattggaataagtttatttaagcttgaattgtcggctgttagtgggtttgggcaagcgttgagttttagaactcaagcttggccctttaatggcatgttttgatttcgagttggtagttgtgctctattgccttgaaaatgttctttggtatttttagaacaggtctggagagtttggtttaaattcgggttgaattgcttgagttgtgaaatttttagtgtttcctgcactgaaccggaattccggttcagagaggcttgtaggaaccggaattcccgttggcttccaggaattttacccagaaccgaaattccggttgaggaactgatctaccggttgggacaatttaaaccctagttcttcccatttttgcgttgattagggtatttccatgctttgtatcaatggggaaacttttggtttctagtttaagtctccggcaagtgatttagcgtgtcagttatcaatgttgcggttattatgatttaggagcctgtaattcgccgagcagattgttccactcaggttgaccggcacacctgaattcagaatcgaggtaagattagtataacagtatgcatatgtatatacatgtttaccgtgcatgtcacgaagcctgttagattacattagatatgtattttggcttcataccatttgacagtatcacatcggtacggctagagtatgactagcgtatcgactataggctgatattatggtcaatggtactgtactgtttgaccgtatcacatcggtatgctcag

SEQ ID NO: 342237 - DNA, 1066 bp, Cannabis indica
ttggataagagaaagcgtgccccagcattgaaatcgccttttgttaagttttgggtcggctgatgtgagcagcactctaatgggggtaatgtcctcaggttctcaatctggaggaaatgagtgggattttaagatggttacgtatgtgaaggacctttacgctcttaacgatacattttccgatcccgtctctcctgaaattgaggcaaagtttgatgcttggattggcaaaggattgctaaaacatcctaggtgataatttttctttattttttattttttttatttgtttgcatttcgttttgttttgccaattatttgaattcaatgttgtttttttgtcatttttttgttgatttaggccttaccattgttacgaggatagtgcgaagaaaatttcccctgggtttagattaggtgttgattatgttgaagataaaacctggttttatcatttggcttgctttgacatgcttatcaatgactcggaatatttcattttccttttaaaattttctatagttgttttatcacatgcttttaagtttagctactgttattaagtttttgtaatatttgttcactttttcttttgtgtttctttgttgttttgtttcagcatatgaacactatcttctattaccttaggaaaaaagggaaatattcttctattgttacactgaattttgtaacaactgactgccttttcgatgattccattcaatcgttataccacaaattctgcaaagccaatgcaattaaaactaagatgtctcacatccatgctgctcacccaatagcgcattatataagaggcctgcaaattccgtgttctaagccttggtatgaagccgatcaggtcctattcatcataaatcttaggaaagaaagctattgggtttttggccatcttgatttgaatgagaggattatatttttttttataattctttgaggactgccaaaatgaattccacagcaaggaatgcaatgaagacttacttgttttactccctttttttttatctccttggattttggaagaataggtcccatgttcctgatt

SEQ ID NO: 342238 - DNA, 1135 bp, Cannabis indica
actcctcccctttttaatcggtttttatagtggttgtaacacctcgtcttattttgcagacatgggttatgaagacatccaaccctggagttcctactgccgctaaggtggttcctcccaagaagcaaaggaaaaccactgctcaaaagaagaagttaccgagcgagcctattgatctcgaggtttcgaacaacgagatccaagagcaagttcctcattcagttgttcccaacgccaatgcccctcatcccgaggcgactcccgctactgcttctctgagtcaggccatcaagagcctgtcggtcgcagctggagaagctgggtctaaattttcccaggcatacggggtcgcctgttggcgcaaacttcaaactctccttcccctagattgggattttctcaatcttaggagcccaaaggagatgctttcaagggccttggactgccacttcatggtatgtcggctttgttaatataattatattatctttttatacctcttttatactcatctgtttgcaattctctaggcttcttttgcttctaatcgactactctctgatcgctcgagtatttggagggcgagactcacaaattattatcccaatccaaggatgtatgtgagcaacgagacaacgcccaacaggagattacccgcctcaagcagaagccaaaagtgagggaggaagcagagaaagcaaagaaggaagccgagaaggcaaaagaggagaccgagaagaccctcaaagtccaagccgatgagtttgaggagaagcttgctgaaaaacatgccgagaaagaaattgagatcgtagaacagtgcgataaagttagttttcgcactgtatatcaggcctggctctggaaccctaacatggataccagcttcttggaggagaaggaaaagaaaactttagctctttgcgaaaagaccaagatggaagaagaagacggcgaggtcgatgaggaagaagaagatctgtccaagtctcccagcatgtagacttggtttatttatctcccttttatattaatttttttttaagaaatggccctttggcaaagacaatggttttgcccctagtagcacttttttattgtaaagacaaatttgcaaggttggacggccaacttt

SEQ ID NO: 342239 - DNA, 1009 bp, Cannabis indica
tgatgaattctgcctccaacatcttcgttagctgactcttcaagtccttaagtttcgggggagacattcgatatgctgctttagctggggcctttgcacccggcaccagctctatttggtgatcaactcccatcctgggaggcagtctctttgggagctcgtccggcatcacatctttgaattcatctaacaccttctcaattataggtggactggactcttccactttttcatcgtactcggcgggagcaatgaaaaatgttggcctcttcttcttcaggcccctcttcagttgtagggctgatagtagcttgacttctgggggctgtctcactttagcgggaaccatagaaggattctcacccatgatcagtagattccctgttgctggaattggaatggcccccttctcagctagaaactccattctcaataccacatcaaagtcatccatgcgaacagctacaaggtcaagtttcccctcccatccgtcgatcttgacattcactttcctggccactccaattgtggccatggccttcgaattgactgctttcatgcggcctgcatctttctccagttttagacccaccctcttagcttcaatttcgaaaatgaagttgtctgttgcgccggtgtcaatcaacacgctcttggtctgcttaccatttaaagtggcctccacaaacatcaatcccttcccaagggctttctttcctccaatgccatgcttcttaagaggagccatcaatcgaacggcgcccatgtgcgcgcagtcttcatcttcatcatcttccccatatccttgctcctcttgagcaatggatgcctttacaacactcaacttggactagtgggggcaagcagccaccctatgtgggccttggcaaagccaacacgtaaggggcttcttccccattgcaacatcacttttagaggaggggctagattcaggagccctcttgtcccctcccccacttttactcggccattgctttcctgacttctt

SEQ ID NO: 342240 - DNA, 1577 bp, Cannabis indica
atgatactttaatacccaatgactcacaattactaaaatgatcactttattttgggccaaacatcaaataacaatacaataatatacatatgagcccatattgaggattttaatccaacaattattttacatgaaactttataatatttattaacacagttaaataagattttatttttacttctatcaaaaaaaaaaaatcaataaataaaagtatatttcaaaaataaatataattttttttcttaactataaatatatatattttttaaaaaatatatattagaatttatcataaaaattatttatgttcataagaatgtgttaggaggtgtaatttatggcatttggctaaaccaaactttgtaaataataaaaaaaaaatggtatgaatccgaattgtatagatactaaatttaaagagagcttcataaaaagacttaatcttgaagaaaggaagttgtctagcatgaataaaattgagtggtaagtttctcttttgaagaggaatcatcttgtggatgtaattggttcagtttgattaatagacattgtctttcttgataaaaaattattaaagtaaattaatttaaaagataattatgatagaattatgtatctaaataaattagtaacgaaagtactcaagtaattaattatgttatagttaacaattagtataaaaatattagcaaaatttataagtaattttttttgaaaataaatacctatacaagaacaatttaaattaattttttaaaaaatattaataattaaaataaaaattaataaaattttaattattaatattatttattttttaaacaaatatataattaaatattattataatatttataaagttttaattgtatacatgtagtcttatcgtaagagtatacaccttacatgttaataaccacatgatctaaaatcaacagtcaaaaaacttccttaccggtaggaaacttatgctaagtcctactatagttttgccctatatatatactatactaatcaaattatataccataattaaaatatatatcatgacaacaaaattatatgctattattatatataataaaatacaaactaattaagtattatttaaaataaataatataccataaattaaaaatatcaaaaataataattcaatatatgtataaaactaaaaaaattatatacatacattaaaatatttatattatacgaacaaaattatatactattattatacacagtaaaataaaaaatccattccaaaaataaaaaataaaaaataaatatcatctaagaataataatatactatacaacaaaacaaaagtatattatactacaaaatatatatacgaacaacccataaaaaacttaaaaaattgacgtaacttaaaaataattttttttaacaaatatgaaaggtgtaggaatttacttggtgaaattccaagtttaacctacaccaactcaagttcacagttaaaacgacaaggacaaaattgtcctttaaatcaattaaaacaatcaattcacacgacaaagaaaactcggtcgttttcacttgcacgacaa

SEQ ID NO: 342241 - DNA, 652 bp, Cannabis indica
gaaaaccccaatgaaactcaacttgccattaaagaccaaagctttgaattcaaaactcaaacttgcacaaaacctaatccaaacatcaaaaccatatgctagaaactaaattcaactcaaactaagcttagaatttgaattgcgtcaaaacctcaccctaacagttcccatttcacaaattcacatactcaaactaaagaaaaagcttcaaaatacatattcaagggttctagggttttacctttgcttgactcctcctccaaccttgctgaaaacaccaagttcagcaatgaatgccgttaaccttggttggttcgaagagagatagggaattgagagagagtgttttcttgaattttggcttttcttcctttaattctattttcactaattgaaaaggattcctataaatcctttgctgaataatggctgctaggtgtcaccatacaaggcagccaccaaaacattaaccttggcaaaagactaatattcccttaagggttaattctagcttatttccaacctaggagtaaaatggtcaaaaatcataaccccgctcaacctcgatattttattttctctaaaatatttcccaccaagaaataaggttctaaacttacccatgtgatcaaactagccatccatcgcattt

SEQ ID NO: 342242 - DNA, 737 bp, Cannabis indica
ttgggtttattttttaacgggagatcaaacttaatcgttaaatttaacagaatattcttttatttttaagtatattctgttaaaccaagaatgttaaaccaagaaatgccgttagatagacacttttaatatataaagatattaataggttgataagttgattaaaattaattattatcatttatgtaaacatattatatgaattgtgtcaagctactcatttataacaagattgcgtatgagttttaatttttgacataactaatatatgagacgagcttaggttggacatttacttgtaaaatttaaatatcaacacgacaagaatataattcgtaaatacaaattatcactcttatatttgttgtaagttaaagtagctgatgttaggatttataaaccattcaagatatatatatcacatatctaaacatattcctaaaaagtattttaatatagaaaatcctagatcataaatctatagaactattacaaaagaggaagatgatgaaagtgagcggaagcactaacctgaagccattattggagattgcagagaatgttttgatcttccaagaataaactatttcctaggtattttctttaatgggagaaaacagaaacccaagtatttcttggggaccactacctatttatagactcattatataataagttttgagtatttataatttggcccctcaacaaattataaattaacttatggtatctacaca

SEQ ID NO: 342243 - DNA, 1278 bp, Cannabis indica
ataaataattacatagtcagattaattagtgttaagtgccccactaatcccatgtctaagaataacggtcattacaccctaggtgcacgaaattgtccatgggaagagtcccaaggtgcacaaaattatccatgggagaagatgttgggattttaagccctaaataaaactcaatttcaatgtaatcttatttactaatcaataaaagattagaaattattttattacttttgtatattgcttgattgatagggtactttcgtgattatatgtttaatatataaattctattaaatctcaaacatatagttattcacaattatagtgatgtcatcacattggaaaataattgtgattatatgcttcaaattatttagtcctgtaatttttagtggactggatttatactacataataattagcgatgtggtttacttaaacttatttaagtggaatgtcttttctagggcattagcaaagtaaacttgtatcagatttattggctattcattagattagaccgatattgacagtgacaaagatatcataaacttactgttatatcttttctaagttaatgtcacttagttgatcttagtcctgagatggttaagctttgacctaattgtagtaatagagttatttgacttgttcattaccatcttactcatcggtttagcccattcttacatcttagaaactcagtagtgcaattgagtgagagcattatttatagataagggcatatgtacgttctatgtgagtctaagaagtgatatgatagtttccttagagcttggctaaacacgatgaatgaagagctcttatttcgataattatattagtttgcaaaactattatttacaagaagctaagtgttttgtgaataaaatacatttaagggtaaacaataattttttccttactcaatgtaaacagtcaatagaggattattgattttttagattgaaacaatggataatttatagcgtgtatatattggatatatagagcgttttatgtaatcaagagtgcaattacgaatctatagtggagtcatgatgaattaataagttagggaatttacttggtaaatttcagatctacttattgaaagcttgatttcataggtccatgatccccatattacttggggtaatattatcttgtaaactcaatcaattggaattcaaaaattgactatgtcaaatttgagaattttcacaaagtttggatcattttgagaagaaaaaagaaataagagtttatttgttaatt

SEQ ID NO: 342244 - DNA, 876 bp, Cannabis indica
acttgcatcttattttctctcaaagaaaacttgagcctcctattctattgatagccgcccctctctcttcttctcttctcttcaattttgaaatagccttaagtgaatgagtagtgcccacacacatcaagtggtatctcaatcatagtgtgaaagattgtgtagaatccaaccaacaagaaggagaataagcatcaaggaaggagagaaagagatccaggttcggatcttgattatgttcagctatagaaaggaatcaagggctagagatctgaacggaaggagtcattatattccgctgtacccaatgtaaagttttcttaaacttttatgtgtttatttcattgttttagaattcacattaggatgttaatgaaacatacatggtagtaagtctagatcctggtaaaatatttccaacacaacgaccatctcgagcggatagagacaatgtatacacatacttaaatagaggacatgtatccaatctctttcaaaggagaaggccaacgcaagatgaagtaagttcaagctcatgacaatcgaggtctcgagggcatagtcggtcaagcagacatacgtgagaaagaagtagaacttgacattattacgctgaccaggaaagcatgagcaatacgcgaagctaccaatctgagagttatccagagacaagatctgtgagttattatgaatgaaggcaacctgatctttgtcaacacctaaatcgaagacaacctgatcttcaagagcaactaaaccaaaatgcacctgatttgcaccatcaactcaatcaaaattcaaatcaacaacaagcagaccctatccaactgcaaataattgataatgtgaaattaaacacaaccttttctccaccat

SEQ ID NO: 342245 - DNA, 1038 bp, Cannabis indica
taataataataataaagagcataggcaataaaaaaaataagagtatatatattagaattagtatgacatgcataacatattatatttgtaagagagaagaatagtgataaaaaaaataagaaagaattgatatataattttacttatagatcactatataaataaaatttaaaatctaatatttttatataattcatagaaagacattacaaagaagaaaaaaaagaagaaagtaattataccagatcatatatgtatctttgtatttaacttgttatatgtggtgaatcctcaccctcaaaacaagttgttacagcagtaacaatgttcaagaaacacaaatcaaaactaaaaccaatcacaaaaccaaaacttgaacttaattgaaataagacaaagaaaacttaactcaataatggatgaataatggatctttattgaataggaatagtcagtagtacacaatagattgagcccaagattacaactcaacacagtaagtaattacaaagaaatgcctcacattgagggaaatcacttcaagagtgatactccctttttacatccctccacacacactcactatgatcttggactctctctctctaaactgaatctaaagtatgagcattggagattagagatcagaactctcaactcagacctctctttttagaatagaggaacccctatatatagttgctggtgggtcccctttaagttggtattaaagccaactgttataaattgcagcagctttcttcagattcatctgataggcaaatagatggacatactgacttgagaggttaagtgagtttatgtaacgccctaaataattaggcacgctacccaaaatgattatgaaaccctaatcccctaaccgggattactaattaaaaacagcgcagaatttaaacttttatattaaacagactgaaaataaacttgtaatatatttaaactttttcaaacatagttgggatcccaaaaatatttacaaaattattacaagttctttcttactagccgacctaa

SEQ ID NO: 342246 - DNA, 810 bp, Cannabis indica
agcaaacaagggaaaaactttcccaagtagggaacttcccaaggcggggatgaagatttggatcctcgacttggggacccatgcagcaatgttggaccagtggaagagttagaagagatcaagatcgatccagatatcccgaccagaaagctaaaaattggaaaacgcttgagcgacataccaaagattggtaaaaaaatgtttgaagaccagatcagacaaaatatggaagaatacgtggatgatatgctcgtcaaatcaaagaaggctggggggcacatagacgacctagacgaatgcttcaatgtcctcaaaaaatacaatatgaaactaaatccctcaaagtgttcccttggagtcagctcaggaaagtttatgggtttcatcgtcaatgcccgaggaattgaagccaatccagagaagattcaagccctcctggatatgaagtcgccaactaaaaccaaagaagtgcaaagttttaattggtcggattgctgcactcattatgtttgtttcaaaatcaatagataagtgtgtcccattcttcaatatcctgcgaggaaacaagcagttcgagtggatggaggaatgtgaaaaagctttccaagagctaaaagcacaactcgcgaaacctctcgtactctcaaaacctctagacggagaagaactttgaatatacttagatgtcacggaacatgccgtaagtgccgtgctaatcaaagaagaaaacaacatacaaaacctagtctattacatctgtaaaagactcattgaggccgagggctaatacccattaatagaaaagctcgc

SEQ ID NO: 342247 - DNA, 1380 bp, Cannabis indica
gttcttggtggatttttcctcctttagttcttatgaaacccagaattctcaacccctgctttaatgagtttggggggtatttatagtgtttttgtggggtgatccctagaattgaggtacatgtctttctgtaattatcagtaaagccacacattcccaatgaatatatcataggaaatgcatggtctaatccctaggctttgtaggggttttatggatgtagtcctttatcctttttgactgatgtgagtcctcataaagtagtcgtcactaggctcattaatcatagcatagtagctgcagagagggggttgtgccgtcagactttaagacatatggcagttccaatacgccttctcccatgtggcattaaatgcaaaatgactgttcagataggatctgacacctcccggagatgctttgtcatggctttgctctctgggagcatgtgagacttgcatgccttctccgagaggcgtgtctaaggctgatccctgtggttaaagagacttagctgatttatttaaacgctaaaccctttctatctacgtgtcatcatccggttggtccacgtattttgcgcaaaatcaggggcaacatttaccccccaagccttgtttggtgatgaagtgaacaaggcttgcttagatgcctccggttgccttatcaacttcctggcacgtgcttcgggcgcatggtgatatataaatgaccatcattactgcagttatttgctttttgctggcgtcgattcgtttcttgtccatttattgatacggcgcattaaatgggtgtcagacgggcactcaaacgttttctaccgccttgatgacgatttaatcaaaccgttggatctgtagaattcgaatcgattgtcatcctagccgtttgatggtggatgatcacagctgtctcacacctgttctggcctataaaagccagccttcccacttcatttggttactttccgcatttcaccaaattttcatagagtttttcagagaaacagaaacttaaaacaccattgatttcctgctaccattccttcgtcgttgccagtctacgttttaccggtgatcaacaccaacccccagccttcaaacttcatgtaagttcttcatatctcgtacatttgcttactgtttgttcatatagcgtgctttacggtttctggattggatgttgaacttctgggaataatcttgtttgagtttttgaatgatgtgttaaatttcttcttttttgtgtttagattgcttcttttcactacgtttttgctggggcatcatcctcatttcatgtaatgaccactttagggcttagagtagaccttgctttttcgggtgtacccttttttccctttctctctttacttttttg

SEQ ID NO: 342248 - DNA, 667 bp, Cannabis indica
gagttaaaagattttctatagagttagcattagaaaaatactctaacatcttattaaattatgttgcttgtattagagtataaattaccaaacatatcacaatccgaaggtttaaataatctcaaacctatgatactaggattgggaagtcttgttaagtctattgaatagacttattattaaaatttcccttcgtaatacaaaattttttgttacttcatatgaatggttttgcttcttagttccttattctgactatccaatacatgtttaaactaatgatggatttttaccacaagtgtcttccaagtcataacagggtgagttccttgaaattctctcactacgacaaggtatcgtgactttctatctaagaatataagtggtattgtcgtcatcggttgtattaatataacagaggcaatgggaccatcttatatagaataagatgataaaacactttggaataaacaaatagtatctcatctacttttctactttataatcagatttagtcatatttttaaaaagtagtatttgtagaaacaaacacttttttatgttaatgaccataggatgatccacccctaatcacttagaatagctatcaaatatgcaaactttagttaacaattttagcttttcttaagttcatgatcaggacatc

SEQ ID NO: 342249 - DNA, 529 bp, Cannabis indica
aaagtgtgaaaattgagagaatacgaagaaaatttagattgacagtaacctgaaaaataaataaataaatttaaagttgttgcaatcttgttgaaaataaatagaaaaaaaaattctctcatgtaattagaaaaggggaattgggattgtgtgtgaaaaatttcttttgggtgacatgattggagaaacttatggtataggcaagcctaaatgaccatttcaattacccttacctaagcctaacattacaagcctagaaagaccttctgattcttggttgtgcattaatatatattagtggagaatagtaagtattgcaagcatatgaaattttgggttagtggattgatggttgttgtaacgtccccgcttcaagcctccattgggcccttacacccacggaataattggctcttatagacgagtacgccactttggctgcttcctggaatgacgactgaccctagagaccaacacaagtgtttccagcatgtctttgtcctcactcgcacgtcttccgtagggaaaa

SEQ ID NO: 342250 - DNA, 518 bp, Cannabis indica
cataaaatttaaaggtttctcacaaatttgcaaacgattatttaagatagcagaaattttcttagaaagatgaccaatgcaaaaatttcatgggtccttcaaattacatgtagtttttgaaaaaacaaaaaaaaaagaccgatgtgaggaagttctgatcttgttaaagaaaaaataagttatccaactttcttagcagccccaattgtgaaaatcagggagggatcctgaattaaacattgatcagatgtaaaagtgaatttattagcacaatgttcgagataggcattaatagaaaataaagttgaacttgaattctgaaattaagggtgttcgcggtgcgagtggtgcggtttttgaccatttttttcaaaacaacccgcatatgctgtttttccaatttcctaaaccgcacccgcactgcaaaactaaaaaattgcgaaaactgcaccgcaaaataggtgtggtgcgatgcggtttttacagtttttgtggtttggactatcactaataaacta

SEQ ID NO: 342251 - DNA, 885 bp, Cannabis indica
aatgccatcttaaacagagtcttacatgttgttccccacacaggcaccatagatcaactaccattttgcaaagcatgtcaattaggcaaaagccacaaacaacccttccccatatctagttcccatgcctctcaaccccttgaactcattcataccgacttatggggtccctctcacatcaaatccaaagatggctatagttactatatccactttcttgatgattttagtaggtttgtttggatctatcccttaacacttaagtcccaagctcttgatgtgttcttaaagtttaaggctatggtagaaaaacaatttaatttgccaataaaaagagttcaagctgactgggggggagagtacagaccattctccaagtttctaagtgaccaaggcatctccttcactcatccttgtccaaaaactagtgaacaaaatgggcgggctgagcgtaagcatagacatgttacagaaatggggttaactctcctagcacaatcggggttagatttttcctattggtggcatgctttccatactgctgcctttctcattaatcgactaccaactccaatcttacaaaatacatctccttctgagtatctttttgggcaacctcctgattacagtgtcttaaagccatttggctgttcctgttatcccatttaaggtcttacaacaatcacaaaatggagtttcggtcacaagagtgcatctttcttgggtattcttcagtgcacaaaggatatctttgtgaaaatccctcgggcaggctgttcattagtcgacatgtggtttttaatgagaattcctttcctgcaacatccattcagcagccatctcagcaggtaaattctcatgattcctctcattttcctactgcaa

SEQ ID NO: 342252 - DNA, 995 bp, Cannabis indica
cggcaaaagcacaagtgattcaatcgtaaagatgtacacctatcatggtatttaaaccctggccaatctcctacccttgtgaagattctggataagtattccattcctaacacaaagagaaggggagacatcgggtcaccttgtcttaatcctcttttagcattaaagaaaccacacatagagccattcaatagtaaagagaattagggagtgcaaatacattccataatgagcttgatgaactggctagggaatcccaatgcagtcatcatttcctccaagaattcccattcaatagtgtcataggccttccttaaatcaatttttatcatacaacttggcctacaatttttcctcccatagaacctcaccaagtcttgacaaccaacacattatgtgcaatgaatcccatgaacaaatcccccttggttctctgctatcagatcaggaagcactttcctcagtctattgcagattgccttggttgccaccttatacactacattacagcatgatattggtctgaaatccaccacacttttaggacaagaaactttgggaattaatgtaatagtagtagtgttaatctctttcaaaatctttccagagttgagaaaggaactaacagcttctactaactcaggcttcactaagtcccaattatcctggaaaaaagcactcccgtaaccatccgggcctggagctttatccttatctatggaaaaaacagctatttccacttcctcaggtgtgtactctgccaatagaatctgtctatgttgctcagtgattttaggtcccagatcaacaactgactggaaaactttccttctaactggtagcttcgatcccaacagcctttggtaatactcaaggaatgcactttgaactgaatctggggtatcacaccaattgccaaactcatcttcaatcgagaaaactttattttggagtcttctcaatttcagagaagcatggaataggtgagaattatc

SEQ ID NO: 342253 - DNA, 574 bp, Cannabis indica
cttttttccatgccccgccgttgggcaacaaaggagatgaaagatgtctggaaaccaacaaataaaaaagcatgagtattttgaaggatgttgaaaaaagaagtaaacagataagggtagaggaatttaccaagaggctatgggatacactccttttaagcatctcctccagatccccattattgattaagtcccattcatgggggaggaaagccttgaaatgacgccaataagctgcaccaaactctgcagtgtactggtgccagtattcccgatctcgataggtagagtttcgagggcttggctcgaggaggcagaagcttgagtcgttttgggaataggcttatcggtatgtgcggggccggaggatggatcagagcctgagtctcaattttagggatcttgaggctagcactctcggaggctcgcttcttgttggcagtagtcttcttgagcctttttaagggctccatgtcgacatctgatggagcctccgagatggtcaacctcttctttcccttcttgcctgatgagtgaaaaagacccttgagattcatttctgcgagacaagata

SEQ ID NO: 342254 - DNA, 1780 bp, Cannabis indica
gagcgctaatcatagatatggatagatagcttctatccagaaatagaagtgaaacgatgatttccttcgagcttgctaattagagataaatgatagagtgctcattttagtgactatattagttcactataatatcatttataggtggccaagtattttaaggataaaatacattgaaagggtgtaacggtaattttatccctatgcaatgtagatcatctatagaggattattgattattgggatcataacaatggataattaatatcgtatctattgtggaatatatagagcgttctatgtaactgagagtgccattccgagttctatgagtgaatgcaatgaggaattacttggtaaattctagatcagcttattgaaagctcggttatataggcccatggtccccgtactagttgagacaatactgcttgtaagactcagttaattgattttagttaatcaattataattctaaaattagactatgtctagtttatgaaattttactaagcaagggcttatttattaattaattaataaatatattaaatgacaattttatttgatagttattttaattatgaaataattagtttttgcatttaaatggtcagaattggaaaaatggcatttttgagaaaataaggaaagattgtgataaaatggaaagttccaagtggggcccaatacatcctatggccggccactagggaatgtattttccatttaatttcttcattattttaatgcctaataaatcctaacctaaacctaggtgattgcctataaatagatagtgatagctcacacttaaagttgatgaaaaaatcaccattagtaaaattttgagcctcctttcctatagcatagtcgaaccatattctcttcatattttcatacattaagtgatagagtgagtacccacacacatcaagtggtatctcaatcatagtgtgtaagaatgtgaagaatccaatcaacaagaaggagagaaagagatccaggttcagatcttgataatgctctgctacagaaaggaaccaaaggctagagatctgaacggaaggagtcattatattccactgcaatcaatgtaaggtttcttaaactttatatgtgttatttaattttttttttagaaattcataataggatattaaataacatacatggtagtaaatctagatcatggtgaaataattccaacagcactacattccactactgtactagtatgggtaggatttgtaccgtacctcaagtaccactaagtgttgttccacatacactacgtacttatccgtacaagtgttggtagcatacgaatcacaaatgacatgcatatattaaacatacacatattaatatatagttacattctatgctagtcttacctcgtttcaagttcaagtgagccggtcgacctgaactaaaaatcacgtgctgaatggatgtcctatgtcatattcacataaatgggtaaacaactcgctagaaccctttttcagggacctaaactccaaaccaaaagtttttctatcaataactagcatggccttaccctaatgatcgaggaaataccaaatctatgcctctgagactccttaaaatggtaaactggatttcccaaatggataacctgttttagggttctacccagtgaaacaattaattggttcaatagtactagtaggaccggttaaccggttcatagcaaaaatccccaaacattttcaaactctctctaaacaaacccaaactccaccaaactttctag

SEQ ID NO: 342255 - DNA, 998 bp, Cannabis indica
gcctccttataaggtatggcaaagccgttaagcagtaaacgaaaggagttaagcgagccgtcaagcagtagtacaaacatgtttggccagccaaggagagtctataggctggccaggatgagcttgcatggctggccaaggtttaagcataagttgtttggccaaaagtgactttcagaccaagagagtttccgttcaaccaagggaggcggacttctgcatggaaaagatgtccaaaggctggcctccacctaccagatcttgacgagaacatgacctgccagatcctggcaagaacatgacctgccagatcttgacaggaacatgacctgctagacctcaacctgtagaccttgtatggccggccagcccgcatcctgtaggtgcatggctggccaactttcttttgtaggtcattaatgtgcagcctttatccgtggacaacaagccaagctgcgagttgacccttgatagcccacgaagatgctacgaaaatatctacattcaagggaaaatttggtgatttgtattttttaattaaatatgtaaataatagctttattttacctattcctaaggatattaggcatgtaagctgtactatataaagagcattaacctatctctaaaatcctaagtcattagctctcaagtttaaagtctgaaaccctaatcctgagctttatcaaattccacctatagtgatctaaatagtattatctttaggtattaatacaactaaaaggagagtaggtcattatccactaactaagggggccaaacctctataaaaattcttgtgttcttttgctttctagttttaattgtgtaacacgtggcaagcattagtttaatacaactctgctatcggttggccaatttctgaggtcaatagtttggtactttcattgagagggagttgatatcatatctggtcaaatgccatggttaatgttagcccaagatatgtttccaagagggggggtgaattggaaatt

SEQ ID NO: 342256 - DNA, 1136 bp, Cannabis indica
tcaatcagaagaggagcatgagttacatcttcgaatggttctgcaacggcttcgggaacacaagcttaatgccaaattcaagaaatgtgaattttggctatctcagttgtcattcttagggcacattgttagcaaggatgggatcaaggtggatccaggaaaaatagaatccgtcagggattggcctagaccaaaaacagtaacagaaattagaagcttcttgggtctagccggttattatcgtcggtttgtggaagggttttctaagatctcaacacccttaactaagcttactaaaaagaatcagtggtttgtatggtcagataaatgtgaagctagttttcaagagctgaaacagaggttgattacagctccagtgctagctttaccttctgacaaagaaaagttcgtggtttattgtgatgcatccagacagggtctggggtgtgttctgatgcaagctgatcgggttatcgcttatgcctcccatcagttaaaggagtatgaacagcaataccccactcaaattctataattggccgtagtagtatttgctttgaagatctggcggcattacctttatggagaaaggtgtgaaatttatactggccacaaaagtctcaaatacttctttactcagaaagatttgaatatgagacagaggcattggttggagttagtaaaagattacgattgtgagattctttatcaccctaggaaggccaatgtagtggcagatgccttgagcaggaaaggtcctgggcaggtagctagcatgattcagatatcaccccaattagtagaggacatggttaggtctagccttgagtttgtggtaggcaagcttcacaacttgatgctgcaatctgatctgttagaaagaattaaagtcgctcagatgactgatccagagttagtaaaaatcagagaagaggtttcagctggtcaagctagggatttttcagtgttagacaatgggatgctattatttaaagctagggtttgtgttccaaatagtgtggaactcaggaatgaaatctttgaagaggctcatactactccatattccctacatcccggcaccaccaagatgtatcaagatcttaaacattacttctggtggagcggtatgaaga

SEQ ID NO: 342257 - DNA, 748 bp, Cannabis indica
cacttccttggttttagttggcgatttcatattcaggagggcttgaatcttctctgaattggcttcaattcctcgggcattgacgatgaagcccagaaactctctcgagctaactccaaaggaacactttgagggatttagtttcatattgtattttttgaggactttgaagcattcgtccatgtcgtctatgtgccccccagccttcctggatttgacgagcatgtcatccacgtacacttccatatttcgtccgatttggtctttaaacattttgtttaccaatcttttgtatgtcgctccagctttttttaggccaaacgacattactttgtagcaatatagacccatatatgttcgaaaacttgtatgttcttggtctggtggatgcattttgatttgattgtagcctgaataagcgtccatgaagcttaatatttaatgccctgttattgcatctacgagctagtcgatcctttgaagtggaaaacagtctttggggcatgttttgttgaggtctgtgaaatcaatacaaacttgccatttcttgttcggcttgagcaccaatacgggatttgtgacccaagctaggtagaacgcttcaattataaaattgttgttgcccagcttctctacttcttccttcagggctagtgctcgttctttgtccagtagcctttgctattgttggactagtcagaaattgggataaatattcagaacatgtgaaatgatagaaggatcaatt

SEQ ID NO: 342258 - DNA, 535 bp, Cannabis indica
tttttacatttttacggttatacaaaaaataacacgaaaacaacataaaattaacaagaaaacaacataaaagtaacatgaaaataaaaaaaaaaaaaaacatacatataacaaaaaattaacaacaaatgaacaaaatttcaacataaaatgaccacattttatgtaaataaaatcaaaaaaatcgtaaaaatgtttaaaattccgtgaaactgtatttttgttgtttttgtgcatttgtgaaattattgtaatgtaaattttgcataataataaatattatgtcaaatttagcacaaaatttaatatgtgccaaatttatatcactttttggcacaccattagaacacatttttagttaaatgagctatattttaacttttcaccacttattgcatcttcattgaatatgctctaatacaaaatgtgtcaacatattttttgaaaataaattttaataataggtagtgttagagtattagctgtatattaggtgtaaaagaattagggtaacttgtatttagtagtttcctat

SEQ ID NO: 342259 - DNA, 583 bp, Cannabis indica
aaagtcaattattctttgtgtgaagaagtaaaaagaataacctagaaaatcacttctctctttccctctttctctcgatttggtaggaaccagcactaagctgggattttctttgctcaattcacctagttgttgttgtaattgaagctctaattcaaggtaaaccctttttgcttgcttcctttgatattctttgattttattttaagttatggttggtagtcttgggatttaagggggctgtgagtgtgctcttggtttgttctcttttctggagttaggtattgattgctttgagtgtttagggctgagttagttagttattttgaagttgggatggaaatttagttaaagagctcaagttggagctctaatggtgatttgagaaattgtgtgaattgtggtgttttgctgcttgggattggtttaaaatattgtatgcaggtattctggaagttttgaaaagatttgggattgttttgaattaaggggatgaatttttgggttcccagctcagaaccggaattccggttcctggggccctgttgcaaccggtcgaccggttggtcccaggaaccggact

SEQ ID NO: 342260 - DNA, 655 bp, Cannabis indica
aatgtcatccccagttatcacaatatcatctacatacacaattaaaatagccacctttccttcctctgaatgtttgtagaacatagtgtgatctgcttgactttgagtgtaaccaaacctcttcaaaaccttaccaaagcgttcaaaccaagctctaggggactgtttaagaccatacaaggatttcttcaatttacacacttttccaactccaaactttttttcgaaacctggtgggacactcatatacacttcctcttcaaggtctccattaagaaaagcattcttcacgtctaactggttcaaaggccaattatagttaactgccaaagatagtagaatccgtatagaattaatttttgcaacaggtgcaaaagtctcttgataatctattccataggtttgagtaaagcctttggccacaagcctcgctttaaacctctcaatacttccatcagctttaaattttactgtgaacacccatttacaccctacaatcttcttgtccctcggtaacattacaatctcccaagtcccattctttatcaaagcatccatctcttcatccactgccaacttccatctcggttcatctagtgcctcctgtatacttctaggcacaacaagttcagaaatattagtaataaatgctcta

SEQ ID NO: 342261 - DNA, 611 bp, Cannabis indica
ttgattcttagaaaaataaaaaataaggaaaaaaataaactaataaaataaaatttaaaacgtaccgaaaataaaagaaagcaatgaaagatagaacctggttagtcttggcaaaccagagacaagtctcctcaggtgggcttacctactcaatattcttgactatccagtatcaaaaatgaatttttttttatcccgtgtctcaaaaatagaagcattagttacaattttaggaaaaagaaaatgatctttgtctaagtcgtagaggaaatatggtaaatgattaaaggaaaataattttttaatttcctcaatgacttcgtctatcacatcagtatgatagcatttcttttcatccagaattaagggaagaatggtagaatgagaaagagcttcgttctgaatagtggtggtagcatcctcctctatgaataatgtgggtaccacgtcagtatgataaccctcacatgtactcggtagagtggattctttaaaattttcaccactataggtagaggtgacacttaccttgtcaaaattgtaaaaggtggcagttgagattagtgcttcattcactggttgtggtggaaaactattaacatgtgaactta

SEQ ID NO: 342262 - DNA, 1162 bp, Cannabis indica
ataatattaagaaaactttgtctgttaatttactgtccatgtttcgtgaaactcagtttggtcattttctagatatgcctgagtttgtttttcatccccaagttgtccatagtttattactgagggaagttttccagcccaatcctaaagagttttgggctaaggttgctggccgttgcatacggtttagtgctgaggaattttatttgatttctggaattgattgtttcggtgattgcaacaagttgttgttttcacaggaaacaaatcagttggtagaaatctgttttcgtggtgtaaaaaccattgaccacaaagccattgaggatgcttttttgggtagtaggtggggtttggatgagtcccttggattgaaaatggctgtgttgtattttattcagtgttttcttcttagtaatactcctgataaagaagtatctaggtttgatctagatgttgtggatagcggtcggtgggacgagtattgttggggtagggaatcctttgaattgactattgattcattcaaaggtagaattcagcatgggattataatgaaaaataagaaggcagagaagggaggccagtatgatggttggtatagggctttgggatgtccgtgggtttttacggtttggttttatgaatgttgtcctgctatggtcaactctttctgtaaaagagtttcatcttcgattccaaggattctgaattggagcaacaccattgtcaccaaaaatccaactcttcgagacttgaagggcaagatttttgatttgccgttgaacaaggtaaaatacagtttctttactgtttctttttcagttttatttatgttgttaattttttgtttttttaattgttttttttttcatttttatattctgattgattatgctgttcagttgaagatcaaaaacatgtgtcctactgatgaagagaggcagaagcttcaacttgacggtttatttcttgatgagtctattgatgaccgtggtatagcgaagcaatcatttgagagtgggtcatcttcaaagaaatctattcagaggatattgatttgatgaaatctaagttggagatggtcatttcgaatcaagcatcattggctgaagacttcatatccttgaggtgttttgttgatctaatttcaagtccgtaa

SEQ ID NO: 342263 - DNA, 683 bp, Cannabis indica
tcttatctattgcctcatttgttttctggaccaactcagggcctagatatttccgttctcctgtttcgtcccaatggataggggatcgacatttcctgccatagagtagctcataaggagccattcctatggtactttgataactattattataggagaactcaatcagaggcaaatatttgctccatgaccctccaaaatccatgacacaagctcgtaacaagtcttcaagtatctgaatagttcgctcagattgcccatctgtttgaggatgaaaggccgtgctgaattttagactagttcccatggccttctgcaaactcacccagaactttgaggtaaatttagggtctctatctgaaacgatagacttcggtaccccatgaagacgaacaatttctttcacatacaaatcagcatactgatccactgtataggttaccttaacgggcaagaaatgtgctgactttgtaaagcgatctaccacgacccaaactgagtcgtacattcccgtggttctgggcaaaccaaccacaaaatccatcgcaatgtcttcccacttccattctggaagtgttagtggctgtagtaatcctgcaggtcactgatgttctgctttaatttgttgacaagttaagcacttagtgacatagtctaccacatccctttttatcccataccac

SEQ ID NO: 342264 - DNA, 588 bp, Cannabis indica
atttggagtaacatcgggaaagttcctcgggtttatcgtcagacatcgaggaattgaaatcgaccctgcaaagatcaaagcaattttggaaatgcctcccccgcgtaatttacgtcaactacgtggactacagggaaaacttgcgtatattcgaagattcatctcaaacctgtctggtagatgtcaacccttttcgcggttgatgcagaaaaatgtcccatttatttgggatgaggcatgccaaaatgcttttgaaagcattaaaaagtacctgttgcacccaccagtgttgagagctccaatcttaggaaagccattgatattatatatcacttcactcgaccgctccttgggagcaatgctagcgcaaaataatgaggagggaaaagaagttgctctttactacctaagtagaactttagtaagggcagaacaatactacccactatttgccgtcacaaaactacgacactatttgctctcacatcctgtgactttagtgtcaaaagttgacccgctaagatatatcctatccaagcccgtgttgtccggatgacttgccaaatggtccatgatgttgtcagaatt

SEQ ID NO: 342265 - DNA, 604 bp, Cannabis indica
tatcattaaaataataataattattaaacagagtcaaaaaattaattaaaaatcatagaaaaatcagaaattaaattttaagcacgctggaaaaaagaacgtcgaaaaacgacgtccgacgtggccccacgcgccacctgcgcgagtgggcttcgcggctggactccttcttcttcctccagccgggttggaggcgggtcacgcgacccggttcggcccagtcgggtctgctcgtgttttccggccaaaaaatcgacgaaaacaccagattttgcatgggtttagttcgggaatcgatttctagtcaatctatgtctctaatttcggctattaattgctaaaaaaaatagatctaaagaaaagctatccaaaaataaagaacataaaaaaaattgatttggaatatcaatcttgatcaaaatacaaaattaatcattgaagaacattcataaacaattaataatgagatatctataatcaattttagatcaaaaacaataaaatcaaaaaacacaaattataatttcataatgtaattatataaaccctaaaactttaaagttaaaattctcttaatatacacaatgatttcatgcatataata

SEQ ID NO: 342266 - DNA, 689 bp, Cannabis indica
aattaaaaaaaattaattatacgtgcattgcacgtaacattaacctagtaaaatgaaaagtatgtatcctcatgcaattatttcttataaattttctaaatcttaattaacattcaattgagaatcaagttaattaaatatattacattatacaataactaattagctttcaaaataacaaaaatgtataaaaaataatcggtatataaaaagaggaattctcaaaaatacctttcttttatgttttatttacaattttacggcctaaaagttttaattacaaaaatactcttgtaaagttttgaaattacaaaaatagactttgttcagcaaaaagtaaagaaaaataattaaaaaataacaaaaaattagccccacaaaaactataaacaactataaaacaacaaaaaaaaaaatctcatgacaactataaataaactataaaacaactaaaaaatagttcattattttcaccgaagaggtattttgtaaataaaaaagatcaaggaacaaaaataaatttttttccgtgttgatgtatttttgtaaattttttcaaaattttggtctatcatgtaaatttttatataaaagtggtagtttgttatagtacatgagaactcattagtttcaaaaatattttttaaggttacttaaatgtatttgaaattataatctatcataatata

SEQ ID NO: 342267 - DNA, 1020 bp, Cannabis indica
gcggccagaatttttagtaaattggatagaccacatgatagttatgaaatagggtttggaaccctactgcctggaggagacttagttatctccataaggtggattaggtctatgccgatcagaataggggatagagaattgagtgctgatttgatagagatgaatttagtggattttgatattatactgggaataaatttcttgtctaagtatttagccagtattgattgtacgaggaagatggtaatcttccaaccagaaggtgaagaaccgtttgtctttgtcgaatccgttcagggatctcggatcccagtaatttcagtactaacagctagggaattgttacgagacgggtgtattggataccactcggcctgaccctgttcggccagaagacatcaaagtggtttgggaatttctagatgtttttcccgaagaacttccgagtttaccacctcagagagaaattgattttgttattgacttggcacctagagcagaactggtttctaaggctccctacagaatggctccagcagaacttaaagaattttaaattcaactacaggggttacttgacatagggttttctcagcccagtgtgtcaccctggggagctccagtattgtttgttaagaagaaggatggatctttgcggatgtgcattgactaccgggaattgaataagttaacaatcaagaataaatatcctttacctaggatcgacgatctttttgatcaactttaggggaagactgtcttttcaaagattgatctccgatcaggcttcatcagttgagaatctgagaggaggatatcccaaagacagctttccacactaggtatggacattatgaatttctggttatgtcttttggactaaccaatgctcctgcagctttcatggatttgatgaatagggtattcaaggatttcctcgatatttgtgttattgtatttatcgacgacattcttgtgtactcttagtcagaagaggagcatgagcaacatctccagatg

SEQ ID NO: 342268 - DNA, 697 bp, Cannabis indica
ttaaaataatttataatttttttttaaaaaatttcaaataatttacagagctgaaagtaacaattatttaccacacatataagaaaaaacaattgcacgtgcaacaacataatatgtaaatcttattttcagtattagaaccctacttaagttttttaaaaatttacaagtgatcttatataactataacgtacataatcatagaaaaaatattagaacaaaaagctctcatttacaataaaatagataaaaaatttactaaaacacctctttaatgagaaagtgctctgtaaacttaccataagtgtattatatataggacaacgataaagtcatgcatgttttttttcactctcaatacactaatcgtttgatgtgtagatattttgcaggctaatgatctagcggttattaaattatacaattcaataataatacactttaattttagtatatttatatataaaggtattatttgtgttaaccggtgggtagccggttagtttgtcacgtgattctcttgaagaaataacttaagtggtgtttggtagtatttttgtaaggaaaatttgattttttatacttccatagacttaatattttattcctaaactaatgcatatcaccattgaaaatatatgaccactttatctaaaacccaaaaatacccctctcataactcaaccccattttttcc

SEQ ID NO: 342269 - DNA, 808 bp, Cannabis indica
gtaacattccctagcagactgttggtttcttcttagacaccctaccccattctttgttggaaacttcaggcatgagtgaaatactgatgtgacagcctttaagtcatacaaggttggccggcctagcattacgttaaaagctaaaggaacatctaatatcaggaactgtgccatgatagtcatgttcgtcggagcttgtccaacagtaaggggtagacaaatttgtcctagaggtgcgactccttgaccggagaaaccatagacaggctggaggcatggggttagatccttgcattggagtctcatcttttcataagcagttttgaacaagatattggaagaggctccattatctatcatggttctagccaccattttattagctatctgaacttccacgaccagcgggtcgatgtgcaaaaatttaattttgatagcgtcttcatcgttgaaggttatggtcggttctcctgctcgtggaattttgggccttctatcttccacggctaggataacttcttcttgctcgtgttgtgctgttcgggcatacctctcccaacctttgcccgaatttccagcaatgtgcgggcctccaacaataacttgcagatgcccatctaccagtggaggtagtaaatcctagttattgtcattcttctgacccagatcggtcttgacataattctgcaggtgtgggttgtttttccttatgaggagttcaatttcccgcatcaagttgttacattcattagtgttgtggtcgtagtctccgtggaatcgacaaaactttgtcatgtccctcttgctg

SEQ ID NO: 342270 - DNA, 632 bp, Cannabis indica
ttattgggtatttaatttgaagtactatatatgttcaacttcctacttacccacgatcacaactattcacacttctctcaattttttcaaaagtctaaccctcttcaagtttgagagtgacttagttttctagggtttcaaagcaaaaattgcaaaaaccaaaagtgctcaaccgtccaagaagccttctcttggctctgcctttgcttctccgatcaccccacccgcgccactagctccaatgatcggagttcctggttcgtcatctgaacctgaagaaggaagtgaggaggatcacaaattagagggtttgtccgattcaagtgaagattttgttcccaaagaataaccctctgctgatgattctgggcctgaaagtgaagagcctgaagctgaacctgtcagtgcagaacctgttgttgtccctattgcaattccaaagaaggacaaaggaaaaagaccaattgtctctccaagtcctatatttacacagaaaaagaaggaggccctctggtattactcttgaaaacttcaagcctcattctcattatttttgttataatgatcatgctagagacatgaaattttatgagaatagtaattttactgttgagaaaaatttcaatgtcatt

SEQ ID NO: 342271 - DNA, 1444 bp, Cannabis indica
ggaagacttagagaagttgattctttgccccgaagccaccgcagaagtatgcaatagctccttcacattgtacgcttctttctcagttgccttacagtaaatgtagttgtcatcaacaaagatcatatgagagattaccagcgcgcctcgagcaattttacaccccgtaagtaagccactttgttcatagctacgcaacaaactagagaagccttcagcacaaagaataaacagatattgtgacaaagggtcaccttggtgcaaccctctttcatatttttattttaaaattgataattttataaaaataaccaactggtattttattgaaatcataactaataggtccaaaaaatatcgtatttgtggtccaaaaaatatcgtatttgtaattatttaaaagttatttgtaacttcattctttatttaactaatcataatgcatatattaatttatatttaaaaaatacagatgacttaaatatttatgatatatattttcttaaaatacaattcactaaaatggtagcttactggatgacaactcattattttcaaaaataaacttgaaagttactcaaaatttattaatataacctaaataattaattaattattaaagtgtaatataaaaatgaaaaagctacttgttggtttattatcaacatcataagcaaccaaaattacttttagaaacgcaaagtaaaaatttaaaaaaaaaaaaatcgagatttaatttcaagcatattattttagaattgaagtattttttaataatgtagcaagatattattgtaattgagtgttgttaagttatttttataattattttatattttacatatattttttgacaaaatccctaatttatatagggaagtttgattaattatgcatttattaaactaaaatttttttaaacctaaactattcaatattggtagaatctctctctctctctccctctccctctccctctctctacaatcgacccacaacccacacaaagacccacagactcaatgacaactacggacccaacgacttctccatcaatcacggcttcactatcgacaatgttatcaaagaaataaattgtatgattaatgtttcttacctgtgagtagtaggggtcttcatatccaatcgaatccgcacgattcaatccaatccaattcacaaagtgtggatatctgcatttgtgcggattggattggattggaaaattcaaaatccgcacttgtgcagattggatattgattgacatgtaaaagtaacagatccaatccaaatccacacatattttcaaaatatatatatatatatatatacaattaaaatgtatagaaaataacaatttaaaagtactaatacaaataatacaattatatttactaaaacttaaaagatacaaatgtatgttctattgttatatataattttt

SEQ ID NO: 342272 - DNA, 821 bp, Cannabis indica
ttttgcatgaaatggtgttttagctactgttgttgctgtagttgttagatgttgttttcagaagttaaattatgcttgattgtgttggtttaagcttgaattgatggttgttagttagatttaaccaagtttgagttttgaactcaaacttgcagctttaatggtggattttgtttctgagtatgttgtgatgttttattgctttagatatgttcattggggtataaatagcaggtttggaaagtttgttttggattggggatgatttggttgagatatgaaaattttggtctttcctgcactgaaccagaatttcggttcagaggggctagtaggaactagaatttcggttggctcacaagaattttcccagaaccagaattccggttggggaaccggtctaccagttggggcaattttgggaaccctagtttttcccatttttgtgttgtttagggtattgcaatgctatttatcgatagggaaacttttagtttctagtttaagaccccgggaagtgatttagtgtgtcactcacccatgttctgattgatgtgatttaggagcctgtaattcgccgagcagttgttccactcaggttggccggcacacctgaatctgaaatcaaggtaagattagtataatgtcatgcatatgtttatacatgtttagcgtacatgttagttgctgatagaataacataatagatatatgttaggcaaatatatatagccatcagattagcatatcctggcaagagtgaggtgtacatagagttgcaccgagatgccatcagatataagctaggctatcagatagta

SEQ ID NO: 342273 - DNA, 536 bp, Cannabis indica
cttttttccttttgttttttttttccctttaaattagccattagttaaaaaaaattcattaccctttttttaattttcatgtcattaaattattaatgacatggcgagcacgagtttacctggcattggatggactgagccacgtaaacgaataacggggtcagggggatggaggtgtgttttaactaacagtacaacagttttgggagttatgccgcacgaatttgggttttgggggttaagtgaaagcaaaataaaaggtttgaggattttgacgcaatttaccctatatataataattagattttgcgtacctgattgatccatagcaactgctgctatttgataatgcaatactatcaactaagtcttctttcctagatctctaaattataagcagtttttattttatctaattatcataaagtatacaattgcgatgagacaatatgtatttatagagttagggaggagacttaactacataactctagttggactggacctactcatcaaaggcttcagttaactagaaa

SEQ ID NO: 342274 - DNA, 685 bp, Cannabis indica
aagaaagacatttaatgttggagacttggtgttaagacgagtctttacaaacacgagagatgcatcaatagcagtggtcaaccagaactggaagggtccatatgtcattgaagtagtagatggagttggagtctataaattggctcgacctgatggctcgctaataaaaaaccacaggaacgtagaacatttgcgaccctactatcaataaataaatgatgtggctcgcattactgatgtaaatttaaaacttcagttatgaataaagagaatcatttatattatgtaattacaaagtttcattctttaaaattactcaaggggcatttatgtatgactaacccgaattcttctggaaatacattgtataatgcaaacccgccatttcaaaaaacattttgaaattcaaaggttctggactaaacctctttgacaaaagtagagtcaaaccgttataactacttgaccaaacctttttgacgagaaaggggtcgaattgttataacagcttgatcaaacctttctgacgaagaagagatcaaacaactatagtttttaatttgtaatctatttgatgggagaggaaaatcaaaagttataacttgtgtacaaaactgaatactaacagttctcccgacctaggaaagtactaaacgaggcatcacgacgccttgataaaagtact

SEQ ID NO: 342275 - DNA, 955 bp, Cannabis indica
gttccacctgaagaccaggcctgggatcgcttggcccaagcataataccttcaaagcatcgcccctcgggaatctggtgaaggagcatcccgaggtaatcaatgtggcttgtcacctactgtacttagggctgagcgtaatacattagttaccttcccagattcttgtcttaattttatacttggaatattattatcgtggaccgcatttctcataagtttgacatttggtaccctagattccatgtccaaatcaactatcacgagtcattttatggtatagccgagcaatatggtaccatggaagatagggcaggtcacatagatgcgagctgggatttagaaccaatcgagcctttcgatatattcaaaattataggctgtagggattttagcaaatattatggtccttctgccccctcatctagtgataactcgccttctagtgattttggtaaatcccttaggtggaaatttatactcctcccctttttaatcgtcttttataatgattgtaatgcctcgtcttgttttgcagacatgggttatgaagatatcctggaccgtaaggggaagaaaaggtcatccaaccctaaagtctccattctcgccgagtgttggaattattttaccaggatctagatttactaacaagtatgttattaacatcctaaacatgaacttctaaaacgatatgaaataaacacatataaagtttcaggaaccttacagtggttgcagcgaaatataatgtctccttccactcagatctctaacccttgtatcctttctgtagcagggtatcaccaagatctgagtctgaatctccttctcttgaaactggattcctcacagccttacacactatgattgagtaccacttgatgtgtgtgggcactccctcttttcactataggcttcggtttttgaagaggggaagagagagagagggtttt

SEQ ID NO: 342276 - DNA, 479 bp, Cannabis indica
tttgattttcaccttgctcattcgaagcttcgtgaaatttagcctttaacccaaaaaattcaaaacttctaggttctagcttattctttatgtactttccatctttttagtctgttgagtaatcctggtcggcgtattagcctatttattgtttgatatcccgaccacacactcatctcgtgtgttgtcttttgcagatgaaccctagtgagttcttgggaggcaaacaccgaattgactaggatttgcttcaacttctgtacgaggattaacctcgtctttgtgctagtctatcctcctcgagtgacggactttctaactcgagctttgaagattgggaaatgagtagtgatcgttctcctactccagaacccgtagtgcaacatcactcttactccaagtagatcacaggagaagggtatggctgcttcatttgggaattgaagaagggttggaggcgttatcttccgtccaactgg

SEQ ID NO: 342277 - DNA, 556 bp, Cannabis indica
ttttttttttttgaagaaaactattaatatattattgttaaaaactttaagggctcgtttggtacaccgtataaggatcgtattgtattaaataataaataacactatgtttggattaaacaatatattgtattaattattacgaccaaattttttaatacaatatatgttgtattatttaatacataataaatggtccatattagcttgtattataatatttacaaagaatttggggtcaacaccaatctccgacccggacccgaacccggacccgggcctcggaccccggaccccgaagccggatcctggaccccagacccggacccggactcgggcccagaccccagcctggacccctcattatccaactaatgcttctaaagctaagaacctagttttctttctaggtttatgagacttcatcttcttcctttttcttctaatttcgaaatctatagccttcttcacaaaccaaattcaagccttagtgattgagtgcatgcccacacataacaactgagtcctcaatcatagtgtgtaagactgtgaagaa

SEQ ID NO: 342278 - DNA, 789 bp, Cannabis indica
ataatttaagaaggaaatctctgaattttatcaaaaggataataaagagttttatgaatgttgggaaagattcaaagatttattattaaaatgtctccatcatggttttgaaaaatggagattagtaaaatatttttatgatggtttaacccctacaaatcgacaaatgattcaatctatgcatattggaaaattttctaaattgcaagggcaagaagcatgggatgctcttgaagagttatctgttaattcccaacagtggaattattatgatcctaggtctagatcaaacagttcaccaaagaggggaggaaaatatgttgtaaaaaatgactttgacataagaacatcaattgaaaaattagagagaaaagtaaaagccttagtaataagtcaaactatgaattatcatgtgcaatctaagaaagatgtttgttctttatgtcgttgtcacaattcccagtcatgtccttctttccatgaaacattttctaaagaagccaatgctttacattcgtatgggaagacttctgaaagtccattctcctccactcataatcctaattggagaaaccatccaaatttttcttggaggcaaaatcagcctcaaatcaaccaagggcaacaatttaacatgccgaaccaaagtcatgcccaacaaaaccagtcttactctcaacaaagaaaaccttctttagaagacactctacaacagttcatgcaatctacccaccaaatccttcaaaatcagtctcaatctattgccaaactcgagactcaaatgggtca

SEQ ID NO: 342279 - DNA, 1178 bp, Cannabis indica
aggcaagtcacgaaaagaggtaaatcatctcaaagaccttagacgcctcagtttccctaattaaaagcgaatatgggaaatcaaaaataatcaagtgcagtcgtcagccatgagtgagaaaatcgaatttcaaaatattaattgtcagagcatttattagccgaaaactgcagggatgcccagtcagcctcacatcgagtctcagacggtcgcactcgacacgtgtccccatccaaaggacgaaacagctcggatgaagtctacacgcaacttcataagttctgtacaaacttagggggcaaatgttatcccaatttttgcactctgacgtggcctcacatgaatggtgacacgtggaatccacttgaaacatctgctcgggaagcatagatcgagtaggatgcctcgcttgcatgcccagggaaaagtattcagcaatccgcgcatagagaccaacacttagcgaattcaactttcacatcgtgagtcatcagcacaatccctataactcagggatcaatttacgtggatatggcatacacacgatcccactatcagtgtattcagcctcaatcccacgatccttgcattcagcattgatcccacgatctttctgtttatacgcattgtaacgagaggggaaactcttcctctccaagcttactagccctataaatagtgatgcatattcactgggcaagaggtcgaaaggcagttgagctaagactataccctaaatatattatctaagaattatacattcaaagatactgttgtaagagctatatgaaaaggaatctttttccttgatcttaagtcaatacaagtaacaaggattaggctatatcgaactgatcgaggctgaacctctataaaattcttgtgtctttatattgctttatcatatatttgttactataaatcacttatcgcttataaaatagaatcattgtcgttggctaaaattgaggtcaacagttagttaagcctactttctagtcagggtgatacataccttttgcgaacatggtagtatgattgagtgggagcgctaaacatatatatggaatctatagcttctatcaggacatagcagtgaaatgatgatttccttcgagcttgacttaatagagataaaatattagctcactgaaatatcatatataggaagctaagtg

SEQ ID NO: 342280 - DNA, 519 bp, Cannabis indica
gtccaactggacatacattgttcggccaggtgttgctgatacccttcctattggccgtccaagttctcgtaacttcggcatcccaatagctgtccccgccgttactgttgcacgacacacacatcagtatccatctaggagaagaatgatggcccgcacaaagcagacgatgcggaaagtcaacgcatctgatcctcacgtgtcttagcttgccacgttgccaagtgccgagtaggatccgcccgccatggaggagggagatcatgagagggacattgaggtccaagagatagaggagtaggacgacgtccgtcctgggagcccttccgaggctgaggaggaagagcggctgaacctccaaattttggagggtataatgaggccggggagccaatgtccgtagagggtgatgtcttcatcgagggggaagactatgtcaccgaggagcttgttggaatttattttaccaggatcttagatctactcacaagtatgttgtttaaacaccctaaatatgaa

SEQ ID NO: 342281 - DNA, 1315 bp, Cannabis indica
aaccgatttaataatatatgtaagaaagttgtaggaagtttaatgcatgagatttttacgtggttggggcattaacgagccttagttcacgagtcttttttatttatgagagtatttattacagagaatgttcttggtaggtattcctcttagttgctctctttaattcttatgaacccaaaattctcgacccccgttttagtgcgtttggggggtatttatagtatttttctggagggatccctagaactaaatcacttgtctttctgtgcaggttcagtaggggcacatattcccagcagatacaaaataggaaatacatgacctataccgtaggtatcttaggagttaggtgggtataatattttatcccttcttaattgatgtgatctctcataaagtagccgtcactagccttattaatcatagcgtaatagctgcaatagaggggttacaccgtcagtcatattgtttatggtagttccaatacgttttctcccatgtggcattaaatgcgaggtgactgttcaaatagagtccagtacctcccgaagatgccttaacacggctctagcctccgggagtatgtggagccttcttccatcatctccgggagttatcttctcattgacactcctgttgccaaagacttagtcgatttctctaagagttgagcctctcagctccacgtgtcatcgttatactggtccacgtattttgggcaaaatcaaaggcaacactcttaaaatatacaacttgttaaaatttttctctaagatatgacaattacataatcatgcctattttgttagatttcgtttcttttaccgttaaaaattaatatttttattctcgaactttgaccaatacaaattttgtccccttttgttaaaaaaaaaaaattttaaaaattataatgttgtataaattttgaaaaataaagaaaaattattaaataacttgataaaaatattaagtttacttaaaaacaacttaaattattctctaaaaaaatattttcaaactttattttatttataaacacgtatcttaaaaaatcaaactaaaattattgaaaatttaataaataatttaaacaaactaaaattttttaaagaaaaaatcaaacttatatatatttataaacacatattttaaaaactaaagaaaaaaaattttaaactcaataaaaataaaaagttattttgaagaaaaattaaaaattaaactaaatatgttacttaaataaattaatatttttggagaaaaaaatagacttgttcccataaaattagtttttacaaaattaaatttt

SEQ ID NO: 342282 - DNA, 722 bp, Cannabis indica
atgttttagaaatttcatgaattcgtgaatttcagcaatgttaaaaagtaagtggttaaagatctttcgaactgaagggagtgaagaaatatttggtagatatgcagttcaaagatcattaagatgaatcttcgaattgtatccaaacttacctccctagaaattcaatttgcatattgatgatagtgtaaggttatgattagttactagtatttgcctaagtccttttagggatataccctactgataagaaaatttcagaatgatggaatggttgtatacttagtgtaaactattactagatacatggatgaccaaatcgtgatcttaagaaaagctaaaattgttaagcaaggtttgcatgtttgatagctattctaagtgattaggggtggaccatcctattgtcattaaggtaagaaagtgtttgtttcaataaatactacttttctaagaaaatgactaactctaaaaataaagtagcaaagtagaggagatttttttttcttgattccaatagtattttatcatcttattctatagaagatggtcccactacctctgatgtcctgacacaaccgaacaggacaataccacttagattcttagacagaaagtcacggtaccttgtcgtagtgggaggattttaaggaactcaccctgttatgacttggaagacacttgtgatgaaaatctattgttagtttaaataagtaatggat

SEQ ID NO: 342283 - DNA, 562 bp, Cannabis indica
caattatgtgacgatctgggaaaaagaaagcattctccgcagttgcttacccacaaagcaacggacagactgaagttgttaacaaaataataaagcacaccatcaaagggaaactcgaagaacgtaaggggacctggccagacgagctctcgcaagttctttggtcttacaatacaactcctcgatccacgactagtgaaacacccttctcgctttcctatgggtgcgaagccatggtaccagtcgagattggggcaggttccctacgaagagatgttttaaacatctcgcaaaatgaagaaaaaaagtcactctaccttgatcttctggaagaaaaacgcgatcaggcgtacttaaaaaatgccgcttaccagcggcgaaccgcaagatacttcaattccaaggtcaaggcaaaagtcctgcgaacaggagacttggtcattcgaagagtaatgccaaataccaagaacccagcgcatggggtctttggggataattgggaaggaccatatctcatcgcggaaaagattggtgacgcaacataccgactcacaacactcga

SEQ ID NO: 342284 - DNA, 533 bp, Cannabis indica
ttttttagttttaaaacctgaaaaaaaaaatcgtatttttagaaatgccaataattttctttaataacagtaaagaaaaaatagaaataatagtgcaaagtttaaaacttgacactaagagatttgtacgcggtatcagtgttctttcaaacactgctagttcacgggggcacgcccaaaaaatgaaatcaatttgtaaagtatcaaagattattacaaaagcaattgacttaaataaatttagactccctctaatgatttgccacaaccctttgtaattcaccttgctaatttgatctctcaaacacaccaagtagtgaactcccttcatctattgatgtgtgcttacttcttcttgaagtaaggcttagacaaatcttctccagaagatatatgttcaattcctcccgaaacgagacttgaaaaagtcttctcccgaagactcacacttgttcaaagcttctcttcaacctattctacgaatagtatgacatcatactatgaaaaccgaaacctagttgaacactctaggt

SEQ ID NO: 342285 - DNA, 1001 bp, Cannabis indica
tgagcggctagagaaatgtttaaaaaagaaagtgacgacatcacctttatggagagtgatgcgagatggggccatcacccgcattctgacgcattggttatcgtcgccaagaattggcggagataatgtccatcgtatacttgtggacaatggaagttcagtgaatctcttgaatttccaggctttcaaaccaatggggttacatgaaaaggacctgcgacatgtgacgtcgagtatatatggttttaccggcgacgtcatcgcattgaaagggatgatcaaactcccgatcaccttgggaagcgccccagtaacagccaaatcaatggttgatttcgcagtaatcgaccagtattcggcatacaatgccgtgattggtcgaccaatcttaaaggagatgaagatcataacctcgatctatcatctcacaatgaagttccctactcccgctagagtaggctctgtgtgaggagtccagtcagactcacgagaatgatacaatgcagcagtcaagctcgcggggaaaaagtcaataaatgttatctatttattggaggcaccacctccttgccgggaggtcctcataatcgaagaggtaccacacacggatggaccagatctggatccgaggatccttgatcatgccgcagcggcccaagccgcggaagacaccattgaggtacctatagatcctatagataatagcaaagttttgaaaatttgttgtaaattgacttttcagcagcgagaacaactaacgacttttctgacacaaaatcttgatgtttttgcttggaaacattcagatttggtcggaatatctccgcaggtcatgtgtcatcgtttgaacattgaccccgaggtgtgaggtgtccgacagaagcgccataaaatggaccccgcgaggtactaagcgctaaaagaagaagtcgaccgcctcctagcctgcggctttatacgggagttgttttaccccaactggttagcgaatcccgtactcg

SEQ ID NO: 342286 - DNA, 1994 bp, Cannabis indica
acctattcctgtggaaggagagaacattctggttatttcgggagggccacatatcgcaggggaaagcaataacgcccagaaaagatatgtgaaagaagtaaagaacaagcaatcgaccttttccccaaaaccttccaagaagatgaaaaccaaggaacctcccattacattcacaaaggaagatgagaaaaatgtgagatatcctcacgtcgatccattggtgataaccattcagctcgccaacaaaaggatcaagagagtgttaatagacaataggagctcagtaaatatcctttataaggtgaccattaagaaaatggggctcgaaaaagccaaattaagaccttgtatggtgaacctttgtggattcaccagagacagcattgctagccttggcataattgagctcgcattgaccctaggtgaggcacctttatctgctactgttctggaagacttcttagttgtctacctgccctcggcttacaacatatcgttgggtcgtccagcactgatcggactaggggcagtcagttcgattaagcacctatccttgaaattccaaacgccagatggcgtgggagtggtgcgcggcgaccaaatgttggctcgcgattgctatcgcatagagctacagcatagaaaagttggacatcagttgatggcaattttggcagaagacattgagaaggaagatgaagatcttgaccctcgagttcaagataagagaaacctattgaaactaatcgaggaatcgaaagaggtcattctcaacccagaaaatcccgcaaagtgtgtatacattgggtagaacctggacgagaagctcaaatagcagctaataagcttcctgaaggcgaaccaggatcagtttgcctggttccatggagatatgatagggatcgaccctaatattatctgccatcacttaaatgttgatccaaactacccaacaaagagacagaaaaggaggcccttaaattttgagaggtaaggggcactaaaacaggaggttgacaagttgttagctaacgactttatacacaaggtattttatccctcgtggatagccaatcctgttctcgtcccgaagcccaacgaaacttggagaacttgtattgacttctccgatcttaataaggcgcgcccaaaagattgttttccacttcccatgatcgaccagttagtggatgcaactgctgggcatgagcttatgtcatttgtggacgcatattctggatataaccagataaaaatgtatgtcgatcaagaacatacaagcttcgtgaccaacatgggactctattgttataaagtcatgccgttcggactgaagaacgcaggggcaacgtattagcgattggtaaacgaaatattcacaaaccaaatagggcaaaacatggagctttacgtcgatgatatgttagtaaaatcaataagaagtaaggatcacacctcagacctcgcggaatgctttgaaatattaaagaagtatcacataaacccaaaaaatgttccttcggagttttctcaggaaattttttgggattcataactaacgcgagagaaattgaggcaaatcctgaaaagatcaaggcattaatagacatgccatcatcgacaaagcctaaggaggtacaagccttgacaggaagaatggttgcacttaatagattaatttcgaagtcaactgataagtgtgtgccgttcttcaacatattgcgaggcaataagaagttcgggtggacaaaagagtgcgaggaggcctttcagaacatagaaaggcatctcgcaacacctctagttttggcaaaaccaataactggagagacattgtttctctatttagccatctcggaagatgcgattagtgcgactatagtgcgagaagagggcaagcaccaacaacctatttactacgtaagtaaaaggttattaggggtagaatctagatttcccacactagaaaaactcgcgttgtgcctagtccatgc

SEQ ID NO: 342287 - DNA, 761 bp, Cannabis indica
ttttttttttttttaaaatggaaacatatagataagaaagtaaataaatatatttttggtttttttttttactagaaaaactatatatattttataaaaaatatataatataatttctttagcatctaaacaataatttttttaagtgaaaaatactctataatttttaagcaaatgaaagaaataatcataagaacccaccaccccaaacttaatttatgaatagtcatcaatgtattaaaatataaatataaattgaaagtaaaagagttgagagtttagaatggtcatacctcatcttgaagcatgtcaagagcaacaaaaagtaacaaaaatcaaaacaaaaagttaatctaaaacataaataaaacacaatctaccaataattgatgagagcaattaagaatcacagtagattggatcctcaaggaggatttcatccacttcattattttttaattctaaaaatagtttcaatttttatcttttaactttaaatacactacaattattaggatttttaattttaatggctccatgtggaaaaacagtacgaataatgtatggacctacccacctagagcataactttcttggaaagagatgcaaatgagaactgtataaaaagactttttgattgggagaaatttttaatctcaaaatatttttgtcatggcaaaacttcactcggtccttatacttttttgaataatcatatgcatcattcctaagctcttctaactcattcaattgaagctttc

SEQ ID NO: 342288 - DNA, 911 bp, Cannabis indica
aaaataatttccaacaccgatctcaccaagcagagctggatcaccacaacagagaagtcagtggcctgataaggcaattcaattaaaaaattaatggaagaggccaagatctcatcagatatccactccaaggaagactagtcgacagatcggggagggtctatcgacgagttgtctaaccaggttcttcaggaaccaggacagaccttcccgacccaaaggaggacaagccttgccacaaaggtctaatggcaagaacagccagatctcggcaaccagcagtctagggggccagccaagaatctcaggctcaataatagccctcattagccaacctttggctgaccagccacctattggtgcacctcaagccggctaggtgaatgatctccctcctcgaggcattcgggagcgagcaacccaaaagtcaatcttcagttattaataaatgatgtaactcgcattattgatgtaaattttaaacttcagttatgaataaagagaactatttatattaagtaattacaaagtttattctttaaaaattacttaaggggcatttatgtatgattaaccggaattcatctagaaatacattgtataatgcaaacctatcatttcaaatttcttttgaaattcaaaggttctcgactagacctctttgacgaaagtggagtcgaaccgttataactcattgaccaaaccttgttgacgagagaggggtcgaatcgttataacaccttgatcaaacttttttgacgaagaagggatcaaacaactataatttttgatttaaaacctgttcgacgggaaaggaaaatcaaaagttataactcgcgtataaaattgaataataacggttctcgcgaactaggaaagtacaaaacgaggcatcgcaataccttgataaa

SEQ ID NO: 342289 - DNA, 525 bp, Cannabis indica
gttcccaaatcctcttgacttccatatgataacttggatgagaagccacatacgaagtatgtaaaaggttttttgccacttggaaactcaaggtaatattgaggactgccggagtatgatcaaaagttccctctgtaagaaacaaagcttcagcccttgcaaacaaatccatccaagatcgattagccaagactcgatcaatctttgaataaattctatctcttgtttgctgtttattactacaaagtaaaaaaacaagccactactctttacatctaataatcgacaatcattaacacactctaagaaagttgtagatgtgccaacctttgctctatccccaattctctcttctttgtaaagtatatcattaaaatcaccaaatactacacacggctcctgactagcaatgctacgtaaatcattccatagaattttcctcccattttcatcattgaaaccataaacaaaagtggtaaaaaacttataccttttatttaccatttcaacatgaagatgtatcaa

SEQ ID NO: 342290 - DNA, 466 bp, Cannabis indica
aaaataaaaaaataataaaagagagggaggcgttggtgaattgtcttgtgggctaagtattttttttttttggtaagtatcatcatttattcaaaattgatttattttgatatgtttaagtttgatatcatattcattgttttttgtaattgatcttgaaggatattcttaaattattttttttgaaagtatcttggttagtctagtttccttttattttattttttttaaaaaaaggacgggcagtttcctttgtgttcgtgggctggtagttattcaaaatttaaaattggtttcctttttgctccattctcccatgtttatttaaaccaatttttacttgtcatttattttcgccacctacccgattccttcttcctagtgtttttgttctttgtttttaattcttctttcagaattttttagctaagactaagaacctagggcatccaagcaagatggtgga

SEQ ID NO: 342291 - DNA, 633 bp, Cannabis indica
taaataaatatttgaggctcttatggtaagtataaatttcacatttctctccatagagataatgccgccaaatcttcaaagcaaacaccactgcgacaagttctaaatcacgagtcgggtatcgctgctcatattctttcaactgacgggaagcgataacccgatcgacctacatcaatacacacccaaaaccctgtctggatgcatcacagtagactacgaacttttctttatctgacggtagggccaataccggaatggtaatcaatccctgtttcagctcctgaaagcttgcttcacatttttttgtccacacaaactgctgattttttttagtgagctcggttaagggcgtagaaatcttagagaacccctctacaaaccgacagtaataaccagttagacccaggaaacttctaacttctgtaattgtctttggtcttggccaatccctgatggattcaatctttcctggatcaaccttgattccatttttactgacaatgtgtccaagaaaagacacatgggatagccaaaactcgcacttcttgaattcgacatacaatttatgttctcgtagccgctgtagaaccatccaaagatgttgctcatgctcctcttctgattgagagt

SEQ ID NO: 342292 - DNA, 980 bp, Cannabis indica
attgaaaggcggtgtcgaaagcaagaaaacggaagtttggaactcgccgtggccggagaagacgacccgccagcgaaactccggcgaagctccattaaggggtttttaaaggttttatttcagattttttcttatacatgactttttttaggtatttttagttctactatgaagtttgagaattttcttgcaattatttgatttattatgaattatttggtttaattgttaaattaattaggaaaaatacttagattactcagaaaaatataaatttatttatatgattatttatgagatataaactgttgcaaaattggtagattttaatttcatttaattttaaatttttcatgaattatttgtgttatttataaatttaattatgaaaaatacctagactattcagaaaattaaaatttaattattcatggcttagtatatactatatactgtgttcgaattgttagatttggttttcgatcatttttgtatttttcatgaatttatttagttaatacttaaaataattataaaaaatagttaagtgatgttaaaacagtaaaatatatttttgtaatgctatttactatttatgatacgaaataaaagaagttttataatttattggttactgtagatatttattataattatttgtgactaattaactatttaattagatttttaaatagaataaatagtaaaaattgtgtttactgtttggggaccttcaatataatgctaagatataattatagtatctggaattaatttgagactaggttgagatgttttgctatttttggttaattatttagggttttattcatttttaacaataaatttatacataatcatggatagtatttcacacatatttctaagcagattgaatatgttttatgatctgtataaatgattaagaaatatgctagcttctgattttgataaataattacatatttgtatattttgtt

SEQ ID NO: 342293 - DNA, 467 bp, Cannabis indica
ttgttaattaagagactttaaatgtctaattaataaatatattatatgacaatattatttaataattaatttttagttattaaatagttggaattgacatttaagtggttaaattagaaaattggcgtttttgagaaaatgggatggaaaaatgacaaaatggcaaaattgcaaattggggcccaataacatcctatcgccggccacactaagattttaccatttatttttctattattttaatgccaaacaattctaacctaaacctaggtcgtcacttataactaggtagtgatggcttcaggaaaagatagatgatgcatctcattccttcagagtaaagtctaagctgccacttccctctcttttcttcttctaaatttttgaaccttgagtgaatgagtgagtgcccacacacatgaagtggtatctcaatcatagtgtggaagactgtgaagaatccaatc

SEQ ID NO: 342294 - DNA, 542 bp, Cannabis indica
taatctcatttattatgatgggataaataattcgatacatgtaagattttttaaatcgtttatttttattttttgagtgtagcgtaatagttttttacaatcatatattagcttaaagttcctgagttcgaacccacgacctctccttttttcccatccctccttcaccactaagctagccttagtggctttattttttattttttatttactaagaatttaaatgaaagaattactgcaaattatttttaaaaaaattatcaaaatttttttcattaaaattagtaaaaatttataattttaaattatcatacatacatttttcaaatttaaaataatattaattaaacaatagttactaaaataaatttcaaagagaaacaatacgataataaaattatagggtgattctataatgcaaatgcacccccttaaaagggatgtaccgatataccatctacttgtttcggcatctaaaaaaaaattagtttatttctttttcatattcatgtacgttatagctatttaagatatcctacaaa

SEQ ID NO: 342295 - DNA, 1138 bp, Cannabis indica
gtttggatttagattttggaccgaatcccagggtgggtctttgaccgagtctgggtcttcgtccggttacagttttgggtctaggttaatgtcctggtcgtcgtgttcttgggtcctgatccgcttctagtttcgattccagtttcaagtcacgggatacgggtttgggtcgagtttggatccgagtctgggttcgggtcatgatttgggtctgaggcaaggttcaggtccgggtttcagtctcaagtagggttcgaggctgggtctgggtccaggtccaggtcccattcaaagatcttggtcccgttctaattcatgtttcggttttggttcacgagtgtgggtcttggtcttggtatgtgtcagggtcttagtttgagttcgagtttgggtgtttaggttctagtctatgtccttgatccaaacaccgagtactggtcgggtccaagcatcgagtcccggatcccagatctcgatgtgggtcctatgtccaggtttgggtcttgggtcgggtcctcgatcctcatccaagttctgagaccaagttctggtcctagtcaaggtctgggtcccccatctaagttcaggtcctaggtcctggtccgggtccaagttcgtgttcaggttcgagttcgggatcaggtcgaacttgaacttcggaaccgatcccaaacccagactcggacccatacctacaccgggatcaaaacttgggaccttgatctggactgagacctagacaaaatctggacccgtacccaagacttggacacgaacctggacccaaacccagacccaagccgtgatctggactttgacccaaagccaaccctagactcagaccaggacccaaaccccaacccagacctagaccccaacccgaattcgaccacagaatcgaaatttgaactaggaataggacccgaaaccgaacattgacctgaaccctggacttaggcctcggaaccaagacccatatcagaactcaagactgagaccccaacttggatatagactcgaacttgggactcaaaacccatatctttgttgggttttatgccctaaataaaactcatttcaatataatcagatttacttattaatacagatcagaaataacatttaatgttgcatggtt

SEQ ID NO: 342296 - DNA, 602 bp, Cannabis indica
atcgactatgggcttgtccaagctccagttctcttatcacgggataagatctgcatcccaatcacgggtcctagtcttgtttcaattcttgtcccaagttagggtcttggtttgggtctaggtccaagaccgacactggggtccagtctgggtttcgatcccagttctgggtcccgagtcatgttcaatgttctggtcttaatttaggtcttttttcgggtcttgagtcctggttcgggtttggatttagattttggacccaatcctagagtggctctttgaccgagtctgggtcttggttcggttacagttttggctctatgttcatgtcttggtcattgtttattcttcggtcctaatccgcttctagttccgattccagtttcaagtcacgggctacgggttttggtcgagtttcgatccgactctgggttcgggtcttgatttgagtctgatgcaaggttcagtttcgagtttcagtctctggtaggcttcgaggctgggtctgggtccaggtcctggtcctggtcccagtcccgttcaaagatcttggtcccgttctaattcatgtttcggttttgttcccgagtgtgggtctgggt

SEQ ID NO: 342297 - DNA, 725 bp, Cannabis indica
gtccaatagttcaagtttattgaccaaagttagactcgggcgttattattattatgtgatttagcttagaacctcgttgttagttactagtgataaaattaagtttatgtattgatatttgactaaatatgtgcatgtgcgttttagatgtattttatttttattatgtgactacctgacacacatttccttactgagtttagtagctcacccttatcaaaataccatgtgcagaccaaagataactaaagtttagaaggctggtggcaagtggaactttgaacgcttgtgtgtgtgaactcgctgagggccatataactgcaggtggtctaggacactctgttttatttatttatgatgtgaaattaatgttgcaattacttttatttattattattatgtcttttgtctaaaaactggccaattgtgaacattttcaagtattaaataaaaatgtgacattatgatttttcgcatttaacgcttgtaaataaaatttaatatttttataaaagtacgggcgttactgtttggtatcagagccacagctatatcggtcccgaatgttctcacgagttacacacatcagccaaaagtctccgcttgccactaagtaagtctcattatatatgcttgcattttatgtgtattgtgtaatttctaaatttacattttacttcaaaaaaataaaaaataaaaaataaacccttagtaccaatagccaa

SEQ ID NO: 342298 - DNA, 1018 bp, Cannabis indica
gaccaatcacagctatgtgatttttaaataataacctcatttatttcacgtgaaacgtaatcaaatcctacaatttcaggggattcttgttgtatgatatcagttcgatttgtaattaactgccttcctatgtaactataaatatgagcaggatacactaaaaaatggacaaaaaaatccttcagagaaaaacccctagaattgtgttaacgcagattttcgttaaccaaatttgagcctcacgatgataatgcaacatagaaaaaatagaagctatagaaaaataatatacgaacacagggtttttttatgtggttttgcagttaaaattttgcatagtccacgattcaatcttattcaaatttttgagtatttttttagggccttctccttttttgagattgtttgccagtatttataattgcatattagcaataaattacaaagttggccaaaatataattacatccattatccctaaaatcgtgggatctgattacgtatcataaaatgtaaatgcggtgtatgatttggaaaatcatataattgtgatctttccgcttttactgggtcaagaatatcgtgtattaaatacgtctttaattgttgaagctagagatgtctcgacagaaacttgattgtagtgatcccaacggcgagctagaaccattcttctttccgatgtcgacaagatatgtcttacgtcgattgcaggtatacagaaatcttttaacttgtcagggttatgagcctcgctcctgttagttggagaaacctagagaaagcttccttgtagtgagatggtcatctcgcattcttattctttgaggtgatctgacttttacatttagtttgcttattgtaacctaaggtatgtgttacttttgtctggtgcctcgctattctcctttagcgacatatggtttcttgttattacactaagtgccagttcgtacattaattcgtcgcctaagaccttacagtcagcgggttacaaatatactctgatacttacgca

SEQ ID NO: 342299 - DNA, 618 bp, Cannabis indica
actctttgtgccacaaagatggcagtggtcggctaggcttgatcattagtgagaaataatttctttcacttatgttgcactccttggcattgagaaaacatattttgacaagtttcctttggtacttaatgagtggcgagcactgccatctccttatgaagtgttccccatgtggcattgctctccaaaaagaaggagaaggagaacactgccatcttcatgtggcagtggttgcacaggccatattgcacgtgattcttgtgcagttttgactttatgttcaagtgtaagtctttttatgcctaaatgagttaagtcattgttagcctccttgtcgaattgaggtctctagggtgaaaactacacttgcgctgcccatacaccctaatttgggcacacttgggtgtgtgagtcccagtaccaaatggttggccgatttttttgagtttcatagaggtgccatgagaccctcaagtaggacgtcttaactcatttggcatttgtaagtcttgcactacaacaaatatagttattaccggcgggtttattgccggcggaactcacccgccggtattaataggggtattaccggcggaaatagccatccgcgggtaataa

SEQ ID NO: 342300 - DNA, 504 bp, Cannabis indica
aaatattatcttattataaaataattgtaaaataagaaaacaaacaattaaaaataactaaaaaacaaccgtgaaacaatagtgaaaacttaacacggtacacagtatttttgaaaaaaaattctacccacagtaataaagaaagtaagaaatttcaatatgtagtgtaaaaatctcaaatttcaatataaagattaaaaaaaataagttttacaattaattttggctaaaatattattagaactgagaagttcgcgggctgaaaaataatttgagttatatgtagagtagtttcaaattattatatttaaaaatactttgatataaattaaatatagaagtctaataaaattaataaaagtatttaaagtattaccgtcaatctcttattataattttttagttaatatctgtatccgaaaacatatgtcgaaatatttttattaaaaaaaaaagaaaagaaaattcatgatggcgttctttataattataatatcattcctg

SEQ ID NO: 342301 - DNA, 649 bp, Cannabis indica
tgtaatttttttctagtttcgtcagtacagactctgttttgaatttattaaaagaatatttgaaaggaactgatattacatatttctatctagacccaatgatcaagaatatagtttaggccttatatgtgccttgtttaagacaataatagagtctagtactaacaaaattagagaaaaattatagttttacaaacagttgggtagttatgccgactaaaaataaacagttgggttagtgccgcttacaaatataaaactttgggtatttgtaccgctatttacccttttatttatataaaatacagtatttttatgatgtactcttaatattttattgttaattttttgttatttgtatattattctattatgttgttttgatgttattttcttgttactttcatgtgcttttttttttgttgttttcttgtattcttttagagtactgtaaatgtacccacaacacgctacatccatatatgatgttggacaccttaaagtgcttaataacaatgttctctttaaattactttatattgacccatatggatcgataataaattatagcggctgttcattggaccacatctattatttttaagcctatcataatccgatccaattatatattggatattagatttta

SEQ ID NO: 342302 - DNA, 817 bp, Cannabis indica
taagaattatttttcttgttgtgttttttattataaaataaataaaatgcaccaactcaatatattactaaaaaaaattaagaaattggaagttggtgtctttttttaattaatatacattatatattataattttttaaaaatatttagaattaagtgcggattggattggatcggttattttttgaagtcaaacaacatccaatcctcacaagtgcggattttagatttttcaatccaatcaaatccgcacaagtgcggatatccacattttgtggattggattggattagattgtgcggattggatttgatcgaatactttgtgaacacccctaattattaatgtataagtcttatttaacttatataaggcttagggtttaatattatgttattattaatgtagaagcattattacttatatacttatttttgaatctctataaaaaatgcactgtacgtatattattattatttttttttaatcaacaaaaactgtacgtatattattttatttccaataatatatatatttagaagttataagaaataaaatattaaacaattgataaatctatagaggacactaaagaaatttaaaaaaaaaaatacaaacatgcataattgataagcactcgcttataaaattaaattattgttatcaccatatctcacttatagtcatcactatatttaaaatttatatcattatcgtatctcattcgtagttttttttaaaaaaaattaatatatattattatatgtgcagtaattttttaactaaataattttgttatagtataaatatatatttt

SEQ ID NO: 342303 - DNA, 508 bp, Cannabis indica
tctcaacagcaactcagctgacaaaaatgaggcacgaaatctctgtattcagtgcctcactacacgatagtagaaggcaaattgtatcgaaggggctattcaatgcctctcctacggtgtgttctccccacagaagcaaacgagattatcaaagaaatccatgaaggcttttgtggagaccatgcaagttggcaaggcttatcatagaaaataattcgagaaggatattactggccaactataaataaagacacacatgaatttgtcaaaaaatgcgataaatgtcaaaggtttttgcatatacctcgcgtaccacaaacataattaagaatgatgatctcgccatacctatttgcaatatgggggattgatttgattggggcatttcccacagagtgaggaggagcaaaatacgcagtattggcggtcgacttcttcacaaattggacagaggctgaacttgtcgtttccataacctgcaagaaagttctcgactttgtcgtcaaga

SEQ ID NO: 342304 - DNA, 552 bp, Cannabis indica
ataccacgtacaaatctcttgtgtcaagttatttattttctacaaatatttttatattttgcctgttctgttttgtcgcttgaaaactggtttctgcagtaacatattacattctgcttctgctggcgtatacaattttatattttcgtatatactattgacatttgcaaaaactcagtttttcaattggtatcggagcgaggcactaaactcttagtgtggtcctttaacagtttcgtgtaaaatgtcattttttgcataaggaagttcaatttctagaccacctttgcttaatgattctaattatccttattggaaagatagaatgagggccttcatcaaatcttaagatgagaaagcttggaggatggttttatcaggttggtcttctctagttaagacagattccgcaggtaattctacaattaaatctgaattagaatggtctattgaagatgataaactttctacctacagtagcaaagcgttgcatgctatatttaatggtgtaggtgagggttatattaaacttatatctgttgggttttatgc

SEQ ID NO: 342305 - DNA, 919 bp, Cannabis indica
aatacaaaggagatttacattctcactttgtctttataaaagattctattatagtaaccttggcatttgttgctggtttcaatttattaattaattcaaaacagtgaactatagaggagaaggtatacagactactataaaaaatttcatctaatagtgaacatatgcaagcttaaagagtcaacctataggttaaaacaaattttttacaaatggcatttcatcttgtcaacttttcctttagttttaaaaaaagttataaattaattatatatcagaaggtcagtaagagtaatatttattttatatatagacaatatattacttgtaaatgatgataaaatttttctgcataaggtgaaataattcatgtctcaaattattattttgagataaagaatataaataatatatataattttaattaattagagagtagcaacaacttctctgattaaatataattatgtattattcatctcatgttacttttatctttaagtgtgatgaattcaagtcaaaccagcatctaaaaaatgatatagaattagaataaattaagaatattcatttgcttctatttttagaagcctaatgtatgcctaagaggctatataaggctttacattacatttgtttcaggaatattaagtagtatcaaaataatttaagttaaaaccactttatttttcatacaaagtgatgaggtatctttaagatactaaagattatattcatacatattttattgagatgaattgattctttcactggttatattgattcacgtaaattaacatttgactatgtccttaagattaccagtaagttgtatcgtggagagccttgattgttatttctattatataagtcagatttatttattgttttgaggatacatctcgtatggtgtattata

SEQ ID NO: 342306 - DNA, 1223 bp, Cannabis indica
gttggcttttgtactattcgacagtatcacatcaatatgcctagagtatgactagcgtaccgagtataggctgatattatggtcgatagtagcgtactacttgacagtatcacattagtttggctggagtatgactagcataccgagtataggctgatattatggtcattagtactgtcgtacgaacgttctagactcagtaccgtgcaggtcacggggatagggttatgattgggggtacgggcatcggatcataatccaagttattgctatgttattgtttatgcttttcttactgagtctgtcgactcacaatgctatttctatgtgcaggtaagggcaaagctaaagttgaggagccgtgagagcgagtaggtgaagattgtacatgtcggggcggttaggcctggagcgtacgatctttgggacatcagggcttttgctgtttggtcgctaggcgacaaatcttttgaatatgagtagtaaaattttgtcaacatattttgtaaacaggatcccagaattttataaatgtattactttaagattttaattaaataagcaaattttaattattcacgatatttgataacctcgttgattagcaatgagctgcacaataagttaaaagaaaaatcacgctaacatgcctaagtttgttagggtgttacattttttcagtatatcctgttcctatttatagttacataggagggcagttaattacaaattagactgatatctgacaacaataataccctaaatttttgggattcgattacgtcccatgtaaaataaatgcgattattatttgaaaatcacacagttgtgattggtccgcttttaccgggccaatacatacgcgtattaaatatgttgtaaagcatatcgttctgggacatctcgctgggaacatagcaacaataaccttagtagtgagctagagcttttcacatgtctttctgaggttgataatgtaaatccgtcatttctacgattgaagacataacactccgcctgacaatcgcagttcttggtgacaaggtgaacttcagtattcaacatcatttgaatatcagcttctatctgagagagctgactagatggagtagtgaatctcattgaaaaatttctgaagctgattagtgaaggtacccagagtatgtcttcttatagcgagatggatgcctcgctattttccgtccaagttcattcaactgtta

SEQ ID NO: 342307 - DNA, 938 bp, Cannabis indica
agctttccctggagctggtgatgggaggagtcctaaaggagttcacaagggtaggtcttcattgatagttttcttttatccttctttactcaactcagattctattgttttttctctgtgaagacgggtctgaagatggcttatgcttattcccgggctaagtcggctgcttctaagaatggtgtcgtgtccaacaccatgagggcagaagtggacttggctgggaaagatggtgatgaagccagggttcaacttggagccatccgcctcgagatgggtgaagtcaacaaaaaacttcttgctgtcgagaacaaagtagccgagctgacttaggacctcgaggcttctgaccaacttgaagctaccatcgcctccttgtcaatagaagtgaacaatctccaagaagaaagggaggttctttgggctgtcttctgtaggttggaagcagagaagaagtctaaggaggaggagcttaaagctgaggtcgagaagtacaagtcagaggctgaacagcagagagcagaggctgagcagcagagagcgaaggtgatgaggattggagagaaggtaaatgccttagagacagcgggtctcgagattttttatgacttctggaaagctaatgccaagaaaaattttgattacttaggcgattccaaagacatgtttctcgagtattgtgcttctcaggtggcctatggagaattcgaggcgaccagttctgcctctggccaggacgttggcgtgccccccacccagaaaacaaatcctcctgctcctaccgacctagaagacccgtacaaagagcctggcactccagctgtctaaatacttctccttttatctttttcttttttttttaatatctgtccggccagaaggccttttttaagacaaagtgacttgccaagcgttctttaaacttggaattatttttc

SEQ ID NO: 342308 - DNA, 665 bp, Cannabis indica
cagaaagattgcatgataaatactgaatacgctgagcgtgggatttggacaacttgccatatctctgcaatctgatccccaaattatagggatttctttgatgactcacgatgcgaaagctgaattgactaagtgttggtcgatctgcgcagattgctgatcgctttgcttcaggcatgcatatgaggtatcctattctgactgtattctctgagcagatactcgaagtcgattccacgtgtcacaatcatgttatgccatgtcagagtgcaaaaattgggataacatttgccccccaagtctgtacgggacttccgaagttgcgtgtagacttcatctgagctgcttctgcatttggatggggacacatgatgagcgcgtctattcgagactcgatgtgaggctgattgggtgtcccttcagttgtcggctaataaatgctcggacaattaatattttgaaatctgattttctctcaccacggttgatggctgcactcgattattttttatttcctatactcgcttttaagggggaaccgaggcatttgaggttcttttgaaatgattaccccttttcgtttcttgcctataaatacaaatgagcatttgtataaaaactcattttcaccatccttccttgctaagtaagttcagagcaaaaag

SEQ ID NO: 342309 - DNA, 370 bp, Cannabis indica
ggacttaaaacgattttttttttgtgatttggatggtatcatgttgttttgtgtgttgtattgatgattgattgatgtttgtgaaattttgggtaacataattgatctttcgattctgaaattatttttattggatagtatggaaaaaattaagcaatttacttatttacagaactcaatttctattttatttgaattagttatgaatttttgaaaacagaaaaaatcagggtggtgaaacccttcccacgcgcgcggaaatcatgcaaggggagccttgcgtcgagtttacacaatgttttatttattccaaactttagtagaaacttatttagtgtttcatgtttacgaacacaattttatatattga

SEQ ID NO: 342310 - DNA, 1770 bp, Cannabis indica
tctctctttcttcttctctgtttcaaaacctctaagtaatagagtagtgcccacacacatcaagtaatacctcaatcatagtgaggaagactgtgaagaattcaaagtccacaaagaaggacattcgggctcagatcttgattatactctgcaacagaaaggaatcaagggttacagatctgagtggaaggagacatattattccgctgcactcaatgtaagatttctaatactttatatacgtttacttatattcgttttagaagttcatatttaggttgttaatcaacatacttgtgagtagatctatgttcctggtaaattaattcaaacaagtgggtcatctgaaaagaacttgcccatagttaagaaagattgttgttaaagaagaaaagtgtacggatcctacccaagtgtcagttatgatacaaggggacccgaatatcggtccttcatccgactcaagttagaatttatgggcaatattataattgttattgatattaaacattgtacatttagttagagacatgaaaaatctgaatggactgtgcatgtatgttatttagtggtaacccatttaataggatagacagattagaaatattctaatatgagttaaaaattttatattccctagtggattttagaacatgagtagttaatggaggcatcgatctaattgattcaaataacaaaatcttttgtttagaagtgatctagcgttaccaaaggtaagacaatttatgagtattgtctggaatcctagatgaattgaaggcgacgattgtgtagtaattttgagattatgtaggcatgggactacctatgttagcaagaagcatcttgttttggtagctcaccatgaacgaactccatggttgagtgtccttgacttggggtggtttcatttaggaaatttccccatgaagcgtgcgagttagagaaaagcgcgttagaaacatttggattggtctgtggagctagtcatctgtccaggatgcagttggagtgatgcactcatgtataagagccatcactctgtgggagtaagggcccaatgaaggcttgaagcggggacgttactaggataatgtataaaagaacatcaggaagagtagtggtatcactaagctaaagaagattacctgaattacttaaggtaatacagtaatggtggagagtacttcataattgactggatagtcaatatggtatataaggagaccattgaaattctaggaaatgattactttattaagcaattatggaaaggcatactcacccagaatggggaagagcttatgaattgagatgaaatttaatggatatgtgtttgagtgattggtgaatgttggatcccaaagtaggttgtttattaaacaacaagctatataattaagtgtaaaataagttttagagtggttaaccaagtatgaagatagtgatgattgcaagaaagcaatggtagcatacgaaccagggagtgaaaccttagttgtaatgatggaaaagaacacgagagtctcatatgttgatgaatcaacataatctacggaagactcactataagttggtatggtaatttgtaccaatgggttatcaatataacagagaatatacttgaggtatgtatatttctgcgtgtgttgaaaagatcatcaagatctctatcaaacacagaatagaaatttcaagaccacggaatgatccttgattaattgttattagttgagaattcgggaaatgtgtatttccagtttagttatg

SEQ ID NO: 342311 - DNA, 613 bp, Cannabis indica
aaaaaaaaaaaaaaaagttagaatctttctcatctttattttgagggggtacgctttgatagttgtaagaatttagggggtaaagttgctaatttacaaatacacgtcagcatttaaacagaataatgagacggaacctagcataaggactaaatttcagtaaatgtaaaagttcaagggaaaattttaacaatctatttattttaggggcgaatcagtattgttgaaagttcaccgaggtttgagtctgggaaggggtctcaaagttggggtccgagtccaggtccgggtctgggaccaaggtctggatctgagtctacgtcaaagtccggggtccaggtctgggtcaaaattcgagtctggggttcgggtcttgcatttgggtttgggtcagggtccaaggtctagggttagggtcggagttcaggtctgggtccgggtctagtttagggtcggggtctggagttcggggtctagggtccaggttcgagtctggatttgggcctgggttagggttggggtctggggtccaagttcgggtccaagtctgggtttggtgtaggatgggtatggtgtaattttagttaaaaaaaaaaatctaaaaataatattt

SEQ ID NO: 342312 - DNA, 726 bp, Cannabis indica
caatatttttcaagattagaacagaataaaaattcaagaagcttaagtagacaaatagaaattaatcaaaatgagaagatagggaagagaatcctgttgatatgtttacccaattgttaatgtctaattactatcccatttcctgttgtgaatgacagattatacacattaacctagctcttctcagatcttctaggttctaaatcacatgctctctaattaatctcttagttagaatcacatgaaatcaacattaagcaataatctaaattgtcacataagtcatgcaaatactttcgtttcacataaacctagattatccaaattttagcattctcaattctcacttttcagatttcgaattgagatcatagaacatgctaaaggtgatcaagcttaaacatggaaataacacaaataaggataatttcacaaccaacatgaacaggaatggcaaatgacattaactagggtaaactttaaacaacattcatcatcttccttaaatgggagtttaactcatattcaaatccataaccattccaaaataaaattcaacataaagaaattagaaaggaaggaagaaagaaactgttggtggaatgaatctgggtctccactttgctcctccagctactcttgactgctttctaggtctaaaaatcgcttccccctgtcctctatccgcagttttctttttatctctcgttccaagattcaaaagac

SEQ ID NO: 342313 - DNA, 506 bp, Cannabis indica
ttctcattctattttctatttttattgcgactaatattttattttagtggataataactgttttgtgtagtgagttgatggtcgagtcttaaagcttcttaaaatttataactggttagtacttttggtcttgtgttggttttgattttggtagtgggttggtggtgaagtcttggagcttctaaaaagcatgtacagtttatatatgagttttggtacttgtaatgttactaattttttttgttaaaaaattaatttttaattacatagaattaatgagtttattaatttattatcttaatataattattttaatattgcttcaatttttataaataaataaataaataaaatcagcttctgcagttataattgatatattattttacttggtattttattattgaaaaaagaaaaaaaaatgtacacaatttaaaatttgttatgatattctttttatatataataatttttttatatattttaactttttttttaaaaaatat

SEQ ID NO: 342314 - DNA, 706 bp, Cannabis indica
atcttgaacttctgcagtacctttctaaggtaatttccttgtgtcaaagttagggactcaggtctgttccttcttatttcaattcctaggattttcttagcctttcctagatctttcatctcaaattctgagtttagaagtgccttcatttctttgatttcactcttgcttttcccatcagcagtatgtcatcaacatacaggagaagaaagagtgtatcattgaaatatacacaggggtcataggcacttttggtgaagccacttttcagcatgaaatcatcaaacatgagattccattgcctaggagcttgtttcaacccatacaaggacttctgtatcaagcatactttgtccttgtcttcatcaaagccctctggcatcttcatgtagatggtttcatctaattttccattgagaaaagcagtcttcacatccatttgctcgatttctagatcttcagatgcagccttggccattattgctctaattgaggcatgtttcacaacaggtgagaaaatttcattgaagtctaccccttctctttgagtaaacccctttgccacaagtctagccttatatctcttgcaatcaacacttgatagaccctccttttccctaaaaatccatttgcaactaaccagtttgcatccttctggttttctaacaacagtccatgtttattctttaacagggattgtttttct

SEQ ID NO: 342315 - DNA, 560 bp, Cannabis indica
tatcaaaacccatgaccggcgaagtcctatccatttacttggcagtgtcagaatatgcgattagttcggtactaatacgtgaagatcaaggacgacaatacccggtgtactatgtcagtaaacgattactagatgctgagacgcgctatcctcaaataaaaaattggcgtttcccctggtaatatcgtcgagaaaattgcgaccttatttccaagctcacagtattgaagttgtaaaaaactaccctttgatgcaagtcttagcaaaaccagagacgtcagggaggttgttgaaatggccaattcgacatcaagtataaacaaagaactgcgatcaaggggcaagccttggcagattttatcctcgaattcccaagcaccgaagtagcactcatagacgacaaggttgacactgctatgcccaatggagaagcatggatgttgtacgtcgacggagcttcaaatagcgaaggttctggtggcgggatcttattaatcagttccaacaattttaaggtacacgctgctttacgttttgaattttctgcatctaacaatgaa

SEQ ID NO: 342316 - DNA, 611 bp, Cannabis indica
ggtccattaaaaaattgtcacctacttcttgccatatttcccacgtgcccaccaactttttttctatttcccacatgcccacttatttcttttcacctatttattctccatttcccacaccctaaacacaaaaatcttgactctccaaaaccccacccacgcctccgcaccatcgccattttctctcgccgtcttcctccctctttctcgcaatcatctccctttcttctcgtctctctcgtccatcaatctccacccacccctcttcccgtcagtctccatctactctctatcgcatacgtcgaaccaccaccaccttccgtcattgtccctctcatcttcgtctcatacgccggacaaccaccacctctcgtccgtctccctctctctaagctcggtataaatacatttatttatttattatatatatttattttgttatagtataaatttaatgtgttttaaaaattagttgttattgtaacaaagtgttttattttaatttaggtaaaattaatctgtattttttttcttctttttttttactattccgtacggtttaaaattgttgtcctataactgggtataggcgtacggtttaaaaatcgtcg

SEQ ID NO: 342317 - DNA, 530 bp, Cannabis indica
tcttaatcgggttagtcgggttaatttgggttaattgggcaggtcatatttttgtcgggtttcttgggttgtattatttgtcgagttatcttggtttggtttgggcaggttattcgggttgggcgatttacaaaactttatgtacaaccctactctcaactagtcgtaggtcatgtcctaggtgaatatacaatttgatgtaaaaaggagatgacctatttgaactaatttcaagacttggtaagtcagctcaaacactacaacatttcacatcattagcgggggaccactccgccgctaatacccactaattcggtcgctatagggtattagcggcgaatttcggccgatattggtccgccgctaatgcgtggctactactaacagtattagcggccgaaatggggtctgtcgctattaatatcattagtagcgggaccccgccgccaatgctgtttgtcactctcgaaacatagaaactgacaaagagcattggcggcggggttcccgccgctaatgctccgccgcta

SEQ ID NO: 342318 - DNA, 479 bp, Cannabis indica
ggcataaaacccaacagtttcagcatcaagcaatgtcttcaaaacatagtaaattggttgttgctttccttcatcttctcaaactactgcagcgctgactgctgcttctcaaactgccaaatacaagtacagtgtttctccatcctttgtgtttgctaggattggaacttctttgcattcctccgtccacacaaagtctttggtctttctgagagttgaaaagaataagtggcaacggtcgaacaattttgaaatgaaacggctgagcgctgctatcattctgttgagatgttgaatatctttgattgactttggagattgtatattttggattgatcttatctgatttggattttcttcggtccctctttttgtgacgaggtaacttaagaattttgctgaagagacaccaaaagagcatttagtaggatttagttgttgggttttatgccctaaataaaactctttacaatctgatt

SEQ ID NO: 342319 - DNA, 558 bp, Cannabis indica
atatattattttatttgtagattatcattctaatacaatttttttggtgtttgttttgtgatgttttcaggtaatgtttatcgagatttttaaaaactaatataaagagagcttaaaaaatagtaaaatgcagtattaaaggaaatgaatattttcatatggttaaagcattattaaatgagccagactattagtctcaaagggcgtatttaatatttttacagtgtttatgcaagaaatcataactctgcaccctttggtttctcttcaagaagaggaaagcttagagtaattttagcagaacttcgactacccttctttcgatcccccttttgtatgaaaatagaagggtatttgtaaggggtgggtatgggacatgctcatgacttgcctaggatttctacaagatgcccactaatggggtaaaatacatgtaaagagctgactattgggccccttaaaaggtattgtgctcgtgcgttgaagcaactggataataggagaccaccattcgtactggacgcatgttgccaaaaggtttaaccttgaaaagtaaat

SEQ ID NO: 342320 - DNA, 637 bp, Cannabis indica
tttaaattaattttattgtttttttatataagttttatgattagttttctaattacttgtagattgaatagatggcaggaacagataatgaagtggttattattgataataacgaagcttctgtttggccagaaaaatatgaagaaattttaatttaacttatggaaaaagaagttttgaagggaaataggaatactacaacctttacaaagcaatcgtggaagcgtataaggatgaatgcagaaaaagatgtatattttgatggagatgaagacattcttgaagtacaagataatactatacaaagcaaccacaaaactttgaatgatagtgttgagtttagataatgactttttaaatattttttttcaagattggagaattattagttcatattttattatgactttgtcagttttgtgttatagataatgagtttcgtgatttcaaattacttgaatttttttaagatactaatgagtattttttatttaatttttttataattatatatttatttaaaataaaataaatgatattcataattttatttaataaaaaagaaaaaaaatcaaaatttatgtttttgtttttaaaattaaaaataaaaatagttacagaacaaacttttgttttt

SEQ ID NO: 342321 - DNA, 822 bp, Cannabis indica
caactgccccacaacaaactcaaaattagctcaggtcatctcatctgatagctgcgtaaagatctgtttcattgtattcatctgattctgacctttcctactcagagcatcagctataacattggccttcccaggatggtaaagaattttacagtcataatcctttaccagctcaagccaacgcctttgtctcatgttcatgtctttctgggtaaagaagtatttcaaacttttatgatcagtgtatatatcacatttctcgccatataagtaatgccgctaaatctttagcgcaaatactactgctgtgtgttctagatcgtgagtagggtacctctgctcgtactcctttaatttccgagaagcataagctattacctctcccgtttacataagaacacagcctagaccttgcctcgaggcatcacaataaacaacaaacttttccttatctgaaggaagagttaatactagagtggtaatcaagcgctgctttaattcttgaaaacttttctcacaccgatcagtccaaacaaactttagattcttttgggtcaattccattaggggagttgttattttcaaaaaacccttaacaaactgatgatagtaaccagctaaacccaaaaagcttctaactttcgtagccgattttaatgttggccaatcccgaatagctccaattttggtcagatcaaccatgatcccatctttatccactatgtaccctaagaaagagacacgtgacaaccagaacccacacttcttgaacttagcataaagcttgtgatcatgtaatcattgcaatactgatctaagatg

SEQ ID NO: 342322 - DNA, 504 bp, Cannabis indica
acgggagtcccccaaactgaactgaagattggacaatctgcagtatggctggcttgatttcaaaagtgttggcgtcaacagcaggtggccttatacaggatcgggcccctgtcaagttaggaagcaagtaatccctcatgctacggtcattgttgttgtgtccattagcctggtcttccacgcctcctccgttgttcccatttttgccataattggcattgtcagccatgaatacatcttgttcaatctttagtgctgctctttcagatttcctccttctgtttcttttgcaagtcttttctatctgagggtcaacaggtaatctggcaattggaccttgacttctcataaattattgacctgaaaacaaaatacgatcttgagacaaacagagttaatactcaaattgaaaaaaaaatcaaattagaacaaaatttaatttttcataatattaactatcactccccggcaacggcgcaaaaaacttgttgcgatattttgcac

SEQ ID NO: 342323 - DNA, 554 bp, Cannabis indica
gactttctctcttctgtctaaaacttacactggttgctctttgtatgaaagatctggctgaagttccaatgcttcataactcagaatatgagacggatctgagacatatttccaaagtatcaaaacatggaacacatcatgtacagcagccagcgctggaggcatagtctagatcttgcaattgtacttccttaattctttccagaagtgtagattgtagggtaatgctagctaattgtcccacaacaaagtcaatgttagcttaggtcatttcatctgctaatttcttggagatctgcttcattgtattcatctggttctgaccttttctacttagggcatcagctacaacattggcctttccaggatgataaagaatttcactgttataatcctttaccagctcatgccaatgcctttgtctcatgttcaggtctttctgggtaacgaagtatttcaaacttttatgatcaatgtatatctcacatttctcaccatataagtaatgccgccaaatcttttgtgcaaatactaatgctggcagttctagattg

SEQ ID NO: 342324 - DNA, 558 bp, Cannabis indica
ttgtttttattttcgttttcagagaaataggctttcataaaactatcatatctctctcccaataggtccgttttaagtgatctaggtaccgttttaaagatactttaatgatatatattttttatgaagaaactatttcctaattctggttattttgatgtcaaaaaattcatgttttacactgactgtcgatttacaatttttttaaaatttctttccgatattgccttagtaaaagtatgatatctctctcgatatctattattttatagcaattcttgtactgttagagagataatttaataatccatattttctttgaagaaacctttccctagttcggagttcttaccagtcaaaaattaggatctttactcggttatggtatttcgttttaagttttgtttcagaaaaagtgttttcagtaaaaattcaatatctctctcacgtttgatccattttaaaatatctcgttttaaagcttaggaaaatagctacattttttatgaagaaagtattgtctagatcggggtgtaactatttttaaaacttttattt

SEQ ID NO: 342325 - DNA, 977 bp, Cannabis indica
attataaatttaatattaaaaaataaaataaaaataaataaaattcattacccttaggtgctatttggaatgagttaatactagcatgaaacattaccttgtttgtttttaggatttaacattgtaatgttattccctttgtaatataagtacccttaaagagagtaatgttgataccttaaaaaaggttaggattgacttcttcccttttattatattaataaataaatttaaataccattaatattttgatttattatagataaatattaccataaataaaaatagcttttatatttttaattgagttatttctatgttattaacaataacatatatatatgcattatatataaattttatacgaatgatgtacataaataacataacaaacaaaaataaataatatactgataaaatacatagaaatgttcattttaattaatacaataaaattcaatatttattaattaataaatatattactttaataaataattattttataattaacattaaacggataaattttctgtacttaacgaaagaacaatataatttaattaacggaaatataaatacatataccaaaagggaaatttgaatttctatgcatgcataaggggataattttttccctaaactaatacttttctacattgaaaatatatgatcacttttccaaaacctcaaaaatacccctctaaaaaactcaaaccctttctctctccttccctcaaactctctttgcctctttgcctctttgcctcttcgcccaaaaccccatcgcaggaaaccgcccctaaccctcaaccatcatcacccacccacccaacgaccgccccaaccctccatgcaatcccgaccgacttacgaccgaccgccccaaccatctcctcctcgtccaaccacccacgccgaaagccaacccacgcccatcctatacccatctcaaccgaaccaccatcggcgatcca

SEQ ID NO: 342326 - DNA, 584 bp, Cannabis indica
atgatacagccagcggcaattataccgcatatgtaaataaatatatgctatatgctttatatgtagttagtgttagacttaaatggtacatttatttatttatttcatcattttctcttttctgctgactagtttttttatttttgtatttatatatctatttttactttttacaattttaaaaaaataacaactacacttttaattattttaattaaaaaaaataatattattgtgatctactccttaaattgatcattttgatatgtaagaagtgtatattcttttactgtcaccaaaaaagatatttgaaattgaaagtaatcatttaatttcttttataaattgttcaaaaaaaataataaaatttttaaactcaaacaaatttaaatatgtaccatactcaaagtaattttttattgcgactaatctatccaaaaaagattaattttatattaaaagatactagatgttattaaaaagtaaggtactgcgatattaattgatttcatcagtggcggaactatgttatggtatggggtggccatggcccccctaatattttggggaattatttttaatat

SEQ ID NO: 342327 - DNA, 751 bp, Cannabis indica
aacttttctttataataaaacgataatgacacacacacctttgctaggttcacccaagacctcatgtctcgctttgcaccattaatggccttgtgcacattccattcattgatcttgttgagaaaatatactccctatttctcatttagggcggcaccacccttaggtcaatataggtagaattcttacagtatttgttaccaaaatacttattttccaagctgaattctattaaagacttttaaaagtctaaccctcaaattggtaactcactaagtacttaacaactttataggatgggacatatagtacttatcacatttgttcacacattgatttgttcttacctattgaacctaacactagtaaagttactagtattaagataggttacccccaattatgaaccggtttagggagttttagtcccatccctttagaagtcttttccactaaatctctagttagtggcttcgtaaacagatccgccaagtttccacttgatctcacatatgatattgagatgactcctctttgaatcaactcacttacatatccatgtcttagacaaatatgtctagacttcccattatatacactatatgctctagccaatgttgcttaactatcacaatgtatcgatattgtaaatactgataggttttatgccctaaataaaactctatttcaatgtaatctttatcttttaaatatcaaaaaagaaacagaagtattttcatcacttattgtg

SEQ ID NO: 342328 - DNA, 754 bp, Cannabis indica
gatttcaatgcaaaatttaaaaaatgagttttgattatgtgttataatataatgtagattaaaatatttaaatgtgacatattatatattagtatgagattaatatatattatgtgttggatgttgtattatatcatatatagtataataatacacataaaagttgtaacatatgaggagttacaaatctgaaaatagattgtaacttaaggatcacatgtaattaagtgagttattacatatgaaaattatggaattaatgtgataagtttctaactgttagaaactgttacaatactcaattatatcatttaaatgagtattgggacgttggagaagatttaactcggagaggagttacaaaaactcaatttttagttttctaaaaacaattgtttaatgattgtttttatgttgatttatggttgttttcgaacacttggaaccaatttttgaaaacatccataaacgtacatgaattgattgagcatgtttccagctctcttgtgcaatgtttttattttattaaacaccaattaatgtgctggtaacaaccatgtggtgaagagtatttgattttcaaatgtgatcctcaaaacactataaatagaggtcttgagttcactttgagagaaaacaagtttctatcaagagaacacattgctagaaacactatatgcttgataaatcgagaaagctatttatattcttttcttttccctaagtgctcgtgatagggggaaataagcttttg

SEQ ID NO: 342329 - DNA, 686 bp, Cannabis indica
aaaaagggacatttattaacttaattgttagatttagggccattttgcatcttggtaaatattcttctgttgttacactgaatttcgcaacaactgattgccttttcgatgattccattcaagtgttataccacaagttcaacaaagccaaagcaataaaaataaagatgtcgcacatacatgctgctcacccaatagcgcattagatatgaggttcacgaattccgtgttataagacttggtatgaagccgatcatgtcctattcatcataaatcttaggaaggaaagtcattgggtttttggtcgtcttgatttgaatgtgggagttttatttctttataattccttgaggactgccaaaattaattctgtagctaggaatgcaatgaaggcttattttgttttactccctttatttttgatctgcttaggttttggaagaataggtcccgtgttcctgatttaggttctgactctaaagctcctctaagagttgtggagattgctgggcttccatctcagcagaaaaagtaagttgttgtttttaagtttattttatgttgtattttagttgtttaactatttttttctttatctggttattagtgattgcagagcatttgtggctgcatttgccgagttcttcatccatggaaaagatgttcctgttgattttgacattgaa

SEQ ID NO: 342330 - DNA, 564 bp, Cannabis indica
caccaacgagtgcaaaaacctaaaagacgaaattgagaacctaatccgattaggtcacttgtatgaatggatcaaaagtaggttactgcacttaaatctggttccaacagtaggcccgttgctttatggaagaacaggaggtatgcccgaagggtaggtacctcccagaggagcacttcctctgcaggcgcctggattaccacctcggtcgaatggaagactagccatgatctttggtgggcctcatatttgagaaacaaccaagagcgagatgaaacgttacgctagagccataaaacacgatgaagtgtgggaggtcactcaactctcagcgcaaaggcctagactcatggacaaacctatcactttcatagaagaagacgcgaaaccagtacgcttcccccaccatgaccctctagttatagaaactcccatcgccaataaggtcgtggctagaatattggtagataacaagagctccgtaaatctattattcaaagaagcattcatggctatagggctcacagacagggacctatcgcctagtggttcacagctcacatg

SEQ ID NO: 342331 - DNA, 1002 bp, Cannabis indica
aataactaaatgttctggatttaacagattttgtacacattaaaccataaacatgaaaactacatataaacataaatgacttctaatcttctattgataacaaatcaaattatattgaaatgggttaatttagggcataaaatccaccggcagtggatcctactctatagaatccaagagatgcaggggttccaccagccacaaatcctaaacaaccaccaaccgtaggtcagggtgtgacgactcctttgagtggaatcgcacctgctgtgcaagacactggaaatacaagttcagcagccaattagggtattcccaatactggagttctgccaaatgtttaaacaaccgtgggagatgacaccgacatccaaaacctctgtgctgctcttggactcatgcaaggtcatactaataccttgcatcatgaccagaaggagctctgtgttccagtgaacctagcattttaggatcaatggcttctgttcgttgaatggacggataaagaggtggaaacgttgagggctcaacaagcagccattgacgaccgaataagataggccaccgtgctgatacgaagagcctatcaggctaccaattagcaacattcaaccattatcccgctgggtgagtcagacaaagatccagccgtgaacgcttctcaaacggtgaatggtcagccactcaatcaatccccggtcacaggttccacctgtgggctaagtagtaggcggacaaaccttatctagtaattcttcaagaaaagttgtacctaataactctgcccagattaacggtaatgatcaaatgatcacccagtcactgagaaaacctggtgtttctatatttaatagtctgggaacagctcatgatctcagggatgatctgaaaagaaggagagggttagacgagcagtatgtcgcaccagccactcatcctagggctcatgttaaaaatcccactcaaagagatcctgacgtgactctggtcggccaagagact

SEQ ID NO: 342332 - DNA, 436 bp, Cannabis indica
aaaaaacagaaaacaatacaaaacatgctcttaactatctatttcttggtatgatacactactacaaaataatcctttagaggtactttttttttttcagctgattactaatcaacttatgtcatagagtgtggttgaatgaaattttaataaaaacatatacgaaatcagttattttgtcctatgacagcattgagtggagctttttggattcggtgcttagaaagattcgtttctcggatacttggatttccttggtgataaagtgtgttagttcggcaagatacaatgtgattcatggtgggagaactatggggccgatcactccatcacgaggtatttgtcaaggtgatcctttgtcaccttatatttttatctgtgtgcggaaggtttatcaactttgattaaaagatatgaggatatgggtctcattcac

SEQ ID NO: 342333 - DNA, 739 bp, Cannabis indica
ttgaccaacatgtcgtccacgtccacttccgtgttccatcccagaaggcctttaaacatccagttcaccattcgttgatatgttgcactagcgttcataaatccgaaaggcatgaccaggtagcagtataccccgtcatcagtcttaaaggtagtggattcttgatctgaaatgtacattttgatctggttgttgtagccggcataagcatccatgaaggataatagcttgaatccggaagtggcgtccaccatttggccgatccgtggttgggggaaacagtcttttgggcatgccttgtttagatcgataaaatctatacatacttgctatgtcccattcgctttaggcaccagcaccgaattggccagccattctagataatacacatctcggatcatggcactagtcagtagtttgtccacctctttctccagggcttctgccttcactgggtcgagggggcgtcgcttctgctgaaccggtggcatgtccaggttaacgttaaggacatgggttatggcatggggacttatgccggtcatgtccccttggcaccatgagaaaacattcgtggctgcccttagtgctttaattattttttccttttcctctggctcgacttatgccggtcatgtccccttggcaccacgagaaaacatccgtggctgcccttagtgctttaattattttttccttttcctctggctctagattttttcccagccggaggaccttg

SEQ ID NO: 342334 - DNA, 571 bp, Cannabis indica
tttataatccatattaagccatacaaaattattctagaattttctgagaagcctagctatttttcataattaatttataaaataaatcaattaattcataataaattaaataattgcaagaaaattctaaaacttcatagcagacctagaaatacctaagtaagatcaaaaatctaagaaaatccagaaaataaaccacagaaggtgttgatcggatcttcggcggagttacgccggcgaacccttcttctcttgcgacagcgagcctccaacttcttatacagttgcttttcacgcattattttgatgggcaaagcttcctacagtgcttagaacctccagccgaccataaatcacgaaataatacggtccaacaccgttgtcttcttcgttgccggtgtaacctttaaaaatggagtccaacaatagcgattttcgttcagggctttaaagctttgattctccacgtcaaaagagatccttggggtcctatgagcttaaacacaatgttactttaaacccaaaacagttcaaatacgtttaaattcgatattgctcaagaacatgcttg

SEQ ID NO: 342335 - DNA, 751 bp, Cannabis indica
gtttatgcctgttaggatacattaacagcagtaatagtatacgtagagttgtactgattactaataaagttatgtaggctgaaatattgatcgatgctgtgacatcaatatggccagattatgaataccgtattgagtataggctgacattatggtcgatagtattgggggacacggggatagggttatgatcgggtgtatgggcgccagattataacccgggatattattatgttatgcttttcttaccgagtctgttgactcacagtgctatttcaatgtgtatgtaagggtaaggctaaagttgaggagccgtgagagcgagccgatgaggattgtacatgtcggggcggttaggtctcgagcgtacgatctttgggacatcagtgcttttggtgtatagtcgcttggcgacagaacttttgtatatgaatagcaaacttttgtaaatgtgttttgtaacgggatcccagtattttataaatgtattactttatatttctaattaaataagaaaattttaatttatctcgtttttcgtgaatctcgttgattagcaacgagctgcacagtatgttaaaaatcacgctaacatgcctaaatttgttagggtgttacattttaatatcagagccgtcaggttgtctactaaagatcgccacgacatgtactatcatcatcaacagtcagatcgtttcacggtttggtaagctttcattgctttagtagtttattttaatagtatgattta

SEQ ID NO: 342336 - DNA, 665 bp, Cannabis indica
aatttttaaatgtctgacgtttgttgattaactcatggaagtcaaaagtcaacttgttcatgacataatttgatgtaaagggcagaaaagttggagtcaaactatttaagatcaaacttacttcagtttcctaatctacaatagctccatgattctcagcttcctagaagtaacttgccatctggagcaggtgatcacacacgttctgatgaggtttcatccgtgcattgataaaattcttggtcacctcaaaccgagcttgatctgacaccatcccaaacagttcagtcaactggttcatgatatctgcagctgtgagagcatttgcaaaccttattttcaaggtgtcgaccatgctagatagcataaagtatcgagctttgttgttagcattatgtcaacgctcaaacttttccttgactgccttgttcacattctcacctggctgctcaggagcctctccagtcaacacaaacagggtattttcacctatgagagccatattaatgttctctttccatttgacaaagttagcattgaagagcttgttgtcagttaacattgacaccatgggattgttcatagtcatattgggtactacaaatatcaataaatagaaatcgaataaggttcaatacaaaatcatacacattcagaaattatta

SEQ ID NO: 342337 - DNA, 976 bp, Cannabis indica
atatttaggtttgttaaaaacttaatttttcaaatttataggtttaactttatttaattattttcaaaattatttatttatttatttaatttttgcaaattaatttaattatttaattaattcaaattaaataaatcttatatccatctatggagtttgttacatgtgtgtggttttatatattgtttattatcaaaacttattttataaaacatattattgtttgatctaaattcttatggttaacttgttgacagatccaatgatctgatttaaaccaatagttcaattatcaataggtcaaataaataatttgaaacatgtaaattttgcaatctactttcatctgtgtataaacctagtaacatgataggatgcatccaaattaatgtgcctgtgtgagcctatatgtttgctttgggattagatgcatatattgagctcatatattttttgtaattaaaatggactaggttgctaaaataaaatgatcactgttgatagattttatttaggcccaattattgttgagcttaatcaatgaataacagttgttgaatttaggttaaattcctctccttcgggtcctgtgtgagagctagggggacattagtagtgggtgcgacatactgaaccagccctccctcacatgaacaactccaattgtgaaggcatgtttgccttatttgaataactgtagtaggttactcacactagtataacccaataaaattgattagcgacataattaatttcgaaatatatgaaattaattttttatcagattactaaattaatttaagaaaaacacaattagtttaataaaatatattcaagataaactatatatatttttctgtatttaattaaagtaagaagttataaccaatcagatttttctagatacttaattatttaatttttatagaaaatatatttaagtttaaaatcacttattctaactaattttggatca

SEQ ID NO: 342338 - DNA, 1690 bp, Cannabis indica
tggtaaaatatttccaacagaaagttcttcgaaataagaccattgccttggtcaaggtgctctggagaaacaacaaggtggaggaagccacctaggagttagagtctgacatgaggactcaatatccagagctattgatgttagatttcgagggcaaaatccttttaacggagggataattgaaatgtccgctttaataatttgtattagtaaaggcaatcagcactaatttcttttattttgataattatttatgaatttcattatctgtggacctcattgttagaaatgggcattagagttataatttctcaattctagagattttatgaaactctaggggtattatttgacttatatgtgaaatatgctatttttgtaatttttgctcggcgacaacggaaaatgcgatgggtgtccagtttgatcacaatggtaagtttagaaccttattcttagtgggatatttattggagaaaataaaataccgaggttaagcggggttatgaaatttgaccattttacccctagttttgaaaaatacctaagtaatgggtttaggagcattttagtaaaatgccaaatgaggagttaggtggctgcctaggttgttgacacctagaaatttttatttcagcaagggaataattaggaaattcctttttgcattttgagaaaaatcaagaaaaaccgaaattagagagcttatccttttctctctctttctttgttcggccaacccaaaataagaggaaaccatctaaattcttcccaaattctgaagtcaagctgattaccaagtgttcttgaggttgaggtaatccctagctctttgctctttgtgtttttaagctttaaatttggtttctagtagtgatttttagtgttagtggttgttagggttggaaatgcttaggcttcgaattctatgcttaatttgagttgaatatagcttcttacaactggttttaatgtatgggattggatttatgcaagtttgaacttaaaaacctaagctttgatctttgatggcatattatgatacaatgagtttttctgtgaattactggttggaaaatattgtgtataccctaattaggtactctggaagtgtgagtggcatttggagaagtttttagcaagaaatggagtttttaggtgagctgttctaaaccggctaaaaccgattagccagtttttgcagggttccgtgaatgttccattttctcaattctcatgcatttaagtgccttagttgggtgtttccctatttcctgagttagagtaatccctagagagtataacagaacctagagtggtgggttcgggtttcctggattagggttttgatcatgtgatttaccgagtttcattatgtgattagggcattcatttcgcacaagactttccgttcaggtcgtagcacactggaatctagaaagaaggtaagaattgtttataatgtgtaatatgaatatctgagtgtatatatatgttatgtgtatatgcatgcttatatgttgtgattcatacactaccaacaattgtacggttgctgtacagagtgcattagtaaagtgtatgatgtctgaaagtacatcgtggtgttaccaacacttgtacgggaaggtacaaggtgtctgtggtataacacttaacagtactcaaggtgcggtccataccctaccta

SEQ ID NO: 342339 - DNA, 575 bp, Cannabis indica
gaaaatacggtatttgtgaaagaaatgataagttgttacataaaataactaaattctaatttagtagggcccatcttagggttggccacttaaggagaattttagctaatttttatcttttttaattccatattatttaatctaaccctaggaaaaatcctatataaggaatgagatggctctcattctcatccaaccttagtttacctagttttcattctttgtcagacaactagaaaatttgagaacctccttctacagaattcgaatctcctcctcttcttcttcttcatatttttgagtcctatagtgaaagagtacatgcccacccatagcaagtcaagtactcaatagtgtgtaagactttgaagaatccaacacctgaaggagaatcgggctcaaatcttgataatactctgcgacagaaaggaacaagattagagatcagagtggaaggagacatattattctgttgcaatcaatggaaggttttttaatttatatgtgtttagttctattgttttagatattaacaattagggtgttaaacaacatacatgttagtaaatttagat

SEQ ID NO: 342340 - DNA, 870 bp, Cannabis indica
taatgtcccagcaaatcttgccgcagtagttgcgagccccgcagttgcagcgaccccggctcctgcgacaggagggattgaccaaagcatgcttctgcaggctttgaaaatgctcgagcagcaacgaaagcctatatataagttgcatggcacctcgccttttactacagaagtgcgacaggctcaacttccaaaagggtttcgtctatccgagtccctcaaatataaaggtacttctaacccgatagactatcttgaaaaatttaatactataatggaagtggaccaggtaccgcagctcgcaaagtgccgcattcttgcggcaacactcgaggaaaatgcccatgattggttcacccaattacccgaggcatcgatatcgacgtgggaaaccttcgtcgacctattcctcacacatttccaggccacaatgacgtataggccaccttatacgactttggccaacatcaaacaagaacctggtgagtctttacaagactatttcaaacgctttaacgcagaagtaacaaaggtcgagaaggcccccgagtcttcgcttgtttgcatgttgataacaggtatcttgccgaggaccgacttttggaaggaactacaggctcgaaggcccgaatccttagtggagttcttcgccatggccgaacctcacaaaagaatcgagaattctctagcggagttagagaaagggaaggacaagcgccggtcacccataccgcggtcacgatctcgcagtccacgagggaagaactccaggggccgaagcccaagaagacgcagcccgcgaagacagcgaagtccgaagctggccaagtctcctccaaagaaggaatcctcgccaaaaaggaaaggtgg

SEQ ID NO: 342341 - DNA, 565 bp, Cannabis indica
agagagagagagagagcaaagagagaaagcaaaagtgttttccttcaatttttggtatttttgaataaaatgaaaataacataggttttaattgataatatcagtttaacatttatttaaaatctaatttttaactaaaacaaagtccactaaaggacaagaaactaatggggcaaaatgaccattttgcccctcccacattaaaaatcataaaaggtcacttaggggcattttggaaaattctaaaatcctgactattcacgattcccaatatctaaactattgtcccgctatactaaaaatactaagatatgattcaaatagccatacaccgcgttccaatgttgccgggcacaaaatatgcaaaattatgaaatttctatatgtgacataaaaatactttctgaattcaaataaatcatcataaataattaactcaataatgataaataatttttataattaagccctttatgtgttgctactatggaacaagggttgtaggttcttagagcagatgaaccatttacgcttaataaaaaactgtttaagatagctaaaccta

SEQ ID NO: 342342 - DNA, 780 bp, Cannabis indica
cactcaaatcatccccaaacactccaaactttctagagcatcaatacatgtcattgaaaacatattgcacaacttaaacacaataatttcgctaagaatcaaaaagtgccattaaagcaccgagctggagttccatgaactcaaacttgcttttcacaacaaaattctcaatcaatccacaaattaacatataggattactagcacataatagatacttatctaacatattacatgcatcaaaatcccgaaattcagattacataaatgactcaaaaatcatgcttaactcatcaaaatctcaagttcaagaacatgaactcaacccaacacaaacctaataaaaatccagcagcataacaccattttaacatgaaaatccaacctagaaatcccatacaatctctgcccaagctcaacaacaaagcatacaacaaatagaagctcaatttccacaaaattaacacaaattcactcatcatgcaacaagaacattcaaaactcaaagaacatgctttttacccaccatatttcagaaattaaaacaaggttaagatcataaaaactaccttgattctcaacaaaacaagagcaatgatcttcctccaaaatcaagcttcaatcaaaccaaaaaccaagctttttcttcaataatcaaagttttgaaaaacaagagggtaagagagggagagggttcgggtgagagagagaattaaccagaaattatcaatctattttcctcaaaattcatttttaataaacttagaaaataaaggtctaa

SEQ ID NO: 342343 - DNA, 684 bp, Cannabis indica
tgctaaggcttgaccgatgctggtcggggttggaaagtaatttcgtactggcccaactccaccgcccacttgagtagccgcccagaggcgtttggcttttgcaatatttagcataatggttggtcagtgtacacccgaataggatgagcttgaacataaggtcttaactttcttgtttctagaataaggcaataagcgagtttctctatcgatgggtatcggccttcggcctcaatgagtcttttactgatgtaaaagactgggtgttgtatgttgttctcttctttgattagcacggcactcacaacatgctccgtgacagctaagtatattccaagctcttctttgtctagaggttttgagagtacaggaggctttgcaagttgtgcttttagctcttcgaaagctttttcacattcctccgtccactcgaatcgcttgtttcctcgcacgatattgaagaatggggcacacttgtctgttgattttgaaacgaatctggtgagtgcggcgatccgaccagtcaaactttgcacttccttggttttagttggcgacttcatatccaggagagcttgaatcttctctggattggcttcaattccttgggctttgacaatgaagcccagaaactttcccgagctaaatccaaggagcactttaagggatttagtttcatgttgt

SEQ ID NO: 342344 - DNA, 771 bp, Cannabis indica
taatttagaataaaattattaataaatttataaactaaatatattttattaagatatgattattcttatatagatgtatatttttttaatacgagacttaaaaaatgtataactaattgtaatttaaaagttatccttaattataattgaaccaaattggggtataattttttttataataaattagagattattctttaataaagtatttttatataaagattctattttatatgttgagaataactaaaaggcatcagtggtgtctaacaccctctaaaaagtcatatcaccataggtgtatttaaatatcggatcctctaatgctcatatttcgagcaacaaatatagtcacgacacgtgaacaagagctcgaaaataaaagagaatgcacccgagggaagtgaatatggtatttaaagcgtcttagaaattattatttacacttttatatttaagtcttactttaaagaatgatcaaaggggagtcaaaagtattaattattaaatagaaaaccagcgagatcaaaatattatgtatcacaatcatttcagagataactgagtatagaacatgcacattacaaaaggaaatacaggatataagaaggcaagatgagtcaccacataagatatttataatgcgagacggacctaaaaaacccacatgaaggagggtgggcatccgatccaatccaacctttttttcctcatccgatccaatccaattagtaattggatttggaaaatcatcatccgatccaatccaat

SEQ ID NO: 342345 - DNA, 582 bp, Cannabis indica
aacagaattattcttttatttgtaaagcatattctgttaaaccaagaattgccgttacataggcacttttaatatataaagatatattgattttataatcacatataattaattaattgacactatattcttaccatatattacaaatttactattatcccattttcaaaggttctagtaataattatgagagataaattaggtaattattcaaagttagtaaatttttatttaaatttgttcccacatttatttatattaatgtaatagtcttatatttttcttaagtaactattttaattttgatcatattgtttttacgaagaacgtgttttttaataaattttttttttttttgaaaagaaaatataattttttttcaaaagatatatattatagataattctgctaaagtatttaatttctttattttcatattaaaagtgttacatattaaaattggtaacaatcttccccgtaaattttgcgtgagtggttacattcaattttattgtcaacactgcacaacgctcttgacaaaaaaaaaaataccaatgtcaacattgcgaaagcttcaacaaa

SEQ ID NO: 342346 - DNA, 852 bp, Cannabis indica
acacctatttacaaggcttaacagatgagtaagaacgttccatactagggtacaaccactataccacatacattacgtacctcactgtacgagtgttggaagggtttgtttcgtaccctgagtaccattgagtgatataccacacacactcagtacttttccgtacttgtgccggtatcactgtaatgtactctcaaacaatattcactataccaatgcactctgtactataactgtacaagtgttggtagtgcaactaacacataagcatgcatatacacttagcacatatatacactcagatattcatattacatattatacacagttcttaccttctttccagattcaagtgtgctggtcgacctgaacggaaagtctcgtgctggatggatgccctaatcacataatgaaaccgggtaaatcacatgattaaaatcctaatccgagaaatccgaacccacaaccctaggttcgattatactctctatggattactctaactcaggaaatagggacccaactacgacactgaaaaggacgggaattgagaaaatggagcattcgggaaccctgccaaaaccggctagccggtttactccagttcaaacccaatattttcatttcttgctcaatcgtccaccaaatgcaaccatactttccagaacacctatacaatgcatatacaacataatccaaccagaatttctcagaaaaaactcaatataaacaaacatgccattagagatcaaagttaagatttctatgctctaacttgcaccaaaatctaaaccaaacattagtatcagctgctagaaactaaattcaactcaaatgaaccctataattcga

SEQ ID NO: 342347 - DNA, 1204 bp, Cannabis indica
acagtttgagaatgaaaaatatattataatatttttttctttctagttgaataaactcacatacaacaccttagaattttgagcctccttcatacacatgccaatattgcagtgccattttatggtatgaggaacgaactacaaaaacaataaaggtcaagcatcccaattcttattttgttgtatggaaggacgcgtacaaataccaatattgaaagaagaacctccattactcaattttctcctcagagcagaatttggacaaaagggctttaaatttcaaaaaaaaaatataagggcttataactctatgtttgcattcacattaatgggaggctgagttgatacaacaatcaaccaatcaaaaggaccttatatttttcaaatgagtggtcagaattatcatcttattggttctttgttcccagaaattgggaaaaatcacaatttgctcaactatacatctataatactgaaaatgaaacatggaacagagttgtcacattgcaaaaatatgagaggaagaaagatttagatggatacaaaatcaccaagaaaaactcaggacaaacatttactctggtttaatggatgctgctcaccgaggtgattcaaattgctcaaaagtgggaaaaataattattttgccttcgtcacacactgggtgtaataccctaagattataaaatagattagcaaaaccctaactagttaattgagtattattgtgaaattatattattatatgtgaattaatatgagatatgacatgttaagaccccgttggtgagccaggggcattttagtaattttgacacgagaaggataaaactattaatttaatttaatacgtgcttatagactatattattatatagtatgcttgttttgtccttcttcaggtgtgttctgacaagtcggcgtggtatagtcacaaccgggtatttcggaccgaaccgggttcggggccgaaaaaataattttgggattatttattggtattttaataaagtgtgattaatctgaaatttaattgggtatatttatgttggaaatgactatgttatcctttgaatgcttttatgtgttatttggccctaaggggcattttggtaaatttggccttttggattaattgcaacaaaaaggaattattttgcattttagaaagaaaattctggttattttctcagctcttggctga

SEQ ID NO: 342348 - DNA, 525 bp, Cannabis indica
acaaaatcaatatttatcttaagctctccatctttgatgatttactatcttgctactaccggagcttgaattgctagattttggattgaaaataaaaaaaaaataataaataatgaaagtgagggtttcatcgcaccaaaggaagaggattcattcgttcttttattttaaacttttaaaacatatataataataataataataataataataataatatattactaataatattaattttattattttttttattaattatagttattttattatattttaaccactaagaaatctttaaccctatgatatttggtcaactttgagtatttcaaaataccttgatatttttaaaatcaacttatctcaataatctcattaagattactaactaaaattgctgtggcacttggcttctaatcgggtcttcaaggtcgccgaacataaaaataattttatcgtacaaattgttggaatttattttaccagaattttagatctactcacaagtatgttgtttaaaca

SEQ ID NO: 342349 - DNA, 943 bp, Cannabis indica
cacctgggacaaaatcccaagttccaccaacaggggtgggccgtggcatgcccagaccatgccgcgacacctgggttgaaaacccagaaatcagttatgaacaacacgaatttcagcaacttaaacacttccaattcatcccaaatcttgatcaaactctcaaatcaacaaatagggttgctagcaattaaaacatactcaattaaacacatttcatgcatcaaaatcctatatcaaactcaaaattcagattgcccaagagtataaaaatcaaactccaaacttgcgaaattcaagctcttgaactagagcttcaaactcaattaactcaaccaaattccagcagtaaaataacataaaacccaaggattaaagctagaaatatccccaatacaccatctaaagctcaacaacataaattccaaccaattcatgtaatttcacactcaatttaccaagattaacacccaaaaccatgaacatgcaattacacaaccacaacaactctaaacatgcttttcaacaaataaaaccagcaagaatttcaacaataaatctcaaataaactcagcaagaaactacctcaattccaagcttaaaatccttctaatttaaagctccaaaatcaagcaattctctcccaaaatcaacaattaacttgaaatttcaaaagaaggttagagagggagagagggtcgggtgaggggaagaaaaatccataattttctttcatttactctcaaaattccattttgtcaaacatagtaaataaaggtcaaaagaccaaaatgcccctagggccaattcccacattttcaaacatacaagggcataattgtcatatcacactcataaattttcaaataaaattcaaattatcacccataaacaataatgccaaataattcaatccaatttgcatttcgggcccgaacacagttcg

SEQ ID NO: 342350 - DNA, 763 bp, Cannabis indica
tgtgtgaatatgtggattggaagaagttgtctcatctttttattaagtatggctcattgtgaagttgaatgaatttgttctttgctcaaatgatcattgctcacttgttaattgattaggccactcattgtgtttcctctttacaagttgaacatgttaattcttgagatatatcatttggcatgtttttgattgaaataaaaataaatctcatttgtagcatcattcgtaatatcgtggtgatctgattgttttgcttggtcaatctctcatttgtttatatctaatatccatatgttttaggtcatgttgtgagatggtttgactttcttctttaatgttgtaatagatactttggaatttctttgcaatgaggagtctatgttgcattttctgtcgccattcagggggagctctttgttaaacttcttattttcttagggggagaatttggtttaggacaatattattgacatggattatgctcaatgaagggggagaaatacttatcctttgtgtaaagtggtgcatttgctattagttgtttaaagtgtttgcttttctgtttgtttagactctgttatattttgatggtttctttgttttgcactggtattgttgtcattgaccataatttgtcaagggggagattgtaagaactattattttctatagtgacaaattatgtccagttgctttccagttgcgtctgagactcgtagtgtttttttttggagttcgtactgttagtgttagtccacgt

SEQ ID NO: 342351 - DNA, 1548 bp, Cannabis indica
tatatatcttggtgttgtttttttttttatatagttttctgcctttgttgttttttggttttcactaatctattcacccctgtttttctccgattattgtttgtgattacttaatcttatcattgccaattgtttgattgtttaaagtttagttgaattggttttacactattagtcgtaatttttccacattattctttacaagtctaacatgcttattcattgatgatttttttagaaggtgcatgtatattgttaagtctttactattagccgtaatttttccacattattctttaaaagtctaacatgcttattcattaatgttttttttagaatgtgcaggtacattgttaagtctttctttgaagcaatactaaatgatatttaaagttgagatcttaagatttaaagagtgtattttattttattaacactttttcgcttcatagttgctgattatagaattagaattgaatataaaattttgtaagcctaaaataatacactatatattgtaattatatttgtgttattaataaatttttacttatgctcgagttgtttgacgattataattatgatataacaaatatataataaacttaagattattaaaattttaaaataataaaaaggggttattatactataggtgatggtttaataccgtcgcttataatactataaggcacgatttaaaatcatcgcctatactataggtgacagttttaaatcttgccttatagtataggcgccagttttgaattgtcccatatacttcacaatatacgcaacaattttatatcgttgagaatgctttttgggcgacggtttcgaatggttgccttttctatccgttttgcaacagtcgaatatgcgacggttataaaaattgacggcaatactttacctaactgtttaagaccatcaggaaaaaatatttctttaattgtgtgtgctctctattttacttagttatttctaactttcatcttgtttatatatatgagcgagttggtcagtttttcacttcaacaagatccatagtattttagggacactttgcgacatggaatttgtatctataaatattggtataaaaataaaatttgctccatttgtaaattaataaggttataatgattcccggtatcatcaacatgaggaaggagtagaattgttaggagtaggggtagacaacatccaatcctatccaattgaaccgaaccgatccaatccaattacaaaaattggatatctaattacaatttgattggattggaggctaaatgttggattctaattgaatgtcaatctcaaaatccaattaaaaaccgatccaatctaattacatttatatatattaaaaaattatttatgtttatttatataataaaaaaatgtaatatatattaattatatttttattgatttttttgtgttaaatttataatagatggttattttgcgtatttattttcatgatgttttgttatattttattatttagaaatattgttgttttacttatttttttattttgaa

SEQ ID NO: 342352 - DNA, 1447 bp, Cannabis indica
gagatgtatgttgtagagttttttctgccaccctctcggaagccgcctaacaatggtatttcaagttggcacctagaaagttcaactcatggaaggctttccccagcacctaccccgagttctagcttgcggtttaaacgaccagatcgccgctgcatgatccaatatcctgtaacccaaaaccttcaaccctttagaattcaaacaatatcaacatcaatatgcatatgttattcacacactacttcttctcatcacacactataattgtctaaacaagtaaggcaataacaaataacataaacacttactataccatgagtcgacatatcttcccagcaaatgtacatattcgacaagtcttcaaaacctttaaaaacaatggctactcagataccaagttgtaacgccctagtccataggaatgccaagtgtgtgagcttgtcgtaagcttcgaaatggtatatagaatgtctaaaacagacactcgagtgaaaagttatggcaaaaatatgattttggactacccgagacaactccaaatggcaaaccggtttatcagtttttcaaaggtaaaaaatgttatttttctagtttacacactcaccgaaacactaccggaacctgtcgaaacaaccccagacttcataggacacatatataccatacatactaccatacttacgcaatagaaaataaaatcaagcacttgattggcaaacgccactaatgttcagacttaagatataaaaagttctaaactcaatttctaatcaaaaatcacctcaatttcagcaagaaaatatcagaactagtcccatgactacccgagaataatcctacaaggtcagaaccttcataactattctaattcgcaaaacccctatacaaaactaattgaattaaacttaaaacagaattaaacttttcctttaagctttcccgctctgagaattcactatcctgccactatcagagcttcgatcgctaaatttcaagttaaaatttgaagaaaatggataaggggaggtaagggtttcgtcggagaacgaaggttcgttggttttctttttttttctgtaagttttcatatatttttttttttgataaatcaatgaattgtattgcccaaaacaaatttgaatacacactaagagcaaccagccggtcctcaatctatacaatactttctgcactatactgctatatttctctaattacaaagctaagaaccattctctatctacacttgagattttctttggtagaacaacatgaatccgagtccttagactccacttaatgtcgcaaaccacctgctgttgattaatctgctcttgctgccatatgactttattttgaaccttccagctactgtacacaagtgcagcaactgctgcacaaaaaacttgtttttaaattttgacatctttgccttctcaatcca

SEQ ID NO: 342353 - DNA, 965 bp, Cannabis indica
gacaaaagtccttaaatttaacaatcttaatagttcagggagaatttttaacggccaaaaaaattcagtgggcatgatttggtatatgtcaaagttcaggtggaaaaattactaattagcctaatttttataatctgtcattcacattgagaaagagaatagtaattagtattaacaattgggtaattaaatcatcatgattcttttccctaatttctcatccttgattaaacacctttattgatttctttaattttcttgtgtttttttttattttaaaatctatcataattatttatctaccaaatagaatcataagtctaatttagtggtattcagttcaattccctatggttcgatctcactcgtgtgagtttattacttgaacaatgatacgtgcacttgcgtattattaaagtttgtcacaagtttttggcgtcgttgccggggtattgtttaaaaattgatattacaaaaattagattaaattctactttggttaattctttctgcttattgctaactatttcttttagattgtctaattatttcaggcattgggggtgcatgcgacgtcaaggacaaagtgtaatactgccggttgatcttgaaattgaaaagacttgtagaagaaatagaagaaacaaaaggcaagaaagaagcacagcaagagctaaaatagaagaagtcatggctgataacgctaatggcgataataatggcggatacaatggtaataacggaggtgtcgtagaagaccaggcgaatggtcgtattccacctggtcgtagcctgacgtgctatgttcttccaactttgatgggggttcagtcttgtataagaccacccgccgtagatgccaacaactttgagataaagccagccatactccaaatggtgcaatcctcagttcagttcggtggactgcttgtaacgccccaatttcccgagacgtcacactagct

SEQ ID NO: 342354 - DNA, 869 bp, Cannabis indica
tatgcttgaatatgatttaatttaatagtagtaacaaaaagtaacgaaacgtaacttaaaatatttaatccgtcaaaaaatttatatagtattttttttaaaatgaatacatataatatttaagtatatgaaactaaaaatataaattatttatgccataaatatattaaatttctcctcatggattgagggctactattgtaatgactcaacttatttattgtggtcagaatcatcctagtacagtaggtacgttttgtaggtgtcaggctacagaaatagtattgttcacacttctcacaaaaggagctccgatttgaattctgctctccattgtttaaaaaaattaataagagcatctccaaagagacaccaaatttggtgttacactatcaccaaatttggtgtcaaaaattatttctactccaaccacaacaccaaaaattacactaaaaaaatattccttattattatattaattttttaataaattaaaaaaataatatcatattaattaacaaaaattaccacaattgttatatttaaataaacttactaatgtgattaaatacaataatactgtaaaatcggcaaaattcgataaattaaaatatcatattgcaataacataaatattacattactagagaacaaacattacattcatgacaaaaaaattacattaaattaaattaaacttgaaacacacacttaaaattaattaaattatattaattttgtgagttaccatattcgtcccacaagtgttcgattaatgcatttcgaagctcaatgtgagcatctttatctttaatttttctatgtctggcaagaaattcttgaaaccgagcattatcatcttctaccat

SEQ ID NO: 342355 - DNA, 732 bp, Cannabis indica
ttaaataacatacttgtgagtagatctaagatcctggtaaaataaattccaacaaaaactgctatggatgatgaaattgtttctctcaaacgcaacaaaacttggatcatggtcccatattctgctgcttataatcttgtgggctgcaagtggatattcagggagaaatttaatgctgatggttcattttagaggtgcaaagctagacttgtggcaaaaggttttcatcaacgacctggacttgaccttggggaaacttttagccctgttataaaggcctctactgttcaaattatcctaactatagctgtgaacaagggctggaatattcagcaactcaacataaataatgcttttctcaacgaccatttagaaaaagatgtgtacatgcttcaaccagaaggatttgaggatccgaacaaacctaaccatgtgtgtaaattgctcaaatccttatacggcttgaagaaagccccaagagcttggtttgacaagctgaagaacacattactgagctggaattttcaaaattccaaagccgatgcatctctcttcttctacaaagatgacaaactcattatatttgttctcatcaatgtagatgacattatttgtaatatcccaataagcttaataattaataattagggtttatatttatattatgagttaaccaggtaatgagtgggatgataatctaactaatttagttcaacataaaattttaaattt

SEQ ID NO: 342356 - DNA, 753 bp, Cannabis indica
tttaaataattttttttttatatttttacagttttctataaaaaataacaagaaaactatataaaaataatatgaaaataatatctaaataatattaaaataactaccaaaaatagcatacaaataacaaaaaattaataaaagtacaacatacaaataccgtattttttacaaataaaattaaaaaatcgtaaaaatatttaaattctatgaaaccgtatttttataatttttttgttacttttgtgtatttgtgaaataatcccttaaaaaatgattaatagtaaaaaaattacaaaccgtccaacccgaataaactgtccaatttaaaccgaataaaccgaaaaaaaatataacccgaataattttacgaaaaattcaaaccgttcaatgaatatattgaacgggttgaatattattctaacccacccaaataaccccgaataaaccgatttgcatatttcttactaaattatctataatatctgttgaccgaggttttcgacaaccaatataataatagtatttaagaaagctataaagaattaatgagagagatttttacgtggttggggtatttatgagccttagtccacgagtctatgtatttatgagagtatttattacagagaatgttcttggtggttttcctttctagttcttgtgaaacccaaaattctcgacccatgccttaatgagtttggggggtatttatagtgttttcgtggggtgatccctaaaattgaggtacat

SEQ ID NO: 342357 - DNA, 1006 bp, Cannabis indica
agacttagtaagaaaagcataacataaaaacatactatatcctgggttataattaggcgccgatacacctaaccataacccaaattgagtcaggaacgttcacgacaaagtatgaataactacgaatccagtctatactcagtactctagtcgtactgatgtggtagcagataactcatactatctgatagcctagcatatatctgttggcatctcgatgcaactttatgtacacctcattgttgccctgatatgctaatctgatggttatagattttcctaacatatatctgttggtatctcggtgcaactatatgtacacctcaccgataccctaatatgttattctgacggcaactaacatgtacgctaaacatgtataaacatatgcataacattatactaatcttaccttgattccgaattcaggtgtgtcggccaacctgagtggaacaactgctcggcgaattacaggctcctaaatcacatcaatcataacataggtaagtgacacgctaaatcactttctggagacttaaacttgaaactaaaagtttccctatcgacggataacacgtcaatatcctaaatataataaaaagggaaaaactagggttcccaaaattgccccaaccagtagaccagttcccaaccggaattccagttctgcggggtttcctagggaccaaccggaattctggttcgtacaggtccctctgaaccggaatttcggttcagtgcaggaatccaacaaaaattcataactcactccaaacaaccccaatttaaaccaaaccttccagacctattttatacaacctaaagaacatattcaaggcaataaaacactattataagctcagaaacaattttcaccatgtgagagcaaagcttgagctcataagctcaaactttgaacaaccctcaacacaagccaccaataagctcaaaacaacttaaataaacataatccaactccagaaacaaactcaaacaccaacagcaa

SEQ ID NO: 342358 - DNA, 786 bp, Cannabis indica
aaattattattttccattcaaaaaaaaaaaataataaatagaaaagtaaattgaaccaagaaaaccatgcttgcttaattgcctcttactatagctggaccaagttaaatgtttgccatttattttatatcataccataatttaaaataaatttatcttttacaaatttatttattatcttaattaaacttatttaaaaactaattttaatttaataattataaataattatcaaataaaatacattttaaatatattttattttattcaaccaaccaccaaaacaagatacaaaacataagacaaagcctcacaacttaaaagttgtttattatgaggattacatctttcttcatagctttgaaattagaaaagttacaacaactaaatctagcccttaagattaagcttaaccgttaaactaatggctttagccgaatcacaaataccctcaaatatacatttatttttattacccattatattatatactttattttgaaaattttattatttctatcattaatgattatttatttaacttttaaaaaaaattacattgtaactgccactaactacaaaaaaaaaaaaagacaaaaaaagtaaaagtatgaaattgtaacaataaattctatataaaaaaaaataatgtagtagtacaaaaagataaataaaattgtcaaaactaaataaaaaaattgtaaatacaaaaacatattgagaggagttgatgttgttttgcatattgcaattaaatcaagggtaaatactattttggaccatgtg

SEQ ID NO: 342359 - DNA, 490 bp, Cannabis indica
ctaggtttaggttagaattgtatgacattaaaataatatgattgaggtaccacttgatgtgtgtgggcactactcatcactcaaggaatttcgaaatttagagagaagaaaagagagagaagatggcgtgtggccttttctgaaggaaacaatgttcaaagttgtgtgtgtgttgtatgtttcctgaagccaacactttctatttatagaataccctctaggtttaggttagaattgtatgacattaaaataatggaaactacaaatggtatttcttgtgcatagtggccggccatacaaagggaattgggcctcactttgcaactttcccattttgttattttccattcccattttctcaaaaatgccaattttccaatttaaccttttaaatgccaattctaattatttaataacttgaaaataattattaaataatattgccatttaatatatttattaatttagacatataaagtctcttaattaa

SEQ ID NO: 342360 - DNA, 491 bp, Cannabis indica
tggtaaagccaacgtggttgctggtgccttgagcagaaagggtcagagttagataaatactgtgaaacaaatctctcagtagctagcaaatgagatgacccgagctaagattgagttggttgtagggtagttagctaatattaccctgcaatctactcttttagagaaaatcaaagaagtgcaaatgcaagatctagagttggtaaaaacccgagatagggtttcgactgggaaaccttgtgactttataatagatgaaatgggaatgttacgatttacaaatcgtgtttgtgtgcctatggacgatggtattaaaagagagattattgaggagtctcatacgactccttactcagttcatacaaggtcaacgaagatgtatcaagacctaaaggccatgttctggtggccaggcatgaagaatgacatcgttgagtatgttgctaagtgtcttacctgtcagcaagtaaaggctgaacatcagagacctg

SEQ ID NO: 342361 - DNA, 662 bp, Cannabis indica
aaagtactttttaattaaaaagatttttttaaataattacaaaggtattttcatcttaacctatttttgaaaaatcgcatgctttggattttagttgttcagaacttcgaggcacatcattagcattaaattctctgacttttctcttttgcaatgttcccatccattagattagatttctcttgatagaacgattatcagtaattgggtataaaaactaggacttacaatcaattacaccattttagtatttcaaaccttcaaatcttctctataaatcccggttgtttcctcattagaatttgcatgccctcattgcccttcacatatttcttgcatatctcaatcgatttcaaccatcattctagagatcttcaaaattcaatctgacgaatttcagaatctcaatcatcaagttttcctctgcccaggaattccaaccaaaacagtaagtgatatactctcatcttcttaattgtttcctttcctaaactcatgatctcgctttcttgattgatatattttttatcttgctgtttggttatttttaggtaattttattttggtagtttgaatagttttagggttttaaggaaaagtttaggttattcaattcataaattcttaggttaaattattagattttccagaaactgggataa

SEQ ID NO: 342362 - DNA, 985 bp, Cannabis indica
tttttaataagttgatgaagtaattttagatttatatcgaactataatttcacttaagaactattttgtaaatggccacaaacaaatttagcttctctggttattttattggcaaaacgataatttgcttgttagtcttggagacaagataacaatttctatggagcacccttttgagttttggagaatgattttaaaatagttatcaaagctctaaaagggaacttgctttaaatgaggtacatatgttaatgtaatagattctctaatttattttgagttgtaatttttttactcttaaaatttataattttacggctcataatatgactaaattagcgtatgctcagaactttattgtacggttgagttatcaaccatatcgaagatcattattttgtaatgactttgagctctaattttctttttataaaccatttttttttaaaaaaaaactatgacttcaaatttagttatattaaaacattatttgatggagaaactaaatttagagtgtcaatttaattcattttataaacacataatttaaattttcatttaacacaacacaagaattaatcacatataatcacgttaaactcaatacacaaattaattttttttcaaatatatattaactcaatacttaaagaggcgttaagttagattaaagtgcaaagttggtcgaagataatactaaaaacagatagttttttcacagtccaagcggtttgtagtgaactcattataaattctatttttgatcttctagttcgtgattgtcaagttctcatttcttctttaaattatgttgatttaagatttattaaacggtccgccaatcgtattgctcactttgttgttaggggctctcaattcttgcctaaccggctctttttgtatttagattcatccatttaaataaagatttttttattttaaaaaaaaattgatattttccaaatatatatcaactcaataatag

SEQ ID NO: 342363 - DNA, 515 bp, Cannabis indica
aaagatacttgacaaatgaatttgggccactggatttatttgatcatcatctcaaccattggatggtatagtcaaatcatatccaaaattttactctttcaaaaatttgaagataagaaatataatattatcaagccattttacacccctatataagagcatattactctttgaatgaatacacatcttcattatatttctctcccttcttctaatttatcttccaaaatgtcttcaattagaactttgtcatactcacttgaagaagatatacatttatgtcgtgtatatcttgacatttctcaaaatccaattataggaataaaccaatccaaagatcagttttgggcaagagtggaagctgagtaccacttacccgagatgtttatgactcaacgtagacctagaagatctttgcaaagccgaatgacaacaattcttgctgcagtttcaaaattcagaggatgcattaatcaaattgaaaacaaaatccgagtggtgcttcagagcaagat

SEQ ID NO: 342364 - DNA, 573 bp, Cannabis indica
ttgaaaataatttgagtttaatacatcatcatcagaaaaagatgagaaatcgtctatcaaaattagttcgtcgctcatcgtgagtgcacaaactgctaatttatgtatagaacgaacatgaattaaggatacctcaagaaaatttgataactaactaacaaaaaacatctaagaaaaatcagaataagcaaaaaaggaactcttaggaaatataatagacagtccacgtgcaaattacagatacaaaatctattttctgctagtctccctagtgaaaactactccaatacatcaacatgtcacataatatgcttaaatgacaatttgagctcttacaaaaatattaaaagaaatttatgaaaatatttttatatcaataaactaagcaaactaacaaatctcaaaaattaactgccttcaaaaaaaagtatgaaaaacttatcttatttaggaattctatgtccttattaaacttatgtgaaagttaataatataagaatatttttatttaaggaaatatatttctatttaaagaaataaatttctatttaaggaaataaataaataattgat

SEQ ID NO: 342365 - DNA, 572 bp, Cannabis indica
agagtaattaaattattacctttgtaacatttcagtaatttgttcgggaactttgtggccatgtggccatgaagttataatatagaaataaacaataattagcactaaaaattaaaatagtatttactcgacattccagggaatcatgaacatttggtggctgttataaagggccaatagttgtgacgcattcttaaaagactcactcttctcttcatcgttgtaccattcactgcgagaagctatgtgtcgtaaaacttgaaattcttctcaaactgtttgtgctctcctagatgtgcctgcattaaattgttaaatattagtgttttataataatttcactagaatttgatatacgtaaggttaattagattaaagaagagtatacatcattctaaacagcattccctgattttcgatgaagtcacacaatgccaggttttgtaaatcctcaccaactaacatgccaggttttctaatatcttaatttaatattagaaataataagtagtctagaaataactatctagaaaatatcttatttgactaagtatcttttccacaaaatttga

SEQ ID NO: 342366 - DNA, 544 bp, Cannabis indica
aattctctttcaattgatatattatatgcatgaaatcattatgtatattatgagaattttaagtttaaagttttagggtttatataattataatatgaaattataatttgtgtgttttgatattattgtttttgatctaaaattgattatagatatctcattatcaattgtttatcaatgttcttacacaatttatttcgtgtttcaatcgagaattgatatcacaatcaattttttttaagttcttaattttcggattggttttgccatgaaatctagagatttaatctttaatacccaaaattaataccatagattgatgagaaatcgtgtcccgaacaaaacccatcaaaaatcgcaagttttcgtggtgttttttggccggaattcgtccagacccgcctggggccgaaccgggtcgtgcgacccactggagatccggttcaaggttgaagacaacctactgccagcgaagcccactctcggcagcggcgcgtgggggcgcgtgcgctgccgtccgacgtcgtttttcgacgtttctttt

SEQ ID NO: 342367 - DNA, 618 bp, Cannabis indica
ataactgctaaaaaagcactagactttgttatcaaaaacatagtatgtcgatacggcttgcctcacaaaatagtcttagacaatgggaagcagtttgactgcgaagaattcaccgacttctgcaaccaacatggagtcgttaaaagcttctccacaggcaaggccacaaacaaacggacaagtagaagcggtcaacaaaatccgaaaggtcaccctaaagaaaaagttgctggcctgcaaaaacaattggcccgaagaattgccaagagtgttatgggcctaccggacaaccccaagaaccacaaccggccactcgccattttcaatggcgtacggttgtgaggcaatggtcccggtagagacgctattctcatcccacaggagaacaacttacgatccaacaacaaacaaggctttattacaagaagcgttagatcaaattgaggaactccgggaggataataggaatggcggcttatcaaaagaaggtgactaagtactttaactctaaggttaaaagtagaaaattcactattggtgatatggtcttaagaagagtgttcccagccactcatgaacccagagtaggggtacttgggccaaattgggaaggaccat

SEQ ID NO: 342368 - DNA, 1334 bp, Cannabis indica
attaaatccaattgggtaataatagcaaaattgggtatttaatggaaaatttcttttatcacatgcatataatcatatatatatatacattacttaattattatttattgtaaatggtctggtacagtttaacgttaactatttactacgaaccacaacgaaactattaagtggtgaacggttcggattaaccaggttcttatagtaaatctgcttatcttactcaggccttggaaagggctcccttttgtgaggttgctccctcactttgaaatagtaaagttttggagcgacataaggttctttggtggtgcattctctccaacgccttccctgtcaggtttgtaattaggaaaagatttcatatcgaggaggcgagatgccctttgtgtgggtgggaagaggaaactatggaacatttatttcttacttgtgatgtggctttccatgtctggcgatcttctccttggggtatttatccgatctgtgacactggtatccagatgtgggactgggtcaaattcattttggacttgaaatataaggggattgatgtggaggaggttttcatgtatgcctcacttgtggtcgacaccatctggcgcactcgaaatgagaaggttcataataatctcactttagatgtgaagaagtgcattgactctattcgattttctttcgcagaattacatgctactattttcccttcccctgtcccatgcacttgatagcatgtgtatagcaattgttgccaggaaccacttaggcgaggtggttcgagttcatacgacttgtcttgacttttctgatgctctttgtggggaagcatcgacatgctgcttggctatttctactactttagaagttgatgccaagtttgtcatcgtggagagcgactcgagggtagtcatcaatgctctcaatgggaaggagtctcattgggttattggaaactatatctctttttacaatagtcaatcttctttattttcgagttgtattttctctcatattagtaggacgtgtaattttgtcgcccataatgtggctaagtgggcgtttacccacaagttatttggtgatattctgctatctaccatctcgttaaacatattatgtaatgaccgtgagatctaacttattctattaatgaaatacgcttctcttcaaagaaaaaaaaaaaagaagagaatgttgtgttgttaatatattatttatttaattgtgtgaatgaaagcactgtagcaacagtgaagtcattagtcattccttttaaaaatatatagtgaatagtcattaattatagggataattgcggcataagtccccaaaaa

SEQ ID NO: 342369 - DNA, 245 bp, Cannabis indica
aaaagatgatgcatcttattccttcaaagaaaaactgagtgccttctctcccttaacctagccgccaccctcactcccacttcttcactattgaaaccgaaccccttgagtgatagagtgagtgcccacacacatcaagtggtacctcaatcatagtgtggaagatcatgaagaatctagattcaacagagggacattcgggctcagatcttagtgatactctgcgacagaaaggatacaagggt

SEQ ID NO: 342370 - DNA, 1119 bp, Cannabis indica
aattctaagtgtttgtgacaaattacaattttaattgtgatgaagaatagaacctaggttaaataaattatatgcttcattgatttgttgcctagattactctatctccatagaactcaaagatttatctaagttaaataaattgcatgctttgtagatttactacttaggtaaaatagttaattattgagcggttccccttgattacatacaatagggagattgggataattgattgcttcaacgttatttgcgggattaatagtttgttagaaaacttaaattacattcattaataggaattaagaatgattgttgagagtggcgaataacctttaactagtttctcatatcataatctcaatattaatttgtttgttttatttttatttctgctattttaatcttaatctcaaaaccccttttctaactcttataattaattgttgcataattgaataaacatagccctctattaaaataattgaaagtattggaaaaaaatagtaaatttgatacggcatacgacacccatcaaatttttggcgccgttgctgaggactattgttttattttattattcattattagttttttctttactaacttgttattctagttgtggttttaattttcagatcctcctatagaaacatggcgatgtacaatcaacaatattatgatccatattatacctcgccacaagtgcatcaatatgatccctattacgacacttacacataaaattaacaatgaggagattattctaacacttcctatagtgggatcaatcaatatgttcaaccaactttttactatccttatgtagcaccacaagattaatgtaacaccctaactagcataggcgtgtttacgtgatttttaaacgtactgtgcagcttgttgctaatcaacgaggtttatggaaatcgtgattaattccaattttgcttatttaattaaatacttataacatttcatacaaaatactttgggatcccatttacaaaatactttacaaaaagtttactgttcattacaaaatacttgtcgctcagcgactaactacagaagccttgatgtcccgaggatcgtacgctccaggcctaaccgcctcga

SEQ ID NO: 342371 - DNA, 653 bp, Cannabis indica
aagtcgccatcacgcatgaaaagtggactaccacttcagccacttttcatttacgcaaccgccaatggcaaccggcgacgaagtcaaaccaccttgaatttgccaaaatcttctcagtgcttgggcttccgtcattcgtcatcggtgatggagcttcgagattcaccgactccattggagtcactcacaacaattcaaaacttaaccaaatttcttgtacccgatcttctacctattggatgaattggtgaaaagaaatattacaagatgaaccgttctgagactaaagctctaattatacaaagagagagctctccgcaaatccttatcttcgattaagccgcttccgtcctgatcagccgcttggaagcaagccaccacgttgggatccgtaccgggtgggaaaatcgacgacgacacaagcaaagcgaagccacaccacaaccccagtatccaaaaaatcaaacaactgcttcttgctctccatccaaacagaaacagtactcccaaaacttccctcaaattatggccgcttctcccattttaatcctcaccctcatcgtctccatcgtgggagcccattccaacgattccatcgacaaaacattactattattttattatcaattatttgtctatttgatttataaatt

SEQ ID NO: 342372 - DNA, 459 bp, Cannabis indica
cggtttcaagagtaattactcataatggtaatgaccgtatcttaattcattcacatcaacggtgataaccgtcttcttccctcattcataaacaattcacaaacaacaataatcgtttctcaccattacctcgattactatcgagttttaacatatacatattattaatctcgatcaaggtcgagtcacaacaaatacatatcgggatctcgatcataatcgagaccgtaataattatatcattaatcataaacagtgcttaatacttttcttacctcaagtccaaaatcaaggatgtgggccgacctgagtggaacgatgttcgacaatttcgagtcctatgtcacgacaaaggtaactcaataggggtttattctaaaacactgtctaaaacccgcttaaaataacctagagtttttaaccgaaatttatggtgaaaatgttgaaaattattttacc

SEQ ID NO: 342373 - DNA, 631 bp, Cannabis indica
ctaatcctcgttatttgtattgattcaagaacaaggagaaaggttccttttcttatagctcttataacagtatctctgaatatgaattcttagataatatctctagggtaaagtctcgactaaactgtttgcgaccctttgcccagtgaacatgcatcactatttatagggctgtgaacttggagacgaagtctttcccctctcgttacaatggatataaatagaaagatcgtgggataaatgtagaatacaaagatcgtgggattaatgcaaaatacactgatcgtgggatcgtgggtatgctatatctctgtaatctgatccgcaagttatagggatttcgttgatgactcacaatgcgaaagctgaattcgctaagtgttggttgctctgcgcggatcgttgatcgctttgcttcaggtatgccagcgaggcatcctattcaggttgtactctctgagaaaatactcaaagttgattccacgtgtcaccatcgtgtgatgccacgtcaaagtgcaaaaattaggataacaccctatatccaactatccaacttgttggaggtgtatgtgttttatattgtttgagtgtaaaacaagttttataaaacctattattgcttgatctaaat

SEQ ID NO: 342374 - DNA, 1590 bp, Cannabis indica
aaatgcataatttgaaaagataacccgtcacactttttgaacttagcatacagcttgtgatctcgtaaccgttatagtatcgatctgagatgcaactcatgttcctcttctgattcataataaaccaagatgtcttcaatgaacacaatcacacatctattcaagtaatccttgaatacccaattcatgagatctatgaatactaccggggcattggtgagtccaaaagacatcacaagaaattcataatgtccataccgagtacggaatgcattcttggagaagactgtcttccccttcagttgattaaaaagatcgtcaatgcgaggtaaatgatacttgttcttagtggtaagtttgttcaactcccggtaatcaatacacattcgcagagacccgtctttcttcttcacaaataataccaaagcaccccaagaagagtaactcagtctaatgaacccaggtttaataactcttgtaattggatctttaattctttcaactacgctggtgccattcagtacggtgcttttgatattggttctgttcccgataaatcttctggaaagacgtcaaggaactcgcataccaatcttgtattctcaggtcaagatgtcacagtttggctggtatccactgcagtgactatgaatcccagacaacctctgctcatcagatctttagctttcaaaagtgttatccttggtatgcgtgtcccctgaactttacccacaaacactaccgggttagcactatcgggctcaaacaccaccatcttccgtttgcagtcaatcgttaccccgtacttagatagaaaatccattcctaggattatgtcaaaatcagaaagttgtaactctattagattggcggttaattcacaactgtcaatcaagaaagacaatgatcgaatctacctagtggatactataaggtctcccgaaggtaacaaggtaccaaaccctgaagcatatatatcacatggtttatgaaaaatttcaattactctactcaacacataaaaatgagtagctcccgagtcaaataatacagcatgggaacaaccattaatagataactgacttgtcaccaatgacggattagcatcagcatcagcctgagtcatagtaagaagtcatctcaggttctgagtagtgtttttcttcagctcctctttcttggcctgaggacaatctcaaataaagtggcccaccatgccacactagaaacaagcatttgcccgacattcaccctgatggtgtttcttgcattttggacacacaggataagatcggaatgaaaatccgtggccctaccggccacctctatttccctaaaactttctattatcccctgatgttccggaagcatcagccttccgtttgatatcagggttaccaccgtcggtccccttactgatattaccacttacaggaggattcgatgacatggcggcatcctttgcagtctgctcctttgttacatgttgctcagcctcctcaacaattaaggctagttcaaccactttcttgtacaaagtgtcatgggtagttgttaggctaaaattagtctaagtttcgggtcgtattt

SEQ ID NO: 342375 - DNA, 725 bp, Cannabis indica
ttttttcgatatttatatataaaattttcaatattaattattcataatttaacattcatgcatatatcaaaatgttcaactcttattaataattaagaaatatttttacaagcttttcaaggcataaactctaacatcttcgtgtttggaagggacgctcttctggatctagagaaagtcggtcttggacttaaatagcctagctcttgaaaaggtgtgagacccatccttacgtacatactgggcccattatcttgttaggacttttgaccaggtcttagatgattaattttgaatcgagaatgtaacgtgttctttttcaaaaaccacaaataacaaaaaaaaaatcaaatttataaaattattatgttatctttgtaattatattttaaaaatatttattgaaagtgtaggaattttaagatatgattttactatcttgcccctacaccaacaaacaaaacaaatcaatattaaggtcaattttgacctttcactgttcaaagacttttcaaagtctgaatacccaaaacgactccgttttgtgtttgaacaaaacccaaagactcgagaatcttctcagtcactttctctctttctctgtcttctcttcgaaaccctagcagagagtttctctctgagaaactcgaagctaggtttcaatcaacccagaaaaacccagattaaacacaaaccagagatcagatctagaatgatctgatcta

SEQ ID NO: 342376 - DNA, 1159 bp, Cannabis indica
taatataaaactaaaagtgcatttcaattaatctcaacaccttgatgtccagatcaagggtagtatgtagtattatctttataatttgatctgacaggttgtattcaatacaacctttttctactattacatctccttagttacaaaatccttgatattgtgaaatgtctttctatatgtttactcctcttgggatattggattttactttttggctactacatctatgttagtccggaagtaatactagtagttaattcattattggtacaacgccaaaaactgcatagaaatttccataggctgaataagtatcctttctgcaactttaacattcagtcttactagtagagttagagacttcagattaatttttacacttttccaaaaatcactgctctacccccagagtaatcaccatctcataagtagactttcaagcattaaagtcagtctagaaactgatttggtgtagtttaagagtattaaaataccacccttattaactaaaatatagttcctcttttgatcttaagatttacttgattatcttccaatgttcctttcctggattaaattgatacctactcataactctcactcaacaacaggtgtctggtctaatgcatagcgaaacatacatgagacctctcactgtgaagcttaaggaattcctttcatgacatttatctttagaattagccattagaaaaatgttctagcatcttactaaagtaagttgcttgcactagactaagtaaattactaggtataccattagccataggtttagataatctcaaacctacaatattaggatgaggaagtttttttaagtccattgaatagacttattatcaaaatttcatttcttgtccttgtaatagaaaatttttgggttactccatttgaatggttttaaccatagttctcttggctttgcttcttaattccttattctgactatccattacctatttaaactaataatggatttttatcacaagtgtcttccaagtcataacagggtgggttccttgaaatcctcctactacgacaaggtaccgtgactttctatctaggaacaacaatggtattatcctcattggttgtgtcaagacaacagagacagttggaccatcttatatagaataagatg

SEQ ID NO: 342377 - DNA, 1653 bp, Cannabis indica
catacgggagcccatttcacctgcgcgaccatctcctcccgtgttcggaaaaggtaaagccgtcatgtctgagataagattgatgtcaggtgatgatagacttctgagtcttgtgcgggcggtcaccttgcattttactttattctattcttgagcttcttgattttcatgccttgtgtttctgatggcagtcttctaaacatactgtttttgttctgtgctgacatgtctcggcagatgatcgacgctctgaggaagagaatggacggaagctctagcgcctctcctccatccaagaagtctaagggtggtgaggggtcctcttcaaaggaaaagagaccttcgggagagattattgatctttccaagaagctgactgctgcaaacccctcttcccccaaaactgccaagtccaaggagtctgaaccaccaacggctgggtctgaactggttaggagtgatcctaaacgggtgcaggcaccaactccatctttgccagtgctttcagaggccaaaaagagcaaggagatgctggcccattacatgaaccggctcattcctgaggtcaatgagcaactggttggtgctgacaatgactcgtctttggatgtatcagtgggcggagtcttgaaggagttcaccagggtaagtcttctttgatacttccctttaattttccacacttagctcaatatgctaaagttttttctctgtgcaggccggtctgaagttggcctaaacttactcccgggctaagtctgttgcttccaagaacgcggctctgtccgacaccttgaaggcggaggcagacttggccaagaaggaagctgaagaagccagggcggaagccggagctgttcggttggagttgggcgaggccaacaagaagctgtttgctgctgagaagaagatctccgtgctgactaaggatctcgaggttgctgaccgttttgaggagaccatcgagatcttatctgttgaggtaaacagtcttcaagatgagaggacttctctgcgagcagttcttcttcggatgaaggaggagaaggatgccaaggagggggagctttcggccgaggtggacaggttgaaagagaaggtcaatgccttggagacagccggtctcgagctcttctttgatttttggaaggctaatccctgggccaacttcgactacttgggcgacgctaaggacatgtaccttgagtactaggcggcccaagtggcttatggcagaaccgaggcggctgcttcaacctctggtcaggctgcttcaacctccggtcaggctgctgatgcttctcccgttcagacaacatattctcctgctccagttggccccgaagaaccaaacaaagagcctgggactccagctgtttaaacacttctttttatctcctttttttatatatatcttattcggcctcagggccttttctaagacatcacgaccggccaagcggtctttcaacttggaattatttttcattttttggacaacgcgttgaccgtgcagcttttaatcccggtattacgtgcttttgtcatccttaatgaatttcattctttgatcataatttccatgcaattgtaattgttttatttttaccaagtgctttgtacaggtataggtgccccccaagtgaccgagca

SEQ ID NO: 342378 - DNA, 609 bp, Cannabis indica
ggtggtaaatactatgcatttgtaattgttgatgacttttcaagatttacatgggttattttcttgacactcaaaagtaattttttttgaaaatcttgtcaaattttgtaagaatgtgaaaaatgaaaatggatattctattacctccattatgagtgaccatggtggtgagtttgataatgatgccttagagtttttttgttgataaacatagttttaaccataactttttggctccatgaactgtacaaccaaatagagttgtcgaaaggaagaatatattaattcaagaaatggctaggtcaatgctaaatgaatctcactaccaaaatattttttgaccgaggtcgttaatacttcttgttatattttgaatcatgttttcattatgcgcaagatgaataaacccccttgcgagctttcgaaagggagaaaacccaacattggctattttagagtttttggatgcaaatgctatatttgaaacaccaaggacaatcttagaaaatttgatgttgaattcgatattggaatttttatagggtatgcaacacatagtaaatcttatagaatatataacaaaagaactaatgttgttgaagaatctat

SEQ ID NO: 342379 - DNA, 526 bp, Cannabis indica
gacagccacctcaatttccctaagcattctaatacttcctgatgctctagaagcctcaaccttccatttgtgatcagggttgccactgtcggtccccttactgacattaccactagcaggagaattcgatgccatgacggcatcctttacagtctgctctttcgcaacatgttgctcagcctccttagcaatcaaggctagctctaccactttcttgtacaaagtttcatgagaagtggtaatcttcaaatcccgtttgattgtggcattcagtcctctcacatacttctgtttcctggtgaaatccctgggcaccagatcaccagcaaacttagatagccgatcaaactctagggtgtattcggccacagacatctttccctgactaaacttcacaaaatcctccatgtgtgaagttctcacagcgatgttgtaaacttttcttcatacaaacttttaaattctttccaggtcattacactgacatcccgggtttggccaacgatatcccaccagacacgggcat

SEQ ID NO: 342380 - DNA, 940 bp, Cannabis indica
atcagattagattgtaatgggttttatttagggcacaaaacccaacacctacgtgttacgctcacacgtctgtttatgtctatgtagcatagacttacgtgttacgctcacacgtctatttacaataaggccttagtagagtttatctcggttatagttaccgagtctaatttggttatgccttgctcgcataatcctacttatatatatatgtaatccatacattacgttctgtcggtggtttatcctagtgatatataccaggtttaacccagttatatcttatacacataactcttaacataatgcatgaccacaatttatactataacatatagaatcttagggtaataaccctatttttcataccaaataatcactcatataacatattacactatgctcaaaataacatctattgaaggtaataatccgaactcatgtcttcactagattaacaatattaccatacatcatcgctttcttaccttcataatattctagggtaataaccctagaccgcatttaattaaattcaaggtaatggtttaccgagtctagcttatttatgccttaatcgcacaattcataatctccattttacatacatatatcatggcatatcaatacttattaacaattcactagggtaataacactaggccaataaactgctcactttagagtaataactctaatcccggtttctagttactcatatatatcatattccatataagcgtcattgcgcataactctatgtgctaactactgtcttacctgacgtcgcacaaaatatggagattccaaatccccgggtgctcctgaccaagtaccggtaatcctagtcacaaacccgggatacacaagtatagggttaatccctaaatccattttcacaaattataaaattggcatttaaattatagatattcacata

SEQ ID NO: 342381 - DNA, 741 bp, Cannabis indica
cgattagaaggtctgtaatcacatcattcaacaaacaccattattacgttcaaaataccgttcttgaaacggatccgaatttgaacgtgtttaagttgtttcggagatcaaaggaggttgtgtttaagtttatgggaccccaaagatcagttttaacgtgaagaatcgaagctttaaggtttgaaacggaattcaccatttttagactccattcttaatggttaaccgccaaggaagaagataaccgggtttaggccattttggctctttttctttgctgttactggttgttttgagatcatggattcattggaaggttcttccaataaaaagtacacgtcgaaagcacccgaagaagagtttcgcattcgccgacaccggaaccaacgagaacttcggcgacactccgttcaggggcttctgaaggttatttttcaattttgtttcagctttttacttgttctaggtgttcttaggcctactatgaagtttgataattttcttgcaattatttgatttattatgaattatttagttatttgttaaattaattaggaaaaaacacttagattactcagaaaaatctaaatttatttatatgattagctatgagatataaactatttcaaaattggtagattcgaatttcggttaattttgtatttctcatgaattatttatgttattttttaatttaattatgaaaatacttaggttgcttagaaaaatctaaatttattt

SEQ ID NO: 342382 - DNA, 412 bp, Cannabis indica
tgatgctgattctccttcttgattggattctacataatcttccacactatgattgaaataccacttgatgtgtgtgcgcactactctatcacttagggacttcgaaacaaagaagaagaagaaagagagagagaggtggcggctcagaaattttttctgaaaagaatgagatgaaattgtattactttcctaaaaccattactttctatttatagaataccacatagggttagggttgaattacttggcattaaaataatgaaaacattaaatgataaaaactatgcatgtggccgggcatggcatatggaaatgggcctcacttttgcaactttcctgttttatcatttctgtattccattttctcaaaattgccagttttcacattcaaccatttaaatgtcaattttaa

SEQ ID NO: 342383 - DNA, 703 bp, Cannabis indica
taaacctccatgttctgttcgatctgatttgcaaacatctcgttcaccaatcattgatatgttgccccagcattcttcagcccaaacgacgtgactttgtagcagtagagtcccatgttggttacgaagctcgtatgttcctgatctgggacatacatttttatctggttatatctagagtatgcatccataaatgatataagctcatgcccagcagttgcatccaccaactggttgatcctgggtagtgggaaacagtcttttgggcacgccttattcagatcagaaaaatcaatacaagttctccaagttctgttaggttttcagacgagaacaagattgactatccacgagggataaaacacctcgtgtataaagtcattgaccaataacttgtccacttcctgttttagtgacccttgcctcttgaaatccaagggtctccttttctgccttttgctaggtagtttggatcgacatttaaattatggaagataatactatggtcaattcctaccatatctccatggctccaggcaaactgatcctgattcacccttaagacacttattagctgctattttagttgctcgtcaatgtttttcccaatgtaaacacactttgtgggatttcctgggtcgagaacaacttcttccgattcttcaattggttttaataagtttctttcatcttgaacccgggg

SEQ ID NO: 342384 - DNA, 438 bp, Cannabis indica
gtgaatgaatatatgttctggacttaacaaattttgtacatatattaaaccataaacatgaaaactacatgttaacacaaatcacttcaaatctcttattgataataaatcagattatattgtaatgggttttatttagggcataaaatcccaacagtatcgtatttctattttcatgtaaaatttgtaggtaccaagtcaccaacaaacttagacaagcgatcaaactccagtgtatactcatccactgtcttatcaccttgaaccagtttcacaaaatcctccatatgagttttacggatggcgatgctgtagaacttttcttcaaacaagtttttaaattcttcctagttcactgcattgagatctcgagactggcctactagatcccaccaagtgcggacatgttcttgaaacatgaaagcgacacaattaacc

SEQ ID NO: 342385 - DNA, 705 bp, Cannabis indica
aaaactataattggcccattaaattatagtataccattattggaccacttaagcccatttagtgagtaaccctttagggttagaggggcatgataaatatatatgtgtatgtcttaagtgaagcggtggtaggttaatggtaataaggtgaagaggggatagctccacattgtgctcctttccaatcttggttttacattgcattgttggtgattcttggattcaaatggctcacatggatggctcaatgggaggtatgtgtgtgtttatttggatgctctaaataaaatatagatcttggttgatgattatgagtaatgaagattagcatttaatgtattttggttagctcataatcatagaaatttaacacgtatgagatatcattttttttttggtgcaataattaagcaaactaaaaagattacaagatcgcacgtaaattagttctctaagtttcttttaaaaaattcataatttttataatgttcacaatacaatgtcatatttgatactatatcatcattttttgtacaataatttagcaaactacaattattataaaaaaccgcgcagagcgcggaataattccctagttgtaaataatacatatgtctcaaagtatttcttacacaacaataaaacaacattaatatttaataaacaccaactatataaacaaagacaacactaaataaaaaagca

SEQ ID NO: 342386 - DNA, 959 bp, Cannabis indica
taatcgggttggtcggattagttcgggttgattgagcgcgttgatattattttcaacccgcccagtataaagattgggcgggttatattttcgtcggatttttcggtttatatttttcgtcaggttatctcagtttagtttgggcgggttgttcaagttgggtggtttacaaaaatttatgtacaaccctattctacaccataccacgacataaactcatcccacctcgaactggaccttgaacacgacctgggaccccaaactcaaacccagaccccagacctaaacccgaatcccaaattcgaacctgaacctaaacccgaaccccgaaccccagacttggaccctgaccctgaattcagaacccgaacctgaatctagacccagacctagggccaggtcagaggtctaacactaaagcatatcccctcattagcggcggaccactctgccgctaataaaccccaattctgccgttataggctattagcagcgaaaatcccccgctaatagtccaccgttattaaatagccgctaataatattattagcggcagaatacggctccaccgctaataatattattagcggcggggtcctgccgctaatgccctgtgtcagtttcaattttcggttcagtcgtttgagagtggttcggttcggttcagttgtacttgaacgtactacccataccacatgatctctatggtggctatttgattcaatcactcttgataagaaaacatacatggattgcagtttctattacgagccagaaacttaagttttgaagcctcctcttttttagttttttgtttcatttattaatttactattagtagtttaattccaattagtgtttttatggggttagaattataaggagtacattccttaattaattttaatgctgtgatcatgtttatgtgttgaaactaatttagttttttcccattagtc

SEQ ID NO: 342387 - DNA, 1005 bp, Cannabis indica
ataatcgttttagaagttcatatttaggatgttaaacaacatacttgttagtaaatctaagatcctggtaaaatattttcaatagtgagtaagtggtatttgtgtaatttttttcatttaggctgtatatttgtttatttggccaggtgaaagtatttttgtaatattgttacttttttttggttaaaactgaaaaaaaaaccccgaaattaaataagatccaaaataattactatgataaacatcaaaagcaataatattaggactatttacaaaaatttgggaaaatgaagataaattttgatatgtatgacataaatacttaattacactaaatatgacattttttttaagaaaacttacaaatatgggaaaaattcacgaggaatgtcataaaaaattttaaatttgtgtttctttttattttttttttcttttttaaaaaattaaaacactaaaataaataacaaatgatctcaactgtagatgctttttttttaaagaaattaaacctgattttatttaaactactgtttgtttttttttttgttaaaaactaattatttcattaaaagcagcaagaaaaaaaaccagtttcatcaacatcatcctgaaaaaaaaacaatataaaaaattataatctaaaaataatataaactttaaaaatcagtttcatcaacattgaaagaaactaataatttcattaaaagaataaaaaaaattataatctaaacacgatactaactttaaaaactaattttattaacattataagaaactaattatttaattaaaagagggaaaaaaaataatttcatcaataacataatgaaaaaatacacaatgtctaataactaaacttttacaaacgatactaaatttaaaaaccagtttcgaacatataaattttatatcaatacctaataaccaaacttctaacttcattctttattttggcatttaattttttatttgcttgctcaaaaattagagttgatttaagca

SEQ ID NO: 342388 - DNA, 1078 bp, Cannabis indica
ccctcaccaaaaaatatcactggaggctggttaatagtggggcagctaggaaagttgctcaaagccgtacctcgaaaggtttagaacatataattttttttattaatttttctttccaacattaatttttcaattgttgaaaatataaatttccttgtagtagctatatacgtgaggaaagttccccctccatatgcaactctattattttcttttgcttatttagcatgatgcatgtgttgtacttttgccctagtagaattaaaagaaaattatagttctcaatttgttatgatgatcataaagtcatgcctaaaattttcgatctgtacatatataataaaattattggatgcagccgttcctgccaagtgataacaacattttgatggttcaagagagctatgtagacgctttgggatcatttgtgatttatgcaccaatagatgtgccaactcttaacctagcaataagtggtgagaatatctcaaatgtaccaatactcccttctggaatcataatatgtggtgatggtcgcacacatggtattgacccaaatgttgaattagcttcggattctcctaacacaaccaatgcatccccatcagttgttggttcacttcttactgtggctttccaaattttggtttccaatccttcctcttccaaacaccatatcaacatggactctgtggccactgtcaacactcttatcagctcaactgtccagaagattaaatcagctcttggctgttctactgaacaataaaactcttgtatattttattacatgtcttatgcttttatcgccttgttttatatttcaagtttaaacagttagttaataagtacctttattatcttacaagactagtaattaatgtcctatttggggtttgatcttataaaatttatttcctcatgttttatttttatattttatctgagattccattactttcaattatatttgttgcatgctcttactatcaagtatgtagttcattgagctacaagctctttgttatctcgtcttgaacacttttattgtatattctatctatcccgagatggacat

SEQ ID NO: 342389 - DNA, 728 bp, Cannabis indica
aatatttataagatattaaaatataaataaagttaattattttgtgtattttcaatgagtattaatgatgttattgacttttatagttattttgcatcttgtgtattagaacacaaatacaaaaattgggttaaatatagcttcatggtatattttgggccaaatttaatctaaaatatataccatttattggagatggtctatgtttaatttttggcagtaataataactaagttatattttcagaactccgtaggtacctagttgttaaatgtcaagtcattatccacgtgtcattttttatgggtatatttaaactattttttaaaaaaaaattaaaaatttaatgaccttgaccaattagggattgtcacgcgataatttacttaacactaaacaattaggtacctacagaagttcaagaattataacttaagtatttataccgtaaattactcttaaagttatatataagattattttgacgtgtgaactaacaccattgtattctttaatgattccttcacgaaaagaaaagtttaacccaaatcaatattcaaaacatattaaaactcatagaaacgatggacttgtttggctacttaaaaattgttttcaacttttaaaagttaatacttaataggggtgtctgaccaaatttttaacaacaattttatgaaaattgagttttaaaaaattaaaaaatagacaacttcaaaatattattt

SEQ ID NO: 342390 - DNA, 617 bp, Cannabis indica
ggtaaaatatttccaacacccttttcttcctaccaaacagtttagattcgttggcaaggaacctacaaatcaataaataaaattagatataatttattttgtataactaaggaaaaacaactttcaatcactagcatacccaacagccctgacacgtccaggatgctctggtgtcccgagcgcctgggtcagaatgtcattttggccatggacctgaacttgtccctgagtaacttgctcctctagttgagcctaatgcacatattcaagcaattagtatatgatttatatatattaactcattactagtacttaatcaacgattaatatatacttactatcttttcggcaatttccttctcgtaatcaatgagaagtttcattctcttggtccaagatttaatccaaacacggtggcgtgggggatcttgaaccacaaggtcctttttttgcattattttataaaaattaaatgagtacaattactttttgaagtacattgttagaaattattgattacttaccagatcttctcttacgttcaccattccattctttgtaccttactcaattcctacaattccaaaaaaatacattagctaccagtacttgtattt

SEQ ID NO: 342391 - DNA, 658 bp, Cannabis indica
ggcaagctgcgggtgatgaccactctaactttcagtgtgatgatggcatattggatttgattcgacgggatgatgcccaatacttggacaattagaagaataaggatagtatatatatatagccctcttctttgacagtgaaaatcattggctgactttagaagcagaccttgatcattggatgttgagcatatttgactcgagccttggattgatttccctagatgaattgaagagtcacttgacattgtgagaacaattattcccaactttgattctacaatccagcctattcgagaatcatgaaatgattgtcatgcctcaactgaccgtctcagagagccaggttagaattatagttcaaaagtcatcgacgggaggattgtatgacagaagaatcaaggtaacttaattacaactgattttttattatttaacttgaatttgatttgcatacttttatttaattactttttattgtctcatgcaccgatgattacgggatgtatgtactagagtacatcgagcataaaatgctggatcttctgtttgatagtgggaacaatgagaatatgaagcaatttagagagcggtgatgtttagatttgttttaccaaaatttagcatgaacaaatatattttttttcttatatatttt

SEQ ID NO: 342392 - DNA, 1093 bp, Cannabis indica
aactacttcttcctcattggccacagcctccatgtacttcatgacgtatacaccgcaatctcggtcattgtcttgttgaggaagcccgcgatctttcctgtcaattctgaaatccacgaaagtcacattcttcgacctattctcctcaaacaaaaggtccaacgtcgacaactgcaaacgtatacaattagttagattcaatgaagaatgagttcacatcaaacaatgaaactttgcaagtttaccatttctttcgtagcctccacacgatacttctcatgcattgcggtgtgtagggagtccagaaatgagacaaccttggacttcatatttacttcggcaccaaaccaatgtggtgcaccttctagagtcaacaccggcacaaacatctacaattgaatagaggaacaataaagtcaaaaataaattgaaattacagaccatatagatattcgacactacaatgaccaatatgcatcgctaacatatctcagttttcaaaattacaattaagaacgaccatgtgtatatgatgaagtaccttgacgcatttttcgaagttgtcttcgtaaaacagttttgaccactcccggtctttcgcaatcctcttcacattaaacgaaccgagagttttttgctgcaaaagcattgttcatcttctcaagtaacagaaattacaaccaaactgaattacaaaatttaaaataagctgtacagcaaagcaattaccgagatgcgagtgggcatgtaccaaacacgaggttggtcaggtaatcgactatcacgttcgtacttgttcattagtatagaaaaacagtcaatgatctgcaacaaaatgaaatatgatttacacatgtacaataaatgatacatatttagttaatactttgacacttacggatccctcaacttctcgcaacggtcgcaacgatgccatgcacctcctatccacttcaaactttcgaaatttcgcaagcacatatctgattcaattgtaatcaatgtaactgttattaaaaatttctacaagtatatcataatgagaaatacgaaaataacatttacttaccccggatctaatgtgttgctaaaa

SEQ ID NO: 342393 - DNA, 822 bp, Cannabis indica
attaacctctctcgagcaatgatagatttaacttaaaataactaacacgatatctctattcaatgttaatcaaaaaagcactcataaagcaatatgattctctttaaatgaaactcataaaattattggaatctctcaatctcacacttttcttatgtgtcatgcaattctaagtccaattttagattacctctatcaagtgtaaaactcaaaatctttatactaattaatggtaatcaagcattaagaagatgataattagcacaaaatttcataaacaaataacaagaacaaatatgaaaataatctaaaaacttaaattcataatctaaaatagttccatcaacactctagaatgagtgtttagttcataatcaccaacataataaccacaataatcatattcataattaaataactaaacaaagaataaagaaagaaagaaagaaaaaaagaaactctaaatgatgatagttgatgatgattgcttgaagtctcttctctcttgctcttcaatgtgttttgtaatctcaaagttgcttatttctatctctccagttcgttcctcaatacgatttacatccttctttatataggccaacaaagatagatcgatcctcttagaattatgatttttttttttaaaaaaaaatgataagtacaccctgtgcaatagcacctaagagaaaaccctcgaattcgccacgtgcctgaaattatctttttttccctacgcgcaatattttttttttccagtcagatgctatagcgccttaccccctgcgactatagcgcctagcaccatttttttttacttcaacc

SEQ ID NO: 342394 - DNA, 1024 bp, Cannabis indica
aattgatcctggtttgccttcagaaagttaattacctgctattttagtttttcatccaaattctttccaataaacacacatttagggggattgtttggatctaaaataacctcttccagctcttcaattggttttagtttgttattctcgtcttggattctaggatctagatcctcttctttctccttgcatccttctgttatgaccaccatcaattgatggttggctcttctattttgaagttctatgagataacattcacgagccaacaattggtcgcctcgtaccacacccactccagcttgtgtaggagctttagagataggtgtttaattgaactgactacccctagtccaatcaatgcagggtgacccatcaatatgttataaattgatggaagatcgacaactaagaattcctgcattagtgttgtagataacggtggctctcctacagttaatgggagttcaatgataccttggctggtgacactatcacctatgaatccacataagctaaccatgcaaggttttaactttgcatcttgtaaccccattttcttcaatgtatccctataaaggatatttatcgagctcccattatccaccaacactcttttcactctcttgttagcgagttgaactgtaatgacgagaggatcaacatgtggatacctcacatgctttttattttcctccgagaatataatcggaggttcttctgtctttgcttttttcagtggttctagagcaaacactgattgttcattctttatttcattaacatatcttttttgggcattattactgtctccagtgaggtgtagccctccctagataaccaatatatcctcgacctcaacagtgggaggttgcaatctctggttatctgggttattgaggtgattgggctggtttggctcgttcccttgacacttcacatactgtttgaaatatccacgtgagattaggctctctatcttgtctttcagttgtcgacactcttcagtagtatgccctatgtc

SEQ ID NO: 342395 - DNA, 957 bp, Cannabis indica
agggagcctatacttaaggcctaaggaaagtgattagtctcactctttcaatttactctcaggaaccctaagtccttcaacattcacaactttctctctaaaatggagaataccactcccattgcagtaccccctattgctatgtttgttccatctgtggcaattactgttgatcctgcagtcgtatctacagtcgagactaatctgtctaatccttgtcgtgacattgtcctctgccagttggaggttggtggttctgctcgccactcgagtcctgagttcactctgtctccgccttcacctctagtcattcagaaacctcgtacgtttcaaggtaaggctcctcccctgtctaaaaaggctagtccttctctgtcgtcacccccttcgtctgtgtcaaaacgagtcactcgttcatcgtcgagtctacagcctccatccaaacctgtaggacgtatcctcatcctccctctaaggtttctattccttcccaaacaagtgaaagagttcagccaaaacgaaagtcctcacgtgataccacgtatcaaccacctaaaaagaaatccaagaccaaacccattccagtcccatctacagactcctctccgaaacagtcgtccagaggctctaaaaaatctaaacttcccaaagcccctgtatcaactgtcgacccagcctctgtacaatgctttgttgatgccttcaaagcttctgtttatcaaagatgatttggtagtcatgagctttggtttgaccaagtggttatattagatgattttcctgaactacatgagtttttaaaacttaggaaatgggtaaacacggtcactaacttgtctgctcctcatcccattttagttcgagaattctatgccaacctagataggactgttattgctgagggtcatccaaggtgtgtgagtgcatttgttaggggtcatagagttccatttggtc

SEQ ID NO: 342396 - DNA, 616 bp, Cannabis indica
gtgatttacagctgatcgtaaattaggtcttcgggccaaatgcttgaaaatggcgaagtatttagagaaagttcggaagaacttggaaagattcgattactttaaaatcgaaaattttttgagagaacagaactccaacaccgatgccttagcaaaactatcctcgcagaatggtctggacgaactaaatccgattctggtagaaatgctgagccagccaagtatatgtgaaacaaaagacgttgagatgatagatagctctccaacatggatgacgcttattgttaactatttactcaacgggcaacttccaaatgacaaaaacgaggcacgaaaacttttgtatacagcgcctcattacacagttatcgaaggaaaactatatagaagagggtgttcaatgcccctatttcggtgtgttcttcccacagaagcaattgaaataattagaaaaattcatgaaggcttctgcgaggatcgtgtgggttgaaaagtctgtctaaaaggatcgttagacaaggatattattggccaacgatcaataaggacacacatgagtttgtcaaaagatgtgataaatgtcagagattttcacatatacctcgcgtaccgcaaa

SEQ ID NO: 342397 - DNA, 1301 bp, Cannabis indica
accagggtttaggtagtttagccgccaaaaattcggtttttgtggttaagtgttacaaaccgtaaagttcaggtggtttagccaccaatatcccttaaaattatattttttacaaacacttggaatcctagactattaggtgtatagtaatcctaagatgacatttagcggttgtctaaacaagattaaaacaataatcatgacattgaacatagaagaaaagaagcaatttgatataactagaaattaacattcaataaggaaactaagaatcatgtctcgggttttgaaataacccttaactaaaagaaaactattctaaactagacattataacgaaaaatcatattatttaataagagtttaaggagaagaaaagaactagaatggtctctttctaagtttctctctctattttgtagctctagaatctctgctaataaagagtttttgagtttttgttttaactctcaaaatctatcaaaaatactaataataatgtgtttgtataggctaacaaagttacctaaaagatactaaaaagatttaaaatttaaacttaaaaaaaaataagaattgcaactctacttgaaaagctatcttttttttcttcgctatctttttatctttttttcttagctctcaaaatctaccaaaaacactaataataataaggaattattacatagaaaatataaattgacactttatttacaaaaatacttccataaagtgtggacaacatttataccttttatataattttaactatcaaaataccacttacactattacttacacaatcagacgatggttgcatggtggttactgcgtggttgcgcggtggttgcatcagacgaaggtttcatcagaagatggttgcagggtagttggccgaaggttgcatcagacgaaagtttttggatagttgctggatggctggccgaaggttgcatcagacaaaggtttcaattagactaaataattgttagtaaaatatttatgcaactgtaatgcaactattgtgaaacattaaaaatcagaataatatttccacgtacgtataactctatctacatgtctctttatgatttaatatgaacaaattcaccattagaaatttggaaaataatgaaaatacaccaggataaacattttactatagtattgacgtaattttttttggattatacttgagttggattgtttgggaactccagttctactttttgagatctgcctttcatggatctaaaaaattgaagtcaggacattagttttatgcaaattaaactagattt

SEQ ID NO: 342398 - DNA, 949 bp, Cannabis indica
agtgattgtatttcagagcaaaaccgttgtccaattgactattattgcaaaaactagctaatactatattgactcgtgaattaatatatatattaataccaaaaccatgttaaaaacatctcttagttcttattattcatttctttataactagttttttaaaaactcgaaatattcaaaaaaaaaaaacatgcatatatatatatagataatagtattataggaagtatcatgaaaatagaaaataatagataatacacacgtacccttttatcattaagaaaagccagcagaaggcatggaaatacaaatacagatcaaacaggtcagaatagtataaattacaaagcaggactatatatatatatatgtacgtattagtagtgtacgtacttgatgcatgcatgcatgcagcccagcttggtaaatcatacattcgtttttattttttattttctacatacacaacatgacatataatacataataattaagattgattgatcgagcatgcatgcagtacgcaatcatgcatgcatgcaatagtacgtacaagtacgtactattcaacaattgacgacagaggaagatggtcatcagtttgtgcagcttcattctcattatttttgtttctattaggaaagagctcatttaatacttcattcttcgggaggcaatatcctccgcccatgccattgcattgataggggtagcaacactcgttcatcaaattgcatgtagctccaccgggcctacacccgggaataggcacacatcttcgactcgaacctattaatggaccttcacaactcaatcctccacagcaaatctttccttctaaaacatgacagtactccccttctatgtaacaacgatcaccatagctctcttgcgccaccatcatcatcactatcgcaaacaacaacattccatagctaaacttcttcat

SEQ ID NO: 342399 - DNA, 570 bp, Cannabis indica
taaaataaggcaaaatattagggtgttacaccaaaccagggaaaccccgtagcctgccatggccgatcctcacaagtgatccctaagggtatagatcttgtgagcgatctcaaaggtcctcctcaggctgatgaagaattccagaggaagattggcatggtttcaggtggatctaggaaggaagttggtgtggtttctatcagagaatccagccaacccaaggcctgaacctgtgccagaagacttttgcgccaacctctttctgatatcgagaaatttcctgaggctggaaaaaggatctcagtttcagaaaatgggatcttctgatgatgaggggaatgaggtctgtgcagagatcaaggctctctacatgtagttggtctttctcaagctatgtgtagtaggtctttctccgagttacgtgtagatggtctttttcaagctatgtgcagacggtctttctcgagttcatcggcttcccctctcgtcctttgtttaggagaattacttaatggtttgccactagtgacattttttgtaaagaaaagtttgtaaccagtcttaggtttt

SEQ ID NO: 342400 - DNA, 548 bp, Cannabis indica
tgtcgacccagcctctgtacaatgacttgttaatcgacctctaaagcatctatttatcaaagatggtttgctagtcgtgagctttaggttcgaacaagtggttatattagatgattttcctgaaatgcacgagtttttaaaacttaggagatgggtaaacacggtcactaacttgtctgctcctcatcccatcttagttcgagaattctatgccaacctagataggactgttattgctgagggtcatctagggtgtgtgagtgcatttgttaggggtcatagagttccatttggtccatccactattgcatgcatgttgaaagttgagtccatcaggaaaccaacatatgggaaacaattcaatccagatcaaactttgatgggtagagtgctaactggcagggatgactatatttgggacaaacaggaaatcttagtcactcatctgactcccttctatagggttcttcatcaggtagctttgtacaattggttctctaattctcatttgtcatgagttacacttgagattggaaagtttctatatg

SEQ ID NO: 342401 - DNA, 924 bp, Cannabis indica
tggtgaggtacaaccaagcaaagacctccatcactttgaaagaagcttgaagaggacttcgggttgccttggccttattgtgtcacatttgagcaacccaagagcggaagacaagattatatttagttatatatatatatatatatattatataataagtttgggtgccaaccccttgtaaaaaaaaaacagagaagagtaagattaaaattaagttttgggtgtggactaccccttaaaaaaaaacaaaagaaaaaagaggaaaagaaaaaaaaattatcatatacatacttatataattacatatgtatataactttcaatttcctacaattactaatgattttgttgtggtgtgtgtgatctttattactggtgcaaagcagggaatgacagaaaaataggttgctgcaatatgatgtgaagcagatttgtgtgctgaagcagtaagtcccagttgttacagcattgcatcagcatcgcttcagtattttcaagcagggactttagtgggggaggagtcggaatcttgagggagtatctctttttccttagttagttaacctagtttaaatgttattgtgcttgtgtgtgctgaaataagtgtgtaagtttaagtgttgctactgtttgtgtttgttactttgtgagtttacttttattgttgtctttagttgtgtgagtaataaacactatatagagtagatgtgtattaatcatgttattttgtcaggtttgttatgttctattttggcttgcaattgagacaaatagtgcatgtgttttcagcttggtttagggtagccctcgatgatgaaaaatatccattttcctccatttgtggagtgccttggtttgtgtgttgaaaatgctaattttaagttttatttgtgtttaaatggtagcctatgaggaatgctttcaa

SEQ ID NO: 342402 - DNA, 939 bp, Cannabis indica
agaaacaagaatctctggctaaatagtgagccagcttgtttgcaaatcgtttgacaaaacgcaattcaacattgtctaaagataaaagcaacgcacgaacatcatgcactaaaagaccaaaagaagatgacatagagactttactttgaatagcttgtacgcataccaagctgtctgattccaaaattacttgtccccaattgtgacgatcaatccaacttaatgcttctttgatgccaaccatctcagcaacttcaggttgaaccctccctacatgaccccgattgaaagcctccacgatattaccatggcagtcgcgagccacacaaccccacccaaacctgccttcaaccatctcaaaccagacaaccataaaacatctcaaactagaaaacttagtctctcaaaccagaaaacttagactctcaaaccagaaaacaatggcaaaaaccagaacaatctcaaaccaataaacaagaaccaatctcagaccataaaacaatcacaccatgtcacaaaagacaagacttgcggtaacggaaccgaacgaaagacaaaagacaaaagacaaggcggtggctgtcgttgatcggtgactccgatcgacgtggaccaaacggacgacaacccgccggcgacgctcctggacttgactcgcctgtacagttatggtagaagcttctcgacttctctcccctcgactcgtcgacttctcctctccgtattacgtggtcgataccacttacatgtatttgattatgtgtaagtttataattaccattctttcgaaaaaaaagtttataatttgccatatgtaactctattccactacaaatttaataaggtaaattgcaacataactcctataagtgttatctcgctagcaactaaccttcaattcttttttttttgcggtaaaaccccccaaacttgtattct

SEQ ID NO: 342403 - DNA, 516 bp, Cannabis indica
ggtagcactcaaacattctaagctggattaaaccgattctgtcactaccgcttcttacgacaaactgattcagatttcaaactggggaaaacaggaggtagaagaaatttatgcctgagtgcacgcatacacaggtaaataaccctcaaaattaccggtcaccagtacaacgcaatatagtactttgccgctggaagagacaacagagggcaattgaactccaatggttgtgttgggtcacttgtcagctctgtttggaaaactttcaaagggggaagattccaaaaaccagaaacatatacgtttttagctgtcaaggtatgattgttttctccaaatggcacccaaatacgatcaaatctaaaagaaattaaaaaaaaggaattaaactaagttgttcgtaccgaatgggagatccgttgtacccaaaactatttcttgtggttaaatgaagaccataattctagaaatccgtgaaattatacaaagaatcacccaatatgataaattctaaaa

SEQ ID NO: 342404 - DNA, 775 bp, Cannabis indica
gttttcatgccacgtcagggggactaaggcataccacacggacagatgtaaaacaggaccaaaagtaaaaaacaaattcagagaatatgtatcaaagtgatcatatatatataaaatatcctgacccaaagggtaggtcaaaaaaaaatatataatacaaagggcctggagacgggccataataattgtctacccttagaaaataaacaactacgtaattaagattgtctacaaagaaaagaaaaatagctgtaaataaaaaaaaagaaagagataatcatgttgaaatgggttggactcagcgacctaatcaatacgaggaggaaggcgagggccccgacgcacttcaagcatagcatcaagcttcttcttcttctcccggaatttggcaagagcctcctcaggcttgggatagaagtcgagtttgatgctctggccgttcgactgccacgccatgtagacaccatcgtcaaagcgtttggcacaatgcttgcaggagacaggggttatgagttcttctcttttggcatttttcaaggcctgagccttgaagtccctcaagtccttcacctccacagtcaggttggtcgtagactacagatctgcctggtgcaattcctctaaggactttaccttggcagccatctcgtccatggcttccctggccttccgaagctcacgcctagccttggcgacgacctcaccctcctgttgggttttatgccctaaataaaactctatttccatgtaatcaagattattcaatatcaataaa

SEQ ID NO: 342405 - DNA, 624 bp, Cannabis indica
accttgaaaacaaggtttgcaagcactctcacgactccagaaatcatgaaccagttaactgaactgttcgggatggcatcaatttaagatcgttttgaggcgacccaaaatttcatcaatgcacggatgaaacctcatcagagcgtgcgtgaacttctccagatgactagttacttccaagaagctgagaatcatggagctattatagatcagacaactcaagtgagtttgatcttgaacagtttgactccagtctttctgcctttcacttcaaattatgtcatgaacaagttggagcttcacttcacgagttaatcaataaccttcagacatttgaaaatttgattggaggaccacagaaagaaggagctaaggctcctaattctgggacagctaatggtacggctaaggctgaggcaaacattgcctctacttcaaaatccaacaacaacaagaagtggaagaatagcaagaaccctgttcaagatgtgaaaacagttaaaaagaaaaaggctgctaatcccgatggaaagccaaaaggaaaatgcttctattgcaatgaaaaaggccactgcaaactccaatgccctaagtttctagcaaagaaacaaggtattctttcta

SEQ ID NO: 342406 - DNA, 704 bp, Cannabis indica
agttaaaagtgttaattaaaaaaaaagcattgttattaagcaccaatggtgcttagcaccttctcgacatatcgcgttgcgattgactagcgatacccccaaaaagctattatattaaactatatgggacctgatacttagttggaccaatagcgatattgacacataggagagtgctaagcaccactggtgccctttaacatttctctaaaaaaaactacgtcaaaaagtttgattggaagactagcagcctctgtatcacaaacttacaagcctatcccattcattaacttcaaattttttagattgtttgtaggaatttcaacaaacaagcatcagtaattttaccaaggttatcactttggaccttccctatcctaagcctatatctcggacacacctaaaatagtttcgtaaaatacaaagtccatatgaatagttttaaccatagttctcttagctttgcttcttaattttttattctgactatccattgcttgtttaaactaacaataaatttttatcacaagtgtcttctaagtcataacatgatgggttccttgaaaccctcccactaagacgaggtactgtgattttcttataagaatattttattgaaggatatatatttctatttaaagaaataaatttctatttaaggaaataaataaataattgattttctgataaatgaatattttata

SEQ ID NO: 342407 - DNA, 904 bp, Cannabis indica
caagttctccaagttccattaggctttgggacgagacaggattagctatccacgaggggataaaacacctcacatatgaagtcgttaaccagcaacttgtccacttcttgttttagtgccctttatctctcgaaatccaaaggtctccttttctacctttccgttgggtagcttggatcaacatttaaatgatggtagataatattagggtcgatccctatcatatctccatggctccaagcaaattgatcttggttcgcctttagaaaacttattagctgctatttgagctgctcgtccaggtgcttcccaatgtatacacactttgtgggatttcatgggtcaagaatagcctcttccaattcctcaattggtttcaataggtttctctcatttggaactcaggggtcaagatcttcttcttccttttcactttcttctaccaagattgccatcaactgatgaccggctttcctatgctgcaactcaatgtaataacaatcgcgagccagcatctagtcgccacgcaccactcccacgccttctggtgtttggaatttcaaggataggtgcttgatcaaactgactgcccctagtccgatcagtgctggtcaacccaacaatatgctgtaagccaatgacaggtcgacaactaagaagtcttgcataacagtggcagatagggcctcgcccaagattaatgcgaactcgattatgccaagactggcaatgctatctctagtgaaactacaaagattcaccatgcaaggcctcaatttggattttcgagccccatcttccttagagtttccttacaaaggatatttaccaagctcccgttgtctattaacactctcttgatccttttattggcgagttgaatggtaatcactaatggatcgac

SEQ ID NO: 342408 - DNA, 1003 bp, Cannabis indica
atatattataacaaatattcaaacctgtaaagtaaagagtttaaggattagaaaatacaaactctcgatttttacaaggttcggtagaactatgccacctacgtccttggtcttcaaagctatggacctagctttgagttccaatatcgagccaagttaacgggcttgactaacccttacaactgggaaattttcaccaaggtatttccaaacctcttacaatagtttcgcacccccgaggactattaacctctttctcagattgttgaagtgccaatctcactataatcgagttgtttacaataccggtgcctacctcacctcaatcacaatatcaaaatgtatttgatattacaagaaaaatcactctagaattatgataatacaatggaagcctaaagtgataagcaagcacactcaagatgaataaacacaaattttggctcaaagtgtgtgaaaagtgtttgttggattttaaacttggaagctcattaatctcacttagataggttaggtgtatgacataaatgctcagccaacttgattttttagtgaaaaatcgagtttctatagtgtttaagagaaaagtaaccgtttatagccgttagcatgcttctcaagacaaagtcagtcatgaaccgaaattttgaataggaactgaaattccgaattaatgacaaccggaattcttgattccaactggaattccggatggctaacagaggcaaaatgccatttttcgagactaaaatgcgcataacttcttacttgattatccgatttcagaaattctaattttttttctcttagttaaatgaaatgtgatttagaaatccaatcaaaaaaaaatttgaactatcgtgtaagaaaacttgttgcacaagttagtgagtgggccaaattttgaatttataaaacctagtgtgctatgcaaatccctttaacaagactaaagtaaatttataccattggattttgagtagtcttgatgtagatgagcctc

SEQ ID NO: 342409 - DNA, 527 bp, Cannabis indica
atgtgatgaatgtatgtgttgttacgaaatttttctatgaaaatattttccttattttgtaaatatttattttgattccttgtgaaaattaagcaatttaggtttttacggtaactcgattccgataaaaattaagaaagttatgaatttttgaaaattggaaaccatggttgtcgaagctaggtgcacacatgcaccacgtgcttcggacaaccagggttacgcgcgtgtgagcctcagtcacgcaccctgcaatcctcccgtgtgaccctgcaatcaaccgagcctgatcctgcaagactcggcgcctcttcctgctcctggctaccaacccacaaaactcgaattttgtgggattttccccaaaattcgattttttatgggattgtttctcgaaattcgaattttccaattttaaatatttctaattttaaatatttctgatttgaaatatttctaattttaaatatttcctattatggtaagtttgaaaaatttgttaacttctttaatatttatatattatt

SEQ ID NO: 342410 - DNA, 354 bp, Cannabis indica
aaaaataaaaatataggatactaataaaattatatatcatgtacaacaaaagtataattgaaaatagaacttaaatattatttaaaaaatatagaccgtacaataaaaaaaaaatcatatgttattcaccaaaatatatatactaacagtaataatattatcaacgacggccggcgtgaccgagcagtcgtctttagtcatctgagagtggttcaagagtggttcggttcaatcgtacttgaatgttctacccatgccacatgatctctatggtggctatttgattcaatcactcttgaataaaaaaaaaaacatacatggattgcagtttctattacgagccagaaacttagt

SEQ ID NO: 342411 - DNA, 667 bp, Cannabis indica
ataacataaatgattaaatatattataatataaagttatatacttaattgttagtttcaaagtcatatatattgtgttgtatttggtgaaatgtgatattttaatttttattaattttaatttgaaacaaaaaataagtttgaccagtttgggcgggttaacccgaccaaaccgctgtcggtttatagttttttttttttaaattgggcgggttgtacttaaattttagtagcccgaactttagattgtgttagaaaatatataggataaaccgtctaaaccgaccgatgtacaaccctaatttcagctttattgttaggaaaagcaatggaacaattgtggaagcagtttcagttggcaaaatgggtcgtgtaaaggcaaagggtggcaacaagtttcacttgaatccgactacttggtagctgttcaagctattaagagttcggtaaagcttccttcagcttttggattgctggtatgctaataagatggtgtatttttcttgcgaaacgttattatttttggtcagttcgtgtctttttttttttgactactactcacttttgagttatttaggtgccgtttggtaacacttttgttttttaattttttaatcaaaaaataaaagtaaaattttgtttttaaaaaatttatttttgaaaaacaa

SEQ ID NO: 342412 - DNA, 512 bp, Cannabis indica
actcgggattcgggtaacggggccttgaacaaaccagtagtcattgtctagatctgggactcaaactaggaccagaacccagacgaagaagaaaacttgaaccaagacctagacctacgatccaaaattagaacctgaataagaagcgtcgaaccaggacctagtacaagactatgaccgtgaccaggacccaaacccagacgtagaaccgaacacagacctaggctcagacccaaactgagactggaactggggcccgaacacggtcgtgtacccaactctgaactcagacccgggcctagacctaaatgttggaccagatcccaaacacagacttggacctagatagagattcggatccgaacgtggactcggaccaagacctagactgggatcgaaatgctagacctatatctggatcgagatcctgacccagacccaaacttggacacgcactcgggaccccaacttggacctggactggaacttagacccagatcggggtccagacc

SEQ ID NO: 342413 - DNA, 1101 bp, Cannabis indica
ggtaataacagtgcttattactcttacgaattaatataatgtaaatataattttggactatgtgttttgtaaaaagttattaattgaactttttgttttgttaaataataaaatgaattttttatttttcaaaatagtataagtaggacactgagttaatttttatcaaaaataaaatttaataataatccaatctaaatgtgtttatgacaaaactgtttatattttctgtatctgttcgtgttaggaattgtatctgttgtgtgttgtgcaactgtggttgtgtgttgtgcaactgtggggaagagtcaatatttcatgttttggttcaatgctcctttcctcattcgtgttggctcaaatttgcgttaggtgttggtcattctgcagcaaccaattttttgattggttcatggaagtattggcagtaggcaatatggggttggttgaagaagctgtcatggttggttgggcaatttgaaaggcttggaatgatatgctttggaatggtaaaagttgtagtgctggtgagattgtttggctggcttgaaccactcttcgataatggaagtgtgctcagtctaagcggctggactcggtctccctggcttccaatctcgctgacacaagagaccactggtccaaaccggttgctggacagctaaaaattaatgtggatggggcggtttttgaagacacaaatgagattggtactggttttgtagcacgcggctgtgatggtcgaatagttgaggtgttttcaactatttcttctgtcagtttccggcccgagattgcagaaattctaagtgtcaaagacgcacttagttggataaagacgaataacaagtcaaatgtcattttagagacagattacattttagttgttcaagttaatcttagttcggtatctatgccttctatttttggtctatttgttcaagattgtcaatctattttatcttctttaagtagtgtttctattggtcatgttaaacggtctgctaataaagccgcgcactgtatggcacgtggtgcttgttattggtcaggtcgtcgttttattgagagcgatgttccccttgctcttcagtccattgt

SEQ ID NO: 342414 - DNA, 946 bp, Cannabis indica
ttatgacttgcttatgatattttggagaaaaatgtgattgacgctcttggtgatctaaagctcgattgtgcaccaggtgacgatcggaggccacctgggcgcaagtatgtcaccccctcaaattcatgggattgtcactcccaaaccttgaattttaatttttaccctaatttaattattttttctaattaaacaaaattaaaaaaatccaaataaatatatatatatatttttttttgatcacgaaggaacaatcttcattaatcacaaacaattacaaagctatacaagcctaaaaaggtatcaaacaagaattacaaaaaaaattctctctatgtatcttttctcatagtcttttaaattctttcctttagctatatgtaatctataatagattgtttttttgttgttttttttgatctcttgtataatctttgaagctgtactcgagaatttgttaaagaaacagttgttcctattgttccaaatgaagtaaatcacggctgccatggttgctacaagaatccgatgctttttgtccatgtcaatctgcagcagccactgtttccagctatggaaaccattcggccagaccttaactcccagccagtcactcaccatcttcaccacctgctgtgaaaaccagcagtcaaagaaaaggtgggcattactttctggtgcatcctcacaaaccgggcaaagaacattgtcaagcttgatgtgaaactgctcaaacttatcacgagatagcaattgagagttaatagcttgccaaaatataaacctgtgcttcggcatgttaatagaacaccagatgtgtttgctgtattcgaagagggtctgaggtatgctactgttatacaacatagcagctttaaactttgtgcctgcccctgctttgtagatgtcttcccgagtgaacttgtcccttaaatgacataacttc

SEQ ID NO: 342415 - DNA, 579 bp, Cannabis indica
ctttggtacccatttagtcttgcctagatatgcatatttctttacatgataataggaaatagtatgaccatcttggttacaatatgtgcatgtaaagtgaggtagcctagatgattttacaaaaaaaattctcaaaaacttttattttttacgtggatcattgccaatgccactttttgcaaaaccacatcattgacttcctaacatgagaacatagcattccttacctctagtaaatgcatatatgtcattctttaagcttttcacatgagcatttaaatcaaaaatttatttcttatatgaagagcatgtagcacattatgacttagctaaaagttcattttcatttaatttaaaaatctcaatttcttttagtagcatgttggtcttctctctaatagtttggtttttagcaagaaatttaccaacattattaattagtttcttaaatgaattagacaactcaccatgtgatatatctaagtgatcatcatcattttcactatcacaatcattttggctagaaatgcttaccccatcatcaagtgccatcatgcacatatttgctacttcattctt

SEQ ID NO: 342416 - DNA, 618 bp, Cannabis indica
acttccccctcatcatcactgtcaactaaagtgacttgaggtaatggttgagcattagggatatcttcatcactatccaacattaagtgagcaccttcttctatagaagaaggtaccccaatcattaatggtgaagtcacactttcccaagatcacatgtcaccactcaacaagggtatggtcacaaacactagcaaatattaatgatctatgaaaactcaaaatatacatatgctatgatatccaatgatcatactacgcaacatacaaaaacattgcatccatgctacacattattcttgtattaaaattcttatggacgtactatgcatcaagttcatacgaaatcctacagtcataccacacccactatgcttatcgaaaaattcttgttacttctatacaaaaattctatggtcatactatgcaattcatggataagttcaaaacacaaaaattccattatttgttacaaattcgaatcaaagcatacaaacactacacatctaagattatgaataatatattgttctatgaacaccaaaaatatcaagaacaccaagaacacaatggtggagaaaaggttataaacacttaccaacaagagagaccttttag

SEQ ID NO: 342417 - DNA, 869 bp, Cannabis indica
gttggttttttgctaaccatgcggtttttgctctgtgcagacatggctcggcagattatggccgccttaaggaagacgatgagcggaggctctagtgcttctcctctggccaagaagtccaaggctagagaggggtcttcagagaagaggcaatctggagaggtcattgatctttctaaggaccttactactgtaattccttccactcccatatcggctaagtctaaggagtctgggccaccaacatctaggtccgaactggtcaggaggattcctgaacgggtgcaagcaccaactccaccccatgcccgtgctgcctgaggtcaagaagggcagggaggtgatggctcatcacatgaaccggctggttcttgaggtcggtgagcagctggctggtgctgacgactcttctctggatgtgttggtgggcgcagtcttgaaggagcttaccagggttagtcttttcatttcgacacttcccttttagcttttcatacttagcttcttatactgactttttcctttatgtagggcagtttgaagttggcttataccaactccctggctaaatctgctacttccaagagtacggctctgtccgacaccttgagggcggaggcggacttggccaagaaggaagttgaggaggccagggcagagactgcagctgtccgccgtgagttgggtgaggccaacaagaagctttttgccgctgagaagaaggtcaccgtgctgacaaaggacctcgaggctgctgatcgctttgaggagaccatcgagaccttatcagctgaggttgatcgtcttcaagatgagaggacttctctacggcaggtcctccttcggctgaaggatgataaggatgctca

SEQ ID NO: 342418 - DNA, 1184 bp, Cannabis indica
tagtcgcgtgctgacactgtagactcactttctcgaatctcaatggccccctgattcagcgagctcttgcaccattctctcgatgtctgcggaagacatcagacctaattctatacctccagtaggcgcgatctcctcttctgagatcgaggtcaggataaagctgtcttccctttggtcctcgtcaccatcaaatgcatcgtctcccgagccaagcagctgactatccgacaggtctctcatctgaaagatagaagatcttttcagcgttgtgaatgtgtgaaaaacaaaataagtgatcttacccgcatataaactataaaaatcgccctgggaggatggtttgaattctcgcggatactaacctccccaccaataggcgggcagatgggtgtacgaatagaaagacttcccaaaaaatggttgggggtgtcccagtgacctcggcgacatgcgtctttcagcatgcttctgaggcgacgaggaaacacccaccatttcaaggagtccaactaaaattacaacctgcgaatatgtcacgcatctttagctaagcgatatacctccaaaaatggctgggagaaactcagtgactcaaggggcatgcgttctcaagcatgaccctgaagttactgaggtacaaccaccgtttggaggatatctaccagccaaagagtacgcttattagaacattaacgcatgtcgcaaatggctgggtgtatctcaatatctcaaggaacatataaccgcatatatgaacattagaatactgtgatacatccaccatttgaaagacctaaccaatgttcccacaactagatttatagaatacaaaatcctaaagttctaagcgacaatcaaaagtaattaagtttcgcaggcatgcgagtatccgaagtgttcatccgaatacccgcgtgtattcaaaatatgaagtagcgtctgttcaaacattttttctacaatacacggttatgccaattttaggtcattttttctgaaattactcagtttcttgcctagaaaacgtagcctcatatgtattccctacaaacatatattcctgaccccccttcgtaaattttaaagcccagaaaatagtgttttttctcaaacagaaaacaaaatgcagtgaactttgaaaactaacctttagttctaataatctgttcctacgattgctc

SEQ ID NO: 342419 - DNA, 581 bp, Cannabis indica
agaaataaaaaggaaggaagaaagaaactgttggtggaatgaatctgggctgccactctactccttctgccgttcttgactgcttttaggtttaaaatttgcttcccctcttctctttctcgcagtttcctttatatttttcatcccagatttcaaaagatgaaattagcctccagttgtacggaacctcaacgcggccatcgattacctcgtcgcggcgagtgttgctttggccgcggcggtaaagtaactcgccgcggctactggaccaacctcgaaaactcctttctgccaaatcttggtcgcgaccgttaataaatccgccgcggccaaaagtgaaccaaatcctgattttttttaatttttcttggctcaacttgtcttttatcgtacttttgaaaccccgaacgtccacagctatgggaaacctgaaaacatagagaacaggcataattctatcctaaaacatcaaaaaacgactcaatttgtgacccaaaacataggctaaaaatagcctaacaacaacaatattctaaaaataaaatataagcgtgaaaatcagtttcgaacctagaaacaaa

SEQ ID NO: 342420 - DNA, 507 bp, Cannabis indica
ataattcctccattatacataattatctagttagggttttgctaatccatttcttaattttgggtattacataagggttactgcctgactttcattctaacggtcagaccacccttcatgattaatggtcatgactttacatattcttcattaatttagtctcggtatttttgtaccatgtgttgctactcttgacacgtcatcatcgttaaaatttgggtaaacaattactaaattctaaatgcttaacttataaatttttttaatgtcttaacagtgcatatgcaaatattacttcaaatactattgtatttggcacaaagggtccgcatatatccctttacttgtccaaagcaaccatacaattacgaatgtggttactatgtgctaacttatattcgtgatatgcttcaacaatcaactcttattacagccatcaaagaaaaagtaagtatatactaattttactataaatacaaacatgtaaaagtactatcttcttaatta

SEQ ID NO: 342421 - DNA, 777 bp, Cannabis indica
gagtacttgcatatctatttttttttgtattcaagcagttcttgaatactcgcacaaaattggtgttgtctaaattcctccgacaacagtctcgattagattctcccctacgatgactacttagagataaatttacgaagtatgaaacaacggtggaagctcataaaataagaataaccttgactctcgcttactaacaacgttggattcttattttgattgaataaaaggttgctagaatggtgtccatttcagatgagctgacagctctattcaatgaataatatctttgactctcgcctactaggcactgtatcagtttgttggaaacattaaaaattatttaagatatgatagtatggtattcttacatgtatttgttacttgctaaatgcttagtaatttctgaattgtgtgtgaatttatattgaatcatgttattttctgttattaattgtagttgtaaatttcgtgtaaaataagaataactttgactctcgcctaccgggacattgttggattcttattttgatcaaaattatccaaatttttcctcttatgttattcatttcgaattttcttacatagtatatcattggatgaatggtttataaatcatctgcttatgattttattctactttcttttatgaaattgaatggcgcatataattatattctggacattctatcccgagataatataaatcctcgatcttagaatctcctacttgtatatgcttactttaagcaaattaaatttagagttagattagta

SEQ ID NO: 342422 - DNA, 513 bp, Cannabis indica
ctgttgaaacaaaaaaatattctgaaaaattacaccataaaaaatgtacataaactaaacaatagctgtaacaaaaaaaaatatataaaaacaactataaaatacctaaacaaaaacacaaaaaaactataaaataataaaaagacaactataaatcaagaaaaaaaataacaagacaacaaccttgttaaaatgtgtaaattattcataaatcaactccgaataaactacaaaacatctaaaaaaaaatactatttttattgatcatgtaaaagagagaaagatataggaagagtgatcctaatttttttttgtaagaaccaggggtgttcacagattgatttggttcgaattttcaatttttttacagcaaaccactattatggttttttataaattcaaaaccaaaccagaccaataaaatgatcaaaccaaatcaaactaaaccactcaacaacaaattggtttggttcgaaccatggtttgtatttcgtagttgttctaatttttttt

SEQ ID NO: 342423 - DNA, 1168 bp, Cannabis indica
aatcaaattaaatatctaataagataaattatttgaaaataaccaaatagatattttcaacaatattttctaatcttataatttaataaaattaaaataataaaataaactaattttaaaatagatatggttaggtaattataattttaataataaaataataaaaaaataattaatattctaattatatgtcaaaatatcctaaattaagcattattcaaatatctacaaaaatatctagattatttaaatatttaaaatacaatttataaatttctaataagtaaaatgatataaataagcataaatatcatttttctaacttataatttataaattaaaatatttaacaaaataaccaattttaaatttgaaattattatggttagaatatctataaaaatatctaggttaattttaaattcagtaattatttaatttaacttataaaatataatatttcaaattaaaaggatagggctatcatttaatttaaaatatgtccagcattaaaatatttgatcttataattaaataatatataaatattaaagaaattaagaaatttttaaatctgaccataatttaaaaaataatataatcagttttcaaatttaatcctcaaaagatcaaaaattaataataatctattaaaaattacatattattaatttaaaattaatatttaagttttaatatattaaaaataatattttattttgatttttagggtatgaaattgggaaaaatagaaatttggggaaaaatcccacaaaaatagcacttggggtgttgctgtaggaaggctgcatgtgcagccatcagaggctggaaatggccctcatgcacgcgcgggaggagggatgtagcctcctcgactgagaaatctgagtcagctgcagggtgcgtgctgggcgtgcgcaggatcaagacacaagcatcgtgtctgaagggtttgcacgctgagttcagacagccctttgtccgcacgcaacacctccttgtccgaagcatctggtgccatgctcgaaattatatgcatccgatttttcaaatcttgataacttcttcgtttttcatgagaattgagttccgtacaagcgaaagttgcttaatttttcacaaggaatctgtaacaccctaactagcataggcgtattacgtgatt

SEQ ID NO: 342424 - DNA, 970 bp, Cannabis indica
tgaccaaagcatgctcctgcaggttttgaaaatgctcgagcagcagagaaagcccatatacaagctgcatgggacctcccctttcaccgcggaagtgtgacaagctcggctccctaagggattccggttatccaaatccctaaaatacaaaggtacctctaatcccattgattatttagagaatttcaatactattatggaagtggatcaggtacctcagcttgcaaaatatcgcattccctcggaaacattggaatagaatgcccacgattgattcaaccaattgcccgaggcttctatctcgacatgggagacctttgtcgacctgttcctcatgcatttccaagccacgatgacctatagggcgccctatactactctggctagcatcaaataaaaacatggagagtctttacaagactattttaagcgttttaatgctgaagtaacaaaagttgagaaggctccatagtcttcgctagtgtgtatgttaataacaggtgtctcgccaagaaccgatttctggaaggaactgcaagctcgaagaccagaatcgctggtcgaattctttgccatggaagaaccgcataagaggattgagaattctctggtagagttggagaaaggcaaagataaacgtaaatcaccagtgccgcgatcacgatcccgcagtcctcgagggaagaattctagaggacgaagcccaagaagacgcagtccatagtgacagcgaagtccaaaactggccaagtcccctccaaagaaggaatcctccccgaaaaggaaaggtggaccgcgcttcgtgaactataccgagctcgcagtacctcgagaccatatctaggcaattgaagagaagaatggggtcttcaagaagcctcccccgatcagggaaaatccgcgacaagagagaaccccaaaaaattctgtaagtacaataaagatattggtcacactactttggagtgtt

SEQ ID NO: 342425 - DNA, 584 bp, Cannabis indica
ttttaaatttaatttttttattattttatttctttataaatagtcactaatcattttacatttttaacacaaattcatcttctaaataatttcacatactcttcttttacaattcatgctactttttttttttcttaccaaataatagattcacaaaactcctaaaattctcaaaaatttttcatataccaactcccaaaatccaaatttattgtattctcaatttaaccaaaaaatttcaaattctccacatactaattcccgcaatccaaattttcagtattctcaactcagtcaaaattttcccatatcttcattccctcaccaaaattttaactcttttgagacttctcaacatactccattattcacactacgaaattcactaccatatggctttcatagatcaaatatggaaaagagtacaattgatttgaatgttgaaacttcatcggcatcggcatcagcatctgaaacccatcatatagggctggaaaatgtggttatagacaatgaaaatctaccaagccagagaagtaaactcaagtggagcaaagaagcaaatatacttttaataagtggac

SEQ ID NO: 342426 - DNA, 1349 bp, Cannabis indica
gtgtttattttcattgttttatagaattcatatttaggatgttaattcaacctacttgttagtaaatctagatcctggtagaatattttcaacaaaaatttatctgcataagttctttgtgcttgtttgatgcattgtatggtatggatgcctcccaagcgaccattatgcaggcaagtctcttggtcatttgctattcgccaagtttcacttgtggtgttatccatagtacgcatgtgaaactgaaagagtaatataagaagttactcttgtgagcaagtggattacacatagttggtcttacgtgtaacaaaagcttatagcttagtgtcctcttttgagatcacgtagtgcctacccctacgcgacttaccttggaacagccatcacttaagagtgatggcaagccatgctacaaagcaatgggtactagctcttttatgggttcctacacgatgaaatgttaaaggaattaattaacaagtttgcaagtgagagtacttaccgagatgttcgctattttagcatttgggtagaaattttgacttcaagttcttgttgtacttgccagacttgtatgcacctttattgttatcttgtaacatggtgcggaccgtctcaatttgttctaaacatgcttggtgtggggtctttgctgtcaaggagtattcttcagggtgtgaatgctaggttgtctgccctaaataaaatctatttcaatataattagaattactaattaataaaatatcagaaatgattttatgttgcatggttcacatgatttacttcatgattatatttaatgtataaattctattaagtcctgaacgtatatatttgttcatggttatagtgtcgtcaatacagtatcatataatcatgattatatgttcaaaagtttaattcacatgatttgtcagatcgctagatttagactgacatgataatcggcgataaggtatacttacaccttagataagtgttatgtcctttctagggaattggaaaagtttaccagtatcagatgtatagagattagcaaagaataactggtgaaataaagtggcaaaattctaattagagattggtccttaagtcgccggccactctagtgagtttttgcccaatattttattctttttaatccatataattcaaacttaagccctagtgaaaacactataaaaggaacatgatgctctcatctcatctaattattcatcttcaacccaccaaacctagttttcattctctgacaactagtagatgagagacaccttctatagtgattcgaaccctccttcattgttcttcaatcaaattcgcccatagtgatagagtgccatg

SEQ ID NO: 342427 - DNA, 995 bp, Cannabis indica
attaccatttatttttcattattttaatgccaaataattctaatctaaacctaggtggttacctataaataaatagtgatggctcacattcacacttaactctgtcagatgaaactgagcttctttctatttatcctagccgccagtctctcttctcttttcttcaatttttgaaccttgagtgaatgagtgagtgtccacacacatcaagtggtatctcaatcatactgtggaagattgtgaagaatccaatcaacaagaaggagaatcacatcaagaaaggagagaaagagatccaggttcagatcatgataatgctctgctacagaaaggaatcaagggctagagatctgaacataaggagtcattattttcggctgcacccaatgtaaggttttctaaactttatatgtgtttattaaattgttttagtatttgtattaggatgttaatgaagcatatatggtagtaaatttagatcctcgtaaaatgtttctaacaattggcctcagaggcatggtaatgatttagtttcatgaaatatgaatttaaacgatgatatgtgttgatttggatggcttcatgttgatctgtgtgttatatgatgattgattgatgatggtgaaattttatgaaaaataattgaattttcgtttctggaattattttattggatagtttggaaagaattaagcaattcacttttttacaaaacttaattgcgaaatgaatttttaaaaatcggaaaatatcagggtgtcatcacccacatgcacgcgcgcggatgagcctcattcctcggacccgtgggcttcggacaggcttgtgtttgagttttctcggtcaggacatgggcgccttgtctgaaatcaaccttaggcgcgcgcggagaggctgcatgcagcctcctgcgccgtgcttcctcggtcagcccccagaacgtgcgtagggacaatatgcatgcaatgcatactgtccgtaccacttacaaattt

SEQ ID NO: 342428 - DNA, 685 bp, Cannabis indica
aaactcatattctgttttgctctttacacttccgttcaaaactctcagttaagtaccacagtggactgtctacgtgtatacaagagtacacgtggcaaaattttagtggtccacgtaattttaatttaaaatataataaaataatttataaattataaaaacaatttataaaataacaaaaaataaaaaacttatttttactttttttttctctttctctttctctttctctttcttctcgaacgagaaccccaccaacccaacttcttctttatcttcttcttcttccttctaccattaccaccaccacaccaccatcatcccaccacaacaattgtcacacctcaaccaccatgatcaccatcattgtcccaccattaccaccacccttatcaccaccaccattatccctaccataccaccatagccaccactacattttcactaaacctaaaacattttcaaccaccattatcaaccaccattatcaccatcacaagcattttctctaaatcaaacaaaaaacatacagatctgaagaaaaaatacccataccaagagaggaagggcgggattcatcgcccaacgtcttcaacaattgacgaccgaagatggggccttgtggcccacaaccctttttcgtcaaagaaagaaatagacaagagaggagagtgagcacgagaga

SEQ ID NO: 342429 - DNA, 795 bp, Cannabis indica
taccaactttcctaccttcgaaaaccacataaaacttgtgttgttgacacatccctaaaatggttacatacagtaggataaaatacgagttgtcaacgaaatttccaaaagataaatacgtaattgaaatcgtgatgcctaaaaagatgcttaaattaagcatacatgaaaattgattgatataaaatttaaaaagaaatattaatatattattatataaaaaaaaaaaaaaaaacaatagaattaaaatttctcaaaataatatattgcgtattaaataaatttaactataaatattaattttagaaatattaaactattagattttaatccgatgacaaataataaaaaaaatatttgaatttctatatttaatttataaatttcccttttatattttagggaatatattcatttagtaccctgtgttttaatgaaaaacatatttggtaccttatacttaattagtaccttatattttttattgtatatatttaccctaaagtaaaatttaattaatacaattttatcattttaaccaaacaattttcagttatgtgtaatcaaataattaaatttgaattcagaattcataaaattttagactgttaattgtattgataaaattttatcaaaaaaatttgaatttagtgtaccaagtaggtataattttaaaatacaggataccaaatacagggtaccaaacttgtatttagacaaaacaccggatattaaatgtgtacaccctatattttatttacataaaatacactcttttgatatatttttatgttg

SEQ ID NO: 342430 - DNA, 739 bp, Cannabis indica
actatgacccacacagagtcgaactgtctcgtggttctaggtttacctaccacgaagtgcatagcaatatcttcccatttccactctggtatattcagtggttacagcaaccctgcaggtcgctgatgttcagccttcacttgctgacacgtaaggtacttcgcaacatattcaacaatatcatttttcatgcctggccaccaaaacatggcttttaggtcttgatacatcttcgatgaccctggatgaactgaataaggagtcgtatgagactcattcatgatctctttcttgatgtcctcatccatgggcacacaaactcgattcccgaatctcaacattcctgtttcatccactgagaaatcactagccttcctagccgaaaccctagcttgagtgtttatcaatttcgaatcttgcttttgtgcttctttaattcgttctaaaagagtggattgtagagtaatattagccaattgcccccacaaccaactcaatcttagctcgagtcatctcatttgctagctgttgggagatttgcttcatagtgctcaactgaatcagaccttttctactcaaggcatcagcaactacattggccttactaggatgataaaggatctcatagtcataatccttcaccagttctagccaacgtctctgtctcatattcaagtccttctgggtaaagaagtatttcagactcttgtgatcagtgtatatctcacatttctcgcca

SEQ ID NO: 342431 - DNA, 610 bp, Cannabis indica
ttgttgctgtagtactgatctctgttgtgttgttctgatatgagattgtatttatattagtgtatataaacagagaaagctaaaagttagttacaaagttttaacaaactttgtaatataactgacttgctgatgctgtctgcaacttgttagagaccaaaggtcacttagtcctttatttactgccttgtaaaactctgtgtaatattctggtttttacagtgtacaggtaatatgggattttatttcaacacttttgtataatagcaagtagcatgttgtcttcattagcatttttcaaatttataaaattggaatctagcttgcttgattgcttaagtatgttaagtttgaggctatgcgcctatatttatgaagagtaaattgcgacataaatacttaatgtttcagattttatacacttaaatacttaatgtttatttttggaggcaaaaatacctaatgttacaattctcttataatgttactaccacttccgttaactcataaaatatagaaacgtgtagggttcagatgtattacatttatttattttattttaaaacttaatattattaaaatcagaaactaaatgctacttgtttcaaaa

SEQ ID NO: 342432 - DNA, 573 bp, Cannabis indica
ctcccattcactgggatgaaataagggagaagaaaaacctaggtccagaatcagtacaacggaccaatgaagcaattgagaagattaaagctagaatgcttgcctctcagagcaggcaaaagagttatgcaaatccgaaatgcagaaatgtagagtttcaagtaggggatcatgtgttcttacgggtgtctccaatgaagggtatcaagcgtttcggaaaaagaggcaagttatgacctagatttacaaaaccttttgagattctcaaaaaggttggaaaagtggcatgttgattagctttgcctccagctctttcagcagttcacaacgtattccatgtctctatgttaaggaagtacgtttcagaccctactcatgtacttagttatgagaatcttgagttgcaaccggatatgtcatataaagaacagccaattcagatccttcacaaaaaggataaggttcttcgaaacaatatcataactctggttagagtactttggagaaatatcagtgtggaggaagcaacctaggagttagaatccgacatgagagctcaatatccagagttgt

SEQ ID NO: 342433 - DNA, 843 bp, Cannabis indica
tcaataattttataatattttattagttgccgaaaatctcggtcaacacaaccaagaaaacattccattgtaactgaaataccaagtgaaagaaggataccaaccattgaggataaatgacgatctaatcttattcttctacatacaagtaaaactaaaagaaccttgcttcataaggtatccattgtgtgtgaacatggtcagcaacacaagttacacaataacaacaaacaatacctccttctttgcaatgagcaactcattagttgcacagcagttgttttaagattgtatgtcatattcaaagtattaacagaaacatgaagattatcaacatcatatttaacacattaatgtgaagttttaaaattttcttattacatcgatgatacacaatttttactgcaagcataccatgttgttatagtagttttaatactaaaaagattgtcgaacccacaggaatttattattaaattttactaattattatactttttaattgtatactttaattagataacacaaagtaaattataattaagaatcaaataataagataaatggaaaaataaatagacaaataatgatttttaatcaaaaagtaaaaacctagagcattgatttccctatttcaaattatgaatctcaatttactgattatcctaatttatcctataatttgtaatttcaagaatcctaatgtaagctattaacctctctcgagcgatgatagatttaacttaaattaactaacacgatatctctattcaatgttaatcaaataagcactcataaagcaatatgattctctttaaatgaaactcatagaattagtggaat

SEQ ID NO: 342434 - DNA, 574 bp, Cannabis indica
gttcataaaaattattattataatattaaataaatagggtagtttaaaaaattagagtattctctataatgaattatttttatatctcgatcattgtatcttactcgttatcattattgtatctcactcggtcatcactgtatctcactcgttgtcattgtcgtatctcactcctaatctcacttattatgatcgccgtatcctacttgtagtttgccactatattcaaaattaaacttgtcacttatgtgtttactgaaattagtagatttcccttaatcttggtcacttaataattcctaataatacatcataaaatacaagactaactctaatcataatatgagtggtgtctctctttatttgagccttcacttattttcttaatacctatctttagaaaattgagctataattcaaaatacttaacacatacatattatttgttacgctatataatagtatatatttatgtttttctaagaaactaatataaaaatagttagtcctgacctcatattcagccaaccgacagcagagttgtatttaatattgatgcttgccacatgttaca

SEQ ID NO: 342435 - DNA, 1029 bp, Cannabis indica
aatcttcattggctcgtcctcacgattcctcagctttggccttgcccttacctacacataaacatagcactgtgagtcgacagactcagtaagaaaaacataaatgataaaacatacatatatcccaggttatgatcagacgcccatacccctgaccacaaccctaatccttgtgtcccacacggtgatgagtctcaaacgtttgtacaacggtacttttgaaaaagtaacagcctatactcggttcgctagtcatactctagccgctagtaaaactctagccgtatcgatgtgttacagtataagcctatactcggtatgtcagtcatactctgggcataccgatgtgatacggtcaaatagtacggtagcatactgttatactaattacctcgattccgaattcaagtgtgtcggtcaacctgagtggaacaaactgctcggggaattagaggctcctaaactatcacaacactgataagcgacacgctaaatcacttcccggggacttaaactagaaactaaaagtttccctatcgataaaaagcatggcaataccctaaataacacaaaaatgggaagaactagggttcccaaatttatcccaaccggtagactggttctacaaccagaattccagttctgggaggaacccaggacaccaaccagaattctggttcctacaggccattctgaactagaattccggttcagtgcaggaaaccttaaaaaattcatttctcatgcaattcaaccccaaatcataccaaaacctccagatctgctatttagaccccaaagaacctatccaaagcaataaaacaaagtttaatgcaaaattacaaaaactaccattaaagctccaagctttgagttcaaaactcaagcttggttaaatcccactaacatgcatcaaaacctgctttaatccactcaactaagcataaacaagcctctgaaaacaacagcaatcaaatacaacaagcacagcaagctatttcaacatttcaccattgaaattaaagattt

SEQ ID NO: 342436 - DNA, 610 bp, Cannabis indica
ctagtcaccaatcaatcattattgcaagaatccctgaatcttgtagaagagctctaggaagagtcacaaattcgtctagctgcgtacctaaggaaagtggcaaaacacttcaattttaaagtgaaaaatagaaaaatttccataggagacctggtcctaagaaggttctttccagtctcacaagactacggagtgaacaggaaaaccatgaagagcatgtcaatgaagaagcagatgaacaagaagatcgtggtgagaatattgattatgatgttcatgatgatggtgagccaactgaacaggatcaagaagcacctccaccaccaccagttgggactccagtaaggagatccacaagagagcgtaaaccaacttcaagatacaatcctcatgagtatgtaatgctcactgatgggggagagccagaaacttaccaagaagccattctacatgagcacaagaatgagtgggatggagccatgcaagatgagatgggatccctgcatgagaatcacacatatgacttggtgaagttgcctaaagggaagaaagctctcaagaacaaatgggtttacaggcataagactgaaaacaatggctcacaacggta

SEQ ID NO: 342437 - DNA, 521 bp, Cannabis indica
taaaacgtcacgttgtcgtgaggtataaaaactcaatgattgtgctaaagaattaaatgtctcaagtatacgattaattatagatttttttattacatacaaacacatacgtcatgataagatagagtttatttaagatttagttcataaaaaaaataataatttttttatagaatttgttataaataatttaaatttttaaaataatgataagtatttaatattatatattttgaattttgcacttaattataataattttctttaatttcaacattttcaattgcgatcaggtcgttgattagggttgaaataccctgtagatagtcaatgtaagcataaactacaacatttgagtgatatgaacagtgatcgataccaatctaagccttttgattaggaaagtcaataagagctagcattaccgattagtgtaataattgttaatctaattagaatattctggatgcaaattttccttatgcaatttgtgtaagcgtatttgcacatattcatttatc

SEQ ID NO: 342438 - DNA, 741 bp, Cannabis indica
agcttgaagacatggaagaattcatacacactatcataatgtacttgtcaaacactgtaaaaaggaaggttcagaacatgaagacagtttgagaattgtggagaaaacttgaagaaatctacatgaaaccctctctaactaataagatcaatctgttagaatctttatatggttttaaaattgtcttctcatttgtgtctagaagataattgattaatggtgaaaaatatacattcaataagcttaaagtttaatataaattaaaaataaattaatatttcatgagattaatgggatatatttttatgttaaaaatatttaatttagatttaatttattattttttttcttgtaggaattaaaattattgggtgttttgaagagaaatgaagaattgaaaaaaaaggagtaattatataaagagaaaatcagatttcagcctgggagaagcccactcgcgcgagcccacattccttatcccaagccgtccgattgcagatccaagggtccaaacagggcgcgtgcctctcagctccagacaaggcgcgtgaggcgcctgtctcctcctgcccagcctgctagcgccagccgcgtgggacccgcctatcccctctctctccagcagctcctctccgccagctctcctgcgcgacacgtgttcctcatgctgcagattgtccccacgccagcttctctctccagcagcctttaagaaatgccatttcaaaatacactataatt

SEQ ID NO: 342439 - DNA, 690 bp, Cannabis indica
agggcataaaacctaacaaatagagcattcaggcgcggtctctgctgacggtcgtatcatgtgaagtggctccaaattagtgcgctgaaatcgaagatttccataattatcgaaaccccattcggaccctggcttggcgagcaccggcatcatgtcacctacagtctcgtcgctgacctgccctttttgggcggagtattggcactcgacagagtttaacccaaacaggttgttgattgctgcagctgaaaatgagactgggacttcacgcaccaccactacagtaggccattcttgggataggaagtttgcgtaaaattccttgacaacttccatgaccgcctgctctctttgctggacaaaaagtccccaatctcgcttatgaactgtggcactgaccccttcgggcaactcatcaatatcctcaatatcggctactaatccacgctccatataaaattctcgattgtcaaccttctcgtgatactttgtctcagctgccgggcaatgaaacttaggaatttcatacagtgatttctttttattcttgttggcggtctgcttaactttgggcattttcttttcttttcacttgcacactaccccaacacaatgaatttcttctttgcttccttactcactactgcccctcaacacaataagaactcttacaatgcacttcactgtccc

SEQ ID NO: 342440 - DNA, 953 bp, Cannabis indica
tccattgttacaatcctaatagtcaaagatcctctatagacgacctacactgaatagggataaatttactgttctacccttcaatgtatattcttaaaacacttagctacctataattatatactttagtaaactaatatagttattgaaatgaggcatcaataatttatctctattcagccaagctcgaaggaaatcatcgtttcacttctaaatacttatagaagctatagattccatatctatgatcagctaggggtgttcgcggtgcgggtggtgcggtttttgactattttttcaaaccaacccgtacatgcagttttttcaatttctcaaactgcactcgcaccgcaaaactaaaaaaccgcacctcaaaaaatggtgcggtgtggtgctttatgcggtttggactcattaaataattaaactatcacaaatacaacaaagtttgagcaacacttgtcaaaaataccttaagacttgaaaataaatatgaaaaaaaatttcaagtttcaacaatacaatataattagtgggcttaggttgggcatttacatattggagctaagtaaatataaaaatttgtatttttataatgcagtgcgatgtggtttgaaccacatattaaaaattcaaaaccacaaaccgcaccacaccgcgtggtttagaaaaaatttaaatcgcgaccgcaccgcaaagaatttcaatccgcattttttttacggtgtggtgcggtgcgggcggtttgagcagtttgatgaacacccctatgatcagcgctcccactcaatttaactgccatgttcccaagatataaatatctactagaactattggttagcatccacgaacaacttgaagaacataaataaaacaactaagttgaacttaaccatatcaggattaagatccatagaccttagagcaaccattgatattgacttagaaagata

SEQ ID NO: 342441 - DNA, 680 bp, Cannabis indica
ttcaataaacaaaattattttttaaaaaaatatttaatttaagtattatttgtataaaaaacataataatattcagaatttactgttaattataattttaatttaattatcgtaatattttttttttttgaaatatcatacactttttttttattttttaaatagaaaaatagaaatatattttttctataaaaatgataataaaaagatagtttttttaaatatgtgtaatgaggttaaatttaaattgtaatattaaaaaagaaactttatgttatatagacacatttaatacaagataaaagataagaaaaatatgtatggtaatcttaaatttgaattgtaatatttttttaaaaataaaacttttgctatatagccacatttaatataacattgatatataatttttaaatatgttttcacattttgctatagaatacccccaatatgctagaataaatggtctggatcatacttgtgtattgttttccataatttttgtcgtttattgcttctgtgatattaacacttatatattttgttttgcagaaaatccacacacttttcaggtgagtttggttgaaaaattttgggaaccatcaccagaagtccaatgacattaaggatgtcgccaaaggtggcaagggcaatggcaaggttgggaaatctataatgtt

SEQ ID NO: 342442 - DNA, 528 bp, Cannabis indica
ttttagaattcatattaggattttaatgaaacatacttgttagtaaatctagatcctggtaaaatatatccaacaccattaatataattttcttataacaacaaccatcagagtataatagagatgactccctatgagtttttgtatggtaggaagtgtcaatcacctattcactgggatgaaaccggagaaagaaagtatttgggtccttagttagttcaaacgactagtgataccattgaaaagatcaaggcacagatgcttacttctcgaagtaggcaatagagttatgctgatcctaagccccgagacatagagttttaggtaagagaacatgttttctcataaatttcaccaatgaaaagtgtaaaatgcttcagaaagaggggcaagttaagtcccaagttcataggcccatttgaaatactctaaggttggacaagtagcgtatcgactagctttacctccagaattattagtaatgcacaatgtttttcacgtatcaatgctgaggaagtatgtatctga

SEQ ID NO: 342443 - DNA, 501 bp, Cannabis indica
taatctttaaaaatatacattcaaaattttaaaaagaccaaaatcttaaattgaataatatatgtttatattttcttttagtatatattaggatttttttataattttttaagttgtatttttatataaaaattattacaataaataataagctgtaatattttaaatttttttttatgtattttattatttaaatttttaaaataaattttctttttacatgaggggcgctgtccccgctccattgccgtcccagtatgggagttcacgccccgtctccgatgaagaataagcgaagatggggcggagatgaaaattaaaatctttaacaagaatgggaacaggagagtactccttacaatttttcccccaaatttaaatctatgcatttaagttttattaatttttatttgaatatatttaaataattgtatgtttatggtatggagcaatttgtacaaaatatagggggaagtttaaaaataccacttttattaatca

SEQ ID NO: 342444 - DNA, 602 bp, Cannabis indica
aatactaatatcacagatggggaagataccccaaggagttgaccgccataagtgaaatgcaaaatcacaagacaagaatagagatgctccatagtttcgaccgccgttccacacagggggcagctgtcatcctcaataggaaatctttttcctatgaccgaacgaacaggaagttatggaaaatacacgtatatttagttatattcttaatttttattttaattgtatacatttttttttgtgtgtggatgttattcaataaacaaaattattttttaaaaaaatgtttaatttaagtattatttgtataaaaaacataataatatttaaaatttactgttaattataattttaatttaattatcataatatttttttttaaatatcatacactttttttattttttaaatagtaaaaatagaaatatatttttctataaaaatgataataagaagatagtttttttaaatatctgtaatgaggttaaatttaaattgtaatattaaaaaagaaactttatgttatatagacacatttaatacaagataaaagataagaaaaatatgtatggtaatcttaaatttgaattgtaatatttttt

SEQ ID NO: 342445 - DNA, 555 bp, Cannabis indica
tacttgctccttaaagatctattatttcatccttcttaataagtaggtttcgtaaattatactgtcccagtctggtataacgtctactattctaagtcatccctacttcctatatgttgggcttccattcatggctaggtgtagagaccgcttcttcaaccattcatagataggtgaaaatatatgcgtcggtacttagttggctattggtacatttcattatgtgcttcaagttccactactagtgttggtgatattttgctgagcctgtgaaaactcttcaacaaattgtcttagtcatgctcgtagtccttccaatacctctattagatcgttagccttaactattattgggttctctggaacatcaaccatctgtgggtcagcggaacacacatccttagcccccacctctattggtcgttcctttcacattgattctaactgatcttctagtttcatgtgtgagctcttacaagaaaggttgatttaaaagaaacaaaagagttcaattattggaagagaagattctatgtacatatctaaacttaatgt

SEQ ID NO: 342446 - DNA, 694 bp, Cannabis indica
atctacctcgcgcatgagcataaagttatattcagtaaaccagagcccatgaggcacgtgaggcataaaagagatccaaccaaatactgtaaataccatacagacatcgggcacacaacagacgagtgtcgttagttgaaagatgagatagatagtcccatcgcacgaggccacttcaagcaatatgtgaataggtagggtaatagacataaccagtctaatccgcccaacaacccaagcaatcagggattacagcctcctcctgttgatggagaggatatcgtgattatctcgggaggggcacatattgcaggagagagcaataatgcccaaaaaaggtacgtgaaggaagtgaagaacgagcagtctgcctttgctccagaaccttccaagaaattaaagaccgaagaacctccaattatattttcagaggaagatgaaaagaatgtgaggtgccctcacgttgacccattggtaatcaccatccagctcgctaacaaaaggataaaaagggtgctggtagacaataggagttcaatgaacatcctttacagggaaacactgaagaagatggggctcaaaaaagctaaattaaggccttgtatggtgaatctgtgcggagttactagcgacagtgtcgccagtcaaggcataattgagcttgcattaactttgggcgaagcacctttatcca

SEQ ID NO: 342447 - DNA, 832 bp, Cannabis indica
ctcgggacccaaacttggactcaaaacccgacctagaacaggacccggacatgatctaggccccaaaccccagactaggacttgggcctcggactccgaaccctaatctcggatccaggaactggatctaaaccgggtcctagaacccgaacttggacccggacctaaactcgggactcggcacatagtcagtgttggggtcgagtttattaaaaatatattataattttacacaacctattaatacaagtccataccaaacatagtattatattaaataatactaatataatacaatttaatccaacataatacaatacaatataataaaatatgatctggggtgtaccaaacgagcatatatgcttgttgaccgaggttttcggcaaccaataaaataataataatttagagagctgtaagaaattaagaaggagattttttacgtggttgaggcgttaatatgataatatttaatacagagaatgttcttggtgagtttttactattctagcacttgtgcaacccagaattctcgacctctctttaatgagctttggggggtatttatagtgtttttgtggggtgatccccagaattaaggtacatgcatttctgtaattatcagtaaagttgtacattcccaataaatatatcatgggttatgcatggtctaatccctaggtgatgtagggattttatgagggcagtccctaatccctcttgactgatgtgattcttcacagagtagctgtcactagactttattggtcatagcctagtaggtacagatcgggggtcgtgccgtaagactttattgcgtgtggcagtt

SEQ ID NO: 342448 - DNA, 868 bp, Cannabis indica
tttgtggttggttttgtctccatgaaaaattgggatggtttctccaattaggattgtatgtgttagaaaatgggctatcatttggtttaccatatgaatgtaatgcattagcctcttcggaaaatgtttcaagaaaagaaggacatgattgatcattatgacaagtactagcaaaaacatcttttttaggttgaacatgagaattcatagtttgacttatgactaaggcttctacttttcttgctaatttttcaaaagatgttctcaaatcagtttcttctttaatttcatattttcctcctcttttaggtgaattatttgctctagacctaggctcagaataattccattgttgtgaattaacagataattcttcaagagcttcccaagcctcttgcccttgtaatttcaaaaattttccggtatgcatagattgaatcatttgtcggtttgaaggggttaaaccatcataaaaatattttacaagtctccatttttcaaaaccatggtggggacattttaataataaatctttaaatctttcccaacattcataaaattcttcattatctttttgataaaattcggagatttctcttcttaaattatcagttttggacatggggaaaaatttggcaagaaatttattaaaaagttgatcccaagttgttatggttccggttggaagtgagtttaaccaagctttggctttatcttttaaagaaaaaggaaacaacctaagcttaaccgattcatccgaaaaattttgaaaacgaaaagttgagcaaatatctaagaaatcttttacatgcatgtaagggtcttctctttctaaaccataaaaagaaggcaacaattgaatgattga

SEQ ID NO: 342449 - DNA, 546 bp, Cannabis indica
tgtacccggagatgccgtagagatatcggcggtgaaatcgaagaggagagtgggtgagagagagagtaacttggtatgggtttcggagttgggttcgggttgctctgtgtgagagcgcacacacagacaccacctacccagagagagagagagagagagagagagctttgatatgaaatttcctaataccaaaatctaagatcaaaacggaaaagctacatccatcactctaaattaaccctctttttccataaaattaaaaaattaaaaaaattaaccctctttttcctttataaaaaaaataataataataataattaaccccctttttctatcaaaaaaataaaaaattaatactcctttttaataagttaatagatttttttacacgatattagaattttcttaacagattttctgcacttttttaaatactttaccaaaatttcacctttttttattttacctcaatttacataattaggatttttgtctcctaaattttgacatgtaccaaatcatgccatttgaacttttaaggtcgtt

SEQ ID NO: 342450 - DNA, 421 bp, Cannabis indica
caataagaattaacagaagagatagatttgccaatcccaaccttccatttaagactctcttgagaaggttcctaccccaaagcaaactatgccaggtaaaggaagaacaatgacccttagaagcctcaaggaaagagttatgcctaaaatatttagccttaaggagtttagcaagaagcgaattaggcatagaaaataccctccaagcttgtttagcaagtaacgcctgattatgacacacaaaagaccgaaaacccaatcctcccaaaaatttagactgacagagtttttcccaagacttccaatgaactttcccatgatttcctgaagaaccccaccaaaattgggccatgagttgttcaatttttttactaaatagaaacaggaaccctaaaacaagacaagtgttgggttttatgcc

SEQ ID NO: 342451 - DNA, 619 bp, Cannabis indica
tacattaagcaaattacttggtaacaataaaatatatttatgtatacatttgaataagtggatgaagatttcattaaaccaagtcatttaacaatacattagcaaattacttggtagttggtaccgtagcattcaaataattataactaacatttaattatgaagttcgagctaattgataaataacacgattaataaatcctttaacaaaacataaacaaatattatgcaaactagaaataagctgcctacaatttgaaatacagaaaccgaacttagcaactctaatgagcttcgaatggcttaaactgtgaccaaactatctgtctcgatcattacatcttggcgcttcgaggtcttgatccaactcaagacttctttgacaccaatagcctcggcaagagctggagcaacaacccccactcgacttgcaaattgagccacaatcacagttccagcagcatcacaagccacccaaccatacccaaatttgtttagattgtcaaaacaggttgttacaacagtaacaatctccaagaaatacaattcaaaactaaaaccaatcacaaaactaaaaacttaaacttaattgaaaatagacaaagaaaacttaacttga

SEQ ID NO: 342452 - DNA, 985 bp, Cannabis indica
caagtgtgcgactagaagaatatctcaaaaaacgtttgggggttacccagtgacccaaggggcatgcgtcttcgagcatgaccctgaagttactgggaaacacccaccgttttgagaaatctaaccaatcacaacgtgcgagtatatcatgcatatccaactagcggtacatctcaagaaatagttgaggaatgtcctatatctcaaggggcatgccttcttcgcataaccattgggctaacggaaacacctcactgtttcgagcaaccctactagtcgaaatatacagttgtatgggaagagggaatgctggcatatgtcgcaaatggctgggtgtatcacagtacctcaaggaacatgcgatcacacatatgagcattggcatacggtgacacacctaccatttgaaagacttaaccagtattcccacaacaaaatatacagagagtataaagaaaaccctaagttctaaacaacgggtaaaagtgataaagtctccaagaattcctaaaggaagtacatacgcgagtattggggatgttcatccaaatacacgcgagtattcaaaagataagtaatcaaaaagatgcgaatattcaaaatattcttcctaaattggcggttatgccaatttcaggtctgttttcttctggggattacccagttttaacaaaggagtaaaactctatgtgtattccctacaactaaacatgcatttcaacctttccaaatttcaaaaaattaagaaatgcaaggctttttctcaaacccagaaaccaaattcagaagaaaatttgaaagactaaccttgggatttgacgctcctctatgtgaatagtctcgatcgtttcgagaagctttgaagattcaaaaggggcagaacaaaaatttgtttgaaaaggggtttttgcctttcaaagcttcgggtgaatggagaaaataaaaatgagagggaaagtaagaaaatcatttcgtatcatgaggc

SEQ ID NO: 342453 - DNA, 1246 bp, Cannabis indica
aatgaccttgatagcgagctggatcttttttttttcttatccttccgagatcgaccctgtacgtcttgttgcttctttgtttgaaagcttaacgcttcatttgtgacaatcacggttcttattaacagagagtttctcgaggctcatttgaatgttagcttctgacttgttaagattttaagtctcattgagaagatgtctgaagttaactgggggaagttacaggaatgggccttcctatagcgagataggcacctcgcttattatgtctcgagtccactggactgctatacttagtttgtgcattttacactaagtgtaatcacagttgatatgcgtcgcttctgtcttcccaaatgtaacggagttgatgtcttgctttatacatccaataaggtatggtttctcatttatacactaaacaacagtttgtatatcttttcctcgcataagaccttacagttagcgagttgcaaatacactctgccacttacccaattaatgagttaatccattaaaagtgatttcatcgatccatattccctttaccttgacacgtgtcctccactgaaatggtaaccaaattttgggcatagcaattgccccttgaaaagttcttttttaataaaaagggctttctaataattatagaggtcattttcgtcatattccctttttgaaaaaatgcatcctttgattttgcggttgtatggtttcgatggtcattatgaattgtctttccatcttctgccccactcccaactgttagatttccttacctttggccttcttgtcactgactttgagtataaaatggtgtcttaagctttccccacacacttttggttttttgtttagtttcgtcttgagattggattgtcattctctcatcaaggtgccccatctgagttcagaaatttgttcctctaaattcataacaccaaaattcgccaactacctctcttctctatacgttcctaggaacttcaaacctcaacttgaattggaaacaacggattccaaggctgaggagcttctgatcaatccaaactaaggaaacgtcgttgatcgttatgggtgatcctcacaagtgattctcgagggtaagtattatcccttgtgaatggtggtttgaactggattatacatattgttattttttattgctccattgatattttatctctatctccacaggaatggacatagattttacgagcgatcttagaggtcctcctcaggctga

SEQ ID NO: 342454 - DNA, 838 bp, Cannabis indica
tagttatatttttaattttaatttttaatacattaaaagaaaaatagtattattaaagagtcaactattataaaaatacgatttagtagtataaaaaattaagtgtcaaaaatattaattacttttttatttgtaagatacggaaaatccaaagtccacaagttcaaaggagccacacaaaacagatgtcaagtagtgcatgcacagattattttatccaatttgtagagttagattatatggttctcaagtggcccccatgttaaaaacctaataatattataattttaggacattcattatttttttttttttatgtgaatgtacatttatttgatgtatttcaaagattattttttttttcgaaaataaataattctattaaaaaaaatacgaggttaaagggcctgagatcaatacaagtatacactatttaaagtaagttaggcggaacacccagctaccaaactcgagaagtatttaaagaaagagcaaatttagctagagaatagataagagtatttactaactagttcgattactacgagaaatagagacatgagaaaagacttccaaaggtaaaagatatcaataagaacaataccatactcattgcaattatttttcttgtttgaaagagaattcaccaggcacaaacgtaatcagagaatatattgatatgagtatattctaactgcagaaaaagctcatggactcatggagaagggcgcaatcctccgcccatggagtatttcaaggattatttgttaagaaaaatgtatttcaaggattaatacataataaatattaattttttgtaagaacatcgtcattgaaa

SEQ ID NO: 342455 - DNA, 1715 bp, Cannabis indica
aggcataaaacccaacaatacaatctccatctgctcgctctcgcggctgctcaaccttagccttgcccttgcctacacatagaaatagcaactgtgagtcaacagactcagtaaagaaagcataagtaataacataataataataacccgaattataatcaggcacccatacacccaaccataaccctatccccgtgtcccacacggtactgagtctagaacgttcatacgacaatactatcgaccataatatcagcctatactcaatatgctagtcatactctacccatattgatgtgataacatcgatcaatatttaagccaaacatacattcatcagtatccagtacaactctatgtatactgatactgctatcattgtactctaattggcataaacaacatgtacgctaaacatgtaaagacatatgtataacattacactaatcttaccttattttcgaattcaggtgtgccgaccaacttgagtagaacaactgctcgccgaatcgacaacacgaatctctgaaacataccctaaactaacaggaaattaaccaactaaagctctgaaactaacacgaatcgacaacacgaaaagttcaggaaaccggtttctaattcggttaactggttttacaccaggtaacctaaaaattttgaaacatcaaccaattcgaatccaaaccttaccaaaccttccagacctgcttaatataccccaacaaacataacccaagcaacagaacaatataacatgctcaaaatcaaaattcaccattaaagagccaagcttgagttctaaaactcaaagcttgctcaaaccttacaacaaccaccaaaaccagctcaaatcaacatattataccataatctaactccagaaaactacaacaaacatcaacagcaactacattacccaaacttacaatttcatgcataaatctcaacttaaagcttttaaaaccaaaaaaagagatgctaggaaccttaccttgactttggatacacttaaagcttgctaaaatctccttgaattgttgaagaacaatctcaaaccctagctgttctagggagctcaagagagagagggttttggagagagaaatgtgtctttttgtctaatttcttattttgtaaaataatgaataaaataggttttattaaaacaatatcaacctaataaaaatcagattagtaattaaattaaatccccactaaaggacaaaaacccgaaaggcgaaaaagaccataatgcccttgcctacaccaaaaagtcataaaatcacctaggggtaatctggtcatttttaaaatctcgactattcccgacattctcaatgtctaactatattgccccgctatattaaaatactaaaatgtgattctaataaccaaacaccgcgttccaatgttgtcaagcacaaaatatgcaaaaatatgaaattctatatatgacatataacatgcattctaaattcaaataaatgtccgtaaactgataattcataactaatatgcaagtttcataattaaaccctatttatctgctaatttctaaattaaagttaagcggtctttacataaatatataaggttacttactttcaagttacaaattatttattatttattttaatttaatttttaaattaatatcacaatcatttaatagtgatttaatgactaaaaataaatgtaaccatcatagttac

SEQ ID NO: 342456 - DNA, 512 bp, Cannabis indica
acaagttataacaatattcattcagttcatatataatacatatttcatagtataatggagaaatcaaggaattctagtagtcatgtagatttggttgtgaatgaagacaacaacacaaaattgctaagagctcaagcccacatatggaaccatatcttcaatttcatcaattccatgtccctaaaatgtgcagttgaattaggcataccagatattatcaacaaccatggaaaacccatgaccatttctcaactcacacttgcactccccatcaacaaaaacaaatctcattgtctttatcgccttatgcgacttttaacccactctggctttttcgctttagaaaaaaccgaaataaaaggagaagaagaagaagaaggttatgtaattactgaagcctccaaattactccttaaggacaatcccatgagtgtcacacccttattgctagtcttgctcgatcctaccttaaccaagccttatgatgttctcagcacttggtttcgaaacga

SEQ ID NO: 342457 - DNA, 571 bp, Cannabis indica
ccacaggaatggacatagattttgcgagcgatcttagaggtcctcctcaggctgacaaggaatcctggaggaaagttagcatggtttcggattctactaaagaacccaaccaacccaagacccaagcttgcagaagaagacctttgtgccaacctctctctggtattgagaaatttcctgaggaaggggatgaggtctcggctacaggaaatgggatctttagatgtggagaatgaggtctatgcagaggtcgagaccttctacgtgtagacggtcttgctcgagctatgtgtagccggtctttctccaagctatgtgtagatagtctttcttgagtttatcaaccccccttgtattttttgtttaggaagatgacttaatggtttgcctctagtggcatttttgtaaagataagtttgtaagccaacttgggttttctcttatcttaaatgccttgtactcttttcattcgaacttaatataaatgtgttcgcttacgtttttatccacaacataaacagctatattttgatccaatgtaaagtacttttgggtttttccattgctcata

SEQ ID NO: 342458 - DNA, 658 bp, Cannabis indica
cactactatggctcccaactctcacacaaggcccaaaagagaggaatttaacctttcattaaataactgttattcattgaataagcccaatactaattaggcctaaataaaactatcatgggtgatattttattttgcgaatttttttaattatatacgtaacattataattattaacatatataccattgctaaattaaattatactattctcgttagtgttacccaatatattaaacaaagtatctaattttttctttgtcacattgcatcttttattttgttttctttttctttttttaatattttctctgtgtgagtgaccactaatatttgtttttatttttaattttttaataattttttcttcaattttaaaaaagaaaataacaactacagtattatttaatttaattaaaaaaaataatattattttgacatatttttcaagttaatcatttaaacatgtgggaaccacactttatacactattaccaaataagatatttgaaattataactaacactttagtttcttttataaattgttaaaaaataaaacaaactacggtatcaaattattttattgtatttatttatcaaaaaatttaaattttaacattttaagatttattagatgttattaaaatataaagcac

SEQ ID NO: 342459 - DNA, 522 bp, Cannabis indica
tggaattccaatgaagatagtgttcaataacgaaactcagttctatggtgacttattcaccgagttcttcgagaggaacaaaataattaagagcttctcgtcagtatccaaacctcaagcgaatggacaagtggaagttggtaacaaaaccttgaaggatactatcaagaagaagttagatgctgccaaaggtagatgggtcgatgaactacctcaagtactttgggctcacaaaactactgaaaagacagcaacaggacatactccattctcgctagcatttggctcggaagcaatgtaacctatggaagtaaacatctcgactcatagacgagagttttatgatcaagaagaaaaccaagagctcttaaaactgtccttggatctacttgatgaaaatcatactaagtcgcaagttactaatgcagcgtatcaacaccgagtaacaagatacttcaacaaaagggtcaaaaagaggctattcaatattggagccttagtgctatggcgagtatttgcaaa

SEQ ID NO: 342460 - DNA, 681 bp, Cannabis indica
gctcattaatcatagcgtagtagcagcagagagggggttgtaccgtcagaatttaagacatatggcagttccaatacgcctcctcccatgtggcattaaatgcgaggtgactgttcaggtaggatctgacacctcccggagatgctttgttgtagccttgctctctgggagcatgtgaggcttaccttccttctccaggaggcatgtctaaggttaatcctgcgcttaaggagacttagctgatttattcaaacgctggaccctttccatctacgtgtcatcctccggttggcccacgtattttgggcaaaatcaggggcaacatttaccttccaagccttgtttagtaatgaagtgaacaaggcttgcttagatgcttccggttgccttatcagcttcctggcacgtgctttgggcggtggtggtgtattaatgaccatcattactgcagttattcactttttgcaggcgtcgattcgtttcttgtccatttattgatacggcgcattaaatgggtgtcagacgggtacccaaatgttttctaccgccttgatgatgatttaatccaaccgttggatctgtagaattggaatcgatcgtcatcctaaccttcgatggtagctgatcacagctgtctcacgcaggttctggcctataaaagccagccttcttacttcattt

SEQ ID NO: 342461 - DNA, 500 bp, Cannabis indica
acttttttagctctagtagcaactccggtaactttcccagtgtcgtcagtaattccagcgactatgccaattttgataacttgtttcagttaactttattatttagcatttatatttcgttatgatttttcatagtgtcgaatctggtttcacacggttcataagttcgaaactggttttacaggttttaagggttctgtaatgaggttgctctattttatgatgttattgtatattttttattttaagtttctttttattattttgtttctaagtttgaaactggttttcacacttatattttgttttagattattgttgtgcattgtgcgttgttttgtttatatttatgagtattttttttgtgtttttttctctatttggttgattgataaaaatagtttcaattttttcagtgtatatcatttttgttttattttcataatctttattattgttgtgtaacaaaactagttccttgatgaagaaaccactttctt

SEQ ID NO: 342462 - DNA, 553 bp, Cannabis indica
tctttttttttttttttaataacctaaaagaaaattttgaggtgtacaaataatacccttttgtaaataaggtggggtgtagttataaaaaataatatttaatggggtaaacttagtaatggggtgtagttataatttttacgggtgtaaatataatcaccctttaaattttatttcattacattcctattcctattcttaaatattcattcctcacacccaaacgctacctaagtgttaaaggagcataacattcacatcaatcaaacttataaagtagagttttttacggttaaaccttttcaactattattccacttgcacttaaccttctaagctcaaattttgactaaaaccctccaaactactgaactagtagcaaaagtaagtcattcatttttcacagttaactaccaatatagactgtttatgtatacacttttatacatgtgtgatattcatattggtacacctaatattattatttaaaaatataaaaattattttaaaatttataatattttttatttttataattttatttaatttcaaa

SEQ ID NO: 342463 - DNA, 1226 bp, Cannabis indica
aaacaacctacatattgcctaaatcctaatgaacagttttaaccctaaaaaactaccaaaaccagatgagatgataacgatacaaacaaatcaagtaacttatccacactatgcaaaaaacatgagaaagaagaaagcaacttatcgtttgaagttagggcttggggcaaagcctggtaattctgtctgcaaaccttcgaacgaagtaaggatcgctttgagaagatgaagttagaggaaactcgcaagaaaaaggtcagggacaaggacggcatgcaagtcttcggacggatttaatagtgatccttgatgaagaagtttaagggtttttcccaaactttctaaaatggtgcgaaggtggttccttttttcttattttatacccatgataatggtttcgtagatcagagaaagatttgatcctatggacatgattcgaagcggaagtgaaaaagatggtcatttaattctgatgtacctcgaaaccgcaaaacggccaaaatcagaggatatgcatcatttaaaaaaagaggaacatgatggaagtaacctttgtaatcactaaaaagctcttttcaattaaaaagaaatttttaaggggaaattgttatacccgaaattcggtaagcacatcacaggaaaacaggtgtcgagctgggaagaacgaagaacttaaacatgcaaacgaaaagtacacttagcatggcacaactcgttggaaatataattcgcaggatatgtttataactcggttggctgaatagcctttgcgagatagaaacgtacgaactgctaacttatgtattgatgagaaactatgtgggtgcccgtgtgcatgacgagacctcaacctcgctgcgtgaaagagaaactacaacactaaaaacacttagtgtatattatacaatatacaaactgagtatagatagtgtggcgagtcaagataacagatagcgaggtgtttatctcgctagaagatggtatgcatgcaaggaagatcatatcgacatcaaaaaatatagttatcagagttaaaacaatattagtcccgagaaatcaaatgacaagcaactgctcgcaatcaaggttaacttggctccattctcggcgaggcatccctatgggataaggcttaccgcatatctttaattacgcattcatctaagcccaataaaagcaggatattcacaactgtgtaaaaaacctcatttatttagcttgatttg

SEQ ID NO: 342464 - DNA, 678 bp, Cannabis indica
atattaaaatagaataactcattaaatgctgaactagtagagtatatctataactcaatggctgtaaagtcttgagcgagacatagatatacaaactattttgcatgtattgacgagaaaactatttcgtatatgaagatatgatcgcaaggacaacatcattaagacaaagcgaggcaccaatctcactacatatgaagaaaagaaagagaaatatgtttattgttagaacacttagcatataacatactgaaagccccaagttcttgtctaatctatctttttcctatttagattgattttatcttgatttaagcttgaatataaaaagaacaaaatcaaagattcaacaccagaattttacaagcttcacctgccctagaaactcattctaggcggctattgcttgggttccccgaaccagggtaatacctttcactatattcaaagatgtatcttacaaaaaccaacaatattgtaaacattacactcttttataaaatacagtgaatctatacccataccaaccaagacccttgattggagacacaagatccccttgtgtgaatgatgagctctcttcaacacttcttcaatctgaactcccttcagatctggtgatgaagatgatactgaaatcccttcagtctgaactcaacatcttcaagctttgatatg

SEQ ID NO: 342465 - DNA, 684 bp, Cannabis indica
tttttttttagaattattggctctttaagagttttaaatttttttaccactgcaccataatagtggtgacaagaacaatggaaatcagaaatcacaacaacaacaacaatagctctagtcaatccaaatctaagttcaagtttgaaaaattctgcaattattgttcaagggagagtcatctcaaagataaatgttatattttgaggaacgagaacaacacgggtaaatgtaaggacaaaaataataaggataacaggaataatgctggtttgattgttggtggtaggagtgcacataagttaggttggtcggattagaggtattttaatgggctaacccaattattgaagtttaaaaaagttataaaccattcaattttttttttctgttatacaacctaaccctacttagtacaattatacagggggttgagttgaatttattggattgagatgaatattttagattttaatatttaataataaataatttaacctagtgtgtacacaaaaaaaaaatgattcatataaatatatgtgtgtatgtaaatacagtacaaagttaataataatgattgattctcacgttaaacttgtttgtagagtagaattagtagggtaactatgagttacgtgtttttttttttttttgtaaggtaaaatggtaactttattaataagaaga

SEQ ID NO: 342466 - DNA, 429 bp, Cannabis indica
agaaccttatagattaggttaggaaaataagcttaaagtttcatttttacctcgatagaaaaaaacaatttgctccatggtgagagaagccaagttaatgcttgcccctatagttattcaaaaaagaagataagtgaaatcttgagacatcattgtcttattggagtttgggaaccaattgctaagagcaaaccgtattagtgaggcatggccataagtaagatgagtgatgcgaacactttgaccagtaggccattcaacttgttcaccagtgattttagtgagaatgcaatcacgatccatagacacttcatcactcttaacaccttttggcaatttctagacttcggtaatatcatcttctgtgaatgaaaaccaatggtcacgaatatagactttgctaaagaactcatattttttatcaagcaa

SEQ ID NO: 342467 - DNA, 1185 bp, Cannabis indica
tttcgtctgatctggtctttaaacattttgtttaccaatctttggtatctagctccagcattcttgagaccaaatggcatgaccttataacagtctagacccatatcaattcaaaaacttgtatgttcttggttcggtggacgcatcttgatttgattatactccgaataggcgtccatgaagcttaatatctcgtgtccgactattgcatccacaagttgatatattcttggaagtggaaaacagtctttggggcatgccttgttgaggtcagtgaagtctagacacactcgccatttcttgttcggcttggataccagtacggggttggctacccaagccgggtagaaggcctcgattatgaagttgttgttgcaaagcttttctacctcttcttttagagcttgggcctgttctttgtctagcagtcttcttttttgttgaacagactagaagttttgatcgatatttagggcatgtgaaattatagaagggtcgattccgacgatgtcctcatgtgaccagtcaaaaatgtctaggtttgctcttaaaaattttatcagagctgattttacttcaagcaacaaacattttccaattttgagtttcctggttggaacacttgggccaatttcaatttcttctaattcttccactggcccaacattggtatttggctccccaagtcggggatccacatcttcgtccccaccttgggaggttcactatttggaaaagctcttccccttgtccgaactctaactggaggattcttcctttttggccttggtcaagacaaggttgtaacattctcgtgcaacttgttgattccctttcaggcaccataccccattctttgttgggaacttgacgcacgaattgaaaattgatgtaacagcttttaagtcatataaggctggtcagcccaacttgacgttaaatgctgatggaacattaagtactagaaattatgccatcacagttatgctcttcggagcttgcccaacagtgaggagtaggcaaattttccctaaaggtgtgacactctggttggagaaaccatatacgtgcttgagacatgggatcagatctttgagttggagccccatattttttcatatggtgttttgtacaggatatttgcagagactcaatatctatcatagtttgggccactattttgtt

SEQ ID NO: 342468 - DNA, 598 bp, Cannabis indica
tctttatgttggttctattattagggtaattactattttggaccaatgatttgtaaaagttaccgattggatcttttattttgttaaaagataaaataaaagtgaatttttattaatatggtaaattagtaattgagggtatagtttacttttttttatagcataataaataataccaaggggttatgagttttttttatttataatatatgtatggacttttttataccatattttcgtaaaaaaaagaaaatagaaattccatatttgtaaaacaataataaagttcgccgaaaaagtcaacggcaccggaaaaatcttcggtaccggaaaagttatagtcgccgagaaaatcactgtcaccaaaatgttgctggaaaaatcattgtcgtcgaaaaagtcactgtcgtcggaaaagtcactaaaagtagatatctcagatataactaaaaatagaactggttttatgaataaaaactaataactcaaaccggttgtaattgaaatataatcagttctgtaatataattaataaaaataaataacacaaaataactcaaaccagttataattaaaatagaatcggttctataacagt

SEQ ID NO: 342469 - DNA, 1101 bp, Cannabis indica
ttaatagaactatattattatatagtatgtttgtgttgtcttttcaggtgtgttctgacaagttagcgtgtatagtcacaaccgggtgtttcgggctgaaccggattcgggcccgaaatgcaaattggattgaatcatttggcattttatttgttatttgataatctcaattttatttgaaatttaaatatgtatgaatgccatttttgcccttgaatgcttagttatgtgggaattggcccttggggcaaaaaggtcttttggcctttattttctaaattttaataaaagtgaatttgggagtaaatgaaaaaagatttctctctctctctctctctcttagccgactctctctccctctctaaccctcttgaaagttcaagttgattttgaagaaaattggagtgaattggaactaaattttggagcttgattgtgaggattgttcttgcttagttttgaggtagtccctacagttttaattgagtttctaattgaatgttcttgctgaattttacgatttaagagcatgaataattgatatgttcttgttcatgcatgttgttaagtttggtgtttgatcttggtgatttttggtaagaattgcatgatttatgttgttgagcttggattatgagtatggggtattttctagcttggaatcatgtgttcttaagatgtttttactgctggaaattgtttgagttattggagatgaaactcttgttcaagagcttgaagttgcttagttaagcatgaattttatgtgtttatgcaatctgaaattttgagattattgctggaagttggtgtttgaaaatatgaattttaattcccttttgtttgctagcaacattgtttattgttttatgagtttacttgtgaattgagatgaaaagattggatttggttgctgaaaattcgtgtttgcagttggcttttctgggattggaacccagattctgcagcatgctctgagcattccgcgacccgcctccttttggggaacctgggattttgtcctaggtgccgcgacatggcttgggcatgtcgcgacccgccctcgatttcagggcaatttgagtgcaaactttgtaattc

SEQ ID NO: 342470 - DNA, 662 bp, Cannabis indica
ttaataattttcttttatttttaataaatttataatacataaataataaaataaaaactttcaaaaataatattaattatatatcaatattctacttaaaattatcataaatatcaatattccatctaaaaatattatattaagtatacataaagagttatacatattgatttacttagaactactattgataattttgaaaccgtaaccaaaccaaaaaattgtaaatggtctgaattgaccaaaccattcactctttatttggtgcgctctcaaatggttcaatccgaattggttgggatttgaaaccacgaattacggattatatgaataacccaaatttggttatatgagaatgggtgttcatccaatccaatccacactatttttactattttactcatagtacatctgatccgcgctaagaattttatttttttggatccaatccaatctgcaaaagtatggattggatcagttattttagatttgttagtttttaatattaaattattaaatatttatgaaaaaaattttacataactagcaacaaaataaaataaattataattattctatatctctaacaacaaattaaaataaataaaataacaaattcaaagaaaaaaaaggtatgtgtaaaaaaatgtttaattttattt

SEQ ID NO: 342471 - DNA, 636 bp, Cannabis indica
attctaggagcccaaactatgtaattgaataaatccccctctattcgttgcgggtcgaggactccttctccttctccttccccttcttcaaactccgatttatattgttcatagaaaaatctctgatcaacgatagaacaagatccattttgcatcatatctaagggattccttggttcgggccgaagaactcgatcattatcaaacaggttgcaaccctatttaattctctctcttgatatctctgcaacttttctatttccgctctttcttatattgttaatgtatgtttttaatatattaaatactaagatttcaaggtgaaaaagtctaatagtcaaaattcacagctcacgtgtttgtattttataatattatattaaagtgtatttattacctttaacacctctatttaattctctcttttcatatctctgcaacttttccatttctactttttcattaatttaattctctcttgatatttctgcaactttcctttgaaaagtttatctcttcctcttcttctctctctgtttctctgcaactattatgtacagttgggaaatgacgaacacaacaaataggaacacctattagattaatgacaagagaaggcttacgacggcggccacc

SEQ ID NO: 342472 - DNA, 818 bp, Cannabis indica
tttttaaattagatatttacaattgaattaattaaataattaatgaacctaaaaagacaaatctaatgatacaagcctaggcacctaccttgttgtttaagacaatgctagtgtcttttgtcctaacaacttttgtcttaacaaatcttgtctcgacaaattctgtcttaacaatttttgtcttttttcctatttaattaattttaaaaaattatttatttttgtaaattttgccaattcaaaatagattttcttcgaactctttattcaactctttatccctactcttaacagtgtttcaaggtggcaattcggagaccatagacctataattccaagcttcaataaactagattatttattgagtgtcatcaaccaaataatattttatttattaattccatgattactccactataaatataaatttacactcttagtaattatataattatatttactaagtttaactgtagtgtccattgatataatcaattccaatgattagccctttatgtgttggttcgtaattagttttggtcaaaatataccttttctaattgcttatttacctttaattccattaattcactagtgaaagtataattcaagatcttatttgaatttgtgcacaacatttcagttctagaattaacatttaaagggaatcaacattcgatccattaagaaagtcaggattctataattgtacatcatgttcccacccatccatgtttttgaaaatttacttacggaaatttgattttatatacttaaaaactaaaaaaatttattcttaaaccaatacattttaaact

SEQ ID NO: 342473 - DNA, 607 bp, Cannabis indica
gtgttcatactccaatttaattcaacttgtgtgatctaattcacgccaatcagcacttgaattgaaaaatttaagatccgcacggacgtattagatgttaattgacatataaaaataatagatccaatcgaatatatatttaaaaaaaatattatatatgcaattaatattttaatataaaaaaataatttaaaaatttaatatatacaatacaaatatttcaacacttacgagatcaaacatacattttattattatttataagaaaaatataatctaaaataaaattaaacatatgctttattttattgttagctatgtgaaaaaaatttattttaataaatattaaataattcaatagtaaaaagtatctaattcaaaataaccaattcaatctacacatttgcgaattaaattgtatttatcgaaatttttaaaaaccgattaaaataagagttgcgagattaaataaattaatagagaataaagatggagattattgatgagaacctgctgctgttatctttctcacacagtagcaatttccagcaacaacaattaataagaacaaatagatgcaacagaagagtggagaagtagtgagctg

SEQ ID NO: 342474 - DNA, 546 bp, Cannabis indica
acattttagccttgtcgtgaatgcgtacgtacgtgttcaaatatttaaacagtagaaaacaattataaatagacatatatatcttgttcaaaaaatatgtatatgaaagaggagtggacatatggatctggtattgatataattaacaacattatattaagtgacttaataatgtttttcctccactatatttagattaagaccattcacaaagcaccactatatccatttgatcatgatattaagaaaaaatatctttgcacattttgtacacattgtgatcaatttccacgatgctgcatgacttcaacaaaaaaaaaaaaaagtagaaaccataattatacatatataaatactacaaaaaattttacatttattattaatcataaaatttgtgattaattataatatataattcctaactatattaaaaatattagtcacaaaaatatcacaaaaattagtcacaaaaatattgttggcttttgccttgtgtttgtattgtttgtcttttgaataaagctttcccctttttcaaaaaaaaaa

SEQ ID NO: 342475 - DNA, 1092 bp, Cannabis indica
ttggacaataaatttggatcaaaaagtgtaagtacagtacaataatgagaaataataactctggccttcacacaatttccttcataacaattttaccatttttaaataatgtaatttaaagctatcaaaaaaaaggttagtgtttttcaaaaatgcagtgtattgaacatcaaggtttataacaattatagggaggaacaattatatggatacctccaatatattaaaaattataaacaatggtaccaatctattaaacattaaactcatagctaagtaaatcatgtactttaaaacaatgaaaaaaaagttgaagtatttttaaaatgcaacatagtgaaacacaacaatattcactaagtcactatgagactttttggattatatcgtcaaaattactgatatttatctttaaatcctattaattgacactagattaattagtgtactacgcacatattaaaattgacaatcaatcaccaaatattagttactgtacacgcacatattaacattgacaatcaatcaccaaatagtacttaagaaatttttaatagaaccaacttaaatgcctacctttcctttgacaacatactaaaaaaacataaaataaacatcataccacatatcatatctctaacgaaatgaaagttggaaaatgatgaaaaggcaaataaatataatgaaatataattttttaataatgttttcatggtgcatcttctctttgtccaaactccttatttggtttcgcaatccgggagtagtgtttgtaggttttttaggatgagcttgatcgatccaacaaaagtaatcacacccttgactttcgttgttctcctgaagttaacataagtacattaccatatttacaaagcctactttaaaatagtattaagcggttcgaagtcttacatagtgcggacatccaaagaagcgacgaccaggattttctctactactagaagtccaaacataagctagatcaccacagtagccatgggggtgtccctcaattgaatttttccatgacgcgaaatacctctcgaacccgtaggggtcctctcctgaaccagccaccatgtttttttt

SEQ ID NO: 342476 - DNA, 635 bp, Cannabis indica
gtttactaaggtaatttatagtcttctcaaatgtataaacctcaattacatacaaatttctactctcgtaataaattaaacatgtaacatgcattaaacacagaaaccctataagctatccaaaccatatagttactcttgtcctatatcgaaattcggttctatttcactatagcataatcgacactcacttctcagatcttgcatcaaaattatagtcatttaattggtgatcaggaaattaaaagtaattaagtacgtatgaaatagaatacatagaaattgaggaaaaattaaatcattttaaaaccaaaaatcaatatcaaacaatctccatccaggccctaatgaactatttagctactcatgttcatcgtaaaaatttcacatattaatttagaatagaagaagaaaataaagaagaaacgaatgcttaaaatgcaattgaaaaagccttcgcgattgatttttatttccaattttcgtcccccttgattgcttgttgaaaactattgaagtccacttcttttatagccaaaaaatgattaaaaaaaagataaaagacgcttaaaacctatttttttaggattagaaggggcgggccgcggcatgggattttcatgcctaggcatgac

SEQ ID NO: 342477 - DNA, 534 bp, Cannabis indica
atatatatattaaatctagactatgaaaagagacaatacctcttgtagcctataaggggatccttgctatcttttagtataattacgatcatctaatccaagaactattgctgaagagttcacaccacaatcttccaatccagcctcaacaattaggaatagagtgggctattaaattctataagatgagcataattatgtattacaatgtattctcaactcatgagatactataattgagatagggttgatcacaatcttacaccacactatacagtgtgtggcgtgtgagactaggacagagagagagatattggtgtgtagagagagatgggagtgaaaaatcgtttcctcatctctttgaacttgttatgctcttttctagttatctcaagttgttagtttataatactatatatcatatatatagtgttataacaaaaatttttaattaatcctttaaactaaaaaaatatctaatttgatttaaattcataatttaaattcaaatataaatatctaataactgattaa

SEQ ID NO: 342478 - DNA, 605 bp, Cannabis indica
gtgaaacagttcctattaatggaattgtgcctggtgtgcaagagactgggaataacagttccgcgcccagccagggcatccataatatgactgttccgcctggaaccaatgccgtgacgaccatcggagacgccaccgaattacaaaatctctgtgacgtgctctgactcatgcagggtcataacaacactttgcatcatgatcaggacgaactgcgtgctccattaaacctcgcgttcgacgaacaaaggcgtatgttcgccgaatggagagataaagagatggaggcattaagggctcaccatgcagagatttaagattgtagtcggcaagccatcatgctgatacgaagagcctaccaaactgtaggtcagcaatcgccgaacgtcattcgcctgggagaaacagaagaggatccaacgatgaatacttcctagactactaatgctcagccgcccaatccccagtcatgagtttcgctcataggcccagcggtaggcgagcagaccttgtccgataattcatcaggaggagtcatacctgacggctccaaccagattaatggtgccattccacccgtcaaccaagcgaatcaatcgctaagg

SEQ ID NO: 342479 - DNA, 931 bp, Cannabis indica
agcacggagatcctcctaatcataatccaaagcgttattatgtccttgcatgagccaaaggccagcacggaggttgtgtattggcctgtttgggatttgtccctggtggtcctctcatattcccaagggtttgtacattaggatttgtcaccattcaccctgatcaaccatgcctctgcaagtttgcaccaccatcttccatgcctgttaaacttaagacaaacaacaaacttgggtttttgctctcagtgaaagcaccaaaatgttgacctcgtttttagccaaagagagtgagtcaattattaagcgattcagaatataattaaaatagagcaaaaaaaagtaagtaataatgaacaccagattttaaagaggttcggccccgtaagtgtggtaatagcctactccccttagattgtattaacttgagacaaagaacaatgtgtttttctctctcaaagctcttacaatgaaatgtctgagtaattctcttagatctctctgttaagcaattctatcgatccctttcacagtgaagctaagtcattatttataaggccttaatgcatgagggaaggtttccctcttgcttacaatttataaaataggaaagaatattcattacataattgtgatacacaaaataggaaattggaacaggttgtcatattcctctgactcaatcagacaatcgtaggcattatcttcgtgcctggacatcacgagatcattctgaagtagttaagtcctaataagtggttcagaaagccaaatctatgcatgctcggatgatctggccttcaccctgctcggataattagaaattatacatgcagatgtatgatataaagtctgcccaggacatttatctctgcccagatgggaggaattgaggacacgtgtcgcttgagtattttgccacgtcattgtg

SEQ ID NO: 342480 - DNA, 604 bp, Cannabis indica
atagtttgagaaaaatgacaaaacccaaactattgtggggcccattaagtggccggccatcaaaggggatttcactctatttttttaactgtttattcctaataattcaaccttaaccctattgaagaataatatgaaagaaagactatggtctcattatccaactaatgcctccaaagctaaaaacctagttttctctctaggctgatgagagctcttcctcttcttctttttcaattcaaaacaccatagcctcttcttcacaaacaaaaattcagccattagtgattgagtacatgcccacacataacaagttggtcctcaattatagtgtgtaatactatgaagaatccaaattcaagagaaggagtttcgggctcagatcttggtgatactctgctacagaaaggatacaggggttagagatctgagtgaaaggagccattataattctgatgcatccactgtaaggtttctcaaactttatatgtgtttatttacattgttttaaaaactcatatttaggatgttaaataacatacatggtagtaaatctagatcctagcaaaatataatccaacaactggtatcagagccatggtaa

SEQ ID NO: 342481 - DNA, 1248 bp, Cannabis indica
aaaaaaaaaaaaacaaaacaaaaaaaaaatgagggttaaatattatatatactctttttcttttttcattattcttgttcattaaaaaaaagacactatatagatgttacttataatattgggaaactagggaatttattattattattataatgaggaatttattatttggagacttctggaattgcacctttgagagtgtagaaaaataataatcataccttggtcaaaattcaaacagaaaatgtaattagtcagaattggaattgagtggctaattgaagttaaatatctgaattgagaagttgagacacttcaagataaacactaactgctatattggtcacatgcatgcatatattaaaattatcatattgtataatttatatattttttatatataaggtatagttatataatagaatttttagtttaacggtatttttttttaattttttattaactttaatagaatatattattacacaactgaatatttttttattaatgttattataatattattatgtatattatattattatgtatattttaaaaataaaaattaatgtaaatatttatataaaaaagttagaggagtgttaccgtcaacttcctgttacaatttcgtagtcaatctccatgcccgaaaagacatgtcgaaatattttttttctacgggatcttcgttatgcttacaacatcatccttataaatttttgaaaaatttcgaatagtttacagtgccgaaaatacatttgaagttttttgaacgctcgtggtaaactagaatatcaagaactctgttttcggtactgtaaactattcagaatttttttagaaatttacaggaatgatattgtaactacgaatctgtgaaaaaaatttgaaaaaaaatatttcggcatgtgattttagacgtggaggttgactaagaggttgtaataggagattgtaattagcatttcttaaaaaattaatttaaatttaaaatacttaaccatattagctttgttggtttaactttaaattaaataagaaataattcagctcaatcagacacacaatgattcaccatgatatctcacttgagttttattatagaaagggtatatatagctgcaacaactaaaaaaatcctaatgatctctagtataaaaatataggctaattagaaatttttctccccaaactttgacatatacaaaatcatgccccctgaactttttttgtcgttgaaaattcccc

SEQ ID NO: 342482 - DNA, 739 bp, Cannabis indica
tgcatgcccacccatagcaagttagtcctcaattatagtatgtaagactgtgaagaatccaaacaactgaaggagaattgggctcagatcttgataatactctgggacagaaaagaacaagggttagagatctgagtgggaggagtcattatatttcgctgcaaggaatgtaaggtttgtcaaactttatatgtgtttaagtttcattgttttagaaattcatatttaggatgttaataaacatacttgttagtaaatctaggtcctggtaaaatatattccaacagtaagtacatatactttattgtacattatcattaaattcgcaactaagttttaaatgaaatgaacttataattattattataagtaaaagtattttaaacaataaaataatataatgttacttaaaataatacttttgtatgcttaagatacgactttgtttctttataattttttttttaaaaaaataattatcaaaatattacacgttaaaataaatttatttagatactatcaagctacttttaaatataaaatgataagatatttatagtaatccaccataaaattaacaatatactaaattgtgtttaagtttaaaatttacttacttgtatgttaataaaatataaacaaaaaattcaaatgttgcttttaaatatggttattttttgatactaacaaaaaaatatatgctttctacacatcttaaaatgaccaccttaaaaagtaa

SEQ ID NO: 342483 - DNA, 644 bp, Cannabis indica
aaagtacaggagacatgatttagtacatattaaagtttgagaggcataatgtagtagatatcaaagtctggggagcatgtttcagtgtaacagtaaaattgaatgaaattagacaaaagtccttaaatctaaccatctcaatagttcatggagaatttttaacggtaaaaaaagttcaagaaatatgatttgttatatatcaaaatttaggaaaaaaattgctaatagtttttttttttttttttttttttttttatctagagatttaaagatttcgagcaaatagtcataccaaacttgttacatgttaaaaaaataactgtcatatgaagcctaaacaactacccaaagttaatctaattcgtaacttaataactatcctcctaaaacattggaatctctactcagtcgacaagtgttgttaaagattacttattacttaagcataaatttgtctaatttattaagttgaaccttttggttggtctcaataatcctctaaatattctctaagacaaaagactataaattgaaaaaaaaaatgcacaataaaaaataaaaatatctattggagcaactaaacaactctgtagatcaaatgttctttcctatgtaatttttgttgaatgaatgaattccaattt

SEQ ID NO: 342484 - DNA, 530 bp, Cannabis indica
agcccatggtatcatgttgtctgaaaagaaaatgattattagatagacgcaaatagaattctttgggatgaaattatccaaaggacaatatgaagcccaaccacatatagcccacgaactactcaaattcccagatgaaaatctcacaaaagttcaggtgcaacaatgcttgggcatcatcaattacttacaagactttgttccctgactgtctgtactgacaaggccactcagcaatatgctcaaaaagaatagtccagaatggtcacatgaccagactgtggcagtcaaaaaactgaaagaaatcatgcaaaatttaccacctctacagattccttctgacggaaaacgtgttcttcaaacagacgccagtgaccaacattggggtgctgtccttctagagcaagatgaacagggaaaaagacgaatatgtggatacaagagtggacacttcaaagattcccagctccattatcattcaacactcaaagaactgattgcaatcaagatgggaatataaaattgagttc

SEQ ID NO: 342485 - DNA, 3707 bp, Cannabis indica
ccacttatacttccatatttcataagatctgatctttgaacattttgtttaccaatctctggtaggtagccccagcgttctttagaaaccatacaccctactccattctttgttgggaacttgatgcacgaatggaaaattgatgtgacaactttcaggtcatataagactggtcgacctaacatgacattaaaagctcatggaacaccaattaccaaaaattgtaccatcacagttatgctcttcggagcttgtcccacagtgagaggtcggtgaatttaccccaaaggtgcaacactttggctgaagaaaccatacaccagttgggtacaggggatcagatctttgagttggagtcccatcttttcatatggtgtcttgaacaaaatatttgtggaagctccattgtctatcatggtccgggccactgttttgtttgctatttgtacttctacgaccaagggatcgttgtgcgggaagagaacgtggatagcatcttcttcagttaaggttatagtaggttttcctacccgtggcatttttggctttctttcttctacgactaaaactacttccttttgtttgtgttgtaaagttcgggcatacctctcccaagcttttcccatgtctccagcaatgtgtgggcccccaatgacttgtaaatggccgtccactggtggaggcattagtaggtcttgattattgtctgtttgggcggcctgttgattttgatcggccttgacgtatttctacaagttcaggttatttatttcgattaagaattcaatttcctgcttcaagttgttgcactcattcatgtcgtggtcataatctccatgaaaacggcaaaacttagacgtgtctctcttacttacgtctttcttcatgggagcaggttttttgtatgggaccatagactgggtttccatgtagattgtctctaagtcgtgaaggataagaaggagtggaggcattttctctaggggtttgtttggctttgcttgtgaactttcccttcttcccgttaccttgcctaccgttgttattggatcttttgccgctcggagttaagctgctgggatattgtgggctttgagcaggtgctcctgccgaggggacatgtggttggcgcggcctatgttagacatctgctggcttaatggcctcttcgagcttgataaacccatctgctcagtctaaaaactctgtcatagatcctacagggccacttttcttaatgtctttccacatttctccaagtacttcaatgcccccagtatggcggccagcctcccctcttcagttaaccttgctactttcgtagcttctatcatgaacctgcttatgtaggctctaagaggctctcctggtctttgtttcacctcgagcaggtcttttaaatgtaatgggagttggcgagaagaagagaactgcgcatggaacactgaggagaaagctttccatgaattgaactttcttggtggtaacttaaaataccattgttgtgtggcttctaaaagtgtggcagggaataccctacaccgtgcatcacctcttaccccttgcaaatctatttgcatttcaaaatatttaagatgtgacaagggatcctccttccctgttacatcttccaggtcggcattttgaacttaaggggtagttctaggacgttgatctcaagtgtaaagggtgactcgtgtgctcggttcagctcgagatcagtgagtttttggtcagccatgccttggaacatattttttaattcatccaattgtgcttgcacagatggatgaaccggttcagcctcttgattgacctgtgtcacgtcaggttctcttagagctggatcttggatgcggatacctggctgagtggccggttgaacgtattgttcatccagacctcttctcttattcaaatcgttcctgagatcatgggtcgtacccaatctattgaatactaaagcaccaggaggcctcactgattgaccggtttggccagtttgttgaccagaactatcagtttggatggagttattaggtataactccacctaaagaatggttatatagggtctggccgctaccacttggcccacaggtggaacctatgaccatggattggacggctgaccattatgagtttgggcagtatgcccagtaggaatctcttctgtgccgccgagtgggatactagacgtaggaactggttactaatgagcaacttgataggctttccatattagtacggtggccggtcttgttcggtcatcaatggctgcctgctgagccttcaatgtttccatctccctatccctccacgcaatgaattgatgtctatgctcttcgaatgcaaggttcattgcagcacgaagctcctcttgatcatgatgcaaggttctagtgtgaccttgcatgagtccaagggcattacagaggttctgaatctcagtgtcaaccactaccatcatctgagcattggttgtggatgggattctagtgttgggagtgctttgattggctgctgaactggtattcccagtctcttgcacacttggtgtgatcccagccagaggggatgtcgcaccttggctcacagtaggtggctgcttaggattggttcttggtgggacccttgtattctcaggagtttgtgaggcaagatctgtcagcaatgggtcactctggtatcacacctctgcgagtttgcaccaccattctgtgtgtctgctgaatcttaagacaaagagcaaacttggattcttgcttctcaatgaaagcaccaaaatgttgacttcgcttttagccgatgacaatgagtcaattaataagcgataagaaatataattaagacagagcaaaaatggataaacaataaagaacacaagattttaaagagggttcgacccctttagttcggtaatagtctactcctcttagattgtattgacttgagaacaaagaatacaatgtttcttctctcaaagctttcacaatgaaatctctgagggttttctcttagatctctctctaaagcaattctttcgatctatttttcagtgaagctagatcattatttatagggctaaatgcatgaggggaggtttcccttttgcttacaatatctataattagtaagaacatacattacatatttaaattatatgaaatgggggattgggacagcttgttgtatcccttttatatgattccatgattgtagggattgcttttgtgcttgagcttcacggtatatatcatctttgaagtagttaagtcttgatacacagttcagaggggtaacttcactctttgctcgaatcatctgtcctttgttctgctcggtcaagcagactttgtgcgtgcagatgtgttgcttgaagtctgttcgaaatattctccagccaagtgtaaagaataactgacacgtgccactagtacacactgccacatcatagtacgaaaaatgggataacaagtataataatatcttttttttgtaaatattttatgtttattttttatattttttctatttaaaatgtggaaaaaatagtaagtaaaatgaatatgtatatatgtatgttattttcctgcattatattattaatttgtaaaattattataaaaaactttaagaaaaaaattataaattttattttttaaaaacaaaattaaagtatttgaattactttaaaattttatttag

SEQ ID NO: 342486 - DNA, 1123 bp, Cannabis indica
ctcgatgttggatggttcaggtccaaaccttcagggttggttcttcgttccctgcgtacacggttagtatgacgtctagaatttgttacctgagggttgtccgtgcgagtagtagggactcgaggggggcgtcgggcccggttttgtccatccacttcggcctgtagtgcacgcagttggtcctgaatcgcagtatattgatcagtggtgagctggatgattccctcggataccactgccggagtgacggggggaaaatgcatggttgctggtggtgtggatgtatccccgacttgagggtcagttgtttctgggaacaggttgagaggtctgatgttgctcctccctactccgccattaacgacgtccacaggcggcattccagctccggataatggtacgttcatcatcccaatgttgatggacccgttgttagctcctccgtttgtttgatttccagccatgatggtatttttcttgaaatgaataaaatcttagttctcgttcccacagacggcgccaaatgttgtcgagtgaatttcgcaacaccaaattatatgatattattagtaacaagaagcaatttacgtgaagaacaagtgcgagtattcaacctagaatggcgagtactcaactgggaatgagaaataattaacaaaaactggaaaataacaatgagacaaagaattatagtggttcagtcagatcacggtctgcttagtccactgtagcaagagtttcgtaggtgccatttcacggtggatcacccctttatatacaaagcaggtgtccaattagttatacagggattgcattcattgtcaatccgtttttacacattgaattacaataattaactaaacaacgttaacattaataaatgaacggcagttactaagtttatcaacgtatgcgtcttctaaatctgcgagttggctgttcatattctggtgagaaactcgcgggttcatcgattatgctcgggatgtctgcgtccttaggtagtcgcctcttatggacatcgcatgacgggctgataggacttagacatgcaagcctatattacattataaaggctgcagggttcttaagaccaactcgtatttatagagaatcgttctcc

SEQ ID NO: 342487 - DNA, 1627 bp, Cannabis indica
gcacatttagtctactccatttggtttgtaagaaatgacattgtgtggaacaaacacatagaaaacaaagatatcattgtacaaagaattaagaatagtattaagcatagagtagagctagtttggcctaaaaagagtggtaaaaaagatagagaatggttttacaagttgtaaaaatgtaaaattgtttttgttgaggtctttatatgtaaaggcgctctttcattgtatttgtcttgaatagattgtggatattgctgatttatcaaaaaaaaaaaaattgcttgcactagagtaagtaaattaccaggcatcccacaagctataggtttaaataatctcaaacctataatactaggaacaggaagttttgttaagtccattgaatagacttattttaaaaaaattcatttcttgtccttgtaatagaaaactttttggttactccatgtgaatggttttaaccatagttctcttagctttgcttcttagtttcttattctgactatccattacttatttaagctaacaatggattttatcacaagtgtcttccaagtcataacaagttgagttccttgaaaccctcccactacgacaaggtactgtgactttctgtctaagcacataagtagtattatcctcatcggttgtatcaatacaatagagacaaaaagtcacggtaccttgtcgatggctaaaggcgaggtcaaaaaaacccatttcaatataatcagattgactaattaataaaagataagaaatcattttaagtttcactattcacatgatttatttcatgattatatttaatgtatagattccattaaatccagaacatatatatatatttgttcctgattataatgtcatcagcacagtgaaatataatcatgattatattgatgcatgtcgtaagccacaacaaatttactacaagaattagaataaaaatagcaataataatatttaaagaagagaacaaatttaaagtgagactacgatatgagagactagttaaaggttattcgccaccctcaacaatcattcctaattcttattaaagaatgtaattttcagtttccaatcaaactattaatcccgcagataacgctgaagcagtgaattatctcaatctccttattgtatgtaatcaaggtgaagcgctcaataattaactcttttacctaaagcagtaaattcatgaagcatgcaatttatttaacttatataaaacattgagatttatggagatagactaatctaggcaaaacattaatggagcatataattcatttaacctaggttctattcttcatcacaaataaaaattgtaatttgtcacaaaccactactacaaaaataccctttagaggcggtttttaagccctttcagcgtcagttttcgtgaaattcgctaccgacgctgatcagggcgacgctaaagggtttatatgaaccgacgccatatgtacccctatggcgtcagttattatgaaataaccgacgccataggaccctatggcgtcggttattattaaataaccgacgccatagggttacatatggtgtcggtttttataaaataaccgactccatagggatttcctaaaattttttttcagct

SEQ ID NO: 342488 - DNA, 1094 bp, Cannabis indica
tctctgtagtcgaatcaatgaacgtgaaatttgatgacttagaaggacatgaagaagtgtgggtcgaagatgatgcacctgttctctctggccctagaccagtcctcactagacagcctcaagtgtatcctgacacacctacagagtctctaaatacagcaccaggtgtatcaggtgacaatcaagcaagtgccagtgatccaggaagaggaaatgaagttgatagtgccctgaccaaagaaccccaacaagccaaattatataaaaacggaccccatcctgggttgagaaagctcatcctcaggccactgtcataggaaatccgaatgataccatggtcactagacgaaaactgcagaatttgttagcctttgcttgctatctgtcacagattgagcccaaaagtgtccgagatgctctgttggatgagttctggttggctgccatgcaggatgaaatgggaaattttaagagacttggtgtatggataatggtccctcggccagatggtgcgaatgttatagggacaaaatggctttttaaaaacaagtctgatgaatttgggacagtgactcgaaataaagctcggcttgtggctcaaggatatagtcaggtcgaaggcatcgactttgatgaaacgtttgcaccagtggcacgattagaatccatacgcctacttctcatcattgcatgctttctgaagatcaaactcttccaaatggacgtcaagagtgcgtttctcaatggggtaattcaagaggaagtctatgtcaaacaaccacagggatttgaagatccacatcatccacaccatgtgtacaagctcaataaagccttatatggactaaaacaggctccacgtgcgtggtatgatagactcacctcatttctttactttctttctaggactccaaataaaacaactagatcatggcacattcatatcacagtccaaatacgtcaagtctatgttagataagtttggattctctcaggtcaagcatgcacatacaccaataggcaccacatccaaattgtcacgagatgagtctggtgaccctgtagaccccactctatacagaagtatgataggt

SEQ ID NO: 342489 - DNA, 1060 bp, Cannabis indica
tctcaatccattctttgatgtggggtatcgatcccttttcaccccttcattgcgaccattctcaagcattacgacgtgtctccttttcaattgacccacaatagttatcgcacggccctggccttctatgcgatgtacatggagtacgtacatatggcacccacagtagaagagttcagttacttctacgatataaagagcgtaggcctccacaacggtttctactgctttagcaagtgggccacttctgagattaattgggtagaaggcatggtttctaacatgggagattggaaatcgaagtggttttatattttcaaagttccaaggattaggactgatttaaattgtcgaccttgtatgtcgcatgtttcctgacatagtcattttttgagttattttgagatttcatgctaactcgcttttttattttcgcagatagaccagctcgacctacactcgactcgactcgcagagagacagctgaagttctcgggagccttcctgtacaagatcgcgactggcgattattgtgtacgactgccaagttgcgagaacacaagctgattccagagaacgcaagtctttggagagagccggtatacaaggaaccttctgaaaagcaacaagagcgaattgataaacgcctctctaagcaaaattctcgaccatcatcaggtagcttatcacatacataaactagtgcgttagaacctcattcttattagcattaatcattattttttgttgttgttgcagaaatgactttcttgaagtccgcacccactcttaaccgcaagctgaaatctggaacagcggcaacttcccctgtcgttcctcagaagaggaagagcgatgtggtggttacccctgtcgcggattcttccaagaggccagctaagggcattcaagagaaagggaagaaggtcgtgattgacccagcagttcgagcccgcaatatactgactctccaagagaggttcgtgagcgacgatttccagtcaaagattgacaagactcctgctgaggagctgttgcctcgctctgcggagttagcctc

SEQ ID NO: 342490 - DNA, 730 bp, Cannabis indica
aatataattttaccttgattatatataagtgtgtccattttataggtacgtgttggtattttcaacatgcaaatatacgtatcattagcaagttatatatagactcacaaagagtaaggacgatcccagaagaattgtagttaagtactttaaaattaaacatttacttctatttggttatataaaattttaagagaaaattaaaactagaaaataataaaaacagtgaaaataagaagcaggtaaattaataagaaaattaacgatgaataaaagttaggactttcaatttcgattgcatatattgattatggtttaatatgattatattcctattaccaaattctatgcaatggtaggtttactaaggtaatttatagtcttcttaaatatataaagctcaattacatgcaaaatttctaatttcgtgataaattaaacatgtaaaaggcattaaacataaaaatcttataagctatccaaatcatataggtactctcgtcctatatcaaaatttggttctatttaactaaagaataattgacactcacttatcagattttgtatcaaaatcataaataattaattgatggtgagacaattaaaacaaattaagtacgaatgaaattgaacatatagaaattgaggggaaattaaatcatattaaaaccaaaaatcaatgtaaaacaatatccatctaaacccggcctaatgagctgtttagctactc

SEQ ID NO: 342491 - DNA, 937 bp, Cannabis indica
ttttgtgacttgatctatgcaagagagaaaaacaaggtgacacaaggaagtgtcacaaacttgaagaccaaggtgtttatcctagctaagttcaaacttaacttgctagggataaacaaatggtactgacaattggggtcattcaagccctcatagcaactatccttgggtaaataagagaatctgggtgcaatttgttgttacagattcacatatttacccttacgttgaataacaccactcacagggtttgacaaatatacccttacatcagataaaacaaagatcaagactaaagaacacagaaacagttacaaagacagttacaaaatcagttacaaatattacgctagggctctgccctagatcagaatcacagatcagtataaaaggaggtatttttctcagatacaaaataagagatacaacaaggagtaaaagagagagtcacagccagagaaaacaacaacagaaataacaacagaagaaaaagagagccttttggcttagggttgtcatctccttgtgagctcctcctagagatgttcatgtaaaagaaaagagagttttgttagtatccaaagagagaaaaaaacagagagaaatacaaacagttgtaaatcaaaagtgtaacctttgtttgatgattagtggaatcaagctgagggcttgacggagaagtagccggttgttttgggcgaactccgagatcaaatttggtgtctccatatttaccatttctgtttgtatttctcaccttaatctctatattgtttatatttgtatttgtgtgtgtttggtgttcttggtatttttcggatttggtatagtgagtttcggccaagagattgtgagtgttttttttgggtttgatttcgggtataagtgagttgcttgtatgggttagtgtttcaggttattagagaagaacaaagaa

SEQ ID NO: 342492 - DNA, 1296 bp, Cannabis indica
tatatattaatataaatagattaaaataaatattagataaaaatacactttaaataatgagctttattaagaggatattcgatctccattgttggttctacatagtttttgttttagtgagattcatccccaatagatggacgttaattagtaattcaacgttgtagaatctcgaaagataagtattattgtcagtattttattcttagtaacgtctatccaaatagtggctgctaagagtaagacttacaaagtatgaaacaatggtagaagctcttaagatagaatggtcttgactctcgcctaaacgggacaacgctagattctcatcttgatcaaatataaggttactagaatagtttccattttagatgagctgactgctctattcaatgaatgatatctttgattctcgcctagatgggacactgtatcagtttattggaaaccttgaaaattatttaggattgtttgtttttgtattttcacttgtcattcctactttctaagtgcttaataatttctgaatgtgtatttttttttattgaactttatttgatttctatttattgatactcatagtttagaatatgactatgaaaaagaggtagctggataaagaggaagcacaagctctaaaagaagaagttgaaaagctaaaagccaatggcttcatcattgaagcattctatctgtcttggtgcctaaaccaaacaacaagtgagagtatgcatagattttactgacttgaataattcttgtccatatgactatttctcattttctaaggatcaatcagctagtagatgctgcagctggtcatgagatcgtaagctcaatggacgcctattcaggttataatcaaatcaaaatgcatccaccaggccaagaaaatacaagtttcttgatagatgtaggcttatactgctacaaagttatgccttttggattgaaacgcaagtgctacttatcaaaggattataaacaaaatgttcaaggacctaatcggccataacatggaggtatatgtgaatgacatgttttttaagtccaaaaaggctggggcatatagaagacttaaataaatgattcaagatccttcgagagtacaacatcaaaaaactcaatccacttaagtgttcttttgaagtaggctcaagcaagttccttagcttcatagtaaatgcctgaggaatcaaagaaaatcagataagatccaagcccttttggacatgaactcgcccacaaaaataaaagaagtacatgttggcttttatgccctaaataaaactcttt

SEQ ID NO: 342493 - DNA, 1061 bp, Cannabis indica
agcggggacgttacaataattttcttaacaagtttttagcgtcgttgctgggaaattgattaaatattgacattacaaaaaaattagattaaattctacttcggttaattcttttaatctatttcttttaaatttttcttactctattttaggcattgggagtgcatgtgacatctaggacaaagtgtaatactgcgcgttgatccttaaattgagaagatctgtagaagaaatagaagaaacaaaaggcaagaaaggagtgcagcaagggctgaagaagaagtagtcatggctgagaatgttaatggcagcaacaatggcgataacagcgataataatggaaatgcagtagaagacaggcaaacagccgtaatccacccgaccgtagcctgagggactatattcttccaactttgatgtgggttcagccttgtataagaccacccgccgtagaagccactaatttttagataaagtcaaccatactccaaatggtgcagtcttctgttcagttcggtggactgccctctgaagacccaaatctacatctgtctaactttatggagttatgtcaaacattcaaataaaaatggagttagtaatgatgccattcgtctgagactatttctattctcgctgagggagctagccatgagttggttggtgtccttgctacccaactccattgctacatggactaacttggcaacaaaattcttgtcaaagttttttcctccagcttaagctgccaagctgggagcagaaactaataatttttgtcaactggacaacaaatctctctatgaagcttaggagaggttcaaggatctcattagaaaatgtccacatcatggaatcaaaaagtgaatgttggtgcacaatttctacaacgggctgattggtaatactaaaacaattatagatgtcgtagttggtggggcatttatgagaaaagtgcaaacgaggcgtatgatctgcttgaaaaaatagctatgaataaccgacaatggccaactgaaagaagccagtctaagaaagttgcaggcatgcatgaggtagac

SEQ ID NO: 342494 - DNA, 701 bp, Cannabis indica
tcttacatctcgaccttacactcttggcaaaagaggttagatcaacaacttgaggatagaactagacaacccttatctgttaaacaactatatccacattccgagcgatatatttttcccaccttcaattagattagactccctaggggccttaacaaccgctcccttaaaatagaaccttgccaatcgatctagtttagtgtcattctctagcaccacgctgcctggaatcaactatttatgttctacgatcttcccactcaggtaatctcttacttcatggcatacatttgctcctagtcttgtgatagtgagaaattcatacccacactactaagtccgagcctggtaagctcgccatcgccccaggtacatcttccagtacacttgcgacgatttcttttcatcatttaaaatctttcgaaccagaattaatgctaataagcattaccacatatacataaacatatttaacaatttcatcataacctatcatgcttatcaattttatgtcaaattatcatacatctctaatagcttacacatttcggataagcaacaattcaaccaataaataaataatctattaatcaactaacaagtagcacttactaagccatgagtcgaacgagtcttcgcagccaatgtacatatcaaacaagtcttcaggatctttaaaccttggtcgctctaataccatg

SEQ ID NO: 342495 - DNA, 1039 bp, Cannabis indica
gtcctaagtaatggacgttcaacaaagtgcaagagggcaaggcgaaatggttgagactgaagatggtcgggatggtagaaatctcaaaaacactcgtggacgcggcagagttcgcggttgtgctcaaagagatggccaagaaaatttatcacaagctccattagctttggagcagaggatcgcagagatggaagctataatccagcgacatgaggaggaaattcaaatgttgaaacacaaaggtctcctgcggtaccttcaccccatatggcaatcgtttccgttccggaattaccagtggagcggagtaccgctagaagtcaagtagaatttttgtatggggaaaatggtagtggctctttggttgggcagaaaagggagcccacattgatattggagggctcaagatgaaacaagagacctcaggagaaccgggggcgagatgggttttaagagacgctatacctatcccgagtgtccacgctgctcgaagcatcaccccggagtatgtaaccggagagcttgtttttagtgtggatcagtgggtcatctcaagaaagattgtccccagttgaagaaagaggaatctaagcctgaagtcaaccctgcacctgctcgtgtattttctatcactcaggctgatgctgctgccagcccttcagtagttacaggtcagcttctaatcaacggttttgtttatactgtttaatttgattcaggtgctacttgatcttatgtgtcatcaagacttcttgtccagtttgatagacttagtaagatttttgagacgggatttggaaccctgttgcctaatggggaattaattacctcaaggaagtgggttagatcagtgttaattagaattgaagatagagaagtgagcgctgatcttgtggagttacctttggctgagtttgatattatactcgaaatggactttttgtccagatattctgctaatatggattgtaatagaaatggtaacttttcaatcggagaatgaggaaccatttgtctttgttggttcggttcaaggttc

SEQ ID NO: 342496 - DNA, 750 bp, Cannabis indica
agtataaatcataacaaatataatatgctcatcatgctatttaaacagtaatgccattcatatatgtctgtgtgtcacagacctgcatgttacactcacatgcctatttatgtctacgtggcgtagacctatgtgttgcgctcacacatctatttatatctacgtggcgtagacctacgtgttgctctcacacgtctgaatacaataaggccttagaatggttcatctcggttatggttaccgagtccaacctgattatgccttgagcgcataatccctaaatctcattacatttaacatggcatggcatttacacacatatatcactagggtaataaccctaggccatcaaccgctcatattagggtaataaccctaatcccggttactaaactatcatacatatcattttcaatataagcgccactgcgcatactctacgtgctaatcactgtcttacctgttgtcccgcaatatcagagattctgaatccccgggtgctcctgatcaggtgccggtaatcctagtcacacaatccgagatttcacaaatagggttaactcctgatttcactttcataaaatattcacatggcatttaaaattcagatattcagatagagctcaaaaagagctttccaacggtatatagaactcccaaatcggagtccgaatcacaaagttatggctatttgaagtttccaaaaaggatctgcccaaaaaagaaatgggcgcgccgcggcatgctaaa

SEQ ID NO: 342497 - DNA, 586 bp, Cannabis indica
atacttgtgagtagatctaagttcctggtaaaataacttccaacataaggttgttggaagtggactctctcttctgagaattgcttgggttcgttaccatggagatgcttcttgcttttccctttttcaagtcctcctcttccttagcaagaatggcagtcatctcctcaacggtccattgctccttttgagcattatagcttgatctgatcgaatcaaactgagagggaatggtttccatcacaaaccacaccatgtaatcctcaccaagatccaatcccatgcccttgagcttttggtaacaacccatcagtttgtcaatgtgagatctaatgtcacctgaatcagcataattagtccgatggaacaaagtcaggcattcatttttctcattctttgagaatttcttgtacttctccttgattgcattgagaaaatcttttgcaatctcagtttggggaatactatcacgaatggactcatccatgtgatacctcataagcatcagacaacaacgattggaatgctcccaatcctcataggacattctatccttttcagtggtatcatgagtaggtttcggagg

SEQ ID NO: 342498 - DNA, 508 bp, Cannabis indica
aactttcaaataaaaaagattttacaaaattaatatagatataccataatctttaagtagtttacttctaattcaaaaatattatgaaaaaaattattatttttttatgtggcaaaagacaatataaataataaatagtctaaaagggtcatttctctataagttttaaaatgaggatatttaataacgtagtcctatgatttgagatcatttgctataatttcttttttaaagatactaaaaatctttacatcatctaaaaatataattttttattttatttatcttctacgtcatttttgatattcttatttttaaaaaatactctaatggtataacattaccacccttcaaaaatactattattataatctcacacattattatttaatatattatttatttctaaataggatatataccattttagactctattttttgtaaaagttacaaattagaccctctattttattaaatgacaaaatagaccttatattttccaaaat

SEQ ID NO: 342499 - DNA, 1850 bp, Cannabis indica
gtacaaattttgcccctgtcacttcaagatactctccatgtgactctcttatgtcagggtattttgggtacaatacatataaaaagaggtatgtttcaattaaatataaaattagaggtaaatttgattaattgattaataaaagtagtatttttcaacatacccctttccaaaagttatgccaaacgggccctaaataaattgtactaaagcatccggaatagattttggagcatatatgtattaaacattctaataataattagaagacaatattaaaattaattctcaaagaaaattagttcttcatttctttaattctatttttatctacctattatatttctttttttttttaaaaaaaaaaaaaaaaaaagaaacgtttaattcatataaataataagaacattagacctcatgatccttataacaaatattcgtgaaaataataacaacatcaagggacccataaaagttttagtagtattatagtatcaaaattatagactaaagaaaattaagttctcttttcttacatataattatacttgtttctcttatgataaatatataatattaaatttatagaataaaagttagaattaaactaaccttccttggaattgatctttgtttgtataactaccattattattatgagaaaacttcttcttctctgtaaaatgatccataacataagtagtactagagaatgaagaagacgacgaagacgacgatgatgatgacataaaactccatagaagaattagaattagaagaagaagaatataattggactccaaagagcctaataaggggcatgatgatgagtagtagtagttttacaagtccttgaattatgacctgttttcccacaatgtgaacattttctaactattcttctcatcatatcattaaaacaaagtaaccctttatttctttcttttttggtacccccaaacaaggccttatataatacacaaaaacaacactctcaatatgaataaaccacactctatctataataatgagtagtagtaatataatattctatgtggagaagctatatatatagcttcagcttcagcttcttagactagagagaggtatataatataatataaaaatgtgagcaaacataaataatataatattaggatttaaagtgagggaaggtaattttttttaaaagtaagggcaaaagtaagattaatattatcttggtgggatttaaaattttaacatttatcatatatatgcattattatatttataaatattatattttattacaaatatatgtcataattaattaaaatgtatatacattttttttaaaatgtatatacatttttttttcgatttttttttcaaagggtaactacccctcgattttatgtaggtctgtctctaattatatgtatgaaatacttttcaatgggtattacctattaataggtattaaacaaatttaaatataaatattaattttaaaaatattaaaccattaaattttagtccgataacgaataataaaaaaaaaattactttctatacttaatttagttacttaattaaaaaaatatcaaaaaatacatctttttacactatatcaaaaatatatttatatgaaaaatatttaagtcaaaataaactcttttaacactttttttgtcgaaaaacttttttttattattatttttttcagctgatgaaccaatctcagcccatataatataaaaatgagaaaattttctaattaaatagaaaaattaatcataaaaactcaaatttttctaatgttatctattcatgggtaatacctattaaaagtgcacctatatatatat

SEQ ID NO: 342500 - DNA, 1065 bp, Cannabis indica
aatcttttttctctcaaattctccgctccttttttgttgaatttgcccatatttataagaatataggttgcagttatttatttgggatcaatttaaaatgtaaatgttcatgaaacatggacaatccccacgtatcatttaatggtatgtaggataatatttgatagctgcataactgctttttgttcttatcttttttaatggttaatgctgatttggacaattgtatctcgcttaacccaagttatcttcattgttcatcttgatttgaagaaattgctaagtgttagcagatggtttgcctcgttaagtttcattagttaaaatagtgagatgactatctcgctatacccgaggttgccctatgtgattgtatttattctactttgaatagatgaatatcttctttgactatgtactctgaggcaggcgcgtgttttgtcaataccagttttaataaccttttatccttatctcacttaagactttatactcatcgagttatgaatattttctattaaacctttgttaatgagttattttatcttacatttaatgatataactttattatatcaggtggttcatattccactgcaagatacgtgtcactttctgaagtgtagctaaacttcgggtataacaattgcccttcaaaagttcttttttaattaaaaagagctttttaaatgattacaagggtattttttcttaatccaatttgaaaaattacatgctttgtgctttggcggttcatgatttcgaggtacatcattagcattaaatgtccatcttttctaattcttttatgttcctacccgttagatcttatctcttctcatctaatggtgaccactcttaaagtatgaaactcatgagaagacatttattttccatttctgcctttcaaaccttcaaactattttgaaaaaaccatctccgtttttccatcaccttgcataccctcattatccttgacttattttctgcgtgtttcatcagacttcgtcttcaatctcagggaatcttagaactcattactccagtcatcaaattctcactcgac

SEQ ID NO: 342501 - DNA, 953 bp, Cannabis indica
aaggagattaaggaagctttgttcagtatccctagttcgaagcgtccagggcctgatggttacaactctgaattttttaaggttatgtggaaagaaataggtgctgaagtgtgcctagtgatcaaatatttctttaatacgggtaagattccaatgcaattcaatgaaacggtaatctctctcattcctaaggtggagaaccccatgagagccatagactatcgccctatagcttgttgctctactttatacaaatgcattacaaagctcatcagcaaaagactagctgaagttcttccgtggctggttcatcaaaatcagggtgcttttataaagaagagatctatagcgcataatattttgatattccaggatttgatcaagaactatgggaggaagaatgtctcgccaaggtgtgccattaaaattgccctcagtaaagcctatgataatgtggattggggctttgttgaggacttacttgtaggcttaaattttccttccaagtttgttgattggattatgaagtgtttgaggggaacttcctattcgatcatgatgaatggaagattgcatggaaactttcaagggagaaaagggctttgacaaggggatccgatgtctcctcttttatttgtgctaataatggaatatctttcaaggaggttgcaaaaagaagcttcggagaagacattcaaattccatcctatgtgcaaaagcctaaagttgatcagcttatgctttgcagatgatctcattctgtttagcaaaggctctgttttggcggctcaccatctgaagattgctttgggatgtttctctgaagctacaggattattaccaaacaaggataaatctctagtgtactttgggggtgttaatttgcttgaaaaagaggcgatcttggatgatttacaatttaatgagggctcttttcctctcaagtatcttgg

SEQ ID NO: 342502 - DNA, 624 bp, Cannabis indica
agctgaaagtttacatcagaaaaagaaaattcttttcttatggcagcgatgttggaagtgggcagatttttggggaatatcaccttgatgagttggataaggacgaagacccaagagtggaagaagttattgaattcagctcagaagatgacaattcggaggaggaagatgattcgggaactgaagaagaaaatgatgaagaagaagaagataaagatactttgagtcatatcaaggaactttggcaagaggaggatcgatccaaaggtgactttgagtctcatgagctggttgcggaacaagaaagaatggaagtggttgatccagaagagaggaatactttgttgttttcgaaatcggagctagttgaatccatggcggaaatgggcatgaatctaatacttaaagagaatgtagagcatcaaaagagtcagtgcctcaagagtggaaggaagagcagtagagaactcaaaaacttgacttttaacataaattatgagaaaggtcagaaaagagaggggcttccaaaaagatcattatgagaattttaacttggaatgttagaggaagtggagacaagatgaagagaaaggcaatcaaagctacactaagtaaggtgaatcc

SEQ ID NO: 342503 - DNA, 849 bp, Cannabis indica
tttgttcaggagtatctggacaagtagattgatgtaaaatactattttcttttaaaattattaaaatagtcccattatcagctcgtaaaatattgattcatgtttgaaattcggtttcaatcatttaaaaaaaaatggaaaaaatttattcaacttcagatttctaacgcattaaataaactaaacaacaacgagtatggttgtctataaaagtaacaaaatcatttttttccagaatttgtagtaacctttgaaggtctccaaacatcactataaaacaaatagaaaggtttggaagattgataagaatttttagcataagattttcgttggctcttagccaataaacaaccttcacattgaaaagataaaggaattaatttcttaaataatactataactaaatgttttaatttgaaaaactaaggtgaccaagtctataatgccaaaccattatttggtcatgaacagaacgagaactaatattactaaacctttgagtaatttcattattagaattcttatcttcaaaatagtagagaccattaatcatcctagaactgtcaatcgtctttcccaaactctagtcttgaaaaaggcaatgagattcatagaaaattacacaacaattagaatctcgagatagtttgctaaccggtaagagattgcaggaaaattgaggaacatggagaatagatgtaagatctatccccttagaaattttaatcaaacattttcctgcaaataaatgagaaattaccatctgctagcttaacttttttactacccgaatagggtatataaaagttaaaaaatttagaagaataggtctgtaaagcccgcttagtt

SEQ ID NO: 342504 - DNA, 563 bp, Cannabis indica
tcgtacggtgggaattggaatcgttcgcgttctatgatccaattgatgggatgaatgggggtaacaaggagaaagggcagttaaaatcgtttgagcacctctctaacaccaggattaaatgcgttggtctatcaattgatgggaagcaaatcgttgcctgcaaagagaaataaatattaatgatgacagtcataaatacagcccacgcacctagggcacgtgccactatatcaataacctaaccggaggcctcatacaagcctcatttacccttcactaaatgagacttggagggtaaatgttgcctcagatttttcccaaaatacatggcagcggccgagggtgacacgtggacctaaaggagcatccactcacgaaaatcaattaagtcttgggcaggaaagtgcatctcatggagtgagcctcccggaggagagcataagacacgcctttactctttgggaggctagaactataacaaggcatctccgggaaggaaagagactgttcgaacagtcacttcgcatttgatgcggcatggggggaaacgtatcagaacctcc

SEQ ID NO: 342505 - DNA, 532 bp, Cannabis indica
ataaattttagcattgatccatgtactatatcccctactccaagtcttagtgagtgtccctaaaactttaggcttttggaacaggttgactgagtacatcgagttttggctgaccgttaacatttgttgagttaaattttatattttagttacgattgaacgtaattctgaagacttgatttatgatttgaaaagtcagactaaatatagctcttgctattttgatctatggttgagtatgactcttgtccttgagttttttaaatgaacagatgggttgggcatagcccttatcacttagtttgtaagtgaatatttgggttgagtgtaattccgatcacttactttataagtgaatagttaggttgagcgtagcttatcacttatttcataagtgaatagttgggttgagcgtagctcctattacttactttataagtgaatagttgggttaagcgtggctcgtatcacttatttcataagtgaataattgggttgagcgtagctcctattacttactttgtaagtgaat

SEQ ID NO: 342506 - DNA, 548 bp, Cannabis indica
ctcaaaataaccagcaaaaactaaagtagctaataaagagtttacatattttggatctaaatctaacagagccgtaaaagaataatgcagagttaactttttagggttttcactttcttgaggagagtatcaatggcattgaattggggggaacaagaaagagatttaaggattgattggtacgttatgaatgtgtgattgaaacctggttgttgggctgtccagttgaaaaatccaagtgcaagtgagtggtcaggaagaagaaaggggtcgatgactcgggcaacgagtgatggggtgagtgagttgcgacaacgaagtcgatgcaatgtgttcttgaggaaaggactccatgaacgagttggctttatgtagttggaagcagcgataagagcttgacttatctgacttgcgaactcagttgccgaaccaccacccttcatcagcaatcggagacaaagaagaagaaacgaaaatgagagaaaccaaatggtgaatgtagtattttgtaattataataatttttgagatttaaaaaagtaaaagta

SEQ ID NO: 342507 - DNA, 1854 bp, Cannabis indica
atgaaggacagtagtttgaatccagaggtggcgtctaccatctggtcgatcctgggcagagggaaacaatcctttggggaaattttttttagatcagtgaagtctatacaaactcgccaggtcccattaggcttcggcaccaggttcggattggctagccattccgggtagtagacatctcgaatcatgccgctcgttaatagtttgtccacctctttctctaaggcttcgaccttcactgagtcgaggggacgtcgtttctgctggaccggcggcatatctgggttgacattgaggacatgggtaatgacgtggggacttatgccggtcatgtcttcttggaaccatgcgaaaatgtcaatggcgcccctcaatgtctttattattttctctttttcctccggttctaggttttttcctagtcggagtactttggtggagtagaggtcgcacaccgacacttcctcgacgtcctccaccggttctacaattttttcggatcccacacggggatccaacccatcttcttcagccatctctggctcaatgatttctcggaccatcagcacgggtaggcgggcggcgacgttatagcattgtctggcctccccttgatttcccctcacagtccctattccagcctcctaggttgggaatttcaggcacaagtgtcgtatggacgtgactgcaccaaaatccaccaaggccggtcggctgaggattgcgttgtaggctgttgggcagtccaccaccacaaacgtgcagtacttgaaggtgctctggggtgtgtccgggcataaggtgacggaaagcctcacttttcccatagggataagtgttgtcccattgaaccctgtgagttgggaaccacttggtgaaagatctcggtctgttaggcctatggcagtgaaggcctctttgaacagtagattcacgaaactcccattgtcgatcaggactcgggccacgatcttattggcaatgggggtctctaagaccaggtcatggtgaggaaaacgcattgtcttagcgtcttcttccgtgaatgtaatgggttgatcccttagccggggcctttgagctgggagttgagtaacttcccaaacctcgtcgtgtttcacggcccctgcgtaccattcagctccttgcgggtagttcctctgatgtggggtcctcccgagatcatagccactctcccgttgggtctaagtggcaggccgggaatatgcggggcctcttcggggggaacaactggagccgatactcctgctgcaccctctggtgctccttgtggcaaagctccagccgcctgactcgggttgagatggggcaaccggtttttgatccactcgtagaggtgtcccaatcggatcaaattttcaatctcgtccttgagatttttgcattcattggtgctgtgcccaatgtcgttatggtactcgcatctctaagtgggatcccttcgggagctatctttgtactagcaaaatacacacgttcttgggagtccgtcaactccgtgtactgagtatattggggagtatacccccttttttgtcgcttatcgtccgtccgggtgctgcctttggaggaccttttactcctcgagccctgggatggaccggctaaactggctgttggagcggagtgcgagggggcctgtccatttatccctgagggatttccaaaatgggacgacgcgggggctagggcctggccttggctatatccgggagtagcagaaaactgaatgtcgctcatcggtggagctgctgccgccacagtgcctgagagctgggctccgggcacatatcctgctaccccggtgggatagtatcctccataggccattat

SEQ ID NO: 342508 - DNA, 764 bp, Cannabis indica
atcctatcgatgatggttgcttattaaagatgcttaatatggtgaagaaaattattaaatattatgaatcacaatttatctatcctttcgatagtgaattaatgtatttgattataatatttaatagatttttcttacctgtgtatgagttccatcttgttaatttgtgtgagaactctagcatgcataatgatcatttgttattttgcgatcatttatttatgagaagagagcacaaatggcatgattatgttataacatgcatttaatggttattgctcttgtttctcattagctttaagcaatccaagaacctctgccatgttgacgctgaacggaactaaccacaagcagtgggtagaatctctcatgatgaatttgactcttatgagagtggatttggccttgagaactgatgcacctccgaaacctactgatgataccactgaaaaggatagaaagtcctatgaggattgggagcattccaatcgttgttgtctgatgcttatgaggtatcacatggatgagtccattcgtgatagtattccccaaactgagattgcaaaagattttctcaatgcaatcaaggagaagtacaagaaattctcaaagaatgagaaaaatgaatgcctgactttgttccatcagactaattatgctgattcaggtgacattagatctcacattgacaaactgatgggttgttaccaaaagctcaagggcatgggattggatcttggtgaggattacatggtgtggtttgt

SEQ ID NO: 342509 - DNA, 573 bp, Cannabis indica
ttaaaaaaaaacgtggcaaaaccttatcgtgacacgtgtaaagcaataaaaccaatatatattaaactttccaaagacagtatactgccaaaaaaaattaaaaataaaaaacagtataaaagttaaattctccgtgtaacagtacaaacgaaaaaaaaaaaaaagggaaaaaacagtaatgggtgtaaatttccctaatttctttgccatcatattaatgttggatcttttttttttgttgttgttgaatgatcttataggccaatgtaaccacaacctctctaaaagtaaagagttcatttaaaactctactaaaaaaaagagaagagtgataaaagtgaagggtgataaattaagagattgatcacatgacatcattcaccttatttgattcttttgcttatttatttatttatttattattattatttttaaaaaaaaacataaacatatatgaattaattttcattatcaaaccatgtcacttacacatattcattagcttgatgacgatagtgtggtaacacaacattattagtacaatcaagttttatatgttataaatcttaattt

SEQ ID NO: 342510 - DNA, 742 bp, Cannabis indica
ataaaatacattgaaaaggtgttacggtattttggattcctattcaatgtaaatcatctatattcaagttccaagagtggatgacaacaaggaattaataagctagtgaatttacataggtaaattcttgatcagcttattggaagctcggatatataggctcatgatccccatactagttgagacaatactgcttgtaagactcagttaattgatttggattaatcaattataattctaaaattagactatgtctagtttatgaattttcactaagcaagggcaaaattgtgaagaaaaagtttctagggtacatttgttaattaagagactttaattagtctaattaataaatatattaaatgacattattatttaataattaattttagttattaaataaatggaattggcatttaaatggttaaattggaaaattggcggttttgagaaaatcagatgcagaaatgaaaaaacagcagaagtgcaaaagtggggcccattacccacattcatgaccggccacccttatagggttttatcatttattttttcattattttaatgccaaataattctaaccttaccctagtggtatgctataaataggaagtgatggtttcaaaaaaataagacacatctttttttcaaaaaactgaatgccttctcttcctaaacctagccgccactttaagccttcttcttcaccattaaaattagaaatccttgagtgatagagtag

SEQ ID NO: 342511 - DNA, 687 bp, Cannabis indica
taattttatttattattgagaattttaagttcatatgttacaacggttgaaacttttttcacagacctccgggttacaacccagtgaggcaaaattaattatctattgttgtggcatggaccaacaagaaatatagcaagtgcttgatgtgtctggttttgtcaagaacaatatgccattcaagtatctaggaattcctatttgtgcgaaaatattatcccaagctgaatgtgatagccttatagaaaatatggttgcccgaatcagaatatggaattcatgccatttaacatatacaagtcgagtacctgtgatcaatttcattttaatatccattcattattattgggcatggacaatgctactccctaggagggtattgcggcaaataaatgcaatatgtcaattttttctctagaaaggaatgacttgattttggtggtcctgggttagttgcttggaatgatgtaacgttcccgctttaagtctctattgggcctttacacccacgaaatgatagttcttatacacaagtacatcactttggctgcttcatggaatgatgaatgaccctactaaccaacacgagtatttccagcatatgctatgtcatcactcgcacgctttcttggaaaacttcctagaaggtcacccatcctgaaattactctaggtcaagcacgcttaa

SEQ ID NO: 342512 - DNA, 765 bp, Cannabis indica
gacaaataattatacgtgaagggggcgacaaataactatacgtaaagactgaaagactaaaatgatattacagtagatatatattaaaattaattacacattacagtagatatatattaaaattaattaggtgtaaagaatatgttagaatcatcattctacatgaatatcatgctataatattttgaaaacgacacaagtacataggttcaactcattttaggcaatattattaggctaatagctacttaattagcgtagagaatatgatttgataataagatcatgtttattatatgcttatacaattttatattgttagttaagaagtctataataaattattaatgatgagtttggccaacattttattcataatataattattttatgaaattagagctacgattctaaattctctagtatattatatatttttatggttatatattaagtataattgttaaatgaaaattattgttttaatggttggttttttttttttactgtttatatattcgttaaaagtaataccattaaattaattaaattagtattgtttttttttaaaaaaaatatttacatttaattcgttatattattaactatttattaaaataatatatatataattatttagaagtgctaataaaattaggtatatgtttttttttataaatctaaatttaataatgatactcatattaaaattatgtcaaaaaaaaaatatttttattgttctcgaacatcctatacagcctaagc

SEQ ID NO: 342513 - DNA, 505 bp, Cannabis indica
ccaaaatccaagcagatcaaaaacaaaacgaaattaagacaaaaaaatgaaacagaaattaagactaaacaaacaaaaatgaaaaacccataaaaagaaaaaagaaattaaactaaaaaaatagatgccctaaaaaaccaaacaaaatgctaaaataaaaaacctagaatagtaaaattgaaaaacacaaaacatacaaatggaaaatacaaacaaattccaaaaagtggcaaaaccaaaaagaaactgaaatcaaacctgataccaaagaccaactccatcttgatcattttttgagcatcatcttgaggaattttttcctgggcagccaccttcgatttcttctttggaggagctcgcccacgtttcgacaatggaggagcaaaatcagagtcctcctcctcaacaacaggtcgtttacccttgtttctattagataaagatttcagaccccattttagaacttttttttttaacaggagaaggagttgatgaagaacgagtt

SEQ ID NO: 342514 - DNA, 731 bp, Cannabis indica
cacccacagaatgatggctcttatacacgagtacgtcactctggttgcttcctagactaacaactagccctacagaccaacacgagtgtttctagcatgttttgtcctcactcatatgcttcctgggaaaacttcccaggaggtcactcatctagaaattaccctaggtcaagcacacttaattgtggagttcagtcatgatgggttaccagaaaataagatgcaccttattgacataggtagtaccaatcaattcatttaagccttcttcaactgtgtagtctgatacctatatagtctcaaaaatcatcacacttaaccttccccaagcgatgtgagattacacaactctcggtctttccccttgcaaatcatgagacgctgtctgtcacaacaatcttcatgtcattccatgtctcaatagtaccaagtggaagatagtacaaccactatttagctgcatccttcaaggagaaaggaaaagtatacatattgatttattcttcagtcatcaaaggaggtatcatactagagcagacaatatgaaactccttcaaatgcttgttaggatcttcactaggcaacccatggaaagacgataataagtgaaaaaggcctaatttcaattcaaaattaatatccaaaggtggataataaatggacaatggttgtttctgacagtcagtagtcccgtgatccgtaacgggaaataccaagtaagttgtgcaatc

SEQ ID NO: 342515 - DNA, 1036 bp, Cannabis indica
gcctggaagtagggtcttaactttctaaaagccatcatgaggcaaaaaactagcttttcaatcactcgataccgtatctctgcccctatcatgcgcttgttgacatagtacacggggtgttgtgttttttcctcttcctggactaaggctgcgctgaccgcattcttggagacggccaagtatagtaacaagtcctctccaagaactggctttgacaagatcggaggtttggccatgtgttcttttaattttatgaatgcctcctcgcattcttctgtccattcaaatttttggcatttcttcagaatgttgaagggaatgcacttgtctgtggatcgagaaataaaccggcttagggcagcaacaattctggttaggctttgcacatctttgtgcttcttgggagaaggcatgttcaggagggcttgaattttctctgggtttgcctctattcctctttggctgacgataaatcgcagaaactttcttgatttgaccccaaaagtgcacttcttcgggttaagtttcattccatacctccggaccacttcaaagcatttcgcgaggtcgtctgcatgacttccacatgccttcgatatgacaaacatgtcatccacgtaaacctccatgtttcgtcccagaaggcctttaaacatccggttaaccattctctgatacgttgcactagcatttttcagcccgaagggcatgaccaggtagcagtataccccctttcggtcctgaagctagtgtattcttgatatgcaatgtgcatcttgatctggttgtagccagcgtaggcatccatgaaggacaatagcttgaatccggaagtggcgtccaccatctggtcaatctggggtaaagggaagcagtcttttgggcaggctttgtttagattggtaaagtccatacacacccgccatgtcccattcggcttatgcactagtaccagattggctagccattccgcataatatactgttggaatttattttaccaggatcttagatctactcacaagtatgttgtttaa

SEQ ID NO: 342516 - DNA, 522 bp, Cannabis indica
cctttctgacgagaaaggaaaataaaaaattgtgaacgactttttgattaaataacctttctgacgagaaagggaaatcaaaagttgtaaatgagatataactcataagctacatatgaacctgaatactaaaggcttgcattgtatgggaaagtattaaacgagagactaagatgccttgaaaaaaatacttaaacctagtatatgaatagacaacctaactattcatataagcaatcaacaatatacaaagtgataaatcattaaaagtatattcaagtttgtttaaaatagattataactatttatgcaaaggagaattgatagttgctcgtaattcaaaagcatagcagataataactgctcgcgcacatagtagattatttactacttaaataatatcgaaggagaatatgagcaatgataatccttaaagtattttaaatttgatcaaaatataattgtttaagttgtgaattaaaatgcaaacacacatatatattaagttcaaatataaaaata

SEQ ID NO: 342517 - DNA, 536 bp, Cannabis indica
agagtgccagatttgggataacattttctctccaagtctgtacgggacctccaaggttgcgtgtagacttattccgagctggctctgccttcgtatggggacatgtgttgagcatgaccgttcgagactcgatgtgaagctgactgggtgtcccttcagttttcggctaattaatgctctgacaattaatattttgaaaatccgaatttctctttccatggctgacagttgcactcgattacttttgatttcccatattcgcttttgaggcgggaagccgaggcgtctaaggttcctttatgtgcagttacccttttgcctataagtacttggagtactggcacattacttcattttatcaccctccgttgttaagcaaactttcagagtgaaaagagaaaattttgtggcttcgaagttgacgaagtgcctacagacaatttctgtcttgcttgaatccggacattcgaatctttgagtaagttcctgattcccttatgcttttcctttgcatgcttatgctttgaatgtaactt

SEQ ID NO: 342518 - DNA, 780 bp, Cannabis indica
tggagttcaagtctgcctccatccttaacacctaacatagacgtcgtcgctctcttttcctatatatataaaagttgggtataattaagtgttttataaacataattttttatgtgttattacagggttagggcagttatcagtaccatatgccctagagaatggagggtggtgttcagtgttcctactcctattacttggaataatatgcgcatattcttgtcttctacttggaaaatgtcttgagaagagtcccaaatcaagaagctacagtgatattggagaagaagcttttggaggcaaaggaaaagccatagtgggagtatttatttacttggagattttcatgactcttgtgtcttataccatatccttgcatgacaatattatcacagtctttaaaggggttcaacttaagtttcccatatgggcaaagttatcaacatcacatctcttaactaccatagcagttttggtagccttaccaagtctttggctgaaaaatctgtcctcaatatctttcctttcctttggtggaattctcatgtcagctgtcattttctcttctgtggcttccacagccatctttggaggtgttagacctgaccataagataccagttcttcaaatttataacattcctgccatttctggcctttatattttcagctatgcaggacatattgtttttccaaatctatatgtagccatgaaagatccatccaagtttaccaaggtatttctattcctgcaatttatttagtattattttttttttta

SEQ ID NO: 342519 - DNA, 946 bp, Cannabis indica
tgagaatggcctttttggggctcccttattcggttggtaggaacaagaacgctattcttggttttctgaaggacaaaataagaaagagaattcagggctgggaaggacgaattttatctcgagcaggaaaggaagtgttgctgaaagcggttgcgcaatcaattcccagctatactataagtgtttttttgttacctttggatacttgtaaggaattggagcgtcttatggaaaaattttggtggcaaattgattctattcagaaagcaggtgttagttggatgagttgggatcggttgagccgtcataaatatgttggaggccttggcttcggaagcttgcgggattttaacttgactcttcttggaaagcaatgttggcgatttctagtcaatgatcgctccttggtgagtaaaatcaaagcaagatattatgctcatggttcctttttttcggttgagttgggagataacccaagcttcatatggaggagtatttttgaagctaaggggctgttacaagcaggtgtcactcaaaccattggtacgggtgatcaaatctcaatattaggggacccttggcttcttcaccgcaccaatagttttgtctcttcaactcatcatgctcttcaaaaccagtatgttagcagcctttttaagacggacgaccgtgcttgggacgaggagattattagagatctctttaacgttcgagattaggagttgattctatctattcaactaagtgcaactgctacaaatgactgccggagttggaaatatgaaagcctcggacagtactcggtcaagagtgcttataaatatttacaagaaatgaaaggggcctatcctaatgatggtggttcgaatttttggaaggagttgtggaatctaaaggttccaccaaaagtgagtaattttctatggagggcagcttcgggttcgct

SEQ ID NO: 342520 - DNA, 611 bp, Cannabis indica
gagtttatttgttaattaaaagactctgtagagtttaattaataaataatataaatgacaattttattttgtaattattaaataaataattttggaatttataggattagaattggaaaatatggcatttgtgaaataatagataaatagttgagaaaaatggcaaaaaatataattagtgtagggcccacatatggccggccactacacccttattttttgctattattttatcatttttttattccttataattcaatcctaaccctaagtgaattagcatcaaatgaaaagaatagtctaataatctaacaaatgactctaaacctagtttacaacttatcaaacaactagagagtttgagacttcttcttcttcttcttccttctaatttttgaatcctagagtgttcttcacataaaagttcaagtcttagtgattgagtgcatgcccatccatagaaagttagtcctcaatcatagtgtgtaagactctgaagaatccaaacaactgaaggagtgtcaggctcaaatctcaattagactcagcaacagaatggaacaagggttagagatctgagtggaaggagtcatttaattccgctgcaacta

SEQ ID NO: 342521 - DNA, 543 bp, Cannabis indica
aagtaggtgacaatttttttaatcggcccttatacccgacaattttataagggcccattaaaaaatcgaattccaattaaaatagtcgcctattcctgtaattactattataaaccgtcgggaatactaatttttattgacggttttaaacaattacttaatttttttagcgacggtcctccaaaaagagtatttttaggaccgtcgcgaattccaactttcgtagtagtgacttgtgtctgccagaatggaagctggtcggcctaccctttattggaggctagctggcccatgctccactatggccaaccaaaggtggtccggccagaccctcctggttggccattttattgtatctttgtcttgcttgatcatttggactcttcgtcaactagtaagttgtacatgatgacttggtcctcttacttacaggttgtactccacgtggcatcaatcttgcctatgtggacatgccacatcatgagaataaaaattaggataacagatgggctaactttgttaggtctcttgcagctcattaga

SEQ ID NO: 342522 - DNA, 577 bp, Cannabis indica
aactttgtggtaactacactaaggtaaaatcaagtcgaaagacattttactctatgcatctaagcaagatctctataaaagtgtttgatttattcaatcaaagtgggggatatataatatttgattgattaaataatgttacaatagtgtgtcacaagttttaatctagtgggggaatgttatattatattgttataatataagatagattaaaatattaaaatgagacatattatatattaatatgagattaatgtatataatgtgattgagagttacatacatctaatatttacataaattgtaacataagaggtggagttactcatattttgtaacttccacatgatcactaattaagtgtgtaaagagtggttacacaacttaattttttgaaatttaaaactataattcaaatatagttgttggggattgaattttgtcatttaaaagtgtataagtgatataaaataaagtgggaatgatttggagagttgtttgcaaaagctgaaaaatttggtaactagtaactagttgctgttttttttttttcagctttaattgttgaacgtttttt

SEQ ID NO: 342523 - DNA, 870 bp, Cannabis indica
tcttcacaaacaaaactggagcaccccaaggtgagtagctcggtctgatgaatcccagattcaataactcttccaattgtatcttcaattccttcaactcagctggagccattcggtacggtgccttagatactggatccactcccgaagccaattcaataataaattcaatttcccggacaggtggcaatcctggcaaatcttctagaaagacatcaaggaactcgcataccaatctcgtatcctcaggccctgatgtcacaggttggctggtgtccactgcagtaactatgaaccccagaatacctctacccatcaggtatttagctttcaacagtgatactctcggtatgcgtgcctcctgtaccttccccacgaatactgctggattagtactttcgggctcaatcactaccatcttccgcttacaatcgatcgtagctccatacttagacaggaaatccattcccacaattatgtcaaagtcagataattgcaactcaattagattggcggtcaactcacaaccatcaatccaaaaagacaaagaccgaatccaccttgtggatactattaggtctcccgagggtaaccgggtgccaaacctcgaagcataaatatcacatggcttatgaaaactttctatcactctacttgatacatatgaatgagtagctcccgaatcaaataacacagtatatgaacaaccattaatagacaactgacctgtcacaaccgacggactagcatcagcgtcaacctgagttatagtgaaaagtgttggaaattattttaccaagatcttagaactactcacaagtatgttgattaacaccctaaatatgatcttctaaaacgattatgaaataa

SEQ ID NO: 342524 - DNA, 740 bp, Cannabis indica
ttgtgccatgtgtatattgtgtccatgtagataaacacgtggacaattacacttggcacttagcacctaaaatggaaatattaaattgctaacaaaacacgagtattggaggttttaccgccaaaaattgagtactggagtttaagtgcaagtaaaatgaaaattttgggggttttgccgcaattaacccatatatttattaattaaacttaataaagtctcttaattaagccatagcttagtagaaattcataaactagacatagtctaatcttagaattataattgattaattaaaataaattaactgagtcttacaagcaacattgtctcaactagtatggggaccatagacctatacaaccgagcttccaataagcagaactagaatttaccaagtaaattccctaacttattaattccttattgcatagaccatagatctcggaattgcactctcagttatatagaacgctctatatgttccacgatatagatacgctataaacatttaactatcgttctaattcgaataatcaaagatcctctatagatggtttacaccgtgtaaagaccgcttagctttaatttaggaattagcagataaattagggcttaattataaaaattatttattaatattgaattagttatttatgataatttatttcaattcagaatgcatttttatgtcacatatagaaatttcataaattttgcatgttttgtgtccggcaaca

SEQ ID NO: 342525 - DNA, 879 bp, Cannabis indica
caattttacacatattttcggttgcagtagaagaaaatgtgagttcaagccaagatgcaaatgtacccgggggttcggatggtgcacaccaaggtgctgccaacatgcagaagccaaagaacactcaaccaaggcgtgagaggtgttttcgggttggatagcacacatgggacaaaggatagaaacatttacatgtttggtgacaagatttaaacaagtggggaggcagtttgtcaaggcgtgccacaacatatttttaacttttggaggtattttcagctgccacagctccttccagaacccgaagttgttagctgcaggtcgaggaaaatttgtaatgtaaggtatttttaacaaggaaatttagtttagtatgcttaaatataaaatatgttgttttaatataccattaaattaaaaatagtatatatatatatacttttaatatttttttttcctaaaaatacccttacatttcaaaaaaatttctctctctcactctccggtgttaatcccaacccagaacccctactgtcgaacacatagacccagaacctcggtcgcaaggcctcgccgtcatcttctctcacggcctctctcgttttttacatttttttcttctgatttactagtaatttgtgatattttacaatatctagcaatgtatttgtaatgatagaataaatctgaggtcagggataaagtttactgataatttgtgatatttagcaatgtttagcgatgatattcgcgatgtgttttgcgatgttgtgaattagagacatttagagatgttttcaagtttttcgcgatgttttgcgatatcgtcaaaaactagaaaaaaaaaatacaaaacaagtgttgttgtgaattggagac

SEQ ID NO: 342526 - DNA, 775 bp, Cannabis indica
aactctagcacccttcttgacctttgcaggcaaacatgactactaagtctcgctggcacggccctctggcctccacacaaactctggcgccatctcaacgcttgcgctcggtcttctcagccgtgctggctactttgatgcattcattgcacaactccgcatctctatcgttgcctttgtgtgacttacgccctctggggatttgacaagccaacacattccactcaaccgcctcagcgcttccatatggatcaaataaaaatcacatctaaacacctccaagtacaatcatcctctgacgattgcggcacctaaccgccttagtctccatgtgcgtccctcttgacacacaatgtagcaactgaagcattccatgtctatccctatttgaaccaactcggttatcaactctcgacctctgtcgttactaacaagaatctaaaggtccctgtcctacttcctcacacatgccaacaagcttccttttcaacaaaaacgccttctgcggcttacgatgtcactaaggcaaacttggcctagtttcccaagcatacaatacggattgtccccccaatcttgtatcatgcaaacaagtttcaaacatctgatgcgcctctccacaattgcatgttgtagttgtctttctagcatccttcctcacgcctacatcctctctaggataggccaactaggttcacctcccactgagatgaacttggctctaataccaattgtcacgggctcaccttttcaggcagcggaacacccgtgcggc

SEQ ID NO: 342527 - DNA, 945 bp, Cannabis indica
caaaagacaaaaataaaaaaaaaaaaaaattgttggagacatgaatggttttgattccttaagattattgactaagatgttcttttttaggggaaatgtatatatttcaccaacatattaagaataaaaaaaattaaaaagttggttttaatatgatattaaattttcattagcctacctaagaagtttttacaacaaataatttaaatattaatttgaaattaaatgaagagtaataatactatggaccaacttgggaagaagagactattccaaagaaaggttccaagttatgtaattaaactaattaattgaattagtacaacctctcatcatccaaaagcaatagtatgaaattaatattgtgtattattttgtggttgagtaaaataatatggtttatagggagaggcttattttatttttttagttaatagttgcctaacttaattaattaaaacataaaacatttcattttttaaaaatcaaaattaaataatatacattggaaggttatagactcaaaataacttttttgaaaataatattaattaaactagtgtgaaatttagaccctaaatcataaaattatataatttaatagaggactcatagcaacataaacacaaatgggttattatttatgggctaattacgatttttgtccctaaattttaatatgtatcaaatcatatcctttgaaatttgaagactgttaaaaaatttcttgaattattgagcttgttggatttaagaatttttatctaattttagtaagaaaagtttaacatgaattaaaatttaagggcatgatttaatacatgtcaaaatttaaaaagtatgatttggtagagatgaaagtttgagaaatataatttaataatcaccgaattagtaaaaattgaataaaattaaacaaaaatccttaaaatctaataatttcaa

SEQ ID NO: 342528 - DNA, 1413 bp, Cannabis indica
agctgcacagtacgtttgaaaatcacgtaatacgcctaagttagttagggtgttacatttaaaattaaacatattttgcattttaatatatctaggtcgaatgtgaccttttattccacaaaaatggcatataggaatgaaccgattcctatttcctttgggatttccaaacttaccaaactgcttcttttttgtaacagcattacattttgttgtagaattagaatcctccaaagtaatgtcagaacatctagaaaccaaaattttagatttcagaaatttagtgtttaatttagattgagccttaataaatcccaaaccaccatgactcgtttgtcctgaatttcgaacctctttaaaaatgttagaacttagatttaacactttaacattttttttcaatttttcaagttccttagttaaagatacaaatttagaattttttgaaatcaattcagattcacaaaatttatttttctcttcaagacctttgatgttgtgagataactctttgttaaatttaacgaaagaacgattttcatcacaaatttacaaccacttaccaaacattatattgtaagattctaccaatgattcttcatcaagttctgactcatctgaatctgaaataacttctttatcattgtcatcagtcaaagtgtttaaaaacaaaacttcttttttccaataaaaaacttggtaaaacacttgttaaagcaacatttttattttcactattttcaaaatcatcatcactccaagtaacattaaaaccctttttattattgttcaaggtattggcacattcagattgaatatgaccataccctttgcgttccctgcattgaatacccttttgattattgggaacaaaagatttagctgcatagttaccttttagattttttgagaaattcattttatttctaacatttttcatgtacttttgaaaatttcttgttaacaaagccattttatcatcattctcattgtcagaaacatatttttccaaaacgttaaaggcaatacctttacttttctcaacgaaagagtttggcttaacctttttcttgatctatttatttaactcaaatgttcttaaagagcccatgagttcttcaaccttcattctgcaaaaatcttttgcctctcccattactagcaattttgtgtcaaacctgccaagaagaacacgaataattttctgaatcaagacatattcatctatttttcacctaaggcaaagaactcattagaaatatcagataacctttcataaaattcagacaaagtttcagtatctaacattctcaattcatcaaatctagtttgcaacatggtaaaatgtgatctttttgttggatatattttatgaggatctagatttactaacaagtatgtttcattaacatc

SEQ ID NO: 342529 - DNA, 743 bp, Cannabis indica
ccaccaaaactaccttcttcatcagaaaaaaaaataaatgtgatattgtttgtgcttttgatagacttaattataaatatgatgttgaacccaaaaatgagtacatttttaatattatacttgcaagatgacgaatagcactttttattttttgcaaaactaaaaacttcattaaacatacacaaaaaagaactacaaggttagagttgcaataggggtgcaatccaatagaaagaaagcgggaaacatggccatcagctgcccaagaggcaatccgatgaaccacctaattatgggaacaaggaatccaaacaacattccaaaactcaaacgaattgagagaacaaaataagtttaaaaaaagaaatcaactttcgatccgaagctttcaaacaaacatagcagcaacaagcacttgacagtcggtaaagaaacgcacaaatttccattctccgcgaatgcaaaaaatgacagcatgatagagagccaaagagttatttttgtggaatattttataacatgtttacacacggtattgagaatcacaataaattgatggagaaatataatataataaatgaagaataaatggaattaatatttgtaatatgttgtttactaaatagaatgataatgatttatcttgtttactttattagaaaacgtaattagagtgcttaaattagctaaattatcattttgagttatactattatacatgatagttattttgtaagacatat

SEQ ID NO: 342530 - DNA, 564 bp, Cannabis indica
cgtgatgttgatcttatattgcaggtccctttgagttctactgtgatggacgacaactggttttggaacaagaggcatctagtttttacaccgtcaaaagctcctaccattacttacaaactgttaattgtaattggagttctaatatggaggctgatttatggaaagtgctgtggaaaattaaagtccctcctacggtgttgcattttgcgtggaaatcactttcaggatgcttgccaactcgaccgcaactccacctcaagcatgtccctatggagcttaaactgtgtattctgtaatgttgcagaggaatcaatattccatgtcttagttgaatgttcatttgctcactcttgttggaactgttcgtcactcggtgttggtgtctctgctttggagttggcagcaggtggtaattctggtgcacttgaagaagcagtgatggttagttgggctatttggaaagcaccttgtctgaagtgcagcttgcgcccacgtcccccggtcaaatgaggctgcttgcagcctctttcctaggcctaaaccatgcttccgcgcgcgcag

SEQ ID NO: 342531 - DNA, 554 bp, Cannabis indica
ctagttccatttgcgattctgagttttagtttgggtttgaattcgggtcggagttcgagtcctggtctatgtttgggttggggtccagatttgagtctatgtccagatcaggtttcgagtgtgggttcgcgtcctaggtcttggtctaggttgggttcgagtcccaagttccaataccgatctgagcctggattcagttctgggtctaagtccttggttctgatcctggtctgggtcgagttcgggtctaggtacgcgtctagctttgggtgtgattctaggtgtgggtgattgggtttgtatccagatccctatcatggtccaagtctgcatttgggatcgggtcctagattttgatcaaggtccgagtctcacttccggtctgggtagacaaccgtgtccgggacctagttccaatctcagtttgggtctgaggctaggtctgtgttcggttctaggtttgggtccgggtcctggtcacgttccttgtcttgttctagggtcttggttcggcgattgttgttcaggttctaattttgggtcccaggtctagg

SEQ ID NO: 342532 - DNA, 544 bp, Cannabis indica
cctactaatatcagaaactaattttaatgaatttaaaaaattaataaaaattaattttattctgacaattagatttttaattgaaaattcagattctacacaaaattctaccaaaaattggcttttgtttcaatgaaaaacgatttttgaatcaaaagttatgccgaaaacaagtttgaggcactgcatacccctccgcgcgcggaagcaaggaaaacgccgagaacagaggctgcaagcagcctcatttgaccgagggagctcggcgccggcagcccttcagacaggaaccgtgtccgagaaacctcggtcagcactgtctgaattggcgtgcgtgtccgagcgaatccgaggcttgtgcgcgcgcgtgagtgattcaaatcctgatattttcgttcaacttcaaaaaatcataactaattcataaaaaatcaaaattaggttctgtaaagcctaaatttattaattttttatcttatttctagaaaaaataatttcagatcgaaattaaaaatatttcagtaacatatattgcgatttctaa

SEQ ID NO: 342533 - DNA, 782 bp, Cannabis indica
atgctaaaacagataagggtacatcaatatatctattttaagagggtgcattgtagaattttttaaaagttattgcactaataatatttgaaagtggtaaatattattgggtgattctacaatacactctcttaaaagggatgtattgatgcacccattaacttatttcgatattcaaaaaaagtttagtctaattttttttcatattcatgtacgttatagctatttaagatatcctacaaaattttgagaaatttggaataatttacaatatagaaaataatgttcaaacagtctatttgactaaaaaattatttcgatgctaaaacagataagggtggatcgatatatctattttaaaggggtgcattgtagaattttccaatattattaccataatttacccaaaataaaaaacactaaaaaaaattacaaaaatacgatgtaggagtttttaataattttacgggttttaaaattttatttatataaaatataatttttggtcttatgaattttgattttttgttatttgtatattaattttctgttgttttcttattacttttctaattttcttgtgtttctattaaatactataaaaatatattaaaaaaattaaaacgtaataatgtaaatttttttaaaaaattaaatatttattataattatttttaatttaaatagtaagatttgatagcctaagtttatttctaaaattatagatataacaattttctaataattttattttactatatataatatatatctttaattat

SEQ ID NO: 342534 - DNA, 1037 bp, Cannabis indica
caccacaaatagtatcagagctttatggttagatcaaggattcaagaatcaagttttgaagtttcaagaactcatcaagaatggctactaccaaatatgaagtagattagtttacaggtcttaatgacttttagttatgaaggattaagatgaaagcaccacttgtgcatcaaggacttacggatgcagtcatggtgactagttctaaggaagaagaagatgtcaagaaggtttctcaagagatcgaagtgaaagcacatagtgctattcctttgagtctagaagatgaagtccctagagaggttattgatgaagaatctgccatgggattatggaacaagcttggatcaatttacatgaagaaattattgaccaataagctttacttgaaaaaaaaagactctacacgatgaagatagatgaggctaaagagcttcgaaggcatctagttgatttcaataagttaattctggacctgaataatattgggatcataattgaagaagaatatcaagccatacttctacttagttcactccctaaggtatatgaacactttgtcaataatatactatatgggaaagattacactaactatgtctgtaagttaaaataaaccttagtaattacaaaaggtaattcaagaaaaaaagttgatgagagacctgaatcaagtggtgatggtcttatttgttcgtagaaagaagtaagggaaaaagtaatttaagaaatctaagaatgggtacaagcgaaggtctaactcaagaactccaactagaaagaagttttattattgtaagaaagatggacacttctaagatgactgtctggcataaaaggctaaattgaaaagagagaacagtcaaggaaagaacaagaacaagaatcaaggagaagctgatattatagatggatatgaatattcaagggtactagttgcatctagttcaaaataaggtggagagtggattttggactcagggtgctcatttcacatgaaactaaacaagaacttgttcaatagctacattgaaaac

SEQ ID NO: 342535 - DNA, 839 bp, Cannabis indica
actaagcacaagcagcaacaacaaaggaattagaaaaattcctcatggccttcttcccgcaacctgatggcatccttggccaggcaatgggcggctgtgttgaactggcgaggtaaatacttcaaggaggcttcagggaaggtgaaggagaacagcctgatctgagaaacaagacccgaaagggcggagtggtcctgccaatcacctttaacttttgaaactaaatttagacagtcggagaagatgaattctggctgcaactgagagttaatacactaagatataccgtgcaacaaagcctgaccctcagcaaaaataggagtggatgcaccaggcaagagacgattttccgaagcaacaatctgatgatgaccaatcttgaaagtgaaaccaatccccgttaagccatgcttatggtctaaagctgcgtcaacataaagagccgaggagtcctcatgaaagtcttctactagaaacaattgggaatggtgagtgcgctgattagagactgaaactgaatgaccagcaagattgttttgttgggcctcattgtaatcctgtaaataattataaacaaactcttccacattgttaggaacaccagatttactaaataatattgagtttcttgtattccaaatatgccaaatgaaagcaacaaaaagaggaaaatcctgttttgagatgagttgcattgcttggagataaaattcttggatgtctgttcttcggtgattgcagtaaaaaattttgaatcttgaaagcttccaaattttccttgctctagggcaatctacaagggcacgtgtgaccgattccatattactgttgggttttat

SEQ ID NO: 342536 - DNA, 676 bp, Cannabis indica
atggcatttggaacattctctagcagttgcaaggcgtgagaaatatcttttttcagagaatgaaaaccaatgtcctctaacatacacttttcgaaaaagtctagaattctcatcaagaaaatcatcagataagttagcatagaaatctttgacaatgtttgcaatgtaccctttgaaaccagtgagagtgttctcccattgatggtattgaatgaacttaacaattccatacaccctatgagcatgcaaatcgtaattcctttcactctcaaactttcgggtagcatacaaattccaatcacgctcattatcacgatagtagaaacgaggacaataggagagagatgtaggaatgttaccaggagatgattccttcattggctgcttgcctttggcagcagcagaagccttggctactgaagatgatcgagcaggagttggagcagatttggtcagaggtggctctggttcgagatcaatttcctcactgtctgaggaaactccaatgtcttctggaatctccttctcagaatggagagacacggatttgtccgaggaaccaacagagggattttgtttcatggcaggaggaactagctttttatgacttcgagatgattgaagttccttctcgacagaagcttgctgggtacgagtgcgagtggaaggaccagtt

SEQ ID NO: 342537 - DNA, 648 bp, Cannabis indica
ccaagaacatccatcaagggccaatccttggtagacttcctgatagagggaataactcaagatgaaaattcgcttgttcaatgagacacgaatacttggttgttgtacgtggacggagcatccaatggacaaggctcgggtgcatgggtgatactgatgttgccagaaggctttaagtttcactattccttaagatttcaatttgagacttcaaacaacaaggttgagtatgaagccttgatcattggtttaaagatagctgaagtgttaaaggtcaaaaatcttatatgccatagtgattcccaattaattgtaaaccaagtcctaagggaataccaggctaagggattaaaaatggcaaaatacctagagaaggttcagaagaacttggaaatgtttgactattttaaaatcgaacaaagtccaacagaacaaaactctaatgccgacgccctggcgaaattggcctcatagaacaaccttgatgaattgaacttggtaccggtggaagtgtaagatgagccaagtatatgtgaaaaggaagaagttcatatgatagacaactcacctacttggatgacacccatagtcaattatcttctcaacaggcaactttcagctgaaaaaaatgaggcatcaaaacttttg

SEQ ID NO: 342538 - DNA, 658 bp, Cannabis indica
aataatttcacggaccattaggacgggtaagcgggcagcaacgttgtaggcctccccttggtttcctctcacggttcttatcccagcttcttgagtggggaatttaaggcacaagtgccttattgacatgactgcaccaaaatccaccagggccggtcggccgaggattacattataagctgttgggcagtccaccaccacaaatgtgcagtatttgaaagtgctttggggtgtgtccgggcacaaggtgactgggagcctcacttttcccattgggataagtgttgttccattaaacctcgtgagctaggaaccgctcggtgaaagatctcggtccgttaggcctattgcagtgaaggcctctttgaataataaattcacagaacttccgttgtcgatcaagactctggccacaatcttattggcaatgagagtctctgtgaccaaggggtcatggtgagaaaaacgcactgtcttagcgtcctcttctatgaatgtaatgggctggtccattagccggggcctttgagctgggagttgagtaacctcccaaacctcatcgtgcttcacggcccctgcgtgacgtttgagctccttacgggtagttcctccgatgtgagtgtttggttttatgcccttaataaaactcatttcaata

SEQ ID NO: 342539 - DNA, 1428 bp, Cannabis indica
atttatttatttattttttgaatgaaaataatttttattagaaagaaatatccgctaatacaaaagactgaagagtaaagggaatatcacttgacgacctgaccaataacaagcaccacgtgccatacagtgcgcaactttgttagcagaccgtttaacatgaccaataaaaacattacttaaagaagataaaataacttgacaatctttaacaaataaaccaaaaatagaaggcatagataccgaactaagaatagcttgaacaactaaaatgcagtctgtctctaaaatgacatttgacctgttattcctctttatccaactaagtgcttctttgacactgagaacttctgcaatttcgggtcggcagctgacagaagaatagttgaaaacgcctccatcactcggccatcgcagtcgcgtgctacaaaacccgtgcctatctcatttgtggcttcaaaaaccgccccatccacattaatttttaactgaccagcagccggtttggaccagtaatctcttgtgtcaatgcgattggaaaccagagacactgcgcccagccgcttagactgagcactcgtccattggcgaagagtggtacgagccagccaaataacatcagcagcactacagcttctaccattccaaagcatatcattccgagccttccaaattgcccaaccaaccatgacggcttcttccaccaatcccatattgcccactgccaacacttccagaaaccagtcaaaaaaattgtttgctgtggaatggccaacacctaacgcagatcggagccaacatgaatgagcaaaggggcattgaaccaaaacatggaaaattgactcgtccccatagctgcacaacacacaatgtaactccaccggaacatgtttactagacagttgagtacgcgtaggcaaacaacccgaaagagctttccaaacaaaatgtaaaaccttaggaggggctttaagcttccacaacatcttccaaacatcatcctccatagaggagttccaactaccattgaccgactgtagatgattataggagcttttgacagtgaaaaaaccagttggatccttattccaaaaccaactatcactcgcaagattaacactcaaaggcacctgtttgatgagctcaacatcacgggaatcaaacaagtcctcaataagctccaagtcccattgtctactacctggcttcataagttgagacactttacaattggtcagtgccggatgattagagaccacacacggattatcctcagacaaaagccaaggcgtgttaagcacctcagtagatgaaccaggtcctattctcctacgagcaccatctttgagcagcgtttgtgactcaaagacactacgccatataaaactcggattgccacctaactcggcctccaagaatgtacagtta

SEQ ID NO: 342540 - DNA, 543 bp, Cannabis indica
aaatatctttttcaaaatttcaaaattgaactatatttaaaatttctaagttttattaggataattttatcaaattaaattaaatatttaataagataaatgatatgatattaccaactagatatttgtcatatcattttctaatcttataatttaataaaattaaaataatgaaataaactaatttttaaaaataaatatggttaagcaagtattattttaagaataaattaataaataaatgataaattttaaaattatatgctaaaaatatatctttttaagcctttttaaatttttacaaaaatatataagttatttaaatatatataatatcatttataaattttttataagtaaaataatttaatattgtaataaatattatttttcaaacttatgatttttaaataataaattatatcataaaataactaatttattaatttaaaattattatggttaggataactatgaaaatatctaaattaatttcaaatttattgttatttaatttaacatataagataatttataatataa

SEQ ID NO: 342541 - DNA, 1415 bp, Cannabis indica
tcccatgatttgtcagtacagtggatttacactgttaatgtagatttttgttaactatatttgagcctaaattgtgataaacttgcgcagaaattaaaagctcgtaaagaaaaagtaagaacacaaaggttttttatgtggttttacagttaaaattcagcatagtccacgagtcaatcttattagatttctgatacagttctatgattattttctcttatcattttttcatccctttttcagtgtagcctgtctctatttataattacatagtcaggcagttaattacacagttgactgatatctttacaacaattataccctgaaatcgttggatttgattacataccacgtaaaataaatgtggttaatatttaattattatacagttgtgataggtccgcttttaccgggtgaaggtaaaagtgtattaaacatgttgtaaactgtaacgctctggatgtctcgctgggaacacggtaacaatggccttggtagcaagctgacacctttcccatggttttccaaggttgatgatgtaagcctcgtcatcatgcgcttgaagcaacgctccatttgaaaatcgcagtcctggtaacaaagtggaccatagcagtcaacatcgattgtatgtcagcttctatctgggagagctgacttgacgaaactatagaccctattgaaaggtgttgggagctgattgatgaagataccatgagcgcaccttcctatggcgagataggtgcctcactattagttgtttagatttaccagattgttatacttattatgtataaggggtattatacactaagtgtcttaccagtctccatgtcttgtctcctaatgcatagtgaggttgatgcctcgccttgtacatcagaagccatatatggtttctcgttaatatacgaggcaacagttggcgtatctttatctttcataagacctttcagtcagcaagttgtaaatatattctgtcaattccgcattaatgagctcttctattttcaaatataattactgttacattcattgattcatattcttcctaatttgacatgtgtccttttttaaaatgatagccaaattttgggtatcacatacactaacatgataatcagcgataaagcttacttacaccttgaataagttttatgtcctttctaagacattggtaaagtatgctagcatcaaatgtatggagtatacatcggactggattgatattgaatttggataagatatcataaatttaccgttatatctatctaagtcaatattagttagttgattttaggtcaatagatcttaatcctgatatggttaggtttaatttcaactttgttatttatgttcttagagttgttcgttaaagctgaccaattagagtggcccaatacttacatcttggg

SEQ ID NO: 342542 - DNA, 1095 bp, Cannabis indica
tgtcaaaaaatgcgataaatgtctaaggttttcacgtatacctcacgtaccaccaataaagctaagagtgatgacctcgcctcacccatttgcaatatgggggattgatttgattggggcactccccacagggtgaggaggagcaaagtacgtagtggtggcagtcgacttcttcacaaagtggacagaggcggaacctcttgtttccataacctgcaagaaagttattcactgagttatgcgagagaaacaagattattaagagcttctcgtcagtattaaggcctcaagcgaatgggcaggtagaagctgttaacaaaaccttgaaggatactatcaaaaagaagttggccgctgcaaaaggtacatggatcaatgaactaccacaagtactttgggctcacagaacaactaagaaaatagcaacagggcatactccattctcgctggcacttggctcgaaggcaattgccagtagaagtcaatattgtgaccaaaagacgagatttctttaattaagaagaaaactaagaactcttgaaattgcccttggatctacttgaggaaaaacatactgagtcgcaaattactaatgcaacataccaacaccgagtgacaagatatttcaacaaaaaagtgaagaagaggctctttaacgttggtgatttggtgctaaggcgagtatttgcaaatacgagagatgcatctacaggagtatttaacccaaaatgggaagggccttatgtgatcgaagcaatagttagaaccagggtttataaattagctcggcttaacaactcgctattaaagaaccactagaatgtagagcatttgcgaccctactacaagtaaattaatgttgtaatctctctttctgatgtaatattttgaacttcagttattaataaagttaattcttttctaagtacaaagtcttattctttaaaattaattaaggggcatatatatgtgtatgatcaactggaaattatctgaaaatacataatatattgcaaaccctccattttaaaaaaatttcatagttttttaagtggttgattaaagtcatctatggatgatgcaaagtcaaaagta

SEQ ID NO: 342543 - DNA, 574 bp, Cannabis indica
tgggtctaagtccttggttctgatcctagtctgggttcgagttttggtcccggtccgggtctagctttgggtctaattctaggtgtgggtttaagttcggatccgagtctgtgttcgagtttatgtctaggtctggacatggatctgggtctaggttcgcgtccaggtccaagtttaggtcccgagtactggtccaagttttggtctgggtcaggatctcagcccagatctcggcccaacatttcgatcccagtcttggtctctgtctgagtcctggtttgtatctggatccttatctagttccaagtctgtgtttgggattgggtcccaaatttaggtccaggttcgggtctcaattccggtctgggtacacgactgtgtccgcgcccgagttccagtcttagtttgggtatgaggctaggtctatgttttgttctaggactaggtccgggtcctggtcacgatcctagtcttgttctagggtccttgttcggtgattcctgtacaggttctaattttgagtcccatgtctaggtctgggttcgggtttgatttttcgtctgggttctggtcc

SEQ ID NO: 342544 - DNA, 1762 bp, Cannabis indica
attaagtatctgtccgccctctttctttatgcctcccagaagagggatatgccttctccacatgaggttagctggttttttggtttgaagtccacccctaagcaaggcaggtcggggtacttctatttctctcaactagacttcaagtggttgacgggcaccggggattcgaccatcagcaaaattgggcgttttattgatgagtacttcatggtggatggcatgggcaccacccacactcggttgcagcagattcctacatatcaccgccctcccctcactcttactcttacggatagagctcaagagcttgcttagctaccagcggatgaccagaatatcatctagttgacctccgaggacaactctgtgaagtacgggctttatccgaaggatttcattcctaagcaagtgaaagggaggaagaggaaatctagtactggacgggctgagagaattcattaggaggatgagctgattcaactgaagcacgaggctaagttgaagggaggtgcaagggccaaggaatatgcttatgagcccttgaatcctgaagatgaggttgaggaagagcaggtgactctgcttaaaaggatgaagaaaccttccagcccagcccaggcctattgaacatgcaattcacattagggagcctagttcgcctgctcgaccgccttctcccgtgctcgaaaaagggaaagctattatgtctgagataagaggcttgtcaggtgatggactttggagtcttgctcgggcaatcgttttgctgactactctgtcttgtttttaagcttcttgactattatgctttgtgtttctaatgtctgttttctctaaccatgttgtttgcgttcgatgcagacatgtctcagaagatgcttgatgttatgaggaagagagttggagcaagctcgagcgcatctcctccggccaagaaatccaggggtggtgaggggaccccttccaaggaaaaggcgcctgctggggaggttattgatcttttcaaggaactaactgttacaaacccctccacttcaaaagtttctaagtccaaggattctcgaggaggaagttcggacaggcctaagcaaccaaaaggtggatttgagctgatcaagggtgaatccgagcagatgcgggctcctactcctcctttactagtgcttccagaggccaagaaaggcaaggagatgctcgcccactacattaatcggttggttcctgaggttagtgagcaactggccagtgctgacaacgactcttctttggagctattgatgggaggagtcttgaaggaattgacaagggtaagtctttcttgatagtttcctttaatcctctttatttggttcgagttctaaatttttttctctgcacaggctagtctgaagttggcttacacatactcccgagctaagtctgttgcttccaagaacgcggctctgtcaaacaccatgagggcggaggtggacttggctaggaaggacgctgatgacgccagggtagaacatggagctgttcggatggagctgggtgaagtcaacaagaagctttttactgctcagaataaaataaccgagttgactaaggattttgaggcttctgacggacttgaagagaccatcaaaaccttatttgcagaagtgaatagccttcaagatgaaaggacgtctcttcaagctgtccttcgtcgggtggaagaggagaagaagtctaaggaggaggagcttatagctgaggtggagaggctgggagaaaa

SEQ ID NO: 342545 - DNA, 1132 bp, Cannabis indica
tggctcggcctctcaagaaatggatgggtctctctcaataacctaatgaacatgtcgattacatgagtattaaggtactgagatacacccaccatttcgagaaatccagccaactctcccaaggtataaatcgcgcatgtgcaattagtagagtgcctcaaaaaatggctgggtgtattccagtgacctaaggggcatgcattcttaagcatgaccatggagttacaaggaaacacccaccatttcgagaaacaactaatcacaacatgcaaacaggtcacgcatatccaactagtggcgtacctcaagaaacagctgaggagtctcctgtatcccaagggacatgcctttctcgcataaccattgggctaacgaaatctcctcaatctttcgagaaaaccgactagttaaaacacgtggttatgcaagaaaagagaaaactggccgtatgtcgcaaatggctgggcgtatcgtagtaactcaaggagcatgcgatcacacacatgaacattgggctacgacgacacacccaccatttgaaagacctaaccagtattcccaaacaaaaacatacaaagagcacagagaaaaccctaagttctaaacaatgggtcggggtgaccaaatccccaaaattcctaaagaaatatacgtatgagtattcgagatgttcatctcaatactcgcgagtattcaaaacatcaagcaaaaaagatgcgaatactcaaaatattcttcctaaagttcacgattatacaaatttcaggtttattttctcatgagaattacccagttttagcagaggaataaggccctatgtgtattccctacaataacatgcattttctactccttaaaaattgaaaatgcagaatgtttctcaaaatcagaagataaattcgcaggtaatttcaaaaactaaccttgagaaaaataaggtcctttgattagttttaatcgcttttgaaacttagaagactcaagaagagaggataaaaatctgggagaggttttgagtctttgaaatttcagagaaaaaggaaaagaggaaaatggaaatgagagggaaaaatatgaaatgaggggcttaaatatcattatccctcattaattgggattatgacacgtggca

SEQ ID NO: 342546 - DNA, 1291 bp, Cannabis indica
aaaaataaaaaaaattaaagaaagttcagaattagatattttagtttttgtaaaattgaaaatttatataaaaaaacataacatcatacataataataataataataatgctaatgtatattatatgtatagtattttttttatgctggatagtttttatggaaaatttattaaaataatagtaaaatatcaatttgtagatttatgctataataaaatattaaaaatgagagaattaaggagagaagaaaaaaaatcatattcgagagattatagagtaccatgtcaccgcctcatttatgctataataaaatgttatagccgaaattcagctaccattctaatagaggtcacgtgtcaagttaaagagaattaagcatgtaacggtaataacatttaatggaataactcattaaatgcggaagtaacagagtatatttgcaacttgctgactataaggtctcatgcgagataaaatatatataaattattgcctcgtgtattaacgagaaactatacgttattggatgcataaggcgagacatcaacttcgtcacgactggaaagacgtaagcaatgcataatgactgtgaaaatacttagcgtataatatacaaactaagtataacagtcgagtggactcaagacctaataagcgaggcgcctatctcgctataggaaggcgcactcctgttactttcactaatcaatttcagacatctttcagtgagacttatagtcttgacgagttagaagctgacattcaaattatgatgagtgtgaagtaatctttgttcttaagaactacaattgtcaaaatgaggtgttatgccttcatgcgaaaaagcaatgaggcgtacatcatcagcctcggaaagataggggaaaagctctagctcgctatcaaggtcattggtactgagttcctgtcgagacatctccgaacgttgtgatttaagacgtatttaaatacacgatcattttgacccagtaaaagcgaataaattacaggtgtgtgatattcaaataataaccgcatttatactacgttaatatgtaatcagatcccatgattttaggatagaatggttgtaatagatcacattcaactctgtaattaactgcctactatgtgattataaatagaggcaagttaaactgaaaaagagacgaaaaaatcataagtaaaaaggccctgaaaaaccataagaaatctaataagattcacttgtggactatgtagaattttaactgcaaaaccacgtaaaaaacctttgtgttcatttttttt

SEQ ID NO: 342547 - DNA, 667 bp, Cannabis indica
cctacatcttcgttagctgcctcattaacttcttaagttccaggggagacaatcggtatgctgctttagctggggcctttgcaccccgcaccagctctatttggtgatcaactcccctcccaggaggcagtctctttgggagttcttccggtatcacaactttgaattcatctaacaccttctcaactacatgtggagtggactcttccactttttcatcgtacacggtgggagcaatgacaaatgttggcctcttcttcttcaagcccctcttcaattgcaaggcttatagtagcttgacttctgggggttgtctcactttagcgggaaccattgaaggattctcacccatgatcagtagattccctgctgctggaattggaatggcccccttctatgcttgaaactccattcccaataccacatcaaagtcatccatgcaaactgctacaaggtcaagttgcccctcccatccgtggatcttgacttcacttttctggccactccaatcgtgtccatggccttcgaattgactgctttcatgtggctcgcatctttctccagttttaggcccaccctcttggcttcgatttcagaaatgaagttgtgtattgcgccgttgtcaatcaacacgctctggtctgcttaccattaaagtggcctccac

SEQ ID NO: 342548 - DNA, 566 bp, Cannabis indica
caattcaaaagacggtcttagaaaattccaaggaaagaaaacacaattgtagacgcgttaactcgattggcaagtagtaatgtaagtgataaagcgaacttggttcctatccagttcctcaaagatcctagcattactggcatggaagagatcaaaatgattgatacttccccaaattggataacgccaatagcagcctacctcaacactagggaactcccaaataatcgaaatgaagctcgaaagatgaggagaaaggttgcacggtatatcatagtagagggaattatgtacagacgagggttctccatgcctttgctcaaatgtgtaactcaagaagaagctgcacgaattttatctgaagtgcacgatggattttgtggaaatcatgcccctgggcagagtttatctaagaaaattctaaggcaaggttatttctggccgacaatgattgaagattcaaaggcctgtgttaaaacatgtgacaaataccagagattttcgaagatacctcgagctccgcccaatgagttaactcagatgcaaagtccgtggccttttgccat

SEQ ID NO: 342549 - DNA, 718 bp, Cannabis indica
aacataacttgggtttagaaggttttaccacaaaaattttagaatttggggttagttgcaaaaacttgaccatttaagaaggttatgccgcaaattactctattaaaaatgactatatgccaagtggttgtggctatggccacaatcacttggcaaggaatccattcacctatcataatgacagctcactctctccagcatgcacttcaatggtgtcaccaccactctctcaagcctcactgtattgaatgtgattgtaaggcacttattgactaaatctgtaataattttgctcacaaccttcacttggagggctttaactttgctattcatagcttctttttttctctttctcgaactactattagttatattcttcgaggggcaaacatagtcgctcactatctagctaagtactctttaggcctagatcaagaaactatatggatagagaatgataaattaccatctaaattgtatactgtactcatgataattttaaatgataccattttcttgagaaatgtaaaagggtacccaaggtgtctagtttctagtgctctaattaggtgtaatattgttattagtacaatttactattaggtctcacttattttactttgataaaaattatagaaaatcactataaaaaacagttacctttagtaacaacttattagtcataacataaatttttttgtgaataaatgtgactttt

SEQ ID NO: 342550 - DNA, 714 bp, Cannabis indica
ctaaaacatcataggtgactattttattcattttgttttgtattttgttatttgtttgaattctgtttttatttttgcaattatttgatttcaatatttttttttttgtttttaggcattacaattgttatgaggatggtgcgaagaaattttcccctaagtttagattaggtgttgattatgttgaagagaaaacctagttttatcatttggctacctgtgacatgtttatcaatgactcggtaaattttctgttttcttttaaaacttttgatagttgtattacagttgttttatcattgttttttactttagttactgtaattaagtttttcaaatatttttaaactttctatttagtgtttctttgttgttttgtttcagcatatgaacactatcttctattaccttaggaaaaaaggtaaatattcttctgttgttacactaaattttacaacaactgactgccttttcgatgattccattcaagcgttataccacaagttcaacaaagccaaggcaatgaaaacaaagatatcgcacatacatgctgctcacccaaaagcgcattatatacgaagtttgcgaatttcgtgttctaagccttggtatgaagctgttcatgtcctattcatcataaatcttaggaaggaaagtcattgagtttttcgtcgtcttgagttgaatgaggggattatatttctttataattct

SEQ ID NO: 342551 - DNA, 542 bp, Cannabis indica
gacttagcataagttccctaccgatagggaagcttttttgaccattgattttagatcatgtggtcgttaaatataaggtatatactcttacgataggactgcatgtatacaattaaaattttatacatattataataatatttaattatatatttattttaaaataaaactaatattaataattaaaaaatttattaatttttaatttgaattattattattttttgatttaatttgaattatttttaaatagctatttattttttgaaaaataattttacttacgaattttgctattatttttttatactaatattattttttaattttttaatcacaaaaataaaagtataatttttatttttaaaaatttgttttaacaaaaatgcgttttgtaactacttttgcttttcaaatttcaaaatagaaaacaaaaatatgtaatgtaaagttcacttttatttatattttttgctttatttaaatcgggtctggatccaggactagatcggggctgggttcggtgccagggccaggaccgg

SEQ ID NO: 342552 - DNA, 655 bp, Cannabis indica
catatatagcatggcatagtattcaaaattaattaatcactagaataataaccctgggccatataactgttcactttagggtagtaaccctaatccgggttctcatttaatcacaatcataatatcaaacatgagtgacaccgcgcttaattctacgtgctaactactgtcttacctgatgtcccaagtatgtagagatttcaaattctcaggtgctcctgaacaagtaccggtaatcttagtcacaattttcgagattcacaaataggattaatccctaaatccactttcacatattcatataattggcatttcaatacacataaacatatagagctcaaaacgagctttctaacggtaccaagaacgtccaaaatagagttcggagtcaaaagttatggccaaaataagttttaacacattttgtcctaaaaaccccgagtgggcttcgacgctcaaagaccaggccgcggctcctaggtttaaaacccagagaaactcacttttaggtgcccaaaaatgcaccaaactcaacctaaatataccataactttccagcaagcttcccaatcaaatcgaagtgtttttccaagcatttatacaccaaaatgttgggctttgtgccctaaataaaactctatttcaatataatatt

SEQ ID NO: 342553 - DNA, 556 bp, Cannabis indica
tgccacataagcatatgcgagataagaataataactataaacagatgtaactgacgagacaatatgtccatctcgggatagatagaggatataatagaagtgtttaagacgagatatcaaggatcttgtgttagattttgtgtcctaaataaaacactatttcaatgtaatcttgaaaattcatttatcaataaagaaataaatttgttgcactacttgtttaatgtgttatttgattcatgttatcacttgtttgatttataaattcatccaaatccttatcacattgatattcttgtttattgtgatgtcaacacagtgattaaatgtattcccatgatttattagtacacatggtttaactgataggataatgtacaatgtagtttacttgcaccttagataagtgatatgtcctttccatggcattgattaaagtaagcttgggttggatgtatggagtatgcatcataagggaccgatattgtaatatcccgataagcctaatggtaaataattagagtttatatttatattatgggttaatcaagtaata

SEQ ID NO: 342554 - DNA, 442 bp, Cannabis indica
ctaagcgggctttacattatgcacggctgataacgatggtggcaaagctaaccgataagcaacttgtccaaccttctcaagtatctcaaaaggtcctataaatctagtactcagcttgcctttctttccaaaacgcccgattcctttcattggtgacacacgcaagaaaacatgatctccaggttagaatgtaacatcccggttcttggggtctgcttaggtttttagcctgctctacgaagctagcattcgagctttaatcttgtctattgcctcatttgtcttctggaccaactcagggcctagatattttcgttcacctgtttcgtcccaatggattggggaacgacatttcctaccatattgttagaaatctgttttaccaggatcttagatctactcacaagtatgttgtttaacaccgtaaatatgaactttctaa

SEQ ID NO: 342555 - DNA, 745 bp, Cannabis indica
actatccgggactcgagttgaaatagatgctttgcgcagcagctagagccacaacaccagcagagtttgactccagaatggaagagttaaagaatcaaaatgagagtgcttacaacttgttggctgctaaaccaccaacagaatggacaaaagcacattttaaagagggagttaaatgtgacatgttactgaacaacatatgtgaaagttttaaccacgctatcatggatgcaagtgacaagccaataattactcttctagagagtataaggttttggttaatgtgtcgattttgcaagagaagagaatctgtgttgaggtggacagaaactgtccaccacaacattgtgaagattgtcagacaacggctgaacgtttcacgacactgctcagttacacgtgccaatgcaacaatgtttgaagttaggatgaacattggaggtgcatttacggttgatttggataaacgaacttgcacttgcagagtattccagctctcaagaataccttgtggacatgctttcgctgctatttggttttgcaaccatcatcaatggggttatattcatgattactaccagaagccagcatttcaagctgcttatgaaggcacaatctttcctatgtctagccccgaccaatggcccaacaaaggtcataatccgatcttgcctcctggagaccacaaccttccaggcagacctagaaagaagagaaagagagcgggtgatgagccaccaccacc

SEQ ID NO: 342556 - DNA, 600 bp, Cannabis indica
tctaaaatttaaagtcaaagacttaaatttataccaaatttgtcttaagtaattattattttttggaccaccactactaatctaactctaagtttaagtgcctttagtaagcatttacaagtaggagattctaagatcgatgatttatatcatttcgggatagaatattaggaatatagtcatttgcatcatttaattttatagaagaaaatagaatgacatcataagcagatgattataatccatctatccaatgattactatctaagcaaattctaaatgaaaaagctagaagaaaaaactaaaggataatttcgattaaaataagaatccaacgatgtcccgttcaggcaagagtcaaagttattcttatattatgaatttattcattgtttcatattgtaaacactagtctaagttgtcatctttggatgtacaactagatgttgcatttataaatacttatatgtcgagatctaacactattatgtttgtctaacggatgacaatcctttgggatttgtctcattaaaaataacaaactaagttagatcaataatgaagactaaaaatttataactacaacaattaataacagaa

SEQ ID NO: 342557 - DNA, 1750 bp, Cannabis indica
actcatcaaaacactaccaaaacttatccaaatcactccaaacttcacaatgcacatatataccataaatattaccatccttacgtgacagaaattaaaattgagctcttaaatgaaaattaccattagcgttcagactaagctttaaaaagttccaaacttgatttctaactcaaaatcacctcaaatttaacaagtaaatatcgaagctagtcctgtagctaccaaagaacaattctataaagtcagaatctcaataactaatctaaatcacaaagccaatattaaaaactaatcgtttttagctttgaacgaaattaaaccataccttaagcttttcctcttcaaagattttctttgcttgagggcaatctttcttgaaatgccctaccatgccgcagtgaaagcatgtcttctggttgcactctccgggatgatgtttcttacaacgtgagcacttagggtaagagtaaccctagcgtccacctctgccttggttcccatggaaccgcttgctctgccccgagccactagatgccggagtcacttttctcttttgatcagtggtggaatcaccaccattcctaccctagacagaagtaggaagagtgggggtcccaccaacactcggagtcacacagggctcctggagaaactttaccgcaccctcagctcgcaaagctttctcaaccatctccgcatatgatgttgcatcattagtagtaatgaccagatcatgtctaattttcacattaaaaccagccagatatttttctttcttactgaagtctgtaggcacgatacctgaggcgagctgggccagacggttaaattttgtggtatattcactaacttacatcccctcagttcgcaccaactcagtgaattatttctgcttagcactgcagactgcttcgttgtaatacttggcattgcataactctcaaaactcttcccaggtcattacagtgacattccaggtgaggggcaccaactcccaccacacgagaacgtcttcctggaactgaaatgtggtgcaggtcacccgatcatttccaaccacccccagtaaattcaaaatttgctctatcacagtgagccactgctcagccttcatcacatatgaacctctcaaaaacactggaggtgcttgcttacggaacctctcgcataacagctccatacggttaccaacaacaggttgttttgttggcaccactggagctacaacgacctgagcttgttgtggaagcactacagtaggaccctgctgccttaatcttagaatttcttcttcttgtttgtggattcgatcttgcatctctgcaaacctctgctcccaatccggaggaccttatggtggatttacaggatgaccaccttgaattctgccacggcctcggccgcgaccacggggattccggggaatttgatttccctgaccgcctccggtctcaaccatattaccctaacttcttttatttcgttgggcgtccatttaataggacttagcctgcaaacccataagccagggaggttagacagcgatcataaaacttaatatcgctcttatggattttaaggcaatgcattaaaataaacaactataatctaatatgcttcctaacatgctttattaatcacatacaatactaaacaagtatgagcttactgaactgtgagctgagctttctctgatgaagattgtacatgtcttgccgagcttcagtagacgaacccggcggctatg

SEQ ID NO: 342558 - DNA, 551 bp, Cannabis indica
atataaacaaaaaaaaaatagaactggttctataacataataattaaaaataataattcaaatcggttataattgaaatataaccggctctctaacataataaataaaaataaataactcaaatcagttatcattaaaataaaactggttctataacaacgttataatgaacaaaaacaaataacacgaaataactcaaaccagttatataacataatgaatataaataagtaacacgcaataactcaaactgatcacaattaaaaaaataaatagaaaatgagttcctaaaacactgcgatataaattaaaaggaaaattagtttcataacaaaatacctcataacacataatacctcataaaaccgattataatttttttaaaaaaatggaaataaattttaaaaaatactgaggcataaatatgaaaagaaccgattccataacaaaataattacacacaaataataaaacacaacaactcaaatctaatataaagaaattagttatatttatcaactagttaaaaatttgagacaaaaaaattagtt

SEQ ID NO: 342559 - DNA, 1311 bp, Cannabis indica
atttttgagatgtggtcctaaatgattcacttgggcttgtcatggctttgttttgtagtttgaaaaggagcctatgcatatttgatagcttataggacttttttctttctttttcttttttaaaaaaacgttatatgacattttaatttgaggtgtttgtagaatttattaaaataacgattactcataatcattaaagccaagatctagtatttatttagagcatcaaatacaataaaacacatacctcccatatcatcaatcgagccattatccttcaatgtctttaatgagactcaccaccaatccttgagcaaaaactagagagaacacttgtggagctaacccctttgcctttaccatacaaactctaattacctcttaccacacataacatacatacatatatatatacacatgttattacccttataaccctaaggggttattaactaatagggcttttgaggtcttttacggtatactataatttaatgggccaactatagtattaagggtgctctcatgtgcctctaacatataattaagttgctaaccatcccattatggttatgagtaacattaggcacatagttaatgattgtgtattatggaattaaacctatgattgtattagtccattataataattctaacattctcccacttggacaatacaatcacgccaccataataatgtctatcgcacataaggtaaccaattaagacgtacataatatcatatcgacaggatacatgtattatgtatgaattgaccttgaagacatttatctattaacaatcattaacaatcaaactaaacatgcatgaggtacgacaaaattgagattatgcgcattcatctcgttttgtacctgtcacttccttgaacaacaacatatatgtataagcatacatatgtaacaactataaagaagtgacttcagtatcataatgcatgttctaaaacacaagccataagcaatccgtacaaaatactagcatgttcaatacataaataacaaactcccactgagcttaacaagctaggcttccaacaatcccattcgagcaacatgctccaaaaatacacatatgggtaagcctttcgttagtgggtctgctaacatgctagtgctaggcgtgtattcaatggaaataagagactctgtaactttctctttaacaaaatagtactttatgtcaatatgctttgagcgagaagtacttctagtgttcttagagaaagctactgctgcagaattatcacaatataatttcagcgacctcgtgataaaggctacaacatct

SEQ ID NO: 342560 - DNA, 711 bp, Cannabis indica
agtaacaattaataaattaaaaaaaaacattaatcttaactaataatattaaaacaattattcaaaagcaaattctctcttatcacagaaaataatcaatataatgtgacaaaaataaaaacaaaaaattatttgtgttattataaaataagccggcattaaaataaatcatatattatgaatttcaaaagataaaaaaaaaaagtattatgaaataagtgaagggtgaaactaacactaatataatatatatatatatagagagagagagaaagagaaattacttgagcttcttaacccaagcttcagttcccttggttgcacaaatgagatcaagctataatcaccaaccaaaattatctcataagtaaatgtcatataagtacatctaaacttgtaccagctccaatcgagtgactttctctcattgagttcattactatttcatatcatccaaatcatcatgcatcaattttgtcaagaaagcaaaaaattccaaatgggatctaacccaatttctatagatgagtaagaaaatgacttacttgcccactgtatatagtcacattgacccctttagcaaggagttgatcaacctgtatgaaagaaacaaaaacaaaagcaaaaaaatcaatctttcttttctccaccaatgaatatataaatatatattattattataaaaatgatttcattgcttaattacctcat

SEQ ID NO: 342561 - DNA, 544 bp, Cannabis indica
cttattctgactatccatgatttgtttaaactaacaatggaattttatcaccggtatcttccaagtcataacagggttagttctttgaaaccctcccactacaattaaggtaccgtgactttctgtctaagaacactaatggtattatcctcatcggttgtgacaatacaacagaggcagtgtgaacatcttatatcgaataagatgatagaacactttttggaaatcaaaaaaaaaatatatcctctactttgctacattattttcagatttattcattttctaagaaaagtagtatttgttgaaacaaacattttcttatcttaaatgaccatgggatggtccaccccctaatcacttagaatagctatcaaacatgtaaatcttaagttaacagttctagcttttcttaagctcaccatcaggacatccataaatctagtaatgatttacactaagtatacaaccaatccatcattctgaaattttcctatcactagggtattccctagaagaacttaggcagcaactagtaactaatcat

SEQ ID NO: 342562 - DNA, 938 bp, Cannabis indica
ttttttttttttttcttttggagctgttttctttcaaaaataaataaataaataacgtaactgagtctggcgcgattgtattgcagttcattgaaatagtttgtttttcattttttttaaaccaaaaaataaagaaattattacatgtaaaatataaaattatccagacgatttaggttacatcagacattagacgaatgtttcaatttcagaaagcatgaatggtgggtcgctgttgaaactataatgcagcagttatatctcttgcgagctaactaacgtgtaatttaattgcaactaaaaaatataaaatgtgaatttgtatatgtaacaaactatttgtcaatattgtttttgtcactgattgataattacttgtaccttaatagtaatatgtagagaaataatagttagcaaaatatttatgcaattataatgtaactgttatgaaacactaaaaatcagaacagtatttctacgtacgtaattttatctatatgtctcttcgtgatttaatatgaacaagttcactattaaaaatttagaaaactacaaaaatacactatgttcaaaattttactataatattgatgtaaattttcttttgaattatacttgagttggactgtttgggaacttcagattaactttttgagatctgcatttcatggatctgaaaattgaagtcatggcattagttttgtgcgaattaaactggatttctggttgaattttagattcgtagtagtttttctgcattttttttatgaattcgaaacaagccatgttttaattgattatggtcgtcttctcaggtgaagtcgctggaattaatggtgattctctttcttgttagatttcgtttcggttgtgttgggttgctacgtggttgcccgaatgttgcatcaaacgaaggtttcaatcccaggaagcatgga

SEQ ID NO: 342563 - DNA, 814 bp, Cannabis indica
gaaacttgagtttggcttttcctctagctctaatcgataccatttcgtcattaccaactttaagtttcaactctctggattttaaataattctagttctcaagcaattgcaatgaacaacagacatggttagtagatccaggatcaagaatctagatggatttgtcattctctaaaacacatgattcaaaaactaaagcattggaatcactgcttaactatttttggattgttcttattgctggttgaatctgttgtgaaagataatccgaggaagtggaaacattttttctattcttctcaactgagcctgaagtagtaggattgtcggaggaattattctcaatatcttcaacttttcttttgcccttatctacattactggagaaggatctccatgcaagtgacaatgtccgttcataagcacacaattcagcattcagcatgtctatgtcggacgagttccaattgttaatcacaaattggttaaaacaattcccagtatatagttgcttttggaatttcatgttcatcatgagaaagtgtgaggtgatagtctgaccaggagtcatctttacactttgaagttcatccctaaacacatactctagatgaggattggggtgtgggttgtacatttttgacactacaaatatcaataaatagaaataacaagtaaagcatatatgtttgtaaaaataccaaaaacaaaacatatttattattttccaaggtttccaactgatgtcgcccaattagttacactgccgtcgcggtagtaaacgggttatatgtcgtatccacagggaggaaaa

SEQ ID NO: 342564 - DNA, 666 bp, Cannabis indica
tatgaaatttatatttataaaaatatttacaagtgccgtgatcccgttatttaaacttttaacaaaatattccaaatataaaagaggtcgcacagtgactacaaaaaggaaaccccagatgtcctgagaccgaacactccaagtcccgctgccatgacatgtacaacctcattctagctcaagctcactcctgttcagccttcacctttgctttacctacacatgaaagtagaactgtgagtcgacagattcagtaaagaaagcatataacatatcacataatatcgacttgtatctaggcgcccatacacctatttacaaggcttaacaaatgagtaagaacgttccatactggggtacaaccactgcaccacatacacttcgtaccaacattgtacgagtgttggtagggtttatttcgtaccctgagtaccactaagtgacataccacagacaccctgtactctcccgtacttgtgctggtaacaccataatgtactcttttaatagcatacactatacaaatgcactctgtaccatttccgcacaagtgttggtagtgtattaatcataataagcatgcacatatatttcacacatacatacactcgcatatatatatatatcacatattatatgttattcttacctcatttctgaattcaa

SEQ ID NO: 342565 - DNA, 899 bp, Cannabis indica
gttattttattgacaaattttttttgttataagataaattttttgtgactaaatgtgatttttggtcataataaaaaattacttgtgactaaaacatagtattaattagatacaaattattaccaatttagttttagtcacaacaaattgtgatttttctgactaatacttttaatcacaaacttttagtcacaacataggaataatgatttataattagttacaaattttttacttttagtaacaagttttattgtgagtaaaaataaaatattttataatgtaaaaatatcaaatattattataaagtagcatcttatgagtaattattatcatgagatgatatctttcgaacattagtaattaattgttcgtaattattaaatttataggtgagctctatcaataattaattaaactaatagtaatataataactcgggtagtatattaaacactaataatatcttttaacctttaatattataatctattggtctctaaatttaaaaaatatgcaataacattagtttttatttttaaggaagttgtttattaatgattagttagtccttaatcaattcatcttaactaagacttattttaaggttgataattgtcccttttcattttgttagtttcttttataattagtattaatattaatgatggttacaagagtgtctttatctggtagttattataaatttatgggtaaatactattttggattttatattttacaaaagttactagttcgaccctttgttttgtcaaatgacaaaattgaccctgtattttttaaaatgataaaaaaaaaagaccatgagcttaatttttaacaactttttttttactataactaacttaagataatttttaacacgaggttgcttgaat

SEQ ID NO: 342566 - DNA, 587 bp, Cannabis indica
ttcaaaatggaagtcattccaccaaaataatagagagggcattctattggaataaaatgcaaccaaacaagagaataaaattaaaattgttttctttctattccatttcattacctccaaccaaacatcaactaagagttttacaatcaatttagctgttcgccatcacacctacaattcgcccataattcgctaattgatcccatttcccaatttgcataacagcacacttaaaaaaatggtgttaattttcttgacttaagctaaaaacagattctaaacacacaatccagagaattctcatccgtaaaacaatgagaagaccaggaatcagatcaaaacaatgtagaaagcaaaatccccgaaacccagataataaatggagatgaaaaataaaccccgaaacaaagataataaatggagatagaaaaaaaaaaattcaaaccttgtacagcgaattgggtgaagatgaaaacgacgaagaagaacgatcgactgcaactacacgcgtagggactgtccacatgtgccgactccgtttcctctcttcaccttccctcccatgcatagccttgcattttccccaa

SEQ ID NO: 342567 - DNA, 1133 bp, Cannabis indica
ttggatctttttaactcaaaaactatgatttctatcgaaaattgatgagttttattgttgtgcttgttggggttgatttttattgtttgtagaagttttgatatccatatttgagtagatttaaataggttgtgatgcatgtaagtgagttttagccaagcttgagttttaaactcaaagcttggagctcacatggtgattttcgttttagtgcatgaagctttgttttaatgctttgaaaaatgttctttagggtatttagaacaggtctggaaggtttgatatggtttgagtttgaattgattgagatatgaatttttgattgttttttgcactgaaccgaaccagaattccggttcagtatggcttgtaggaactggaattctggttggtgttctgggttcctcctagaaccggaattccggttgtagagctggtctgccggttggggaaaaattgggaaccctagttcttcccaattttgtgttgtttagggtattgccatgctttttatcgatagggaaacttttagtttctagtttaagtccccgggaagtgatttagcgtgtcacttatctagtgttgtgattgttatggtttaggagcctgtaaatcgtcgtccagttcattccactcaggttgaccggcacacctgaattcggaatcaaggtaagattagtatagcagtatgcatatgtatttacatgtttagcgtgcatgttgggaagcctgttagattacattagatatgtatgttggcttcgtaccatccgacagtatcacatcggtaaagctagagtatgactagcagctggagtatgaccagtgtaccgagtataggctgatattatggtcgatggtactgtactgtttgactatatcacatcggtaaggctagagtatgactagcagctggagtatgaccagtgtaccgagtataggctaataatgtaacacaagtatatgctaatactgtaacacatcggtaaggctagagtatgactagcagctggagtatgaccagtgtaccaagtataggctgttactctgtcaaaagtaccgtcgtacaaacgttcgagactcaataccgtgtgggacacggggtttagggttgtggtcaggggtatgggcgt

SEQ ID NO: 342568 - DNA, 909 bp, Cannabis indica
taaaattaatttaaatatttttataaacatcctaaccataatattttgaaatttaaaattggttatttagtcaaatattttattgtttataaattataagttagaaaaataatattttatatcattttacttataagatatttataaatagtattttaaatatttaaatagactagatatttttttataaatttgaaaaatacttaattttagatattttgacatataatttggataattattatttatttattattttattcttaaaataacaattgcctaaccatatctattttaaaattagtttattttgttattttaattttattaaattataagattagaaaaggatattgaaaatatttatttggttatttttaaatcatttatcttaccagatatttaatttaattaaataaaataattcaaataaacctaaatattttaaaagtagtttcaaatttaaattttgaaaagatattttaggtttttttaacaatcctaaattttcaaaatttagttggttggttaaataataatttaattatataataaataaattggtgattgccatcactgataatatttcccccaatgttagttgttccatgctcatggcaccaaccctctatttaatctggcaagcttgtatggacaccaggggatttatagtagtacaccccatgtcgcgatagtaatggggctacgtctactttcgtttttattaattggatctgacacaccagagttatgatctcaagagtgtgtggacaataatacaacaatggatttctaggtgaaatctgtatcgagacttatgaacacaaagctcatgggagatcaaatattcacaaatctgatgaagatggtggttgtaaggtccttcccaatttggtccaagtactcctg

SEQ ID NO: 342569 - DNA, 637 bp, Cannabis indica
ttgtataactaattggacacctggtttgtatataaaggggtgatccaccatgaaatgggactacgaaactcttgctacagtggactaagcagaccgtgatctgactgaaccactataatcctccgtcttattattgtttccagttttctgttaagcatttcatattcccagttcgagtactcgccgttctaggttgaatactcgcaattgttcttcaagcaattttcttcttgtcattaaaaatattacataaatttggtgttgtgaattttgctcgacaacatttggcgccgtctgaaacacgaattaaagtttcattcagttcaagtaagaaaatcatcatggctggaaaccaaacaaatggaggtgctaacaacgagttcatcaacatcggaatgatgaacgtgccattatctggagttaggacgccacctgtggatgtcgttaatggcggagtagggagaggtaatattagaccactcaatctattccctgaaacaactggccctcaagtcggagaaacgtccatgccaccagcaacaatccactttccaccagtcaccccggccgtagtatccgagggaatcgtccaactcaccaccgaccaatacaccgcaattcaggatcaactacgcgc

SEQ ID NO: 342570 - DNA, 527 bp, Cannabis indica
taatcatcaataatctcaccatcctttataaaggacgtcattctattttcagtctttctttttttaagaaagcaaaaaaatattgtgaattgtcatccccaaactgaagccaagttatttgacttagctgttgaataaagcttgagtagtttcgctgggctatcacaaactcagcatgcttttcctattcagcttgctgtaactgagtatttgaagggtcattggccagcttgtcttgagctaaattgaactcctccttatgtaataccctaagattaagagaatggattagaaaaccctaactagttaactgtgtatgattgtggaattatattattatataatttattatatgtgaattaatattagataaatggcatgttaagaccccgttggtgagccaggattgtaatttcaactcgagaagggtaaaattgtaattttaatattatgacgttcttgttgactatattattatatagtatacttgttgtgtcctttttgcaggtgttttctgacaagtcggc

SEQ ID NO: 342571 - DNA, 1119 bp, Cannabis indica
gatccaagagtgatggagtcatgagtctaaagccaaagaactacattgagaagatccaaacaaagttcaaaatgcaagattctaagagcacttcagtacctcttagaggataatttgaattaactaaggaagaaagcccaatgacagcaaaagagatggaagaaattccatatgcaatggctttggggtatctcatgtgtgtcatggttagcacaagacctgacattgctcatgctttaagtatattatataggttcatgtcaaatcctaggataatcattggatggcactcaaataattgttgagatatttgagagggacattagatattaaattaacttacaagagagttttagagaaagtaacattgaaaggggatgtggatgttgattatgcatcaagcaaggatattaggaggtctactacctcttatctgtttcaaactaatggagattgtatttgttggaaatcatagctccaatctgtagaagcgctttcaactatagaggcggaatttatggctacatcagaggcattcaaagaagcaatatggctacaaggttttatgaaggagttgaagcttctagttggaaagttaataagggtatattctaacagtgattatcatgagaagataaaacacattgatattcaattgttttggatatgggatatgggagaagatagaagaagaagtaatcgagctggagaaagtgaagtcagaagagaaccctactaattttggcaataaggtgttacttgttagttagttcaagcattacttggacttactcaaccttagttgctaagtagctacacatgaaagcactacacccccattggataaatgcttagcttgtcgcggcttgaagaaataaggtggaatttatggtattattccttatgcccccaatcaacattcaattagttagttagtctttaactaactttactgtcaaaaaggacaacttgcatattaggtcctttagcctatataaagagaactactcatctcatttcataaggagatagaaagaagatgaagaggaataacaagagagatacaattatcaatgcagtagagagagaaattagagtgagaaatggagagagagagag

SEQ ID NO: 342572 - DNA, 808 bp, Cannabis indica
tttattcttttttccttggattggatggatccaatctaatccaatacatactgggcataaaataattggatggatccgatccgatccgatcctaaaaatactaggtctaaattattgaataaactcaaattaaattaatagatatatatatatatatatagaatatatccaacagataaaactgatccaatccaatattctgaatcgattggatgcctaaaattaattggatcggatcagatggtaaaatctaacatccaatatataatttgatcgaatctggataggcctgaaaacattgaatgtgatccaataaacattcctaactaaaagacttgcaggtatatatatagtgtcaattttttttatatatgtgtgttactaaaattaattttaggtgacgaagaataatgaggggtaaattttgctaattctggttgaacatactctattttcattttaaaaaaaaaaaagttaataaaagttattccatgttgtgtaaatttttttctatatatacggtagagttgcttgctatatattatgccccatctctacctagataattaagaaaaaaaattactaattcaggttgaacaaaagaaaatagatattgcaacttaaaaagggttgtacagatacaatcttttttgttcttttatatgagatggtatatatatatatatattatagttatataaggaaaattactttatatattatttttaatgtttttttaaaatttacggtttgggtttctccggtagtttttattaggggtgttcatccgatccaatccgctactttt

SEQ ID NO: 342573 - DNA, 546 bp, Cannabis indica
aaaaaaaaaaaaaaaggttaagagtttactagttaagagttacatcattgctggcgtcatgatagtttgtataatatatatatatttgtaagtagatttagaattggatgattatatatactatattgatggtgaaatgcagtttctcaccaccacctatgggtatatgtattgatctatggttaattttaaggtctttgtttgtaagattgtaaaatgaaaaaaattaccaattcgagcaagtttattacggcagcgatgatgatggtgtggtcggcctagtcgcactatgctaaatttgtgaggttttgtggtttagattttcccgagaaaattagtaggagaagagaatttaattgagatttgtcccatttagatattaatttagaataaaggattcaatctttttttttaaatatattgaaaatgatttttttaaaaagaaaaatcaaaatggatctagtcagatccgatccataaaaaaattaagctggcaaagaggatcttgtaatgaccgctctagtaatgtggattagaaaaggcaat

SEQ ID NO: 342574 - DNA, 585 bp, Cannabis indica
aacatccgaagcacagattcattttttttggcaagctatcgactcttagcttctaactcgagacaagtttgtgcaacttcagatcacccttgacagcaccagctgcccagtgtgtgatggagcagttgagagaaattcccatctattttttgactgctatttttcacagcaggtggtggagtaggtgagcatttggctgggaattaggagatgactgactggtttccagtgttggcaggagtggctgctgcaaaccagtagtgataagaaacaacagattcatatttcgataatggctgccatgaattacagcattcggagcaatagaaacaactacctcttcaacaattactcaagtatagcaacaaaggttacacaggaaattaagaaaatagtgtactatagattacaaatagctaaaaaagaagcctaaaagctcatgagaagagatacatagagagaatatttatgtaaaaagcgggtttgctacctagcttttggttagtttggattgtatttgtttgtgattcatgaagattgttctttcttgatcaaaaaaagaaaaaaatagaaccggttctataa

SEQ ID NO: 342575 - DNA, 888 bp, Cannabis indica
aatcacgtaatacgcctatgctagttagggtgttacatgtgttacctgatgcagatttatctggaaagaggaaagatttggcagagtttgaaatcaagcttaaagaatttgaaccaagtgagaagaatgatagcacagacacatctctagatgagactgaggaacaaccagatctgtctgactaccagcttgctagagatagatccaaaagagaaatccatataccagcaaggtttgtagaagctgatctgattgtctatgctttgtcaatagatcattcatgtgacataccagttttattgagtatagagggggctttaaatgaaaattacaagaaggagtggtctcaggttgtggatgatgaattaagctcgcttagaaagaacaatacatgggtattggttccaagacctgagaacaagtaggtggtctcatggaaatagattctaaagattaaagaaggtataacagaggatgagccagtacgacttaaggcaatattagttgtcaaaggtttcactcagaggggaagggatagattacaccgaagtgttttcacctgtagtgaagtacaagaccattagacttatgttgtcaatagaaacccaacaaggtttagaagtagagtagtttgatgtcaaaagtgcgtttctaaatggttatctagaagaagagatatatctggggtaaccacctagattttaggtggaacaagatggaaaagagaaggctatacttctatggtaagtttaatcacaaagatagcagtatgtatagcaactaggaaaattatacaaacaacctaggtactttcatcctaaattgatttgcatccataacaatcagagcatattaaaatctcccctttcagaattttgattccaattc

SEQ ID NO: 342576 - DNA, 1144 bp, Cannabis indica
cttctttttggcttcttccttttgagacctttccctcttttttggatcttcctcatcgtgaccttccccttgaagttcacttgacaatgccaagaacactattatttccatcaccttctttattgagtccaccatactcaagcgacaccagacctcaaaatatcatttaatacacacttttttctacaaattattggtttattgttcccaagaactttacaacctttaatttagatcagatttatgaatatcaagtctcccatgagccttatattcataaatctcgattaagatttcacctagaaatcaattgttgtacttttatccacacactcttgagaacataactctagtgtgtcgaatccaatcaataaatcacaagtagacgtagccctattaccatcgcgacatggggggtgaactactataaatccttggtgtccatttaattttttgcagttttattagtcaagttaattttttgtggtcctcttttattttatgatcttcttagatcagttgatgaaaaaccgcgtcaacagtttgttgctttcattgaaagtgccacggtgaagatttgattattttccctttggaaaattcattaatttacctttttcacaacaatggtgatgagtaccaggaggaaaatttttgaagaagaggttgaagtcccaagggggaagttaatcaaccccttggtaaaggaacctttgtccctacacaaccacatggagagggaacctctaggcaccgagagaagcgtcctatgccacctatgcctatggatggttattcgttggagcatttaacaccgtaacgatctcttatgataagtattttgtaagttcttgtatctattagactctcccctacggtgactacttagagataaatttacgaagtatgaaacaatggtagaagctcataaaataagaataaccttgactctcgcctaccgaaacaacgttggattcttgttttgatcgaataaaaggttactagaatggtgtccattttagatgagctgacaactctattcaatgaatgatagtttgactctcgcctaccgggacactgtatcagtttgttggaaactttggaaattatttaagatatgatagttttgtattttcacatgtct

SEQ ID NO: 342577 - DNA, 522 bp, Cannabis indica
tcgataaataacatggaaataccgtaaggatctcaaaactgggaacaactagggttccaaaaactaccccaactggcagatcggttcccaaccggaagtccggtttcgggacactaaccggtcgaccgggttctataggtccccagaaccagaattctggttcggtgccgggaacctggaaaatgccccccatgacctcaaaatcaagccaaactccaccaaactttccagtatacctgtacaatgcatttacaatatagtccaactagaaattcccagaaaaagtctgtaaatcaaaggatgccattaaagccctaaccttgagcttcaaaactcaagctttcttaataccctcaccacagctcaaaactaataaccagagcataaatcaacttaaaatcaacctaaaatcataaccctaagcattactaaccccagtagcccctctttcacaaaattaatacatgaaacccatttcaaagcttaaaaaaacaaagattaaaggactagggattacctcaa

SEQ ID NO: 342578 - DNA, 718 bp, Cannabis indica
ccaggagaacctctctgagcttacatgaacagatttatgacggaggcagtgaaggttgcacagttgaccgaagtagggaaattaaccccgatactagggggcatcgaagtcctcgaagaactttggaaggatatcaaaagagacggacccgtagattctatgactgacttccttgatcgtgcagatgccttcatcaagcttgaagaggccattccgcgagcaaaagtcgagcttaaacctggccagcaaaaagctccttctgctggaacatccttccacttaccttagtacccaagcaattcaagctcaagcaataaacggtccaacaataatggcagacaagggaatgggaaaaagggaaagttcactggcaaaacggaacagacccctagggaaaatcctaccaagtttatgttggaaatatattttacccggatctagatttactacgaagtatgtttcattaacatcctgatgctgattctccttcttgttgtttggattctcctatagtcttacacactatgattgagataccacttgatgtgtgtgggcactactctatcactcaaggaatttagaaatttgaagagaagaaaggagagaggaaagtggtggctaggcttttctctgaaagaaacaatgtggaagtcatagtttcctgaagccaacactttctatttaaagatgccatctaggtttaggttagaattgtatg

SEQ ID NO: 342579 - DNA, 625 bp, Cannabis indica
cttactttaaccaatgcccttgaaaggacatagcacttatccaaggtgcaagtaaactacatcgaagattatcatatcagttaaaccctgtgtactgataaatctaggaatacattttgttatccaaatttttgcactctggcgtggcatcacatgatggcgacacgtggaatcgacactgggtaccttctcgcaagacacaagctgaacagggcacctcacacattggctcggacgaagtcctttagaccgagcagtgagcaatccgcgcagcattctaacacttagcaaattcagctttcgcatagtgagtcatcaaagaaatccctataactttgggatcagattagagaggtatggcaagctgttcaaatcccacgattagtgtattctatatttactatgcaatctatttgctcatatcaattgtaactagaagggaaatacgtcctctcaaagcttatagccctataaatagtgattcatactcactgggcaaagggtagagagatttggtctaagaattcatattcagagatattactgtaagagctgtaagaaaaggtgttggaaatattttacgaggatctagatttactaccatgtatgtttcattaacatccta

SEQ ID NO: 342580 - DNA, 601 bp, Cannabis indica
cattctaatataattgtattttggtttggtgttgcattgttttttcagtttcgctagctctagagaaaattattaataatgggaaggtgttttttcaatgtgatgtggtgctgttctgaagacatagcttgattgtctaaatttctgggggcagttttgtcccatgtggtttgggataagaattctgcagcacatggtttggcaaagcatgcccttcggttagacgatgagctatcctggttcgaggaggtgtctccgccgattgtggattgctgctttgtttaatcatgtgtgattttgatcaccacttcaaatatatatagtaattacaatgattttttttagattatttattatgtgtgaagattctttaatttctattattttcttctattttatgtttagaaatctcttaaattaaaaattatagaaaaacaactaaaagttaaataatttaattagaaatatcgaaaacctaatttaaatttgattagatgcagttttatttatttattattatttattaatgactatatataataaaaagtgagtagtaactcatttattttattttaatgttacattaaatgtgactatataa

SEQ ID NO: 342581 - DNA, 1030 bp, Cannabis indica
tccaaatacaaaaacagaaagaaaaaaatcatccaacctccattgctgtacaaaaaaaactcaaaaacaacattcagtcaaaaaagcaaatcgcgttcagaggtgaagaatcgaatagaaggagatctggaaatcattgaaactcacccatgattgaatcagagaaagaattgaaggtaataaaatatgaaaaaacaaacatcatctaagcttccagaaaaaaaccagaaagcaaccacaaaacaacattttaaaaacacccagacataaacagcctaaaagatgaacaaccgggaaaaaacatattaacaacaatctgcaaaacatgaaattactaaaaaaattgttcactgtgaaataaaattaaacaacactaaaactactaaaaataaacattaaaacaactgtttagaaaaggccaatagaacactaaaagaacaatcaaacaacgaattaaaaataagaaaaaaaatgttatgaaaacacaaaaccttcgtacaaaaaatgagaacaaaaacaacaataaaccctaaaaaaacacatttaaaacttaaaaacaactaataagaaaacccaaactgacaaaaaaataatagtgtagtttggttaaatgatggtaaaaactatttaatagcagtaacaaaaccaaaaaaaaaaaaaactaaaaaaacaaaaatgagaacaaaaacaaaatgaaaaataacggttgattaaaaatttcaacttaaaaaaataaaaaaattcaaggtaaacaacccttgggtttaactttaggcttcacttccaaatcaggaacttcatcctcgaagtcaaaatcgaagagaacctaaaacattatggagaaaaaaattgaaacacaaaacagcaaacgaaaaacaaaacaacaagaaaaaactaaaaaaaaatacgaaaaacaacccaacttacatccttgacaaatctcgaagatttggttctctttgccttacgagattcaatcttagctgaaaaaatctttttttagaaccagatggctctgcagcatcaccca

SEQ ID NO: 342582 - DNA, 651 bp, Cannabis indica
agctataagttgcagttcctgaaaaaataccagcatctacattaatcttcaaggtgttttcagcttgtttggcccaagtttcagcaccatcgacatcagtaaggaatgcagccataggattaaatgttgattcttgaacccgagtccaatctgcgagtaaagcttgagctaagtgagcaacactcgcaatagtaaggtacttatcaaaccatactagctcatttcgatgtttccaaatttcccaacatgtcattgcgatcaacctccttttctccccatctgcttgttgtagaaccgtagcaaaccagttggcaaaagaaccaattgtcgtcaaattaacaccagcagccaactgttgccaacacgcttttggcaaaagagcaatccaccaagcagtggtagatggtttcatcagttactttgcacacaagacagatggtatcaataagcgcatgtctaaaacgaagtctaaatttcgtaagcagacagttagtaccagcacgccataacaagtctttcactttcgaaggaacacttagcttccaaagagtattccaaaagacagacttatcatcctatgcacccaactctttgctcaattgcaagaacttataaaccgattttactgagaaatggcccgagctctcccaa

SEQ ID NO: 342583 - DNA, 576 bp, Cannabis indica
agggcatggtagaatggcattttcttcaaccaccttctcaataaagacacgtttgaaatcatcaaacttctttttaactccatgtattataatattgccttctttgtctgccttttcaagtttcacataacctgatgcaactaagaccggatctttttctttgggatcaatcacgtacatatcacacctcaatctcttcatttgcaaacaaaacaagagacagacaaaatttattttaaaaagaacttaaataatatgatataaaaattaaacatgcataatgaaaattattttaaaaagcaagtaaataatacattatcagaagtaacaggagatggtgctggtggagcgacaagtggaggtgttggaacagaggccttgggagctggtggagcaaaggccttgggagctggtggagcagaggccctgacagttggtggagtaggggccctgacagttggtggagcagaggccctggcagtaggtgttgctcctagaactgaggtaacaacagcaaaagtgttggatattattttactaggatcttagatctattcacaagtatgttgattaaca

SEQ ID NO: 342584 - DNA, 1168 bp, Cannabis indica
cacattttttacatgttcaatatatttttaaagacaatagtttggagtccaacccgaaatttcgagttgaagaaaccaacttagaaacaaatggactggtttatcttatcaaatttaccagggcactcttttcattttccttttgtcctatttagggatggatggatgtggaatatgaaaattactatttaaaaatttgagaatttattttttgaaatgattatgattattcttttttaatattgttatttattttaaaccagtcaagtatcactgcttcacgtgttagtatatacattgtattaaattatatttatctttaggtaacgttaatagttgtaggtaatgaaatagaatgaaataaataaaaacaatttattctattctctctatttgattgcatttttaaagtatttaaatattatttttatttttattcttattgttagaatattagttgtatattagttgtaaaaattagggtaacttgtatttagtagtttcttattttgtaattagtagttttccatttagtttcctagctttgtatataatatatattattttatggaatacaatacataattctttcaccattctctacatggtatcagagcattagagttagaattataatttgaaatttgaaactagggttcataaaaaaaaaaaagagattagggtttgagtttagggttgtttttcagaaaccatatttggagtgaaaaaattttctcaccgcccacatagaaggactgcccagccatcgcactgccaaacccaaaatttcagcatccagattcaccgtgttgggccccacgcgctgccgtttgcagttgcccagcatcccatgcgccggcgtgtgagggcgcgtctggcatcgtctccagtgacggtcgacacccgtcacactcctgccccttccccgtccttcttgcatcggtcttcgacggttcttggcattttgtggtttgatactttttccttctttgtgtttgggtatctattcttttgagtttgctctcttccttttctctttcaattgtttttgctttcgagattatggcagagataaaatcagattcgaaataaattgttgtttctgatgtggttcccgtgatgtctaaaatcacgaaccataaattgattggttcgaattatttggaat

SEQ ID NO: 342585 - DNA, 788 bp, Cannabis indica
atatatatgaggcagatgagaatggtacttatttggggctcccttattcggttggtaggaacaagaacgctattcttggttttctgaaggacaaaataagaaagagaattcagggctgggaataaggacgaattttatctcaagcaggaaaggaagtgttgcgcaatcgattcccagctatgcgatgagtgtttttttgttacctttggatacttgcaaggagttggagcgtcttatggcaaaattttggtggcaaactgattcttttcggaaagcaggtgttagttggatgagttgggactggttgagccatcataaacatgacggaggccttggcttctgaagcttgtgggatttcaacttagctcttcttggaaagcaatgttggcgtttgctagtcaatgatcgctctttggtgagtaaagttttcaaagcaagatattatgctcatggttccttcttttcgactgagttggtagataacccaagcttcatatggaggagtatttttgaagctaaggggctgttacaagcaagtgtcacttgaaccattggtacgagtgatcaaatctcaatattaagggacccttggcttcctcaccgcaccaatagttttgtctcttaaactcatcatgctcttcaaaaccagtatgttggcagcctttttaagacggacaaccgtgcttgggacgaggagattattagagatctctttaacgttcgagattaggagctgattctatctattcaactaagtacaactggtacaaatgactgctagagttgga

SEQ ID NO: 342586 - DNA, 1221 bp, Cannabis indica
tagttagaaggtctggaaagttttatttgggttggggttgtattggtcgagttatgattttttgaaaaattagtgcactgaaccggaattccggttcagggaggcctgtaggaaccggtctaccggttggcttccaggaatttttcccagaaccgaaattctgattggggaaccggtctaccggttggggcaaatttaggaaccctagtttttcccatttttgtgttatttagggtattgtcatgttttttattgattgggaaacttttagtttcaagtttaagtccccgggaagtgatttagcgtatcgcttatcagtgttgtgattaatgtgatttaggagcgtgtaattcaccgagcagattgttccactcaggttgacaggcacacctgaattcagaatcgaggtaagattagtataacagtatgcatatgtatttgcatgtttagcgtggattttaggaagcacgttagattacattatatatgtatgttggcttcgtaccatccgacagaatcacatcggtaaggctagagtatgactaacgtaccaagtataggctaatattatggtcgatggtatcgtactatttgaccgtatcacatcggtatgctcagagtatgattgacataccgagtgtaggccaatacagtaacacaacggtacggctagagtatgactagcgtaccgagtataggctgttactatgtcaaaattaccgtcgtacgaacgttcgagactcagcaccgtgtgggacacggggattagggttgtggtcatgggtatgggcttctgctcataacccgggatttatgtatgttatttgatttatgcttttcttactgagtctgtcgactcacagtgctatgttcatgtgtaggtaagggcaaggctaaggccgaggaaccgtgaggacgagcagatgaagattatacatgtcggggcggttaggcctggagcgtacgatcctcgggacatcagggctttcgtagttagtgttttgtaaatggaatcccaaaatattgtgtatgctatattacaagtatttagttaaaaaagcaaaattttaattaatcacgttttccattaacctcgttaattagcaacgagctgcacagtacattaaaaatcacgtcaacacgcctatgctagttcttccaaagatcgtcccgacatgtacaatcatcatcagcagttaggtcgttctacggttcagtaag

SEQ ID NO: 342587 - DNA, 720 bp, Cannabis indica
ccctcactagttgagataatactgcttgcagagtcagtcaattgattttaattaatcaattataattctaaaattagactacgtcttatttatgaattttcactaagcaagggattaattatgaagaaaagaggttttatggtcaatttgttaattaagagactttgtatggtctaattaataaattacagaaatggcaattttattaagtaattaattataattattaaataaatagtttggcatttataaggattgaattggaaaatatggtattattaaaaagaagaataagtggttgaaataaagtggcaaaaatctaactagagtttcgccctttgaagtgtacggccaacaagatatttgtgcccaatattttattcttttttaatccatataattcaaccctaagccctagttgaaacactataaaaggaacatgatactctcactcatccaaattttgtcaacttgactattcaaccaaatctagatgagagagttccttccttagtgattcaaacctccttcattgttcttcaattattcgaacacttagtgatgagtgccatgcccacacatagcaagtcaagtactcaatcatagtgagtaagacggtggtaaccaaactcgaaggagagaaagagatcccggttcagatcttgattatgctctgctacaaaatggaatcaagggctacagatcttgaacggaaggagt

SEQ ID NO: 342588 - DNA, 699 bp, Cannabis indica
tattattatatatatataataaaataaaataaaaaaaaagtaaaaatcgggttaaatcgagttgggcggtttgggtcaattttcaacccgcccaattaactgattgggcggtttagaatttcgtcgagttatgtcagtttgtattttttatcggttttgtcggtttggtttgggcgggttattcgggttaggcggtttacgaaaacttttgtacagccctacttgattcctttatgtcgcagtgcattatcaagatctgaacttggatctctttctctccttcgggtttggttaccaccgtcttactcattatgattgagtacttgacttgttatgtgtaggcatggcattctttcactcaaggatcgaatatggtgaagaacaatgaaggaggtttgaaatcagagaatgaaaactagatttgataggttgaacagtcaagttgacaagaggatgagatgagagcatcatgttccttttatagtatttcaactagggcttagggctaaattatatggattaaaaaaaataaatattgggcaaaaattcaacactagggccggccataaaggaccaatctctagttacaaatttgcaacttttttcaacacttattcttctttcaataatcccatattttccaattcaatcctataaatgccaaaactatttatttaataattataactaattatcaaa

SEQ ID NO: 342589 - DNA, 492 bp, Cannabis indica
tctccaaaaaggaaaggaggtccccgctttatgaactatacagaattggctaccccgcgagaccatatctacgtgattgaagaaagaatggagttttcagaaagcctcccccaatcaatggaaatcgcgacaagagagacccaaaaaagttctgtaaatatcacaaggatattggctataccatattggaatgttggctcttacaggacgagaacgaggaattaattagacgaggaaagtttggaaagtagaagaagaatgaggaaggttatccccaagaagatgacaaggaagaaaccaataatgcgagtggttcgagaactcctcgcaatattttgacaatcattggaggacctcacatcgccggagacttcaggaagtcgcaagaacgatatgccaaaaggaaaaagagagggcactcactaatgtgaatattttgagtgaacggctagaaaaactattcaagaaggattgcgatgacataactttcat

SEQ ID NO: 342590 - DNA, 679 bp, Cannabis indica
gtcaattgaaacagacttcaaattgaaagtgacgaccaaaatataaaaattgcagctctagcaaaattataagctaccacacattagctgatcgttcaataaaataaacagaaatatttctcaaactagcaagcaaattttacaatcttgaatgagaaaaccaaaagaagaaatcatactgatagagcatagtaatgcctgcaccacactaggcaatcggtctccaccgcaactagttgctaggagtaggcaacattcaatccaattaaactgaactgaaccgaaccgaaccgaacttatccaatccaatctaattaattggatcagattgggtgttaaaagttggattataattggattagattggttattaaatgtcaattttaaaatccaattaaaaaccgatccaatccaattacatttatatatatcaaaaaaattatttatatttatttatatataataaaatattaaaaaaataaatatttttagtggctatttgtttttattttttttgtatgtttgttatggtattttaacacgcaagtatacgtatcgttttaacaagtattacttacaaagagtgagatcgatcccacgaggattgtagttaagtacattaaaattaaactcttacttctatttggctaaataaaatttgagataaaattaaactaga

SEQ ID NO: 342591 - DNA, 654 bp, Cannabis indica
tgattgtgtgaagaacttgagtctagcaagttcttagtgttttcttacagtgtacttttgtactgttttctttataataattgtgcaggtcgaatacacttagacatcattcatcaagcttcgggagaagtcttactcgtaagttgctttacaggaggaagattgcaagtgttatgatttgaagggaattcatgatcttaacacttcaaaaatttgattaggagtttagattacaacgattgcaacaaattcaagagggagtttttatttgaataagtcaatttgattttgtaatcgtttagagattcttctaataattttcatgctctggcatccccgtgaactagtagcaatttgtaaagattactaataccacgtataattttgtgtgttctttactttatatttatttttatcttctattagtatattgtttaaacatatcatgtttttgtgcaaacaatttatgtgtctatgtaaacatttctataacaaaacataaattaattatttattcaaataattaagctggtaatcataaaaatagaatttcaattggtatcaagataaacttttagcgagatattgtggcaccctaattctcattatctcctaattcatctacttctaatttttttgatttaatcttaattt

SEQ ID NO: 342592 - DNA, 584 bp, Cannabis indica
aaagtactctggaaaaatagcaaaatggaggaagccacgtgagagttagaatcagacatgagagctatatatccagagttatgctggttggatttcgaggacgaaatccttttaaggggggatagttgtaaagaccgattagcttaaatttggaaattagcagataattagcgtttaattatggaattatttattaattttaaattattaatttatggtgatttatttgaatttagaatgcattttatgtcatatatagaaatttcataatttttgcatactcagtgcccgacaacattggaatgcagtgtttggctattagaatcacatcctagtatttttagtatagcggggcgatataattaggctttgggaatgtcggggttagtcgagattttagaatttcccaaaataccccttagtgattttataaaggttttgtgtggacaagggtattttggtccttttgcccatattgtaatttggtccttttgtgtattttattaagttatattattaaattaaattaggttatgttggctgatattttaataaaacaagcttttactcatttattttacaaa

SEQ ID NO: 342593 - DNA, 828 bp, Cannabis indica
tttactcatttattttacaaaaaaataatcaaaggaaagaaaaatcaaatagaaggaaaaactcattttgctctcaaactctctctctctttttcaaaatccctagaaccagctagggtttgattttattcttcaaatcttgcaagtttccaacagctctaagtataatccaagctaaggtaacctttgagcaactctcctttttagtttctttgagttttacgaaagaaattttttgcatgaattgggttattggctgtggtggttgctgaagttaattgttcttgttttcagtggataaaatatgtttggataggctgaattgagcttgttttagtggctgtaagtaggtttaagcaagttttgagttttagaactcaaacttggagctttaatggcaagtcttgattttgagcttgtagaagtgttttgttgctttgaatatgttctatgtgatctaaataccaggtgtggaagttattgtggtgtttggggttgatttggttgagataggaacttttgaaagtttctcgcactaaaccggaattacggttcagagggacctgtaggaaccagaattccggttggtccccaagaaacctcacagaactggaatttcggtagggaaccagtctaccgattggggcagttttgggaaacctagtttttcccatttttgagatgtttagggtatttccatgttattcatcgatagggaaacttttagtttcaagtttaagtccccgaagagtgatttagcgtgtcacttacctatgttgtgattgttgtgatctaggagcctgtaattcgtcgagcagttgttccact

SEQ ID NO: 342594 - DNA, 512 bp, Cannabis indica
atctcacatctccaaagtataattacagcatatttgtgccttttatattattgaattgatgaattgtacacccaaactattaacattattgaatcccacacgcttccctctcccataatttaagagaatttaaaacaatgtaaaaaaatttgggaacacaattaagtagtatttataattcaaaagcgaaaatcatatttattatactttttgttatgcccatttttctagccataaatatggacatgattggaggtgttcattggatcacatccaatgtttttaggtttatccagatccaatccaattatatattaaatgttagattttactattcgatccaatccgatccaattgatttattcaatattttagactaatatattggatcggatcggatccatccaatattttaggtccaatatgtattggattagactggatccatccaatctaagaaaaaaagagtaaaatttaatattaattttaatgtatacatatatattttacgt

SEQ ID NO: 342595 - DNA, 769 bp, Cannabis indica
ctcgccattagaccttcatggcatggcttgtcctccttcaagtaggggagtttgtcctggttcctgaagaacctgattggacagtttgttggtagaccctccccgatctgttgactagtcttcgttggagtggatctctgatgagatcttggcctctcccagtagttctttcattgaactgccttatcaggtcgctagcctctctattgcggcagtctagctctgcctggtgagattagaggatgtacttttggtcatgcatccatctcaggaattcgcatctctattgaatgaataaatcgcaatcaacagcgcatggttcttcaatttggccgacttggcagacggcctctcaaagtcttgctaactcgagatcttctcccaagtctacatggggctcgctaatagtaggttcaaccattcatggccctgtttccccagcatagtactggggatgaggtccagttgttgttcctgggggctgctccacgtggggccttcctttagtggacggcaccagtggagggtcttccctgagaggcaaaggccgattgttcaaatccactgagatgtttgtgtcgacctggccagctgtagtggccagatttgtggtgtctgccaagatggtaggattgactacatctggagcgttcgtggaaattccattcgtggctggaacatgaacatcaggatctggcatcatagggtcttgagggagacctgatgaggcagaggttatagtcgaagttctcctcgtgctaaccatgac

SEQ ID NO: 342596 - DNA, 615 bp, Cannabis indica
agagcaataatccaagtttgctctttgctttaagtttaatcaaacacatatgatggtggtgcaaactcgcagaggcgtggtcgatcaggtggatccactagtggcagatcctacgctgtagaccccagggaatgcaagggtcccaccagtcactaatcctgagcaaccaaacatgcaaccacctactgcgggtcaaggtgtgacgtctcctctggctgggatcacacccggtgtgcaagagactggaaacaccaattcagcagccaaactgggtactcccagcactggaatcccttcagcaacaaatgttcagacaaccattggatatgacactgagatccagaacctccgtaatgctcttgggctcatgcaaggtcatactaatgttgggctatgtgccctaaatgaaactctatttcaatgtaatcttctctattcaaatatcaataaagaaacagatttatattttcatcacttatttaatgtgtcatttggttcatgttatatgtttatttgatttataaattcatccaaacccttatcacattgatattcttgtttattgtgacgtcagcacagtggaaagtaatcgagattgtgtgattaaatgtattc

SEQ ID NO: 342597 - DNA, 841 bp, Cannabis indica
gggaagactttctctcttgcaactctctctttctctctctcgaaaaatcctagggcagctagggttctttgttttcttcttcaaattgctgtaatttccagcaagttcttagtgattccaagccaaggtaagctctagcagtttcctctctagttttcttgaatttaaagaaatggaatttttccttgaattgatagttttgttgctgtagttgttgtagttgtttgttattgttttcagaggtttaattatggtttattatgttgctttaagtaggatttggtagttgttagaaggtttaaccaagttttgagtttaagaactcaagcttgaagctttaatggtgaaaattaattctgagctttgattgttgttttgttacttggaatatgtgtattggggtataatacggttacccggattttgtagcagggggaaaaccggtttttcagcttgtcgtttcgtgtcagtttcaggtttctagttagttgatttcctgctagattgggatattattatattaatttgcagtagatagggttttggttttaaaccttagtcctggttgtgatttagcgagttacttatgtgtgttgatatcgatgtgatttaggagcctataattcgccgagcagttgttccactcaggttgaccgacacacttaaattcagaattgaggtaagactagtataatatcatgcatatgttattacatgtttagcgtacatgtgttattgtctgttagattacattgatagcagtaatagtatacatagagttgtgctgattactgataaatgtatgttggctgaaatactgatcgatgttgtcacatcaata

SEQ ID NO: 342598 - DNA, 532 bp, Cannabis indica
ttcatcagagaaagctcgattcacggtttagtaagcccgtacttatttagtattatatgtgaatattaaagtatgttaggaagcatattagattatggttatttgttttaagtgtgttgcctttaagtccataaaagcggtattgagttttatgatcgctatctaaccagcctggcttatgggttcgcaggctaagttctataaatgcacgcctagcgatatacaagaagttagggtaatatggttgagactagaggcggtcagggaaatcaagttccccaaaatcccggtagtcgcggtcgtggtcgtggcagagcttagggtggtcgacctataaatccaccacaagctcctctggattgggagtagaggtttacggaaatgcaagatcaaatctgccaacaagaagaagaaattacgaggttaaggcagcagagtcctcctgccgtgcctccgcatcaagcttaggtcgctgtagctccaacggagccagcagaacaacctattactggtaaccgtatggagccgttat

SEQ ID NO: 342599 - DNA, 752 bp, Cannabis indica
acaccagaaggatctggtctccaaatacggctatcctccgatatgctcaacactcttacatgttccactttttgcatcagcgagataaggcttggtaactctctatccattaaattccttctgaatttgaaattccagctctccacccatccacctggtaacccctcgtcaactatcaattcctttataggagcgttcctcccttctgaaatcactgctaggtcagggaatgcactaaccaagggataatcgtcaatccaaacgtcttcccaaaatcgaattctatcccctcttccgatcttaaaatgtaccaaacccagaaactcgtcatacaaatctgagatgtctctccacggacctttaggagataggcgacttcctttcttagagtcccagaggttatcagccctaccatatctactgacgaccaccctgtgccacaatgagttctgctctaggggaaatctccacaaccatttcataagcaagcttttgtttcttaattctaaccttccaattcctaatcctccctcgtgtcggggcctacaaacctcatcccaagccactagatgctccccacctgaggactcactaccttcccataaaaaatctctcatcattttctccaatgctttagttaccgacctaggtgctttaaatagtgataggaaatataaaggaagagaagatagaactgactgaatgagagtcaacctaccccctttagataagaatgcgcatttccatccatc

SEQ ID NO: 342600 - DNA, 798 bp, Cannabis indica
atgagaaaaaatttgactaaaaaattatttcggatgctaaaataaataaggctgcatcaatgtatctattttaaggaggtgtatcgtgaaattttccaatattatatttagtgtaattaaaattttatgtcatatatataaatttttttattttcatatttttgtaaatagcactttatttttttccacaaaattgctcctacttgatttgtaatgttttattattattattatattgcatcgtaatgtacaagattatttattaaaaaaggctgctgcaaaatatgtgtattttttttaaaaataaaaaaaaaaagaaattggaaaaggcagcacattcccatcagacagtgacatggtttgttctgctgtctctgtagcaaccttggttgaaatctcaaaaccctaccaaactaaacaactaagtactgcactcccacataaacacacaaatcccacgtacaaaatatcttattcaatacttattataattgcaaccttccttcctatgagttgtatcgttggttgagactttgattgaggagagagagaaaaagaaaaaatataatacaaatcaaatgtgtgacttttttttgtttttaattctattttattattcttatgcagtattccttgctgttgaatgaatcatgattaatatgtgatatattttgtttgaacttttttaattttattatataaaatatatagttttgttttggggagggaagaaattgctggtgatgggccatggcaatccacatttcacacccaccttttattctctctctctctctc

SEQ ID NO: 342601 - DNA, 855 bp, Cannabis indica
aactttacaaactaaaagtttcaaaagttgggatcccacaaatatttacaaaacactattacaagttcttttccattggctgacctaagtggcaaaacagagtctcaaattacatcattggtagatccctacccgcttggtctagtatggcccgaacatgtacattcttcatccagctcctacactcatggccgattagacacagctttaccctttcttgcacagtagagtacccatgagccaagcccaactagacaatataaaatatcaataatatgcttatcatactatataaacattaatgccattctcatatgcatgtatgacacagacctggatgttacgctcacatgcctatttatgtctacgtagcgtagacctacgtgttgcgctcacacgtctagatacaataaggccttagaacggttcatctcagttgtggtcactgagtccaacctgattatgccttgaacgcataacccctaaatctctatatacttagcatggcatattaattacacaactcatatcactaggggtaataaccctaggctattaaaccgctcatattgggtaataaccctaatctcggttactatttactcacatatattatttccaatataagcgccaccgcgcataactctacgtgttaactactgtcttacctgttgtcccgcaataataaagattccaaatccccgggtgttcctgattaggtgtcggtaatcctagtcacacattccggaacccgcttcaagcctccattgggcctttaaacccacggaatgaatggatcttatacacgagtacgtcacttaggctgcttctaggattgacgactgaccctacaga

SEQ ID NO: 342602 - DNA, 678 bp, Cannabis indica
tgaagtaaaggttgtaggaatttgggagctgtggctataattgttgttttaattagaattttggagtttgcttgaggttatttaggtggatttgagttgtttttgggtgtggtagtgagattgtaacaaggtttgagtttatgaactcaaaccttgacctctaatggtatcttgagattttgtgtcatttattgtattctgctgcttgaatatgcttcattatagtgcatacaggtattctggaagttttgggaagttttggggttgatttgaattaaagggatcggttttggggtttccagcttagaaccagtcgaccgattctgggagacctctagcaaccggtcgaccggttggtacccaggaactggtgttccggttgggaaccggtcagccggttggggctttttcccgaaccctaattttccctgtttttgtgttattttaggtgttagcatcctatttatcgatagggttattcttagttttgattttaaatcctcgataggagttttagcgtgtctctcatcgaattttgaacgttatggtttagggccctgtaaagcgtcgagctgcgtttccactcaggctgaccggcacacttgagcacggaacgaggtaagatagcgtaagaatgtatatatgaatatatgcttgttttggatgtttacactacta

SEQ ID NO: 342603 - DNA, 1054 bp, Cannabis indica
ggctcgagttcctcgtccgagtcatatgtagactgttttccatattcccatctcggaacctcctgaatttatcctccaactcattaattcgcaattggacaggatcctcttgcttttgattgagttggtggtgaaggttaggttttttctggtttaagtgattacgaagatccggctgttgctggtcatagttacacactaacctcgtcctactcatggacctcattctggagtaactttcagttctacttgagcatgtactctcttaatcagtactgcggcgagttccatcccctcctcacgttgatcgactacaggttcttgtgcatcccgagctagcactcgccttttcacgtaccggccttctcctttgggtacgggtttttgcatgccccctactgggctttgtatgtgccccttccctgttggtttgagaaggatgttggcgatgcctcggtggcaacccacatgtcctaggttaagtcccatgatttccctcgttctctcgagggatttcttgttccttagtccctagtcgccttctgttctcatttcagggagaaggctctggttggtcatttggttgttcattttcagggagatccttagtttccccagtttgttcttcctgagcgttctgagggtcctcttgagccgtctcctgcaccctcgctcatgaggtctacctcgtggtctcctcactccatgatcagattggttttgtgcgttgttttcctgtgccaccctagctgcggctacctcccgttccaactcagcattttgtcagttttcctcctctaaacattgcctgagatgattctgggttgagcaccactaacgcttctgttgggtacttcattccatgattctgggttttggccacctgcatgttgggtcctttttgaatgtgtggaccgtgtagatcgtgttgtccgtgaattaggaggcctccgtgagcccattggctcttttccaagacggtgagtagtctctttaggatgagtatcatcctttgccccgttatcagccatggagaaagatttttctttttgtt

SEQ ID NO: 342604 - DNA, 749 bp, Cannabis indica
aaacggagtcgcgagtcaaaagttatgtccaaaataaaaacccggaaaaaacacaacatgctgccataaaatggccgcggctactaggtttaaaaccccaggaaacccagtttccaaccacgaaaatgcatccaaaaatactaattttcatgctatatcaacccacaatcataccaaacttttacctagcataaaccaagtaattagagagaaattacacctaattcactcttcaacaacaccaaaaccaagcaacataaaaatcagcattttacaatgaatttcagccccctaaactcatccattccaaccccaacatgcttcaatccaacataacctcttatacaattaaacaaccacaaaagaaagttaaaccacaaattattaagcttaaaatttcagtccatatgcattgaaattaagattcaaataacataaaatcaaagctccaaacctagagcaaaattcatcataagttcctaatcaagaacttgaaacttcaagcaactttcaagcaagcatcaaacttatttttttagcaataacaattcaaataaaaacttgaattttaacataaaaattaccctaaaagttcatctagaacccaaccaacataatccattacaaaaccaagtaattcacacccaaatttctcaagattaatattgattctccccacatgcaaaccatgaacatcatacactattttcatgattttgaacataaatttcagcaagaaaaatcaacaa

SEQ ID NO: 342605 - DNA, 890 bp, Cannabis indica
cctagaagtaaggtcgtaacttgcgagatgcatggattaggcataagacaagtttttcaagaaggggatacctcgattctacccccagtaacctcttactaacatagtaaataagttgttggtgctttccctcttctcgaactattgcagcactaattgcatttttcgagaccaccaagtggaggagtaatgtctctccagttatgggttttgctagaactagaggtgtcgacaaatgcctctttatgctcttaaagccctccacgcactcttttttccactcaaattttttgttgcctcgcaatacattaaaaaatggtagacacttatcagttgactttgaaatgaatttgttaagtgctgccattcttcctgttaatgcttgaacttccttgggtttagttggtgatggcatatctatcaaagccttgattttcttaggatttgcttcaatgccccttgcgttgactatgaatcccagaaactttccttaggaaactccaaaggaacactttttcggttaagtttcactttttcaatatttcaaagcactccactaggtctgttgtatgatctccactctttatcgatttcaccaacatatcatcaatgtagacttccatgtttcttcctatttgtctcgcaaacatttcattcacaagtcgctgatatgttgccgtagcatttttcaatctaaacagtatgactttataacaataaagtcctatgttggttacgaagcttgtatgctcttggtcaaggacatgcatttttatctggttatatccagagtatgcgtccatgaacgacataagctcgtgcccagcagttgcatccactaactggtgaatccttggtagtggagagcaatcttttggacatgccttatt

SEQ ID NO: 342606 - DNA, 1084 bp, Cannabis indica
taacatgagtagttaaattttctgcccacgtgttgagtttaagtatttttttttcaagacatttggatgtctcgtttaatactttcccttagcgtgagccgttagtattcaactttatgcgcgagtcataactttttattttcctttctcgtcaaataggttattaatcaaaaattacacttgtttgattcctttcttgtcagaaaggtttgatcaacgcgttataacgattcaacccctcttctgtcaaaaaggtttggtcagggagttataacagttcgacccctcttccgtcaaaaaggtttggtcgaggccctttttaaaaaattttcaaaaaaaaattattattattttttgaaacgatgggtttgcattgtactatgtatttccagatcaattccggttaatcatacatatatgcccctcaagtaattttaaagggtttacactttataattacttgtttaaaagaaatgattattttattcacagctggaattcaaaatatttcatcagtaatgtgatttaaaatcattaatctcaaaataacttccccagttcaattgcttatcttaccaatcttccaggagcatctagttttgataaaaacgagttttgatgtccagggtcaatccccaacattctcccacaattgtttcaatatccagggtcaattcctgacatataccggggttccaggtaaatggttttagttgtatgtcttcgactgctactggttgacgtccagcgttccacgtggcagcttgatatggcaaccacaatggaccgatatctactcgcatcacaattcttttacacaatttctttaccagagtaactgccccttgtattcttatgacccgcttcctctcgagataaccaaagcatcccttcttctcacggaagagggttataatcttcaatctctcgagttattgggcagatcgaactgatcataggcatcatcttgcccctttatatattgctgaaggtgtccttgtgatatgagaccttctatcttatctttcaactgacgcactctctgtggtatgaccatatcaccatgatattcacactgcttatt

SEQ ID NO: 342607 - DNA, 1193 bp, Cannabis indica
tgctcgcttatttttgttctgatctcaagtgtctttaggatctcgtgcggttggctaactatctgaataggtgtagatccaaagcctactagagatatgactctgataccacgttgaaaatcatatgattctatctcaaaaccaattggtgatgagtgtaatttttgaatttatttttttcgacaaattaaattaataaatgaatctccgtgcaaattacttgcccacacagggatttctcatcctgccctcgatagggaatatgaaaggatgggagcaggtcgggaactaaaataattaataaggataggggatgaggggacactcctcgcttattaccatttctattatacatgttgccaatagcctttcattggtaaaagagtgtttcttttttagaattttaaaaaattattatctataagttgagttttatttaagtattttgtatataaatatatttttatttaattattatctattaagagtgcacccatttttaatatagtttaaaaatagatatttttttttaattaagtagctaaattaagtatagaaattcaaatttctcctttaatattatttatcattagatcaaaatttaatggtttaatattttttaaagtaatatttatagttaaatttatttagtaaccatcaataggtaatacccattgagaaatgttccagttagtgtatattataagtattactatttagtcctttatcgctaatgtgtaaaaaaataataccatatataagatgaatgtgctacttcttccattgttaattggttttgagatgaaactctatgatcttacaattctaacatggtatcagagccaaacaaaaacttccgctgtcactgcctttaacctccatttgggatctttcgaccaatgtcttggggtctttggcccgtttcaaaaattcacaaatcctttgacgtgtacacccacaaatttcttaatttggttttgtgagattctttcaaatgtcatgttcggcactgtggtatcttaaatgttgttcattatatactcatactttacaatcccaaacgtgaacatggtgtattgaaaatagtctcatatcgctaatgtgtggaaaagtaatactatatataagataaatgagctactctttccattatcaattaattttaagatggaatcctatgcatctttcaattc

SEQ ID NO: 342608 - DNA, 621 bp, Cannabis indica
tttaatcatcacacattgtctatttatatagttataataatagtgttgttttgctataattttgtacaaaaagatatattaaatatattattgtaatattaaatattgtagatatatgttttaaaataacaaagttatccatataattataactttaatcatttatataagagaagggtagatagggcaaaataatttttagttggcatgaaatgagttttcgagtcattttatttaggaaaagtaattccctaatttacatgaattataattcctattggaatgagttttccaataacaaaccaaacacttgaatgattgtgggaaaattactgctagtggtacaaaatcaaaacaatgaaattctatattgggttgtctgccctaaataaaatctatttcaatatatataatcagatttactaattaatatagaattagaaattgcttttatgttacatggctcacatgtttatgcttaatgtataaattttattaagtttagaacatatatatatatttgttcatgattatagtgtcgtcagcacagtgaaatataatcatgattgttgagaatcatggggttccatctcaaaaccaattggcaatgagtggagtagc

SEQ ID NO: 342609 - DNA, 1282 bp, Cannabis indica
cctggaaaagaaaaaaaacatcaatgatgacgatcataaatgtgaccgaagcgaccagaggcacgtgtcactatatttattaaggataggaggctgcatacaagtctcatttacctgttactaaataagacttggagggtaaatgttgacccaggtttttcccaaaatacgtggccccgatcacgtattacacgtggaccaaaaggacacctcacccaagaattagccggaggcatattcaaacggacaagtgaagtcaggatgtgagcccccagagaagtgcaataggcatgtgtttcctctccaggacagacatataataaagcatctccgggaggatgagggtatactcgaacaaccaccccgcatttaatgcagcatgggaaaaatgtcttggaacgcccataataggacatgttagacaacataagcctcgtttgcggcaattacacagtaatcaaagggactagtgacgactccattatgaagcatcacatcaatcaaagaaggataaagattaatctcacctacctatgatacctacggcataggttatgcataccctattttgtatctctcgggaacttgtgctcatacattactggcactcaaagacaagtgatccctttgtgaactatccttacccatctctataaatacccctgaacaacataggaaaggggatcggaaaaaagagagggagagaacaactcaccaagaacattctctgtataataacatagactcgtggactactgctcattaatgcccaaaatacgtaaaaatcatctgcataaattattccaaagctctcctcattatcttatttaattggttgccgaaaatctcgatcaacacttatcatcacttatacaaccatgaatattttctcatcaacaaaactctcacacctttacaaatacataaaacatcaatatactatggtgtgaaaaaggataaataaggatttcttttaggctcaaaggttagtgtatagggttaaaagaaaaacaagacgtcaacatttaggctcaaattgggtaaaactagggaattaacaaatagggtaggcttgaaaagctcaatcgatccaaaaaagtgtctatatcatatctcaaaatcatgtgcaatttatcaatttcgcctcaaatgattatcaaaaaagttctagagtggttgagactttacattaaaagtcaatcatgcattcatcttttcaaacactagtaaatgttgggttttatgccgtaaataaaacccatttcatataatcagatttact

SEQ ID NO: 342610 - DNA, 1136 bp, Cannabis indica
cgccttcggaatcgcattactgtatatagttttggtgtcctaataaatgtgggcaatttaaagaaattaaatttgagcaagttgaaagtaactagtttaacgttgggattagatttctctctctctgttatggtttttttctctcttcttcttaaagtctcttctagggttttttatgcacccttgggcgccgcccccagatctgggatggtggcacccaggagtccttgctctcggcgtgctacacgtggtggaggaagtcccctcctggtgggtttcggtgttggtgggtcaagtgggtgttgggcgttgctcttggggatcggttccatggcacctgttttctcaggtgaccggccgccgctgttggaggcggtccatctctattgcgatggttatcgccgtcggtcagaggctcttggtggatccatccttttgggcagcgtggtggcgttgttggtgggcttctttgagctcccatcatttcgtctttgaggtttttggttggttggggtccttctcaggcgggtgttttggctttggagtgttgtttttcttcctattttttcaaatctcagtgtttccttatgggtttctattcaggcgtcctggctctggtgcacattggctgttgtttagctttcggagtgttgtagatgtagaggggggattcgggtcttacccaaagggatgtgcttcccttgtcctagcaccttcaccattcagaaccgctatgggagattgagtgtggactttccttgttggaagtttgcagcaactctttgtctttggcatgtttgttttgggctctctggcagcctcctctgcgttttgggagtgttctttgaagttcttcaatgttatttgcttctttgttttgtgtattttagtttaattagtctttttgatgttgttcaccttttattttttggtggcgttagtcttagactattttggggtttatccctctaaatgcttttgtgtgagccttgagctttttgctccttccatcattggtgtggttagcaaatatttgtgccatctccttgtgagattatgcggttcgtccgctgggcgtgtagggcttcggcccctttcttaaccttgaatgaagttctatttctcaaaaaaaaaaa

SEQ ID NO: 342611 - DNA, 736 bp, Cannabis indica
gacgcatataaaaaggtttatagtacaattaagttggttagaaaaaatatgtgtaagttctactttgttaataagttcaagatactaaagaaacttaaaatcatttacataatattatttattataattgtatcatgtgcttatcatataagataaaagttagaaaaaaataaattagattgtgatattcttacattcttaataccaaatatttggcaagataaagtaataagtttatgaaattactttaggtggtgtataattttttatacatatatgtataacattatgaacttttttaaaataaaaaatgtataaatatatctatttaattagacttattgaatttagtataattttgtgatttttttttcattttaacaaaagtcccacctggtttgcaaatgatgtgtgtattgtatttctaagctataaataaagtactcttacattcactttattttgtcatggatgattgaaattgaatatctcaatcttgtctaattagttatatataatttttttttaatttattagtgtgtgcatattggaattaaaatttaatataaattttgtaaatttatatattaatattaaggaaagtatatagtaggtgaggtggcatcttataatttttttcacctattttatttattttataagaattactgaatttagtataattttgtgatttcatttttctttttaagcaaaagtcccacatggtttgtagatg

SEQ ID NO: 342612 - DNA, 952 bp, Cannabis indica
aacaataataagttttataaaaaaacaagtttaataattaaacaaaatataaaacacacatatgcaacatatttgatagttggataaaggatttatttaatttaaattaattaaataattttcaaaaaatctaaataataaattattatttttcaaaaataataaaaattaaattaaataattaatttcaaaattaaacatataaatttgaaaaattaaattttcaacaaacctaaatatctattcaaaaagatactaacaacttttcaaattttatgttatttaaaataaaattaaatatccaacaaaacaaaataataaataaatatcatttgtctaattttataattcaatttaaataaagtaacaaaattttaaaagttagcaaaaatatctagttacattttaaaattttttagattaaaataatcttattttaaattttaaagaaggtcattttataaaattaattaaataatttaaaatataaaagatatgaccttaaatttaaaaataagataaaataatcaaattttaaaaataagataaccaactaagtaaagtaatagattttatctattaggttcaaaaactactaatatcttaaattaattaaaaaaattaattaatttaattctgataattagatttgaaatatgaaaagtaaaaatctaaatacaaaattacacaataaatttgaaataaattccatgaaaaagcatgaaaaaaatgaaaaaattgaaacgcgcatggagtgatctgggcatgaaatgtcgcacacggatgctgcacgcagtattttcgcacgcgaatgggggaattcagacatcttgggcgtgtttcttcggataggcccatgtctgaacacgagtgacgcccatgtgtcacgtgcatccacacgcgcatggaggtgtcacactttctaattttttttttcaattttcaaaaattc

SEQ ID NO: 342613 - DNA, 574 bp, Cannabis indica
ttgcatttggatgggtaacacgtgtcaggtgcatctgtttgcgattcgatgtgagagtgaccaagtgtctcttcattttttggctaataaatgctctgacgcaattaatgcttcaaacctggttttctcttaccacatttgacggatatccttgattatctttgatttccaatatttgctttaggggggaaccgaggcgtctaaggcttttgaaatgattaccctttttcatttttctgcctataaatatgactaagcattgttcacaaattcatttttaccaacttctccattaagcaagctcagagcaaaaacagaagtttttgcctcaagtttgccatgaaattttcacaagaactatccaagcagtttcgcttagactgaatccagacgtcgatcagtgagtaagttctcgattggttctccttttactttgcacatttattttctacatgcgttcttaaccttgttgtaaaagataggtagaaaaccctaggtttagaaactttacgatttttctttacaatgatttgtacaacttcacgattcatgacacttgccttttggttacaga

SEQ ID NO: 342614 - DNA, 692 bp, Cannabis indica
gatggtgtttactcttgggggtggatcagtggtttggagaagtgctaaacaaaccgcaatttcagactctccatgcaggcagaatacatagctgctgcagaggctgccaaagaacttgcctggcttagaaacttcttcacgggactcggtgtcgtccctggaatggaaaaacgactggtttttctttgtgataacactagaggcatagccaacagtaaggagcctcgaagccacaagagaagaaaggatatatgtaacgccctaaataattatgcacgttacccaagatacttatgaaaccgtaatcccctaattgggtttactattaaaatttgcgcgaaaattaaactttaattataaacagaattaaaataaaacttgtaataatttaaactttacagtctaaaagttacagaagttgggatcacaaaaacatttacaaaatattattaccagtccttttctttcagctggcctaaacggcaaaacagagtctcaaaaaaaaataacactgttacaccccaacccgattggtctgatatggctcggacatgtacattcttcgtccaactcctgcactcatgactgatcagcaacagtcttaccctttcctccatagtagagcactcgtgagccaagcacagcaagacagtataaaacatatcaacattatgctcatcatataatacaaa

SEQ ID NO: 342615 - DNA, 623 bp, Cannabis indica
acacgactcgaaactcgcacgagagttagcgggtttggatttgctttaaatgggttcgggtcgtgttcggattgactcgtctaacccgtttaataaacgggtcgtgttcgggttgacacgtctaacacgaaattgacccgttaatgacctatttaaagttattttagtactttaacatgttataaatggagtacaaacgtgttgaatacttcataaacgtgttattgattggcatgtttaaacaaattatacttataaacgggttacacgggtcgtgtcgtgtcaacccgtttataaacgggtcgtgttcgggttttatttttgtgatacgattattaaacgggttgtgttcgggtcgagcatttacctgttatatatgggtctcgacacgacacgaacacgacccacgaacacgaattgccacccctactccatctctcctctccctccttctctccctcttgtcaaacaagtgatttagcctatccttccatcactctccctccacctctctccatccacccatttttctctcctaccaaacatagtgttaaaataaatatatgttctaattatatatatatttaaaattattaaataaaatatgttattttatttttttt

SEQ ID NO: 342616 - DNA, 726 bp, Cannabis indica
tagtgtgtaagactgtgaagaatccaacacttgaaggagaattgggcttagatcttgataatactctgcgacagaaaggaacaagggttagagatctgaatggaaggagacatattattccacagacaccaatgtaaggtttcttgaactttatatgtgtttaattccattgttttagagaattcatatttagggtgttaatcaacatacttgttagtaaatctggttcctgataaaatgtattccaacaactgacctcagagccatgataataatttactttcaagaaatatagatttaaaacgacaaatatgtgatttggatgtgattcatgttgatctatatgtttatttgatgattgattgatgtttacaaaaattttacataaaataattggattcacgatctgaaattattttatttggatagtatggaaaaaattacgcaatttacttttttacagaacttaatttcgatttaaattgaattagttataaatttttgaaatttgagaaaaaattagggaggggttactcctctacgtgcgcacacaccaagtgtcacttggtgtcacgcgcatggaaatgctcccagcagccttatccaccgaaatttttcggccagcctcatccatccaccatgcacggaaatataccagcagccttcatatttttttttttttttcatttttttcatattttttcgtggaatttaatctctattttt

SEQ ID NO: 342617 - DNA, 737 bp, Cannabis indica
tttatacctctttcatattcatttattttcaattctctgggcttcttttgcatccaatcgacgactctctgagcggctcgaatacttggagggcgaggtccacaaattactatcctaatgcaaggttgcaagtaagcaaagggacgtcacctaacttgaaaacacctgcctcaagcaagaagccgagaaagcaaaagaggaagccgagaaggcaagagaggaagccgagaatgcaaaagaggaagcagagaagacccttaaagcccaagccgatgaatttgagaagaagctcgctgaaaaagaagtcgaaactgtagaacgatgcaacaaggttggttttcgcaccgtataccgagcctggatggtgaaccctaatatggacaccagcttcttacaggagaaagaagaggaaactttggctctttgcgagaagaccacactactacaaaaaagtacaattctcgtcagtttttaagtgtcatttaaagaatttgcgtcggtttaaaaaacagacgtatatttcgtagtcgcaaatagtcttttattagcgtcatttttcaaaagacgcaaaaaataattatcttcatttaaaaaccgtcacaaaatatacattcttcttttatatcttctgcgtcggtttggaaatgacgtgaaatcatttgtggcattttaaaaccgtcactaaacagttataccgttagttataaaatgacacataaattgctgaaatacttttt

SEQ ID NO: 342618 - DNA, 1254 bp, Cannabis indica
agtatattaacgagaaactatatgtcactaaaggtgaatagcgaggtaccagagaaaagtgacacataccttagattgcaataagcaaactaagtgtaaaagtcggatcggctcgaagaacaagaatgcgagatgaccatctcgctatgagaaaacttcctatagcttcatcaaactaacaggagcggggctcataattcgggcaagtcagatgatttctttatactcgcgatcgacgtaagacatacattgtcgacctcgaaaagaagaatggttccagctcgccattggaatcactataatcaagtttctgttgagacatctcagattcagtaattaaaggcgtgtttaatacacgatattcttgatccagtaaaagcgggaaatcacagctatacgattttcaaaatcatacaccgcatttacattctgtgatatgtaatcatatctcacgattttagggataatagctgtaaacatattttggtcaactttgtaattaactgccactatgcaattataaatagtggcaaacatctcaaaaaagggacaaaaaaactctaatgaaagatgccctaaaaaaatactcagaaatctagattgactcgtggactatgcagaattttaataaaaaccacgtaaaaaacactgtgttcatattttatttttctatagcttttattttttctgtgtagaattatcattgtgaggctcaaatttggttaacgaaaatctgcgttaacagtttggtgctttcattgagagcctctatgaaaaagcttaaaaaagccctcccttcttttaaagaaaaaccttctcctttatggctgaaaatccatagaatattaacactccacatgaggaaactaaccatcgttctggaaaaaagcccatgggctctagaagatctaccaatccgcagtccaaaagggccacccgttccagggggcccaacatgaggatggctccagtgctcaaaaccacacgtccctggagaactcaacccgacattggtcctagtacgcagacaacatgctcgaggagaattcagcgtggttatggtcagaatcccaggacaaaggatgaagagctcaaccgtggaggtgcctaatcgtgggagaaagaacttatgaaatggaaagccactgcctgagacgtcttctggaagaggcgtagcatcgaaaggcagcctcggccaaggcagcgtaggggatgaacgctcaaaatcaacctgaacctagagtgagaagacca

SEQ ID NO: 342619 - DNA, 778 bp, Cannabis indica
atttacttaacacttaacagtcagttacctacaaaagttcaaaaattataacttattattattatcgccaaaaatttaacttagatatttatttgtaacttagagttaaacttaaatatttatgccgcaaattactctttatattatatctataagtgcaatttagtatacatgttgtctcacataattatgtggttattgtttgtgatgcttataatataataagttatccaatatcgaatagaacataagaatactaaaatagttttgaatacttaaataccatacctaacaatcaatttgtaatttgcataaatgaaaagcaggaattgtttctagcatgagtagataattcatacaacgcaacagagtgggtgctatcagaaatgttaaatcagccagagatgcttgaaaaggcaacaaaagaaatcgatagagttgttggcaacaacaccacactcctccaagaatctcacatccctaagctccattacctaattgcatgtgtaagagaagctcttcgcctccacccagttgcacccttcaatgtcccacatgtctctacttcagactgcactgtagctggctacttcattcccaagggcagcaacgtcctcctcagccgcttgggcctcggccgcaaccctactgtatgggatcaacccttgcgcttcaatccagatcgccatcttcatgagaagagatgtgacttgtcagagacggatcttcgatttattagctttaccacagggaggagagggtgcattggaggggagct

SEQ ID NO: 342620 - DNA, 559 bp, Cannabis indica
gtaatatgaatctttaaaatcaacaagttgtactttcaattggtattagagcgtgaaattttctaaaaatttatgttagatcctatacttgtcttattcttattccttgatttttgaaatctcttaatacgtgtttgaggattgattctgtcaccactaaccacctctgagttctttctccaagaactacagtacaagagtgtgtttcttcttttctcctctgtgcagaatggaaatgtttagagaaggacgatcaacctcgagacctccgatgttggaagttgctaactatcaatactggaagacgaagatgcgtgctttcttgagagctgttgatgaaagagtatggatgtccatagaagaagggtggtcaaaaccaacgataatggagaatgaaatcgttatccccaaaccaatgagccaatggaccatagacgaaatggaaagggttaacttcaactcaaagttttggcttttgtgccctaaataaaatcctttacaatctgattagttatcaatataagaaatttaaagtgatttatgtttgcatgaattttac

SEQ ID NO: 342621 - DNA, 581 bp, Cannabis indica
gcccaaacgaccatcagagacacaaccgatttgcaaaatctccgtgttgcgctcggactcatgcagggtcatagcaatactctgcatcatgatcaggaggaactgcgtgccgcagtaaatctcgcgtttgattaatagaggcgtatgttcgctgaatggagagacaatgagatggaggcattaagggctcacgatgcacagatcgaaaatcgtagtcggcaagctactgtgctgatacgaagagcctaccagactgtagaccagcaaacgccaagcgtcattcccctgggagaaagggaggatgacccgacgatgaatgcctcccaaacaaacaacggtcagctgtccaatccccgatcacgagttccactcctgggctaagaggtaggcgggcataccttgtccaggaattcatcaggaggagccataccagacggatccaatcagaataatggagccatttcgcctgtcaaccaagtgaaccaatcgttaaggcaactaggttgttctgtgttcaatgggctgggaacgacccatgacctaagggacgatctaaacagaagaagggggacagacgagca

SEQ ID NO: 342622 - DNA, 673 bp, Cannabis indica
aacagttaaatatttagtccatggtatcctgtcgtttacaataaaaaaatgtttacaacatttttgttctaaaagaaatttcctactttgcatgagcataccattaatacttaccatcacaaacttctttgtcttttgtattatacgagtatagtgtatgacaaatgagcaatattagtatttttttttttttttgaaaaaatgagcaatattagtcattgtgtatagagttctcactattattttgaaaatgaaagtcacaatgttctttattggttgttaccattggactttcataaacttaaatgagtgataggaagttaaatgagttcttgaaacgttcatcaagtcaataaaaataaagtatttttattgaacactagtggtgtttagcatcttctataagtgcattttacgattggttaacgatattctttaaaaaaaaaattataagttacatgagattcagtacttaactacacaaaaaacggtgtgatatcaaggagagtagtaaacaccaataatactttttagcaattcttatgaaaataaaaataatttgttaaaggtaccctaggcaatataacaggtctattataggcgatattttatctatgatgtatgactgctaaatatttttagcttttgttttctcttctactgaatctagtac

SEQ ID NO: 342623 - DNA, 643 bp, Cannabis indica
acaataaattatttaatttttttctaaaaattataactatatattctaaaacacttaaacttaattgtgaaagtgcaaccgaaaaaaaaacatatattatatatatatatagtatatgatatatagatagaaaaatgttaaagtctatagcattttcttacgtatcaatttgtgtaattaagtattgggtcttatataatttaaaagaaatgctaaaagacaccaataatacctagcaccttgctaccttgctatgtgtcaatatcgctattggcatggacggagggactttagcctatatgtagactaaagccctcactcaaatatataatttttttatatgtagatatatacatatattaattcactttgttcaatttattaaagcttaatttacaaaagccctcattcaatatcttaatcatgattcaagagcttactcttattctaatcaagcccattttaaaagtagttcaatacaaataataaaaaaaataataactttattaaaaaataaaataatactattgacaatattttattttatttttgtcaatagtattattttattttgttgaagatgaaaatttaaaagatacatttatcagttatttttattagttttgacttaatatttattcaa

SEQ ID NO: 342624 - DNA, 1153 bp, Cannabis indica
aaaaaaaaaattccaaaggaatcccactgaaaaataaaataaaatcatttaatggaatctaaatactgtcgtattagtcgtgttgtttcttaacataattgtaaataattgacaaaaagttggaacttaatggaaattaaattagtgtaataatttttataaaattgccactattactaaatagtgtcatattattatatagttggtacttttaacttaataaaattttaaattaaaggaagaaaatcaaaggtgaaaaagggcatctaagacagatgggacgcgtgttacaccctccttgggtattgacacatcagcatatgtatatagtatgccatcaaccaataatgatacttctttttaatagaacttcaagatcgagtttggtaaattgtattacgagcattgtgatagatattgtagagtaatattttcttttacgattggctagcaatactttttaatagttattatattaaattatgtaagattcaaaatttagttagactaataataatattgacacgtataaatatatatactaggtattactagtgtcttttaatatttttttaattgtattatataatattatatctcatatttttatataatattatgtttgatatttacttatatatacatacacatatactatattttgatataaatcaaaatttcatataatattatacaaatatattgttggggtattaacccaagtcccacattgaaagaataggtaaaagttgtcttgaatataagtattctacctactctattatatgagatcttttgggaaggtgtcaaaaacaaaatcgtgagggcttaggcccaaagtggacaatatcatactaatgtgggagtcaatgtgaggtagaaacaagtggtatcagagccaaagatttatgagcactgggatagtggattgcatttgcgatgtgtgggagaagccttcaatgtatgacctcgcgattgaagatctatatagtgccttgtatcgaaagtctaaggtagtttcgctggagggggaggccatgagatcgagagtctaaggtagtttcgttggaggggaggccacgagtatgtggtccttggtttgaggggaggattgttgggtatcaacccaagtcccacattagaaaaataggca

SEQ ID NO: 342625 - DNA, 806 bp, Cannabis indica
aaaagtattaaagccaagctcaaaagagaatttaagatgaaagagtttgggccagttcaaaagatacatggtaccaaagtctctcgaaactgagaggaaaggactattagtttcaagcagtctgagtacatcaagaagattatttagaagtttaacatggaagatgcaaagagtacatccgttcctttagaagtcagtttattctatcaaaggaacaatgccctaacaatacgaaagaaaaagaagagatgaaggatgcaccctatgttgtggttctcggatgcttaatgtatgtgatggtgagcacaagaccagacattctcacgctttaagaatcctaagcatgttaatgtccaatctgggcatggaacattggaaagcccttaaatggttactgatatatttgaagggcacatgggattatgatctgacctatgagaaaggaaaagaataattagagttgaaagggttcgtagacgtggactacgcctcgaatagagataccagaaaatcaaccactttttttgttttcttgaaaaaccaaaactatatatgcttgaaggctcagttacagttcgtggttgcactttccaccacggaagtagaatttatggcgactacggaagctttaaagaagttttgtggctttagggaataagttatgagttaaaacaaatcaaaggaggagtggttgtgtattcagatagccaaccatctatcaatctttgtaagaatccagtttatcgtaagaagagcaaacatatatgtaacacccgagattaagaaaaggattagcaaaaccctaa

SEQ ID NO: 342626 - DNA, 495 bp, Cannabis indica
tcacataaatattgcaacaaaagtttatttatttgaagctcctaatatagttagaatttaaaatatgccttattaaaattctagaagaattttatacatgttttaagtgatataaattttaagttgtgcacactatatgacaaaaatttttgtatgaagtaaagacatgtaagtaaattattagttaaaaatatgtatgattttttatgcattataaattcgtaaattatacgttgtgatagactcttgaagagtttttgattatattataaatgattgaagaacaaacttttatttcttttatatattgagaaatattcaatgtaaagtttgtttattagtagagaagtcctgaagtacttcatatgcatcaagaattatagatatatgatcatttgatatgaaaattaagatcatacaacaagatagaacaaatatatggttttggagtaccatcattgtcacaaataaaaatttatattatcattaatgtgt

SEQ ID NO: 342627 - DNA, 920 bp, Cannabis indica
ggttcaatctcaggagtactattcatgttctttgatttgttagttaaacctactttcgggtcagggcaatacgtacatattaggaacatgatagtatgattgagtgggagcgctaaacataaatatggaatctatagcttctacaggtatttagaagtaaattgatgatttcctttgagcttagctaaatagatgtaaatggaagagctcttatttgtgtgattatattttagttcacttaaatatcatttacaggtagctaagtgttttaaggatcaaaatacattgaggcgtgaaacggtaaattagttcctactgttaggctatttttagcctatattttggatcaattttatgtgcgtttttgactgtgttgggacacaattacgcttgttttctatgttttcaggttctttgggaacaatagagatctcaggatgaaaaagtccaataaaagacgagctgagcaaggaaaaacactttttggaggaaagatgcatatctagccgcggctagatacagcttggccgcggctagatcacgaagcagttttaaggctacagttgccgcggcgagatacaccatcgtcacggcaattcaagacttacagatgcgtgcttaaaatgcacttatttggtcgcggcgagaccacacttggccgcgacaagattccgtacggcccaggggtatttttgtccatcgaaccttaaaaattagttgtaaatagaaaactgcgattggaagtaaaaaaaaacaatttggaaccctaaaacacagcagagagcggcaggaagagcatagtgattcaagtgaagatccagaattcatccaccaacagtttctttctttatttctctttaatttctttatgttgaatattgttataggaatggttatggatttgtttctgaactaaattt

SEQ ID NO: 342628 - DNA, 522 bp, Cannabis indica
aaataagaaaaatgcaaaaaaaaaaaaatgaatactagaatagctgattcgaatggctgctctctaggttctatttatagaacatagaaaccctagagacagccacaaggtcaaatctaaagttgtacaaagctttcctaagatacacatgatctgcagcttcaaaaccagattctgacgtagcaaatcatatcagaaaaggaaacttgccataaacgagtctgatcttgtattgggtcttgatacctgctataaacagcgaatatgatctgatataatcaagataaaattgaacttaacaaggaaaatgataaagaacaaagtttcctttaaaaactaactttccataagagaatttcttctcttacaagaagtttccaaacaaagaaaaatccagctgaaaaatacatctttcctaacatagaaacgagcaataaaaaccgaataaacaaggtgagaaaatcagttatgaatgcaaataaatatcaccataaagtaaaaaatattttggcatctaacttg

SEQ ID NO: 342629 - DNA, 1018 bp, Cannabis indica
ggaatgtagagtttcaagtagggaatcatgtgttccttcgagtgtctccaatgaaggggatcaagcgtttcgggaaaagaggcaagttatgccctagatttacaagacctttcgagattctcgagaaggttggacaaatggcatatcgattagctttgcctccagttctttcagcagttcacaatgtattccatgtctctatgttgagaaaatatgttttagaccctactcatgtactttgttatgaaaatcttgagctgcaaccggacatatcatatgaagaacaaccatatcagatgcttgacagaaaggataaggttcttcggaacaagacaatagttttggtcaaagtactctggagaaacaacaaggtggaggaagccacctaggagttagaatccgacatgagagctcaatatctagagttgttcaggttagattccaaggacgaaatccttttaaggggggataatagtaaagatcgcttagcgttaatttggaaattagcagataattacggtttaattatgaaacttgattattagctttgaattattaatttatgatgatttatttgaattcagaatgcattttatatgtcatatatagaaattttataattttacatgttttgtgcccggtaacattggaacgcggtgtttggctattagaatcacatcctagtatttttagtataacggggcagtataattagacattgggaatgtcgggaaagttgagattttagaattgataaaaatacccctaagtgacctctatgatttttagtgtaggaggggcaaaatggtcatttttccaaatcatgttttgtcttttgtgggtttatattatgtttaataataagattttaattcaattttaagctgatatttatttaaaaaaaaacctttaagtcatttactcaaaattagacaatacatgaaaaagactctctttcaactctctccttctctctcttgaaatccctagaacaagctacggtttgatgtgtttttct

SEQ ID NO: 342630 - DNA, 1015 bp, Cannabis indica
tcacccatcctctaggattcttaaacttgtttgtgagtccaacaatgtaaaatttttcaaagatgaaatggaaaatttatgtgaagcttgtcaatttggcaaatcacatgccttgcactttaaattatccaattacagagcctccaaagtgcttgaattgattcacactgatttatggggacctgccccaattgcatctaatacaaatttcaagttcatttcattgatgattttagtagatacacatggctttatcctttgaattacaaatatgatgctctaaatgcattcactgattttaaggcttttgttgaaaatcagtttgaaactaaaatcaaaagtattaaatgtgattggggaggtgaatatcaagtgtttgaaaacctagtcagggaaaatggcattcactttcaacactcttgtcctcacacttcagctcaaaatggaagagctgaaaggaagcacagacatatagtttaaatgggattaaccctccttgctcaagcaagtatgcccttgaggtattgggttgatgcttttcaaacctctgtatatctcataaacagacttcctacacccattcttaagggaaaatcaccatttgaaactcttttctgcagaaaacctgattacaagcaactcaaggtttttggggctgcttgttatccatgcataagaccataccagcaacataaattccaatttcattccttgaagtgtgttaatctaggctataatgattcttatagagaatataagtgtttgagaactataggaagaatcgatatatctagaaatgtagtgtttaatgagactgattgccctttccaatctggttttctcaacactcatgcactagaaaaagagttagttattcacaatgagtcttggtctcaaattcccaatataagcttcaaacatttcagtgcttctacgccaaatttacccactactataccatctcaagcacctcctgaatccacttcagcagcaacatcttctcaacatcaggtta

SEQ ID NO: 342631 - DNA, 540 bp, Cannabis indica
tttatttttttttctctttcccctaatagacccccctccttttcaacttctctctctttctttgtcttgctttctttctctctcgaaaagtgttagggtttatgccctaaaaattctataaagacattttttggttattaatatagagttgaacattttaatatatgcatgaatgttaaattattaatatttattattaaataatttatatataaatatcaaaaaattccttattcatatatgaggctgtgacttgtcgctgtacaaagaactaagatcattttgctatgaataaaacagtcaacaccatattaaacttatgtaatctcggttcgaattactgatgtagtatgacatcaaagtgaaggtgttgtatataagagagattatatataacaaggactgatatgaataaagttatttttatctaacatatcatttactataaaacctaattcatatcataatgatgatcagcagtagatcagcacaaatcttgagtaatcatgaattcctattcatgttattagtttctttgat

SEQ ID NO: 342632 - DNA, 571 bp, Cannabis indica
gtgttctttgtttgtccttcctgcattatgtcttctctacccaaaaaccagataccctactcgaaggagccttcctcctctaacattttctcagggttgcagcctttggatcctgcttttctttctttgaaccccttctctagctttcgtgatttcgaacccgctacacttcctccactacatttttcagaggtctgcagctgtccctgctttgagcaagctgcattgggccttggaacttatgctgtttctcgcatcgatgctgcgctacctttggctatgtgcctttcgctatttttcctcccacattgacactagttgaagcggctaaggaggagcctgaaatatcagaaggaagttcgactcagacgacgacggcttattatcccgagattgagtctactgcccaatctgagtacttcgaagaagtccctgctcctacggatgcttccccctcagctttctgtatatctgcttcttccttccctcaagagttacctcgggtggtatccaagatcatacgccccccttctttttccaaccatcgggggtggcttgcaatgcagaggac

SEQ ID NO: 342633 - DNA, 648 bp, Cannabis indica
gcacaagggattgtgcattaacaatcagtgtgcttgattgttgttggtaattcattactaattgctgttaaggttgtatttgattcctttagagagaattggaaattgtaatatgaacctttgagaattagtagatgaatttaccctggttcggggaacccaagcactagtcggctgagatgtgttctcagtgcagatgaagcttgtaaattgttgtgtgatttactgcttgactattaattcatgttcataattcatatcttgaaatcaatcaatctaaagataatcaacttggtaatttggatcattaaaatctacaagttacactttcaaagtgtgagtcgacagattcagtaagaaaagcataaagaataacgtagcaataacccgggctataatcaggcgcccatacacctaaccattaccctaactgagtcaggattgttctcgacaaagtattactaactgtgaatccagcctatacttagtactctaaacgtactgatgtggtagcaaataactcatactatctcatagcctagcatatatctattggcacctcggtgcaactctatttacatctcattcatggtttgatatgctaatcttatggctatagatttgcctattctgacgacaactaacatg

SEQ ID NO: 342634 - DNA, 622 bp, Cannabis indica
atatatgtaaatattaaaattttaaaatcttattacaattataataaatttatactttaggtttttattgattacattaataagacatttcaatagagaaaagaaaattaccaaatttaacaacaatttcaatgattgtgggatattttcttataaatgtggaatcttttcctagttttttatttatttacatttattattcattattttgtaactaggaaacaaaaccgcacttcgcgcagttttgaagcataatttaaatatatatatatatttaatattatatttatttgattaattataattttttaaaatacatatttatatatcaaaaaacatataatgaaagtgttaaatttataatttttttaaaaaaaattgtatttataaagttatgtttgtgtaacttgttttatatatatggaaaattttattttcaccgcacaaaattataaataaccccaataataaaaaaatatatataaactagaaataattttagaaaattagtcataatattttttaaaaattttcttttttacattattttgtgttaatttctttgcctattatactcatataatatcattattttttttctaaattatgtacatttttttat

SEQ ID NO: 342635 - DNA, 744 bp, Cannabis indica
atgatagcccgatcggagatcaatctttgtgaagaccgtcttcccctgaagttgatcgaaaaggtcatcgatcctaggtaatggatatttattcttaattgttagcttatttaactcacgatagtcgatgcacattctcagagacccatccttcttcttgacaaataatacgggagctccccagggtgacacagtaggctgaataaacgctatgtcaagcaacacctggagctgaattttcaattctttaagctcaactggagccattctataaggagccttggaaaccgattccactccaggtgctaaatcaataacaaaatcaattttccgctgaggtggtaaacctgaaagttcttcaggaaaaacatctaaaaattcccaaaccaccttgatgtcttctggccgaacagagtctagctgagtggtatctactaccacggcgaaaaaccctagacatccgtcacacaataattccttagctgataaggccaaaatcaaggggatctgagatccctgaaccgaactgacgaaaacaaacggttcttctccttctggttggaagattaccatcttcctcttacagtcaatactggctgaatatttggataagaaatccattcctagtatgatatcaaaatctgctaaactcatctctattaggtcagcacttaactccctatcatcaatcctgattggcataaaccttaaccaccttttggagataactaactctccgccagg

SEQ ID NO: 342636 - DNA, 981 bp, Cannabis indica
gatatggctcaagctcctcgtcaaaattgtatttccctaattcccccacttgatatctcatgcacttgtcctccagctcgtttatctgcaattggattggatcctcttgctttggatcaagctgttggcgaaggtcaggttctaattcaagtgctctcatagatctggttgggagtaattgctggcagattttgtcttactcatagatcgcgtcctactcatagactttgtctttgagtggctcgcagatttactggttcccatactttctcgattatttgctcgttgagtactttatcctcataaagttgatcgactatgggttcttgatcgccttgaagtcacacttgcttcttcacgttctgttccttcctcccgagagcagtttgtcgtatttctcccatcagggtatgtacgagtccttgctctatgggtttgggaagaatgttggtgatttctagcaggtgatcttcgttctcccggttgagtcccaagatcttcctcattttcatgagggatttctcattcataagttttcggttgtctcccatctggctgttcgtcctgattttcaaggggtgtctcattttccctagcttgttcttcccgggccttttcatgtctcctggttcgtgagccacgaggtctgccttgtggtcttctcactccaggctcaggttgattttgaacattcatcccttgtatcgccctggccgaggctgcctcacgttctaactcagcgtttcgacgttgcgcttcttccaggcggtgacattctgtttcataagttatttctcccatagattgggcacctccacgattgagcttttcatccctcgtcttggcgttctgacccttcccacgctgagttctcctctagcgtgttgtccgcgtactaggacctacgtcgggttgagttctccaggaacgtgtgctccgtgcgctgggaccaccctcgggttgagctctcctggaacgagt

SEQ ID NO: 342637 - DNA, 554 bp, Cannabis indica
acataattatccatgtaataacattctatataagtgtctgatgtatgagtgttattagctagcttatcatgtaatgtaattctcttgttcccccacccccacttttttttttctttattttcttcccaatatatatttggctcagaaagcatagattttagtttcacatttatttgtgcattctctctctttctattggaataaaagaataaatatgtatttatataattattattgtttttcttaattgaacaaatataaattattattattgtaattcttgtaattttttaaataaataattaaattttaaataaaattaatatttacgtgcttcggcacgtaacttctacctagtatatatatatgttataaatattattaattatgtgatgtccaaatcttttatttattactattaatgtaatcaacattcccttttttttagttttcttttttcttagtttcttaatatttgactcttgtatgtgtataaataggagatcacctaatggaataaaacactcagaaaattctcatctcttctctatttt

SEQ ID NO: 342638 - DNA, 838 bp, Cannabis indica
aataaacacatataaagttagaaaaccttacagtgggtgcagtggaataatatgactccttccattcagatttctagcccttgattcctttgtgtgtcagagcataatcaagatctgaatctggatcttcttttctctttctttgatgcagaatttccatagtcttacatactatgattgagataccacttgatgtgtgtgggcactactcatcactcaaggaatttcgaaacttagagagaagaaaagagagaaggtggtgtgtggccttttctgaaggaaactgatgttccatgttgtgtgtctgtttcctgaagccaacactttctatttatagaaaactctctaggtttaggttagaattgtgtggcattaaaataatgaaaaaataaaatggttaaggcctatgcatagtggccggccagaacaggaaattgggcctcactttgcaactttcccattttctccaaaataccagttttccaatttgaccattcaaatgccaattctaattatttaataacttgaaaataattattaaataatattgccatttaatatatttattaatttagacttgtaaagtctcttaatcaataaataaacctagaatctcttttctttacaatttcacccttgcttagtgaaaattcataaagtagacatagtctaacttttagaattataattgattaattagaattaattaactgagtcatacaagcagtatggtctcaaaaaaatggggaccaatgggtctatatagccgagcttccaataagtcgaaccgaattcaccaagtaaattccctaacttattaattcctcattgaatccac

SEQ ID NO: 342639 - DNA, 686 bp, Cannabis indica
aaattgttctatttattatatttacgtttctattgatttaaatattgatattcaatgtaaaaacgaattgataattaatcaagttctatacaatcaacggacacttggtttgtatataaaagagtgatccaatatgaaatgaataagacagaaacccttgcaacagtggactaagcagaccgtgatctgactgaaccactatacttccattgtgttattaatattttctagtacgtctgagtgtccattctttgaatactcgccattctaggtggagtaatcgcatacttttataattctattttaatattttatttggtgttgtcaaaattcctccaacaacatttggcaacatttatgggaaagaattttactattgatttcggaggaaaatcataatggctggaaaccagacgaatggagataacaacacaggttctttcaatgtcagaataatgaacgttccactcctaggtaatggaacgacacctgttgacatgatcaatggaggagtgggacgtactactgtcactcccctcaacttgtttcctgaaaccatcggtcatgctggagaaacttcaacaccggcaaccaccatggggcgcttcctgcctatcacactagctgtggtgtccgaaggaattattcaactaaccacgacccagtatctactcacaagtatgttg

SEQ ID NO: 342640 - DNA, 709 bp, Cannabis indica
aaagagttttatttagggcataaaacccaacaaaccgaacctcggattgcttgaacaacaaccaaagaatccatctcaacttcaactgagccccatttgtttcgctttatccaacttagagcttccttaatcccaacaacttcagctatggccgagtccacgaacccctccaagaggaccgtgaaggcttcaatgaaccgaccatcatggtctcgagctacggcagccgctccaaactttccgtcatttattattctattattcttttctttttatagaaaacgataatttattgaatgaaaaaaacaacattatagttcagaatggaacccacatttttttttgaagttaggatgatacttccatcaaaacatcgtgatggagctgaaacaaatatcagataaaatggaaaattcataccccttcaaattttaaaaaaaaattattcatttatacaagtggctaggggtatgcaaaaagtcttttaattcaattacaactggccgatccaaacccaaaatactgaatattggacttttcacaaaaatactaaattttaggtaaaagtttatagttttattgccacacgaatttttttacaaaaatactgtaattttataaaacaacctaaaacaaccgtaaacaacaaaacagaacaattaaaacaaattgtaagaaaactaaaaaataaccgtaaaataaccaagtg

SEQ ID NO: 342641 - DNA, 689 bp, Cannabis indica
tggaacgtctaccagtactcaagagcaatggacaatggaatgaagatcacaattatgtgaactatgtggctagtggagaattcataccaacaaaatgcaactacgaagagctactgcaaatactgcttacttcattggggtgcgaaaacaccagcacaacactacaaatacagtaccaagctaaagaaggaataccaccgataaaaatattcaacgatcgaagcctctacttttacttggaattgaaaatcaaagaaacagatttcaccacatatccactatgcgtcaaccagcaaaacaacaacacaacacctgctgcaacaccaaatttgatatccacaacaacaccgtatgaagataatgtggcaatgatcgaaaacaacacaacaacgcttgaaaacaacataacaacaacagaatcatacacaacgggacagcaaacagaagaaggggaacagtcagaaacaatagaagatgagaacgacaaattcgacataattgactatgcaaatctggttgctgaagaaatggtagaaaaacttgaaaacaccagtaaaaaactggatccagaaatcgacatcaacaatgcaaagttaataacagacaagcatcaccccgaagtggaaaaaggacaggcatacaaagacaaggaaactctaaagaatgtcctcagctactacgcaatcaaa

SEQ ID NO: 342642 - DNA, 794 bp, Cannabis indica
aacaacaatcaagaacactgattgttaatgcacaatcccttgtgcagcaactgagctcttcttcaacatgtcttcaatctgaaatcccttcagatctgatgatgaagatgacactgaactcccttcagtttgaactcagcaattccagattcagatcattccgccattgatgaacatcctcaagctccaagatctgacctgtaatcacaacaacaagaaacaagatacgactctctctccacacacaaccgaaataactgtctgaacgatttaattgataaaaactttactaacagaaaccgactatttatatatccacaaaataagtccacctggcactaactaatacttaactgaaactcacgtaacagaacgctagtgcagatataacagactaaaaacccagatacgactagacattgaacagaacaaacactgtcacaaaataatgacactaacattctcccccttgacaggttatgttcaatgactaacaaacaaaactaaagaccacaaaaaaattaataatccagatataaatgtctttaggaatataaacaaagccactacaaaaacgtaacgaattacaaatatctcccccttcattgaatatgatctgtgggttcctgtgctgtgccagactccccctgggaaggtggtccagtcgacaccaagggtgttgcagagtcagctggaggatctagatcaggttgggctgaactggtgacaggagcaaaggctgaaggctccccctgcatatgtgcattacttctagacgtgtctgatgatgcacc

SEQ ID NO: 342643 - DNA, 678 bp, Cannabis indica
tcgatccaagaaaaaacagtaataatatcgttcgtgggaggtgtcactttaaaaaataaagtgacacctcacccgccccggtcggacggcggcggcgcacgtgtggtggtctagtgtgtgagtcctcacccatgcgcacaaaactaggtaccccttggggcccaaacccatatctcaaacttgcactagatatacacttaaaatgtagtgtttctatcccatgtgggactcctactcacacacttcacttttttatttttacataatttcatacaaagttccaacagtagaagatctatcagaatctcttggagtcttctattgaaccaaagtgagttcttagctacagtagacagtttcttattccacacaagatcattcctatgcctccacaatgaccagcacatcaatatcatgcccactaaagaaacttcatcacctgtccaagccttacaaccttcttgaaatcaggccgtgaaagtacctttgtagctatctccgcctgaaccaatgacttccatccaacaaacagtgttgattctgggaaagctttacaaaaagaacacaacaaatccacactaagggctcgtttggaacgccgtattaggtctattgtattgtattgtattgtattgaattgtattttatacaatatttttatgtaaaactatatgtggt

SEQ ID NO: 342644 - DNA, 986 bp, Cannabis indica
ccaaaatctaccagggccggtcggccaaggattgcattataagttgtcgggcagtccaccaccacaaatgtgcagtacttgaaagtgctttggggtgtgtctgggcacaaggtgactgggagcctcacttttcccatcaggataagtgttgttccgttaaaccctgtgagttgggaaccacttggtgaaagatctcagtctgttaggcctattgcagtgaaggcctatttgaataacagattcatagaactcctgttgtcgatcaacactctggccacgatcttattggcaatgggagtttctatgaccaaggggtcacactgtcctagcatcttcttctgtgaatgtgatgggttggtccattagccggggcctttgagctgggagttgagtaacctcccaaatctcatcgtgttttacggcccctacgtatcgtttgagctccttacgggtagttcccccaatgtggggtcctcccaaaatcatggccactctcccgttgggtcttggtggcaggccgagaatatgttgagcatctccggagggagcaactggggccagtgctcctgctacaccccctggcgctccttgaggcaaagctccagctgcttgaaccggattgagatgtggcaaccggttctagttccactcgtagagatgtcccaatcggatcaagttttcgatctcatccttgagattcttgcattcattggtgatgtgcccaatgtcattgtggtattcgcatctcttattggggtccctccgggagctgtccttgtacagaggaggcggtctccggtagtgcgtatttttcctggtagcaaaatatacacgttcttgggagtccgttaactccgtgtattgagtgtactggggagtatacccccttttctgccgcttatcctccgtccggttgctacctttagaggaccttttgctccgagagccttgagaaggaccgactagacttgcggtcggagcggagt

SEQ ID NO: 342645 - DNA, 1687 bp, Cannabis indica
tcctctaaatgcaatgggagttggcgagaagaagagaattgcgcatggaattctgatgagaaagccttccacgagttgaaccttcctggtgtcaacttgaaataccattgctgggcgacttctaagagtgtggcaggaaaaactctgcaacatacatttcctcgtactccttgtaggtccatttgcatttcaaaatatttgagatgtgataagggatcttctttcccagtatacatctttcaggttagcatcttgaacttgtgaggcaactctagaacattgatctctagagaaaaaggggatccacgtgctcggtccaactttagattgttgttcttctgaccggctaggccttggaacatatttttcagttcatccaactgtgcctgcacagatggatgaacttgttcggtctcttggccgaccaaggccacatcaggatctctttgagccagattttgagcatgggccccgggctaagtggctggcgagacatacggctcgtctaaccctctccttctgtttagattatccttgagatcatgagttgtgcccagtctattaaatattgatgcattaggttatcttagtgactggttggtttggccgatcgcttggccagtttcgttaacctgggtggagttattaggtataacctctcttgacaaattactagataaggtatggctgcctaccacttggcccacatgtggaacctgtgaccggggattgggcggctgaccgttcagagattgagaagcgttcccggctagatcttcgtctgactcgcccagcgggatgatggttgcaggttgatgattagtagcctgataggcccttcgtatcagtatggtggcctgtcttgttcggttgtcaatggctgcttgttgagccctcaacgtttccacctctttatccctccattcagcgaacagacgcctttgctcttcaaatgtaaggttcactgcaacacggagctcttcctgatcgtgatgcagagtgttaatatggccttgcatgagtccaagagcatcaccgaggttctggatctcggtgttgtctccaactgttgtttggatatttgttgctggcaaaattccagcgctgggaataccctgattggctgctgaactggtatttccagtctcttgcacaccaggcgcgattccattcaaaggagacgtcacaccctgacccataattggcggttgttcaggatttgtggctggtggaacccctgcatttcctggattctacaatgcaggatccactactggtggattcgctggatcgagcatgcctctacgagtctgtaccactatcgtgtttatgagtaaatttgaagtaaagagcgagtttgtgaccctagctctcaatgaaagtaccaaaatgttgatctcgcttttagctaacgacaataagtcttaattgtaagcaataagtgatataatttaaatataatatgaaaagataaataaagaacacagagtttttaaagagattcgaccccgagcagttcggtaatagcctactccccttgatttgtattgacttaagaacaaagaatacattgattcttctcttagagctcttacagtgaaatctctaagtatactctcttagataattctttcgacccttttgcccagtgagaatagatcactatttatagggctctgtgcttgag

SEQ ID NO: 342646 - DNA, 1865 bp, Cannabis indica
aacaatcctttcagattgttactagtccacggggccacgcccagagataatggttgtagatcttgcacacttaaccccattttctccaaggttatcttatataacaagttcacgctactaccgttatcgaccaagactctccttaccctcctgttggcgatttgagatgttatcaccagtgggtcattatgcggactttgtacatgatgagcatcttcattggaaaatgttatggtttggtcctccattcgactttgcttgggagcacgttgttctggtgtgaaaggagtcttatctgagttcttgagctcattaatatatctcttttgagccccattggtggtccctgcaaagtgtggtcctcctgatatgaccaatacgtcctctccttccacaagtggaggaatgtccgggttatgtcccagttgtcccccttgtggttgtgtcggcgggttaggagtattgtttccaggtgccccctgtggttgcacattggcacgtggggcaacaggttgttgtgcatttgctccttgttggttgtattgcctattccttgcataatgagcaagaggcccattacgtataagagtctctatctcatccctcaagtttcgacactcgttggtggtatggccaatgtctttatgatattggcaatacttggatggatctctcttcgcacgacttcctttcaagggttcaggtatccgaaaggccacccgatgttcgtttgccacatatatggtttcttgtgtctccacaagttcggagtatattgtgaacatggactgataacctttgctctttttggcattgttctgatctcctccattgtcgccctttctcttattattgtgcccagagttattggtggctggagggttggcagttgttgcttttggattggtggaagttgttgttgtagtagctgaaacaggttgtcctgagggaagaggcaggttgttagctaacctggcttcctcaatgtttatatatttttgggcccttttcataaattcgtcaatagtgggggcacctctcccttggaggctatcccatagtaaagatccatgagttatgcctgcccccaaggccatgagtctcccactgtcatcaacgttcttcaccttggccgcctcgatgttgaacctattaatataggcctttagactctcaccgggttgttgttttacattggccaaggaagagcattcaggttttcgagacctggcagcacgaaattcttttttaaaatcactcgacaatttgtcccaagaggtgattgaatgcttcttgaatttgttgaaccatgtttttgctgctcctgtcaaggtcaccgggaataacatgcacttcagatcgccactcacttggcttgtcctcattaatgtgttgaaatcactaatgtgggctcccgggtcagtacttccatcatattttgtcatggtgggcatcttgaacccttgggggtatggcaatgccgagatgtgtggagcaaaaggctcaggttcctcatcagaatcgtatctgctgactcttccttgggcattcaataactgctgaatttgatgttctaatgctgtaatccgtgggtcatttaaaacaggagcaggagcattgagactggctggtggaggagcgttcacattaagttggggcgcatattctccttgttgtggaggaatgtcatactgtgctcgataaggagcctccctctatgcgtgccccctattcaagtggtctctcaaatcaggttgtcgcctttggttcagatggtcccgaaggtttgagctccttccgtcatgtggggggtatcgaggatgctcctcataatatggaggaggtgcattgtcttgaatgctcac

SEQ ID NO: 342647 - DNA, 832 bp, Cannabis indica
cttgagtactattaagtgttgtagcacaaacaccttgtaccttcccgtacaagtggtggtaacaccacgatgtactttcaaatatcatacactttaccagtgcactctgtaccgcaaccatacaagtgttggtagtgtatgaaccacaacatataagcatgcatatacactaaacatatacatagattcgcatatccatatcacacattatatacagttcttaccttctttctagattcaagtgtgctggctgacctaaacagaaagtcttgcgctaaatggatgccctaatcacataatgaaactgggtaaatcacatgatcaaaaccgtaatccgggaaacctgaacccacaactctaggttctgttatactctctagtgattacactaactcaggaaacaaggaaacacccatctacgacactaaaatggacgagaattgagaaaatggaacatttggggaaccctgcaaaaactgactaaccgattttacaggtactggtaaaattggctacggtttataccagttcacccaaaaattccatttctgttcaaaactccaccaaatgcaaccaaaccttctagagtacctaattagggtaatgtgcaatatattccaaccagtaattccctaaaaagcatactgaatcacaatatgccattaaagatcaaagcttaggtttttaaattcaaacttgcataaatccaatcccagacaccaaaaccagctgcaagaagttatattcaactcaaatgaaacccatgcttcgaactacacaaaagctaaaccctaacaacccctaattttcaaaatcacctaatcaaaccaaa

SEQ ID NO: 342648 - DNA, 942 bp, Cannabis indica
ctagggccaaataacatccacttcaacatacaaaggcataattgtcatttcatactcatttattttcaaataaaaattcagattatccaataccaaataaaatgccaatatttaattcccaaaattgtatttcgggcccgaacccggttcgacccgaaatacccggttgtgactataccgcaccaacctgtcagaacacacctaaaaaagacaacacatgcataatatataataatatagtcccataagcacgttaataaattaatttcactgtttacccttctcgggtcaaaattactaaaatgcccctagctcaccaacggggtcttaacatagcataaatcatataaattctcatatattaaattatataataatataatttcctcaatgatacataattatctagttaggattttgctaatccatttcttaaatttagggtattacagttgttctttgagcaattggcccttttcaaccatgatcagactgtttttgacaaaaagcttcaatcaactagcaaagtagtgagtaagttattttttgttggattttatgccctaaataaaatttatttcaatataattagatttactaattaataaaagatcaaaaattattttatgttgcatggttcacatgatttatttcataattatatgtttaatgtataaattctattaaatttagaacatatagttattcatgattatagtgttgtcaacacagtggaatataatcatgattatatgtttcaaagtttaagtcccatgtcagtacactagatttaaactgacatgataaattagcgataaaatatacttacaccttggataagtattatgttctttctaggacattggaaaagtatgctagtattagatgtatggagtatacatcagattggaccgatattgaacttggataatatcataaact

SEQ ID NO: 342649 - DNA, 510 bp, Cannabis indica
tttataacctaaatttctttttcaataacaatagtgcgcccagcttatatatttataggaaaaaacctgtatcgcagggagggtttctcacagaacgcaattgactcttacacaccgagaggaaattgaagaaaaaaattgattcgataggagaaaaagataaaaaaaaaatattttcatggcatcaaagggaaaagttaagagacaaaccttgattgtgcaggagttgttgatgatggagttggcgaacggcggcgtgggtgatcggggacggagaagactcctacgagtaaaggtgaggagccgcagtctatctctggattttacgaatgaaaaaaaaaatcctaagtaaaatgataattttttaatttgaatgagggtaattgggtcaactaaaaaattcattaaacctaaattttagcttcccgtaaaagctaaaatctaaaagttggtgtgggccaactttaagtaaaagctataattttagcttaaattttaaaaaaagctatt

SEQ ID NO: 342650 - DNA, 745 bp, Cannabis indica
ggttgtgactataccacgctgaccaatttgtcggacaatgctttctagtttttggtctagaggtagttgagatggctaatgctttccgcactatgtctcctactgagactcaaggactaggtgggaaccttttccctaaggaggttgaggtcacaaatactgccaaagtcacggatgacactgataaggtcgtagaagatctcaatgcccctgctacttaatttatttttctttcttcaaactttttttgagcggtacacgagtactcgtgctttgtacttggttttaaagacaagttaaactttacacttccttggttttagttggcaatttcatatccaggagggcttaaatcttctttggattggcttcaattcctcgggcattgacaataaagcccagattcttacccgagctgactccaaatgagcaccttaagggatttagtttcatgttgtatttcatgaggactttgaagcattcttccaggtcatctatgtgcccctagccttcttggatttgacgagcatgtcatccacatatactttcatgttttgtccgatctggtctttaaacatcttgtttaccaatcttcggtatgtggctccatcgtttttgagaccaaatggcatggctttatagcaatacagacccatatctattcgaaaacttgtatgttcttggtccggtggatgcattctaatttggttataccccgaataagcatccatgaagcttaatattt

SEQ ID NO: 342651 - DNA, 542 bp, Cannabis indica
ttatcattatttaagtaaacactctttctcgcaatgtatttttttatatatatatatcttaattatttaaagttattgttatcattgtatctcctgttattatcacctcatcctggctcggtcctggtcccacctagccgtggggtcaaaaatattttgtcatcttttaaaattacatatttttttttatactaattttgaaaaatacaacattttattctaaataagagcctaaaatatttttttttcctttgacctactaaatttcagggctgaccttgacctcatctcaccctttgccatcaccatatctcaccgattgtcatcacaatatctcatctgttgtaatcaccgcatctcttatagtcaccactattgtccttcacaaatctcaatactaatttcacactactacaatgttagcctttagaggctgttttttcacccctatttatggaaagggaagctaaagggtgtgaaaatacccgctttggttgaaattgacatttagaggcagttttttgataaaaaccgtaggtata

SEQ ID NO: 342652 - DNA, 535 bp, Cannabis indica
tcttagtcttttattcattttattattcttctattgtaatctctcatttatttctaacaaactctcccaatggtttttggaagatgttgtggcatttgaccacgtaaggtgagttcgtacgacggaggatctccatctcgcggtagagctggggacagtaatttgaatcggatcgaatattatcttggatgatttcagagcatagaattttgaggtttccttatggcggactttgtaaactgttttgccatctccccttccgagaacttgaatcttcttgagatcggtagctgagtaaggcgcagaggaagatgaccagttgaattcggtggcggtgggtggaagtgagaggtagtgggagagagatcctttttcttatgtttagaaatattaatttttaaaaattatcattttatgtatttttaattcttacaaaatgatttaaagaattgaagtaaatttaaaaataaatatttctatttcagaaaaaaaaaagatatataattataggttaaatggcggcaaaacccccaat

SEQ ID NO: 342653 - DNA, 557 bp, Cannabis indica
tgcctatctcactataggaaggcccattcctgtaaccttcaccggttaatttcagacatctgtcagtaagacttataatcttgacgagtcagaagctaacattcaaatgagcctcgagaaactctctgttaataagaattgcgattgtcacaaatgaagcattaagctttcaaacaaagaagcaacaaggcgtatattgtcgacctcagaaggataagaaaaaagggtctagcttgctgtcacggtcactagaaccaagctcttgtcgagacatcccagaacgtaacaattaaagatgtgtttaaacacaccatcattttgacccaataaaagcgggaaaatcacagctgtgtgattttcaaataataactgcatttatcctacgtgatttgtaatcaaaccctatgatttcagaggaaaaacgctgtcaagattacatttaaccttttatttaactgcctactatgtaattataaatagtggcaagtaagatcaaaaaaggggacgaaaaaatcatacaaaaatggtcctgaaaaactatcagaaatctaataaga

SEQ ID NO: 342654 - DNA, 820 bp, Cannabis indica
caaataaataaatatacaacccattttaaaaaaaattacacaaatactacttataacacaccttcaacccagaatccacgcttcttaggcaaccatcgcgcaaccatcgtgcaaccacgcagcaacccaacgcaactgaagcaaaaattcaacaagaaagagaaccaccattaattttgggcaacttcacctaagaagacgaccagaatcaataaaaagagggactgttttgaattcataaaaaaaaagtgtagaaaaactattacgaaactaaaattcaacccggaaatctagtttaatttgcataaaactaatgtcctgacttcaattttcagatacattaaatgcagatctcaaaaagttcaactggagttctcaaacaatccaattcaagtataatccaaaaaataattaacatcaatactaatagtaaaatttttatcttggtgtattttcgttgacttcctaaaaattcctaatagtgaaatttgttacatattaaataatgaagagacatgtaaatagagttacgtacgtggaaatactgttatgatttttaatgtttcataatagtacttacagttgcataaatatttgctaatagttatttcgtctgattgaaaccttcgtctgatgcaaccttcggccaacacccagcaacaacccacaaccttcgtctgattgaaactttcgtatgatgtaaccttcgaccactacctagcaacaccctgcaaccattgtctggttgaaaccttcgtctaatgcaaccttcggccaaccacccatcaactaccttgcaaatcatcgtctgatttgtgta

SEQ ID NO: 342655 - DNA, 738 bp, Cannabis indica
ttggaagtcaaggatatgcttttgatttgaggtacgctttctttaacatacttttatgagaattttttttcttcatatatttagataactcttaaatatttagagtaattttagaaaaatattaatttaatacatttacttagatgtatttaactgttcaatttaatttttatttatggttactatatataatttatacataattaaatacattaataataaaataatgtaattagattttaaaaaaaaaaaataaactatgttatcacacaaaattctaaagctcaagaaaagttctcatgtagtcggtccctctggagtcataataaccgactccataaggaccctatggctacggttatttcataataaatgactccataggtctcttacggagttaggtattcatattccctttagcgtcatctgaaatagcgtgatcataaattttaccaaaactaacgctatatgcccaaaaaaattgcctgcaaagcccttttttgtagtagtgaagagactaagataagaaaaatgagatcaaaataattaaacttttatttaaatgggaatccgcaacggtttaaactgcttggtatacaattcccaactgcttaaaaccattgggaatagtgttcttgactattttaaaccgttgtggattccctttacacctgatgtaacgccctgtccaacagggacgccacgtgtgtgcactttatttaaaatgccaataattat

SEQ ID NO: 342656 - DNA, 889 bp, Cannabis indica
ccaaaatctcttttcttcacaattaagcccttgcatagtgaaaattcttaaataagacatagtctaattttagaattataattgattaattaaaactaataaattgagtctaaaagcagtattatctcaactagtgaggagaccatgggcctatataaccgagcttccaataaggagatctagaatttaccaagtaaattccctaacttattaattctatcttgcgccactataaattttgaattgaattacactctcaattaaatagaacgctctatatgtaccaagatatagatatgttatgattatctattgttacaatcctaatagtcaaaggtcctctatagatgatctacatcgaaaatggacaaatttattgttctacccttcaatgtattttatctgtcaaacgcttagctacctataaatggtattatagtatactgttataatcactaaattgaggcctcaatcatttatctctattaagccaagcacaaagaaaatcatcatttcacttctaaatacttatagaagttataggtttcatatttatgattagcgctcccactcaattgaactaccatgttcccaagatgtaaatatccgtcataaccattggttagcttccatgaacaacttgaaaaagacaaataatacaatgaagatgaacctagtcatatcaggattaagatacatagacctaagatcaaccagtgatagtgacttagaaagatataaaagtaagtttatgatatcttatccaagttcaataatggtccaatccaatgtatactccatacatccgatactagtgaactttgtcaatgccctggaaaggacataacacttgtctaaggtgtaagtataccttatcgccgattatcat

SEQ ID NO: 342657 - DNA, 540 bp, Cannabis indica
ccctgagcaggaagggtccctggcaggtaactagtatgattcatatttcacctcggttagcagaggacatggtcagatcaagcatcgagtttgttgtaggtaaacttcataacttgatgttgcaatctgatctgttagaacgaattaaagctgctcagttaactgatccagaattagtgaagatcggggaagtttctgctggtcaagtcagagattttacagtgtcagacagtggaatgctgctatttgagaccagggtttgtgttcaaagtggtgcagaacttagaaataaaattcttgaagaggctcataccactccatactccttgcatcctggcaccaccaggatgtatcaagatcttaaaccctacttctggtggagcagaatgaaacaatatgtggtagaattcgtatcgcgatgcctaacctgtcagcagatcaaggctgaacaccagagatcagcaggtttgttgtagcctttgacacttcccgagtggaagtgagaagaaatcaccacgaactttgtggttggattaccta

SEQ ID NO: 342658 - DNA, 423 bp, Cannabis indica
tagcgctcccactcaatagcactatcatgttcccaacatgtacgtataacccagaccagaaagtaagcttaactaacaaatcaaagaacataaatagcactcctgagattgaacctaagcatgtaaggattcagatcttttgatgtaagatcaaccagtgatattgacgtagaaagatacaacggtaagattataatatctttatactaagatcaacatcggtcccagtccaatgtatactccatacatccgaaactagcatactttgccaatgttctggaaagaacataacacttatccaaggtgtaaccatactttatcgctgattatcacatcagtataaatccagtgcactgatgaataagggacattgtcttttgaagcatataattgttgggttttatgccctaaataaaactcttt

SEQ ID NO: 342659 - DNA, 767 bp, Cannabis indica
tataacatattcgaagcctctctatgagttgcgcgacaatagacataactatcatcggcaaaaagcatatgagatataaccggagcactagtagccaccttgcaacctttaagcctcgcatcccgctcaaacttccatatcaaagatgagaagccctcagcaccaataagaaataaataaggtgatagaggatcaccttgtctaatacccctccccggaacaatcggaccaagcttatgtacgcctgaactattttataccacacacggctaactgtagcaataacaagatcaacgaaacgcaaataaaatcccattttactcatcataggtcgaagaaagccccactccacacgatcataagctttactaagatccagtttgagcgccatatatccttctttgcctttacgctttcttttgagatagttcataaccttaaacgctatcataatattatcagtaataaggtgtcccgggatgaaagcagattggtttggggatatgatctgtggaaacacttctttcaaacgattggcaagcaccttagacactatcttatacaagacattgcacaaagatatgggccaaagagcacccatcgaagtaggttgtttcttctttggaatcaaaacaatattcctgtcatttaggtcatcaggaatactgccatccgcaaagaattgccaaacttggtttacaacatcgctcttcactatttcaaagtatttttggaagaaacctagggtcataccatcgggactagga

SEQ ID NO: 342660 - DNA, 685 bp, Cannabis indica
atttttggacaattttatttatttattgaaacgttttgatgggattattttgccatatttttgtaatcatttcttgtaatacccaattttatttgttgacattttcttataaaagagatttcatgtttagagagtaattttttttttttggtttctttatgtgtttgttattttttagtttttttttccctgaaagatcaacttcattacaatttaacatttcgaatacaaaatagtactaagttcaacaggaacattatgctcgaaaatactatgaccagagtaatattgagaatttttggcaacaaaatatgctactcgatttggtgatcgtctaacaaaatataaaccaacattattcaaggaagaaagtaaaattcgacaatcatgaataattaaactaaaagaaaaacaaatcgctttttattgattcatttgagcaaaaatgatacagagtctggtttatatacaaagaggtaacaaactaagtaactgtatcacttcaccaaaagctaacaactaacttataactaacataatagctcttaatcaatcaaacactttagctaactaactgatatactaaactcataatcttaatactcctccctcaagatagattgtatatacatgcaatcccatcttgtccttaatgtgcttggattggcttgtgttcttcacattt

SEQ ID NO: 342661 - DNA, 495 bp, Cannabis indica
tacactgatgaatcaaggacattatgttttgaagcatataatcataattacattccaatgtgttgacatcactgtaattgtgaataactatatgttctggacttaatagattttatacacatgaaaccataaacatgaaaattacatgtaaacataaatgatttccaattttctattgataacaaatcagattagattgaaatgggttttatttagggcataaaatcctaacataaacaacatgtatgctaaacatgtaataacatatgcatgacattatactaatcttaccttgattctgaattcaggtgtgccgcccaacctgagtgaaacaactgctcagggaattacaggctcctaaatcatatcgattacaacacggataagtaacgcgctaaaccacaactgggaacttaggttttagacaaaatacatatctactgtaactacgcatggcaataccctaaactagcagggaattaaccaaccaaagct

SEQ ID NO: 342662 - DNA, 600 bp, Cannabis indica
ggttagattatcttagaataatctgttcccttgacgaaatatttgtctaaaagtgataattaaatataccactggttaggtactttaaaaagtatggtatgagagaaatattagacacatgttcactggagtaatacatgtgagaaaagaataacaatggaccgaaaagatccatggaacttaaaaagttatagagtgaattcgagttgtatgctcatttcattacatacacaaaaagttatgctaattaaaagcgtagaattatcgagttccaaatgggagattttgtttttctttgagtattgcctatgaaaaggatatgtagagagggaagttaaaacctagatttattagaccttttgatattggagtaggtaggtcaggtagcctattagctagtcttgactcttgcattatccgtagtatataatgtgtttcatatatccatattgagaaaatatttatcagactcgactcatattctgagtgttgggttttatgccctaaataaaactctatttcaatgaaatccagattattcaatatcaataaaataacagaagtatttttcattcatttgtgtatgttttggttcacctt

SEQ ID NO: 342663 - DNA, 721 bp, Cannabis indica
ttgatcatacaacttggcttgttagatttcctactataattaatgcctcaccaaatcttggcatatcattatattgtgccctatagatctacctttgagaaaaccatcttgggagtgagatattatctcaggtaggatgtttctgattctagaactcaaaagcttggttgcaaccttataaataacattgcaacaagcaattggccaaatccttaacagaattagggcatttaatcttaggaaccaaagttataattatggaattaatttctttaaggatttcacttgactccaaaaacaataaaacagcttcacatatgtcatctcctataatctcccaattatcttgaaaaaagctagttaaaaatccatcaggtccaagagatttgttcccagggatactataaatagcctttttcacttcttctctggtaaatccctatagaagcatgctagcctgttcttataacgccctaaataattaggcacgctacccaagatacttaagaaaccctaatcccctaaacgggattactaagaattagcacggaaattaaaatttaataacaaacagaatgaaaataaacttgtaataatttaaactttacaaactaaaagttacaaaagttgggatccaaaaaaaatatttacaaaacgctatcacaagttcttttccatcggccgacctaagcagcaaaatagagtctcaaaatacatcatt

SEQ ID NO: 342664 - DNA, 502 bp, Cannabis indica
atatcattggatgaatggttaataaacatttccttatgatgtcattctattttctcttaagatatttaatggcgcatatgattaaattctcggcattctagcccgatgtaaagaccccttagtttaaatttagaaattagcagataattaaggtttacttatgaaattagttattaattctaaattattaatttatgatgatttatttgaatttagaatgcattttatatgtcatatatagaactttcatatttttgcatgttcagtcccggcaacattagaacgcggtgtatggctcagtagaatcacatcttggtattttagtatagcggggcggtattgttagacattggaaatgttgagattagtcgggaatttagaatttctcaaaatacccttagtacctttttatgtcaatttaatgttagagagcaaaaaactcattttgcccataagtgcttgttttttgtggatttttaattaaattattaatctgattttt

SEQ ID NO: 342665 - DNA, 466 bp, Cannabis indica
gtatagtctcgactaaattgtttgcgaccttttgcccaatgaacatgcatcactatttatagggcagtgaacttagagaggaagtctttcccctctcgttacaatggatataagcagaaagattgcacgatccatacagtatatactcgtcatggaataaatgcagaatacattgatcgtgggataaatacatattacacttgttatcccaatttcggcactctgacgtggcatcgcatgaatggtgacacgtggaatccacttggagcatctgctctggaagcatagtccgagcaggatgcctcgctggcatgcccggagcaaagaaatcagcaatccgcacagagcaaccaacacttagaaaattcagctttcgcattgtgagtcatcagcgaaatcccaataactcagggatcagattacagggatatggcatacacacgatcccactatcagtgtatccaac

SEQ ID NO: 342666 - DNA, 829 bp, Cannabis indica
gggttcgggttctggtctatgtccttgatctagacactgagtagtggtcgggtccaagcattgatcccggatcccaggtcccgacgtgggtcctatgtccaggtttgggtctatggttgggtcctcgatcccgatcaaagttctgagaccaatttctggtcctagttcaggggcccaattcccaggtttgtgtcccccatctatgttcaggtcctaggtcccgttctgggtccaagttcgtgttccggttcgatccgagtttaggtcgtggttttggttacggtccgagttcgcatcccaatcctagtctttgtctgggtttcgggtcccaggtttgagtctggttcttgagtcttgggttcggccccggtgtccaggttcgggtcggagtgccgtgttccgatttgggtctgggtttgggtttaggtctgattcctggtctgagtctgggtctgagtctgggtccaggtccggatcctggtctgtgtctgggttgaggtccaggttcgagttcgggtcccaggtgcggttccaggtctgggtctaggtcagggtctcgttacagatctagcttccgagtttcgatcctgttctgggtccgagttttggtccgggtgtcagtcttggtctgggtacacgacgtgtcaaggcccgactttaggtcacggtttgggtttggggctaggtctgagtttggttctaggtttgggtccacgtcctagtcgcggtcctagccttgttcgatggtcctggtcttacggttcttgtttaggctctattctcgggtcctaggtttgggtcaggggtcgggtttgggtcctggtctgag

SEQ ID NO: 342667 - DNA, 495 bp, Cannabis indica
taataaatactctcataaataaaaaagactcgtggactaaggctcgttaatggcacaaccatataaaaatcccatgcatgaaacttcctacagctttcttatatatattattaaatcggttgccgaaaacctcggttaacattttggtgctttcattgagagctgaaagaagcgtcttcaaatcgacaacaaccttataagctaaagcaacaatggtggaaactcacaacacacgtcagccctgtcctcctgatgacgctcaaaaccctgaagacgaagaagtggcttcgagaatcaacgtggattctgaggaacgagaggaggccaacaatgacaaatacgaggaaaactttgacaaatatgacgcctacgacaaagttagttacacatagctactgctcttaaggcaaaaggctgctgatcatgaaggtgagatcacagcccgaaaagaacaaaacaaaaagatgcaagaggtgatggtcgcgatgcaaaaag

SEQ ID NO: 342668 - DNA, 814 bp, Cannabis indica
ttaatgctagtttgtgtagatgtgtctgtagaaggatgaacagaaggagcaaaattgttgttttctacatcagtggggacatcttcttcttctgtagtggttccctgagtatctcaaaaaatagtggggtaatcacttataggagtgttagtgacattatcagaaggtagcaccaatttaataaaaggatcaatattagtagattggtcaagtttatgaaaaggaaaaatattttcattaaaaatgacatttcgatagataaatatttgcttattattaatgtcatataaacgatatcctttaacaccttgaggatatcccaagaaaacacaagttctagctctggatcgaatttggttctattaacgggaagagttgaggcaaacacaaggcatccaaaaactcttaagtgtgtgtagccaggctcccttttgtatagaagttcatagggagttttattcttcagatttggagtaggcgtgcgattaataaggtatgcagcagtcataatactttcggcccaaaacttaaattggcatacgagcctgaaaacacagagcaaaagcaacgttaagaaggtgttagtgctttctttcagccacagcgttttgttcaggagtgccaacacaagtaaaatcatgtaatatgccatgtttattgaaaagttccttgaaagctagttcagaagcattaccggacctgaaacatttaaatatgcaattgaattgagtttgaacataagatatgaacagaggtatgacaaataaagcatcagatttttgttttaaaatatagatccaagtgaatcttgaat

SEQ ID NO: 342669 - DNA, 759 bp, Cannabis indica
tgtgatttttagtcacaataaaacgattgagactaaaatatatcattattagttataatttgttattaatttaggtggcgtttggttggaggtaatgatatggaatggaaaagaaagaaaacaattttcatttcattcctttgtttggttacatattaaagtgttggaatgtcattctaatggaatgggctttcaccattttgatggaatgacaattccattttaaaatggaaggaaagatcattccaatgcataatgataaaaatttaataatttttttatcaaattttttttttattacattttaaattttattccattccatttctattccaattccaattcccattctcattcttatgttttcaatgcctcctgaactttcatctatgttagaatttttttactaaaattagacaaaagtaataatcttaatagttcaggatgaatttttaaggggtatgatttacattataattcgggggaaaaattgctaattagtcattttataattagtcacaactttttttactttaatcacaaattttattatgagtaaaaataaaaaatgttacagtgccgtaaaatataatacctatagtttctctcaattggaggaggttttcatgagtaggactcctaccataacaaaatcggccgatccaagaaatactttgggtatgatataatatatataggactattcctgtggacagggccggccctgaaacaagtgggccataggagaaaaaaaaaatt

SEQ ID NO: 342670 - DNA, 408 bp, Cannabis indica
aatttattaaaaaaatatattattaatttaaaattgatatttaagtttaaatatataaaaaaaatatatattttattttaattttggggcttgaaaatcaaaaaatacgaaatttggtgaaaaaacaccaaaaaatcgcattttggctgaaaatacgcaagctgcacacgaggaggttgcatgcagcctcctacgcgcgcgcagaaggggtgttgcagggtgcatgtacggggattctcggcgccagcagccttcagacacggaatcagcaggggcgagcgcacgagttcagacaagatttgtctgaagcatctgcgcgcgcagcctcgtcttgtccgagctgtgcgtgcgatgctcgaccctgtgcactcaatggacccagattttcaaacctccataactctctca

SEQ ID NO: 342671 - DNA, 539 bp, Cannabis indica
caccaagataaacatgttcttcaccatcccctactggtttgtaggaggaaaagacatctttgttagcacaaatatgtctggtagcaccagagtctaccacccattctttcacattggccacaagataagcttgagaaatgaccgcagcaataatatcatctccttctaccaaatttgcatttggtttaggaggattgtcatttctcactctttttctacactgaggtgcatgatgacctggctttccacagaaaaaacaactcccttttttcttaaaggtagtggtgttattagctttaggcttgtaaacagagttatttgaatgattgggtttgttggcataccttttatttttgttttgtgtttgtaccaaattcgcctttgctgccatttctctcgctttggtagcttggagttccttgcggttagtatcttcaataatgatgtgggtaatcagatctgcaagggacagctgcttatgcttgtgctttaggtgactcttatattctttccacgattcaggaagcctttcaactaat

SEQ ID NO: 342672 - DNA, 547 bp, Cannabis indica
ggctaaagcgagatcaacatttttgtacttttattgagagcagaatcaagaatcactcttcattctaaatttaaccacaggtacgatggtggtacagactcgtacgggcctggttgattcggtaaatccataggaggtggatcctgcattgcagaacctaggaaacacaagggttctaccagctgttgatcccaagtaaccgtcaaacacaggccatggtgtgacgactcctgtggatgaaattgtgcctggtgtgtaagagactgggaataccagttcagcacccagccaggacatttataacacagctgtttcgcctgctaccaacgctcgaacgaccattggagatgatactgagatccaaaatcttcgtgctgctcttggactcatgcagggtcataccaacaccctacatcatgatcaggaggaactccatgctgcggtaaatctcgcattttgaagagcagaggcgcatgtttttcgagaggagagacaaagagatggaagcgttaagggctcatcatgcagagattgacaatcatagtcg

SEQ ID NO: 342673 - DNA, 531 bp, Cannabis indica
ataaatattaaaaaaattaataaattttacttctgaccataatttaaaaaataaaataattaatttttaaatttaaacctcaaaatatcaaaattaataacaatctattgaaaaataaatattattaatttaaaaaatgatatttaagttcaaatacattaaaaaataatattttattttaaatttggattttgaaaattggaaaaatcaaattttaggaaaaaatcccacaatattcggaaattagggtgaagctggcagtaggctgcacgctgcaaccccaggaggctgtgaaggccctgatgcacgcgtgggagagggagtgatgccgagaaatctcggcgcctgcaaggtcatcctcggcggacagcagggtcttggggtgcctgaacaagagacgtgtgcgcttcagacagggaatttttccctgtcacgcgtgcggatgtcgtcttgtctgaagggtctggtgcgcgcatcacgcaatctcgacatcccttcaacccgatttttcgaaattcataacttttgcaa

SEQ ID NO: 342674 - DNA, 723 bp, Cannabis indica
aattggattttgtatggttttggttgagttttgggtacggtttggttgaggttcgaatatatggtaaagtgggcattttaagaccttaaaatctagttttctggttttttcgaacccagtggccgcgaccaaaacccagcagagagccatccattttctcgattttgttttggccataacttttgactcgggactccgtttgggatgttctttatatcaatggaaagctcgttctgagctctatttgattatctatgttttgaatgccatgtttgtattatgtgaaagtggatataaggattaaccatatatgagtaaatcctagaatttgtgactaggattaccggcacttggtcaggagcacccagggatttggaatctcttctactgcaggacattaggtaagacagtggttgcacgtagagttatgcgcggtggcacttatgttgaaatgttatacgtgagtaattagaaaccaggattagtgttattaccctaacgtgagcggtttagccgcctagggttattaccctagtgatatatgatgagtaaatgctatgccatgttaattatatgagtatattgagatttagggttatgcgttcaagccataaccgggttggactcggtaatctggaaccgagatgaaccgttctaaggccttattgtatatagacgtgtgagcgcaacacgtaggtctatgtcacatagacataaataggc

SEQ ID NO: 342675 - DNA, 686 bp, Cannabis indica
ttataaaaataagttaaaaaatacatatacaccatcaaaatagcattccaataaaaatactcattacacttactttttacatacaataatatataattaatctttaatactacataattgtttttttaaacccaaatactacgtaattaaaagtgatctaattccacttaaaattatatatagctaaattaaatatatattattacaggtaaatattgtttgcaatttgagtctctagcattactcatactattaactgtcttgtttctaaagtgtgtaaaaaaaaataaatacttattacaatctcttagttaatttttatgcctaaaattacatagaatatttttttcaattcttttattatagagcatcatccatgtaaatttttaaaaaattcgagtagtttatagtctaccgaaaatagagttcctaatatttcaatttatcacacgtgttcaaaaaatttcaaatatatttttcacactttaaactattcgaaaattttcaaaaatttacaagaataatgttattagcataacgaacaccgtcattcaaaaaattaaaaaaaatatttcaacatatattttcgagcacgaatattgactaaaaaattataataagagattgacgatagcactcctaaaagaatagttgttttgttaaatcaaagtcaacaatgtcaatat

SEQ ID NO: 342676 - DNA, 146 bp, Cannabis indica
tgtgtttaattttataatcgttttagaagttcatatttagggtgttaatcaacatacttgcgagtagatctaagatcctggtaaaataatttccaacacttagctcatcccttttcgccttcttcagggcctgatctttgaaatcc

SEQ ID NO: 342677 - DNA, 975 bp, Cannabis indica
tattttattttttttttttaataaaatattcattttaatataacgaaattattgcactcataaaatgacaaaaccgaaagttgaaattacaaaataatatattctaacgtcaaagttgcaatatactttttatactttattttgtacaatgtaagtccaccaccgtgtatcaaattacgagtactactataatctcgatatagtagtatcaaacatgtatcaaattataggctttaagcttgtattttaacaaggaaactccaccaaataatctctatataatatatcggaatgtttaaagaaagattaagtagcaacttatcatccttctctttatatattttctctaatttttagtaatttatttttttaatttataatccatacacattaaagaattaagtcgcgctattatcaaattttataacctttttaattgatttatatttttgtactaattgaaaaatcatataaataaatataaacttaaaatattgaaaaattatataaatatttgattaatgtaaagtataaattataatgatattatatcaaaataagaaaagatgagttagctaagatcctgtgttatgttacttagttagttaaaagtgtctgtttgtacagtttgttgtaactaatttctgttacttcatcatatcagttagctgtaattccttcatttttcagactaatgagaaaaacactcttcctctccaattctctttctctctgtttttctatttattttgtaatatggtattagagccaccatatttgtgtgttgctcttcttctttgattgtttgtggtcatggcatggaaaggagctagtagtcaagcaactcgagacagctctagtgataatgtgaatcctttctttgtgcttgattcagatcatgcacctcgacgtttcgatcggagtagagatccatactacattgcaaatggagatcatccaacagcaagtttggtt

SEQ ID NO: 342678 - DNA, 574 bp, Cannabis indica
cattgggacaaaactggagaaaggaagtacttgggtttgaaattagtttaaaggatcaatgaagttatatacaagatcaaggctcgatgcttgcttcacaaagtaggcaaaaacgttatgctgatctaaagcacaaagacattacatttcatgcaggggagcatgttttcctgcgagtttctcgagtgaagggcattaggcgctttgcaaagaagggcaagttaagccctaggctcattgagtgtttcagatactcgagaaggttgggcaagtagcatatcggctagccttaccaccagagtcatcattcaatgtgagaaatatgttcatatctgactcatatcttgagttacgaagcccttgaactacaattagacttatgatatgaggaacagctagtttagatccttgataggaaggaaaaagttctccgaaataagacaatagccttggttaaagtgctctggaggatgagcaaggtggaggaagccatctggaaattagagtctgacatgaaggcaaaatccttttaacgggggtataattgtaatgactgcattttagaatatggatt

SEQ ID NO: 342679 - DNA, 1014 bp, Cannabis indica
ggtcgagacatttgggtcgatttctatatcttccaattcttccactagcccaacatttgtatttggttccccaaatcggggatccacatcttcgtccccaccttgggcggttccctatttggcaatgcttttccccttgtccgaactctggttggaggattcttcctttttggccttggccagggcaaggttgtaacattcctgtgcaacttgttggtttcctcttaggcccctaccccattttttgttggaaacttgatgcacgaatggaaaattgatgtaacagcttttaagtcatataaggcttgttggcctaacattacgttaaaggttgatggaacatcaattatcaagaattgtaccatcacagttatgctcctcgaagcttgtccaacagtgaggggtagacgaatttgccctgaaggtgcaacactctggtcagagaaaccgtatactggttgggtacaggggatcagatctttgagttggagtcccatcttctcatacggtgttttgaatagaatatttgttgaggctccattatctatcatagtctgagccactattttatttgctatctatacctccacaactaatggatcattgtgcgggaagcgaacattgacaacgtcttcttcagtgaaagttatagcgagttcccctacccgtggaatttttgggttcctttcttctacgaccagaaccacttcctttggtttttgtaataaagttcgggcatacctctcccaagcttttcccgaatctccagcaatatgtaggcctccgatgataacttgtaaatgtctgttcactggtggaggcagtaacaggtctttgttgttatctgcttgggcggtccattgattttggtcggccttgacatacttttgcacgtgcgggttatttttccttatgaggacttcaatttcccgcttcacgttgttgcactcattagtgtcatggccataatctccatgaaaacgacaaaatttggacatgtcccgcttgcttatg

SEQ ID NO: 342680 - DNA, 1699 bp, Cannabis indica
tcctctcgacaccagagagtatagttatcaaagtttaacacaatattattctcgagaagccaaaataacaagcagctgctcgctatcaaagtggtcttggctcccttcttggcgaggcatccctatgagataaggcttaccatatatccttaattacgcgttcatctgggcccaataaaagcgtgatattcacatttgtgtaaaaatctcatttatttggcttgatttgtaatcagatcccacaattttcgggataatggctgtaaacatattttggtcagccttgtaattaactgccactatgcaatgataaatagtggcagacaagatcaaaacatgggggacaaaaaaaactcttagaaaagaggccctgaaaaaaaatactcagaaatctgaataagatttactagtggactatgtagaattttaactgtaaaaccatgtaaaaaacccagtgttcatatttttatttttctatagcttttattatttttgtgttgaattatcattgtgaggctcaaatttggttaacaaaaatctgtgttaacagttattttcggtaattatttttttctttcttggatctgtgttgaaccgtttacaccgaaataatactaccgaatatgcacaactaaaagacaaatgcaatatttcttcaagttccccattcgagtcaaaaccttctgttcctgcaacagacaccccactgttttaagtattgtgatctttatctcgactgtgtacaacaaatcgataccagtaactatacatgccggatatgaatacacaacaagatcaaagccaattgccaaagctagcaattcatcactatgttctaatgacccgagcttatacaaatcaaaaaaaaaattaacaattatgatttgagagatttgtcgattaggaataagtatataatagagaaagaaatacttgcacaccttcttatgaaaccacgaaggaaattcctttttatgtaacagattatggttagcgttcgggtcccttcgtctgattatgttgaggtgctctctattatacaaaaagttattaaaaatttaactaaaaagaataataaaatattattcgtgaagcaccatgtaatcatttgattaacttatgtcatgtaagagtcgatctcgatacaattttctaatatgtaccactcagctcttttccgagtcttctcgtcaagagtagttattgtttgcttttcgagtgaacgacattgagatttgaaaactattaagtatcgagatagaagatgagcatcttcattgcgctcaggacggttgaattttgtatgcacacctttgaagtacatggaacaaaatattaatgcctcatctatcatatatccttcagcaatagatccttctgggcgagctttattcctaacataatttttcaactttttcatgtatctttcaaatggatacatccatctcataaaaactggcccacctaatatagcttcctcaggaaaatatagcaccaaatgtatcatgatatcaaaaaatgctagagaataaatcctctccaatttgcacaaaatatgaatgagatctccttgtgccttctccatatattttacattcaatgtcctagcacataaaattctaaaaaaattacacaattcaattatggtgcttgatacttcctttgacaaaaacttgccaataaaaactggaagtaacct

SEQ ID NO: 342681 - DNA, 1405 bp, Cannabis indica
tttcattctttttcaatcataaaaactattgatttggcaagtagaatcataagtataatttagtagtcattaatccaattccctgtggtaagagctcacttgcgtgagtttactacttgattacatgcacttgcgtagtatttaataattttcgtaacaagagcttgtgccatctattgagaaacctccagagcttgagttgaaggtgcttcctagtcatccacgatatgagttcttgggagaggataagaagcttccagttatagtgtcagcttcactttctgatgtggagactgatagattgctcagagtacttcaggcgcacagcaaggctattgcatggacattgggtgatgtaaagggaatcagtccctcaactgtgatgcatcgaattttgatggaagaaaatgctaaaccaacaattgatgcacaacgtagactcaatccacctatgaaggaagttgtcagaaaggaagtggccaagtggttagatgctggagtggcctaccccatctcagatagtaaatgggttagtccggtgcaggtagttccaaagaaagggggatgacagtaatcaagaatgaaaagaatgagttgattcctacaagaacaattactggttggaggatttgtattgttcatagaaaactcaacaaagcaacccagaaagatcattttcccttgcccttcattgatcaaatgctagacagattggcggggcaagaatattactgttttctagatggctactctggatatcatcaaatagccatagcacctgaggatcaggaaaagactaccttcacatgtccttatggtacttttgcttttagaagaatgccattcggattctgtaacgctcctagtacatttcaatggtgtatgatggctatctttttggacttaattgaatcatgcattgagatctttatggatgatttctcgatctttggttcttcatttgatcattgcttagagaatttggagaaggtgctaatcagatgcgaaaagtcaaacttggttttaaactgggagaagtgtcactttatggtaacagaagggatagtttcaggacacaagatctcaaaagcaggaattgaagtggacaaggctaaagtgtcaacaatagagaatttgccgcctccagtttctgtaaaaggagtaaggagtttcttgggtcatgttggtttctaccgaagatttattaaggacttctcaaagatctctaaaccattgtccagtttacttgttaatggcgttccttttgagtttggagaagaatgtttgaaggcattccaggttcttaaagagaaattgatttcagcaccaatagtcacttcacctaattgggagttgcccttcgagttgatgtgtgatgcaagtgactatgcaatcggagcggtct

SEQ ID NO: 342682 - DNA, 624 bp, Cannabis indica
accaaaccagagcgtcttcttaaaatttgaaagtgccataggccaccctatcattaccagtgacgcctataaagtttaagattctggtgatcacagttagccattgctcgaatttcaggacatcgggacctccaaagaaaattggaggtgcctacttacggaacctttcatacaggggttccatttgattcactacaactacaggttggacctgcacagcaggggcaggtgccactggtatttctagagcagggattgcaggtgcaccctgctgtctcaaccactgaatctcatcatcttgttcattaatcctggcttgcatcgctgcaaacctattttcccaatcttgggcaacttgagcagcttgggcagcttgtggcgggtaaacatcgccctgaccttgtgccctgcccttaggacctctaccacggccgcgaatatttaggggaatatgaggtccctaaccaccacgggatccaaccgaattgccctggctcctggtatatcgcatggcgtccatagtaattagaacagcctgcgtaaccaagagctagtttggtcagatcgtgatcaaaggaaaacttactaatgccgcttaattggaaattaaaaacatgcgcctat

SEQ ID NO: 342683 - DNA, 597 bp, Cannabis indica
agctgttatcaaacgttgcttcaactcctaaaaacttgcttcacatttgtctgaccacaaaaatcgctaatttttcttagtcaactcggtcaggggcatagtgattttagaaaatccctaaacgaaacgtcggtaatatcctgctaaactgagaaaacttcgaacttctatcacagattttggcctcggccaattcttcactgactcaatcttaattggatcaaccataatcccattcttccctataatatggcctcgaaaggatacctcagacaactagaatttccactttttgaactttgcatacaacttgtgatccctaagtcgcagcaacaccattcgaagatgatgctcgtgctcctcttctaactgagagtacacaaggatgtcatcgataaacactatgacacagttatcgaggaaattcttgaatatcctatccatgatatccctaaaggccgcatgagcattagtcaatccaaatgacattaccaaaaactcatagtgcccatatctggttagaaatgcagtctttggtatgtcttcttcccggattctgagttggttataaccagatcgtaggtcaatcttcaaaaa

SEQ ID NO: 342684 - DNA, 748 bp, Cannabis indica
ataagttgaaaatacttctttttttatattcattaataaaaaatatcctcatattatattttattaaagagtaccaacttttgtaaatggattttctaatatatcctcactctccacttaagtttaccacataatttacattaacttaatggttataattggaacatcatctataaaagtggatatatcttaaaaaacatagaaatgaaggtaaaaattatacaaataaaataaagtgggtgtacaatataatttcctccaataaatactactttttttaaattatctctttgccacttattaatactattcattgactttgaataaaatattaaaataatataaataaaattaattattttatataattttgaatgagcattagtagtaatatcgactttataactaatattagagcacaaattaaaaaaaaataagtcaaatataattttataatatattttggaccaaattaccaaatttaatccaaaatatactctaagtgcaagtgaaatagactttattagtgttcaaaggattgcattctaagaattttagtgcatgtttggcatcataattaaaaaactgttttttgtttttaaaaacagaaaattattttttgaaaacaatttggcttgtttggctttgttttttgaaaacagttttcagaaaacaaagttacaaaaaacaagaattttgaaaacaataaaatgttgttttctgttttaaaaaccaattcacttttagt

SEQ ID NO: 342685 - DNA, 1019 bp, Cannabis indica
gttttgccgccatttacccaaaaaacctataagtgggagtatcaaaatggtttcattatggccaaaagaacacaaacataacactaattttatgagcaaaacaacaaataagaggtgggtcgaaataaataggtacaattgacataaaataaaaggggtacgtttcaatttactatttacaaaacttagttttttttttgtttttttttttttttttattatatatatatatttatggaattttacatagaaattcttattgtaactagcgctacaacctaaatcgcaacaaaaaatcgtataacaacccacataaacactactagagaaaccactttaaaaacataaaaacacaaaaccgtaaatttaaaaaaaaaagataaaatatatatataaagtaattccccaaaataaaaataatttaaaacaatatcttacttaacacgaacttaatcatttagtatggtttttgaataaaataaaaatttacttttttgaatatatcatataatgttattaagtggtcttttataatatacctaaaattgattttatttataaaaatactttcaacaaaattatttacaccaataccgatggccacgccaacataaatactgaaattcaaaataattatcgaaattatttactcatgatttctatttaaacgactttttctcttttgaaagataagtatctcaagtttaagtccattatattaaatatggattagtttactatcgttatttcacattatctttttctttatattgtgtggtaatagaattttattttttgctattttgtaggttattttgtggagggcgcctacaattacagagaatttctgataattctaattttaaacttaatttgtttgatattgtttttcaacatttttatattacggtgctagtttgttgttactagccaaagggtaatacctttggctagttattcttagaaattttgttgattttttagttttttagaatttgctgatagctagagttataaag

SEQ ID NO: 342686 - DNA, 732 bp, Cannabis indica
ccaaaggcatttctgtttcacagcggccatttacactccaactcttacaagaaaccggttatatgggagcaaaaccctcttccactccaatggaagtcaacctaaaactcagtaagaaggtaatcctttacctgaccctacttcttaccgcagtctaattggcaaactaatttacttgactataacacgacccgacatttcatatgtcgtgaatcatttaagtcaatttttatcttgtcctcgcattccacatcttcatgctgctcataaagtgttgcaatacctcaaagccacacctggaaaggtctttttttcccatcaaatacttcccccaccataacagcttttgcagagaccagtttatcaccttccaatgttcaaatctcttttttctctgatgctgactggggaagttgccaagatactcgaagatccatttctggttgcctattccttggcaagtctttagtctcatggaaatccaagaaacaacaaaccgtgtcccgttcatctgctgaagcagaatatagggccatggcccatgctactgccgagcttacctggattattgcccttctcaaagactttggtatcactcactctccaccagcaacactctattgtgacaatacagctgcaattcacattagtgagaactccatctaccacgaacgcaccaaacatgtcgaaattgactgtcattttgttcgagagaaggtccagcaaggctcc

SEQ ID NO: 342687 - DNA, 950 bp, Cannabis indica
gttacactgtagttggctttgcctcccccaactgcaatcttctaaaaagctgacagaggcatcaaattgatgctggctcccaaatcacacaacgcatttatcccctctattctcccgatagtacaaggaatggtgaaactcccaggatctctgagtttgggagggagtttcttctgcagtatagcgctacaaccctcagtcaatgccattgtttcatagtcttccatttttctcttctttgacaggatttctttcataaatttcacataactaggcatctgttccaaggcttctgcaaagggaatgttgatgtgcagctttttaaatacctctagaaatttcaaaaactacttgtgtaggttggtcttttggagtctctgaggataagggtcttcacatggtgatctatgctgactgatggagaagcttcttttggtgcgagactctcagtagtcttcttttctgctgatgttggtgccggttaatcctgaacctcttcttccactggttttcccccatcaggcccttcatacttcttcccgcttcttagggtaatttccttacagttttcttttgtgttgacctctgttgtgctaggcaagtttcccggcaacggtgctaaaaacttgttacgaaaaatatgaacaataagcaagtgcacgtaatcaagtagtaaattcacacaggtgaggtcgaaccacagggaattgaactgaataccaccaaactagatttatgattctatgtggtagataaaaataattttgataaagtttaaaataaagataatcaagaaaattaaagaaggcaaaaacggtgtttaatcaaggatgagaaattagggaaaagaatcctgttgatttaattacccaattgttaatgctaattatcactctctttctcaatgtgaatgacaaattataaaattaacctaactcttttcagatctt

SEQ ID NO: 342688 - DNA, 763 bp, Cannabis indica
gctgctagggctgggtttctttgtttgattcatgtgattttcagcaagttcatagtaattctagtagaggtactccttattctagcttcttttctttaagtttcttgatttttgatgaaaaagaaatagtttgcatgcttagtttgagttgttcttgctgctgtgttttgatgttgatatcagaggtttatttatgatttaaaatgttgattcaagcatgatagggctggtgattacttgattttattaagatatgaaattttggtctgggtcagggtctcggtccgaatcaaggtctcgagtttcaatctcggtctagggcttgtttgggtttgagtccaggttcgtgtccagatccctatctaggtccgagtctgggtttgggatcgggtccaaggtttaggtcctggtctgggttctggtccaggtctcggtcccgttctgggtacacgaatgtgtttgggcccgagtttttgtctcggtttgggtctggggctaggtttgagttttgttctaggtttgggtccgggtcctggtcttgcagttctttttcagtttctagtttcgggtcccgaattttggtcagggtctggctttgggtcctgcttctagctcagttccagtttcaagtcacagggtacgagttcgggtcgagtttgggtctgagtctgggttcgagtcttgatttgggttcggggggaggttcaggtccgtattttggtctcggttagggtctaaggttgggtacggtattcggttctga

SEQ ID NO: 342689 - DNA, 646 bp, Cannabis indica
tctttgaagtgtgagtgcttacttcctctcgaagtaagacttgttcaatcaagttgttctagcaaactctatgacagagtaagaactgatataagaaatactagaacctagatgaacaactaggttctcacataacaaagaaactctcctcacaaataagaaaaatgcaaaaaatgaataatagaagagctgattcgaattgctgctctctaggatctatttatagaacataaaaaccctagaggcagtcacaagatcgaatctacagctgtacaaaactttcccaagataaatacgatctgcagcatcagaatcggaagctgacgtagcaaatctgaccagaaaaaggaaacttgctataatcgggtccgatcctctattaagtctttattcctgccataaacagattatatattctgattgtatcttgtgttaagatacaatcgaattcaataaggaaaaggcaattaatcaacgtttcctttaaaaactaactttccataagagaattgcttctcttacaagaagtttccaaacaaaggaaagttcagctgtaaaaagaatctttcctaacatataaaagatcaactaaatccgaatatacaaggtaaggaaatcggttatgaatgcaaaaatatcttaccat

SEQ ID NO: 342690 - DNA, 520 bp, Cannabis indica
ttcctctagctctaactgataccatttttccattaccaactttaaatttcaactctctggattttaaataattctagttttcaagcaatcgcaatgaacaacagacatggttagtagatccaaaaatccagaatccatatggatttgtcattcgctaaaacacatgattcaaaaactaaagcattggaatcactgcttaactgtttttggattgttcttattgctggttcaatttgttgtgaaggataatttgaggaagtggaatcactttctctattcttctcaactgagcctgaagtagtaggattgtcggaggaattattctcaatatcttgagctttccttttgcccttatcagcattactggagaaggatctccatgcaagtgacaatttccgttcataagcacgcaattcagtgtccaggttgtctatgtcggacgagatccaattgttaatcacaaattagttaaacttaggtgataagctgctgagaataaaatgaaatctttgctctccag

SEQ ID NO: 342691 - DNA, 673 bp, Cannabis indica
aacccagctccccctcacataaagagacctgcattaaactttaactaggagaccctgatcgagtaacagaagctccaactgggacgcaaaccaccatccatggtgttaacaaggtagagtttcacaacatagagtccctagtgaaaggaatcatggccccaaatttgtcaaccttcaacccataaagagagtgacgctcaccgctcttttgatcggatcaaagctctaccaataacttttgaagttcaagaacccttcctggcatcaatacaccgagaaggaagatccactatcacacatccattactttgaagtgtagactgatctacagggaataagatgcgatgctaggtgtagaatctttcctgccacactggcaggcctagcttagcaatggtacctcaagcttccctctggatcgatcaacacatggaaagatctagtggatacttttggaaaccaattcgctcattcccaactgcgccaaatcgagaccaatgatttggtggacatcaaataatagtaatatgatctctcaaagactatatctaatatttcttagaggcatccgctaagacaaagagacttatcaaggatgtaagggtaatggcacttgttgttggaacttattttaccaggatctaaatttactaacatgtatgtttgattaaca

SEQ ID NO: 342692 - DNA, 534 bp, Cannabis indica
ctaacttgcataccaaatagtctctcatataacatattattgcatgcacaaaataacacttatagagattaataaccctaattcatgctttcacttgattagcaatattattgtcatcatcgctttcttaccttcacatcaattctagggtaataaccctagaccgcattactatcaaactcaaggtactaatttaccgagtctaacttaattatgccttgtgcgcataattctttattacaatatatttagcatggcatagcatttacacattaataattactagggtaataaccctaggccattaaaccgctcactttagggtaataaccctaatctcggtttctaatttatcaccaatataatattcaatataagcaccaccgtgcatatctctacgtgcaactactgtcttacctgttgtcccgcaaaagaagagattccaaatccccgggtgctcctgaccaggtgccggtaatcctagtcacaatactgggatttacacaaaaaggggttaacccctgatttcacatt

SEQ ID NO: 342693 - DNA, 512 bp, Cannabis indica
tctctctctctccgtggtggtcaacgtcgcacaaggggcaatggcagtaatggtgggtcatttgtgctcaggtaagagaattatgggctctggaaattttgacttggagacctaggctgaaaccaactgctcttcctgtattgatggtagaatccaagttaatacccctttccccaaacccaacgttctgctattgttgttgctactgctgcctcccaatgaagatgatactacttatttgattgtgaatattttatggggtttggcttgtatttctggatattattggttgtggatcttttatgttttttactcttttcagtagccaaaaatgtgatatgggttggtcgacgtcgcataatggggtagggggtagtcgtcggggttggtttgacgtcgcacaaggggtcgagggtggtcgccggggttggtcgacattgcacaagggggtcgggtttggtagggatttttagtgaagaagaagaagaaaaaaaaaggaaagagaaaaaaaa

SEQ ID NO: 342694 - DNA, 645 bp, Cannabis indica
tctatcaaagaatccagccaacccaagacctaacctgtactagaagatctttgcgtcaacctctttctggtatcgaagaatttgctgaggctgggaaaaagatctcggcttcaggaaatgggatcttttgatgatgaggggaatgaggtctatgcagagatcaaggctctctacatgtagccggtctttctcaagctatgtgtagtcggtctttctccgagctaacgtgtagacggtctttttcaagctaggtacagacggtctttctcgagttcatcggcttcccctctcatccatgacttaggaagatgacttaatggtttgcccctagggttgtaaagacaagtttgtaaccttttaggtttttcttatcttaaataccttatactattttcatttgaacttaatacaattgtgtttgcttgggtttttattcacaatgtaaacaactatattttgatcaaatatacagtacttttgggtttctccattgctcgtaatcttcctattaaagtagttagtaatctaccaaactttatgttttttcagcagttgtcaattctgcctcgcaattgcagttagaatctgccttaagcaaacttaaatatactttaaggattttatcactttgtatatttttaattt

SEQ ID NO: 342695 - DNA, 747 bp, Cannabis indica
gcagctagttctcgtcgcaaaaacaatttcattcatcaactgcagaatgaggcgggcgattgggttaagtgggagtctggtttacctcaggtaatggttaattatttcactgatattttccattctttggggtctcatggtagtgatgtgttggataaaattcagccttcgataagtgatgacgataatgctatgttgcttcaaccggtcttggaagaggaagttcgctcagcggtgtttcaaatgcaccctgataagtctccgggtcctgatgggatgacacctgcgttttatcagaagtgctggcatattgtgggtcatgatgtggttcgacttgttcagaattttttccggaataaggtgatgcctaaagatcttaatgctaccaatcttgtgcttattcctaagaagaaaacgcctgtagttatgggagatttgagacctattgctctgtgtaatgtgctgtacaaagttatttctaaagttttggctaaccgtctcaagggtttactgtctaaggtgatttctgagtttcagagtgctttcattccgggtcgtctcatctcggacaatgttttggtctcgtttgagatcctccactacttgagacgtaaacagcaaggtaaacacggttgtatggctcttaagttggatatgagcaaggcttacgatagaatggagtggtcttttttgcattctatcttgcttcgcatgggtttctccactggctgggtttcgatgataatg

SEQ ID NO: 342696 - DNA, 1138 bp, Cannabis indica
agaatgatcttgtcaaaaccactatgaacaagatgctactgccatagatataattatttatggttgtggtcttttgatgaaaaaggtttagctataacaaagagttcatagaatagtccaagtggatcctggtcacagaattcaaaactcatattccatacattaacataaagtttgaatccattgacagaaaatggatattaataacttgtgaaagtcatactgcattgtccaatgtattttaggaaactgaaattaaaaatttctatttggaatctaaaatttaaatttcaagacttaaatttatacctaatatacaatgagttttattctagcttggaccaccactgctaatctaactctaggtttaacttgcttatagtaagcatatacaagtaggagatttctaagagcaagaatttatatcatttcaggatagaatgttgagaatatagtcatctgtgccattcaattcataagagaaattagagtgacatcataagcagatggtttataaaccattcatctaatgatatactaatttaagcaaattcaaaatgaataagctaagagaaaaaattaaaggataatttcgattagaataagaatccaacgatgttccagtaggcgagagtcaaagttattcttattttatgaatctcttcattgtttcatattgtaaacactaatctaagttgtcatctttggatgtacaactagatgttgcatttacaaaaatacttatctgtcgagatctaacactattatgtttgtccagtggaagacaatcctttgggatttgtcccattaaaacaacaaactaagttagacaaacaatgaagattcaaaattataccacaattaataatagaaaacaacatggttcaataaattcatacacattcagaagttatcatacaattagcaagtaagaaagacatgtgaaagtacaaaacaagcacgtcttaaataattttcaaggtttccaacaaattgatacagtgtaaagaccgcttagcttaatttggaaattatcagataattagggcttaattatgaaaattatgtattaattttgaattgttaatttatgttgatttatttgaattcagaatgcatttttatgtcatatatagaa

SEQ ID NO: 342697 - DNA, 716 bp, Cannabis indica
gggccatctcaaacaagcaagagagtcttggctaagatgggttcatagtattatctacaaagaccaggattggtggagcgtactctgacttctatcaatgctagttggtattggaagaagctggtagctatcaaagaacaacttaaacgaaagtttgtgatgtaacaggttttcaggaagaagatacaccatagcaacagggtataatctattttttcctactgctactgttctgaaatggtgcaaagaggtatggagcagattgaacatccctaaacatagtgtgattttgtggttagcaatgttaaaccgcttgaaaactaaggacaggttgttgaagtacgagatgcaagtcaatgagaattgctgctttttgtgaagcgcatgctgaaaccaggcagcatttattttttgattgtaatgttgctgttaattgactgcaggaaatcacgatttggttgaattggaatgatgtatcaaccagccttccccaattgctgcgatggataggcagagccaagatttcaaaatttcggaaaatgatctttgttggtgcaattgcagggcttgtatttagagcattaggaggctgagaaataatgtgatttggcaagatgttcctttaacttccaactgagttgtagacattaagtggagtgttaagatgagagttgcaatgtttttaccaaaaaagattaatgatgtagataaagatt

SEQ ID NO: 342698 - DNA, 734 bp, Cannabis indica
attttcttgatatgctataattatagaagtatacatattatacgtacacgagatatatacatatatatatatatatatatgattcaagcggaatgtatgtcactttaattggggactctatttctttaaggttttttttttcatgtgattgaaactgatattgtttaagggattatttcataaatacacaaaaaataatttaaaaaaaataacaaatattttatttaaaaaagtactgtctttttatgttgtactcttgttaatttattattgattttttgttatttgtatgttattttttattattgttttaatattattttcctattatttttatgtaattttattgttattttcgtgttgtttatatcaaaaatcgtaaatatatatatataaaaaatttaaacgtaaaaatataaaaattgtgttttatgtaattattctttttttttcaataaatttggaataagttgcataggattttatttcaaaactaattatccataaaaggggtagcacattttatataagacaatttactttcacacattaacaattataggactaattcaaatacgtacactttcaaaaattagttactcatgaataatgaaaaggtattcttgagatcccatataagcgataatcaagcgacaaaaactgaagactaaaaccctttttctttttctctagtagtgtaagaaattgtaaaataagatgtatagggttccatc

SEQ ID NO: 342699 - DNA, 585 bp, Cannabis indica
taggattataacaatgaataactcatagcgtatctataccatggaatatatagcgcgttctatataattgagagagcaattccaaatttatagtggtgcaaggaggaattaataagttagagaatttacttggtaaattttagatctggttattggaagctcggtcatataggcccatggtccccatactggttgagacaaaatgcttgtaagactcagttaatttattttagttaatcaattataattttaaaattagactatgtctaggttatgaaattttactaagatatggcttgattgttaagatataagattttagggtttatttgttaattaagagactttgtggagtctaactaattaatattataaatgaaaattttatttaataattaatttaattattaaataaatagttttggcatttataggattgaaatggtaaaagtggtatttgtgaaaaataataaatggttgagagaaatggcaaaaatataactagtgttgggccatcttcatggccgaccattaggtgtcattttttgccattattttatcatttttattctaaataattcaatc

SEQ ID NO: 342700 - DNA, 1458 bp, Cannabis indica
aacttaacttccaatattgtattctttttattaaaatgtgtgtatgtcaattctactaactctataaacatgtaattcatgtgcataaagactttccttaccacaaaatattcaagaaaactataggcatgtataaccaatttatctccactaatgtaaaccgaagtcatgtagatcaaaacgactttataggcatgtaacgttggcttaggtaaatggtagatgagaacgtcatttaggctagtttcacaccataaacttacaaatctaatcaaaattgaaaaccttcattgtaaatttccttttctcccgataatattttttctcatttgatacccctttgttcacataattcgggttataatcctatcaaatttatctcttgctattttttttcgtattatgaattttttttaataagagcacttttcaacataatgtacttggatcataactctctacgcacatacaccctttccaacataattctcagaaaaaaaatatctcatcccacttacgtcatatttttcattcagcatacaacaacctatgttcatggtgcaaaatagggtaagaataatttatttaggttcatggctcataatcaaggataaatatgcattttgtttttaaagagaataaaaattggaaagttaggctcaaaataggacaaaaaaggataatatattaagattagctttttggctcaaactgattcaaagaaaatttccttaatcatctctacacaacaaagatttaggatttcgcctcaataaattaattacacaagttctagatatctcaatatcaaccaaatcaaactaactctacataagcacataaaatcacaatatatagaacaagtagaacatcacgtaactcatattacaatatcgaaagcaagcataacaggttaagtacacaatcaaaaagtttttcacacatactaaataatataaaagagtttagcataagttcatcatcaaatttccttaggtcataagttaacgttgatacagtcatccaaaaataaaaataaaaccttaattctacccataaaaccaaaattaaaaaaaaatgaaaaacataaaaatttccttcccatccccaaacttaaaatatacagtgtcccactgtgcaataaaattaaaggagagaaaacaaaccagagcagctaggactacgggtccataactatatcaccgccatcagtagcaggtggaacgtcatcatgacccccaggtggttgatatgatcgtcgaagctcatcagtgcatgccttcagtttacacttgtgaacctttagaatctcacctttctcacttttaatacttacatggccacaagaaagtaactttctgactttaaaataatttttccatcttgagataacgttacttgtcaaagatttgaattttgaatgaatcaccaacacttgttaatgttggaaattatttt

SEQ ID NO: 342701 - DNA, 915 bp, Cannabis indica
ccaatctagaaaagtgcatattggattagttaccttttaatattaaattatttaatatttatgaaaaaaaatcacataactagcaacaaaataaaataaattattgttattttgtgtctctccaacaacttaaacaccattcggactcctctgaggctattagtttttggaagattttatggtctctcaaagtgcctcctaaggccaaggatcttgtgtggagagcagcatcaaattgtctcgcttcaaaaagaaacttatgcatcaaaaaggttctggttgatagttcatgtcctttttgtggtgtttatgctgaaacggaatggcatgtattggtttcttgtcattttgcgtggtcttgcttcgggtatgctggactggctgctgttggaagggatttattttcttccctgctggtgtggttggaagctactgcaaaaagagttgacagagaagatttgggcagagtagtgatgctctgttaggccatttgggcagccagatcagtgaccttgtttggaagaaccgtgcgagaagtgtgaaagatgtggtgacgtttgctaaatcgagtcttgatcaatggttgaatgctcaaggaaagggtaatattccctcgatgtctcctttcaaagatggagacggttcagagcagtggattaaaccggtctcaggcatcaaactcaacgtcgacgctgccatcttcgattcactccacaagcacgggtatggctgtgtgatcagggccatacgggcggtctggtttctgtgctggcaggcgtcttctctggctctgtggctcccgaactggccgagattatgggcattcgggaagctttgagctggctaaaggatcgctctttctctcaagccgtaatcgaaactgatagccttgtttgtgctgaagcgattaggagt

SEQ ID NO: 342702 - DNA, 725 bp, Cannabis indica
acggactcccaagaatgtgtgtagtttgctactaggcaaaatacgcacatcggagaccacctccttgtacaaagacagctcccgaagggatcccaacaagaggtgcgagtaccataacgacattcggcacaacaccaatgaatgcaaaaatctcaaagacaagatcgaaaaattaatccgattgggacacctctacgcgtggatcaagaatcggttgcctcacctcagccgggtacggcggctggaactttgccacaagtagcaccagggggtgcagcaggggtattggctccagttgctcccctcggagatgctcagcatattcacggcctgccacctagacctaacgggagagtggctatgatctcgggaggaccccacatcggagggaccacccgaaaggagctgaagcggtacgcaagggccgtgaaacacgatgaggtttgggaagttactcaactcccagctcaaaggccccggctgatggatcaacccattacattcacggaagaagacgctatgacggtgcattttcctcaccatgacctgttggtcatagagacccccattgccaataaggtggtggccagagtcctgatcgacaacgggagttccgtgaattttctgttcaaagaggcctttactccaataggcctgacggactgagacctctcaccaagtggttcccaactcacggggtttaatggaacaacacttatcccaat

SEQ ID NO: 342703 - DNA, 516 bp, Cannabis indica
ctttctctctctaagtttcacataaaactctatcgatctctctttctgcgcacatcctcctcccttcaacttctttatgcgttttaaaccctaatgatatttcataagcatcctatatatactcccaaactctaatcttaaccctagatcaacaacttaaattttttttaaaaaataataaaatatatatataaaatagttaccatattccataataataataataataataataataataatagtaatagtaatatgaaataataatactaataataataataataatagtaatatgaaataataatactactactaataataataataataataaactaaataatatgctacaatatatttacccatattattattattattattattattattattattattaatattattaatatatttacctataatattattcacttataattaaacattaaattatctccaataatttaattatttatctaacattatacacaccctcaaaataaaaaa

SEQ ID NO: 342704 - DNA, 657 bp, Cannabis indica
gcagccaagagggttatgaggtatcttcaaagaaaaaaagattacatgctcacatacaggaagtcaaatcatttggaggtcgtagggtattctgatactgatttcgttggatgccaagatagcagaaggtctatatcaggctacacttttttattagctggaggagctattactggaaaagtgtcaaacagacacttgtagcttttttctactattgtagcagaattcatatcatgttatgttatattatttattaaataatattatatttaagattaaaattgtgatatattatacatattattatgaatataatatataatataattaggagttatatacatgtaataattacaatataatgtgattgggagttacatatatgtaatagttataacataagaggtggagttactcatgttttgtaactttcacatcatcactaattaagtgtgtaaagagtggctacacaacttaattttttgaaattcaaaactacaattcaaatatagttgttgggaattgaattttatcatttataatgtgtataaaataaagtgggaatggtttggaataatttagagtgttatttgcaaaagctaaaaaatttggtaactagtaactagttactatttttttcagcattaatagtagaac

SEQ ID NO: 342705 - DNA, 644 bp, Cannabis indica
caatcccacttagaaatctccaaaaggattgacattgcatgaaccgtggtggaaagcatagtgggtcctctgtaagtcaccaagtttgaatttttaacaatccaaatattacccacttagctacacatattatactctaaccccattttccctcataatggtctacacatattatatatatacacatgtgtgaattatttagaatacgctagtgatagtaattgactgaagtttgggaggcacgcacatcttgttcttataaggtaattactaatcaaagtattcaatttatttcttgatttggaacaaaatagtcaaatttaggcccagcgtagtgggaatatagaaaagagagaagataaggaggttgcaactagagataacatgaacactttgatactcatttttgcagaaaaacaaagatgagtttgagtgggaatatacaagtcagtgagtttgagaataatactacaatactaatatataataataataataccaaaataataaaaccaaatatatacagatagtagaagataaatatataataacaccacaattaatattcactctaggtactaatgagaatacaatcatcacacagtgttttttgggccatggatctcaacaccaaaactacatta

SEQ ID NO: 342706 - DNA, 1201 bp, Cannabis indica
ttttaatcaattaaggaaataagagaaaacctaaaattgaaggaaacctttctttccttcctctctctcttcgaaaccagcaagaacaagggggaattgatgctgatttgtggtggttttagcaaggaaatcttgggagaatcaagctaaggtaagccctagtagaacccttctttagtttttaagtttttgctggtttgagtttatgattttgagaattagtggctgttagggtttgggatgtttaggattcgaattttaggcttcatttgagttgattttaacttctagtagctgatttagtggtgctgtgttgaatttatgcaagttggagctttgaactcaaagctttgatctttaatggaaagttgagtttcattggatttttcaatgaaatactggctggaatatattttatatatcctaattaggtactctggaaggtttggtgacgtttggtggagttctgagcaagaaatgaaatttcttaggtggactggtgcaaaccgggtaaccagttttggtagggttccccgggcctttcatttcctcagttctcgtccattctgtgccgtggtagggtgtttccctatttccagagttagattaacccctagaaagtataacaaaacctagagttgcgggttcgggtttcctgggattagggttttgatcatgtaacttacccggtttcataatgtgattagggcatccatctagcacgagactttccgttcaggtcggccaggacacttgaatctagaaagaaggtaagaactgtgtataatgtgtgatatcaatatctgagtgtatgtatatgttatgtgtatatgcatgcttaatgtgttagttacactaccaacacttacgcggttaatgtatagagtgcattggtatagtgagtgttatttgagggtacatttcagtgataccagcactagtacggagaagtattgggtgtgtgtggtatatctctcagtggtactcagggtatgaaataaaccctaccaacactcgtacagtgaggtacgtagtgtatgtgatatagtggctataccctagtatggaacgttcttactcatctgttgagcccaacaaataggtgtatgggcgcctaaatacaagtcagaaattgtatgatatgttatatgcttttcttactgagtctgttgactcacagttatgcttccatgtgtaggta

SEQ ID NO: 342707 - DNA, 584 bp, Cannabis indica
cttcccgggtcataattactaaaatgcccctggctcaccaatagggtcttaacatgttaaaattcatattaattcacatatactgaactacataacaatatagttcctcattttattcataattatctaattaggtctttgctaatccatttctttattctagggtattacagtaacaatattaacgatattattcttatgcacattagaaagaagacaaaagtcacaacatatgtattgtgaagcaccactatcaacaatccataagtggtttttagagtttttactagagacatgggatgcaaaagcatctgttgtagtaggagtgggctgcaacttctgtgttaggagtaaaattatggcctgaatgccttcttgctttgtaaggttggcaagaacaccatactgatcaacagaagtggatgaattatggaatgaagggtgatcagttttcttcttgtcgccataactaggggaaatccaatcaagaagtagcatttttcttataactgctttggtttgggacagttacaacagtaggatctcatctttttattgggtcgaagattggtggatgctgcaga

SEQ ID NO: 342708 - DNA, 924 bp, Cannabis indica
aattaattaaataaaatttttttactttaacaactatttaaaaaataatatttaaaaataattttaacattaataatatttttattattttattaagaaattttcaaaaatatttcataaatcacaactaaaatgaattacttgtaatttgtcatatgtttttcctataactttagtggaatgagtaataatcacattactgcaaaataaaattttaccacaaaaaaattatttacatacctaatataattttttggttatttaattatttactaaatattaatattaaaataaaattttagctacagattaattttctaaaataaaattgtacatcttacttattaaaaattaaaaatttcaaattataatgaaaaactttatttaaatataaattataataaatctgtttattaaatttgtaaaaataagaattaagaaaaattacactaattttgcaatattttatttttagaaaacaattttagtcttagaataatttatttaatataggtaaaaatgtaaaaatatgcattttattaaaaaaaaattatatatcattctactaataaatatattagtgatattattttatatgtatatatattatgtgaatgctttataattattttgttataattttttaatttataaataatttactactaaaataataattacacaaaattattagagattaataatactaatccaaatcatatattgcattaatttgtaacattataaaaattaataaatttaattaaaaaaaaataaattcatatatggattgaataattacactacttagagataaatttacgaagtatgaaacaatggtgtaagatcataaaataataataaccttgactctcgcctaccgggacaataatggattcttattttgatagaataaaaggttgc

SEQ ID NO: 342709 - DNA, 680 bp, Cannabis indica
ggttttatgattcagatcagctatgaaccagagatttaacatggtatcagagcggtggcctccgctcaatgctaacatggctactctcggatctggtggtggcaactcaaacaacacagctggcttcaatggtggtcaaacaacacaacctcggatttcaactcatcaagagccggtatactttaatcacagtatttcaattcgtttgaataatcacaatttccttttgtggaagcaacaggtcttagctgcaatcaaaggcaatcgccttctaaagttcatcaaagatccgccaccagctgaattccaaactcctgaagatcgagtgcaaaacagagtaaatcaagccttcatcgattgggagattcaagatcaactcctcgtgtcgtggttactgtcttcgatgactgagagtctcttgactcgaatggtggggtgcgattcagcacagcaaaatctggtctactctagagaagcatttcacattacaagtgtcctcgaaaattcttgagtttcgcacaaaattgcagaatttgaagaaaggaaatctaagtctcaatgactatctcttgaaagttaaacaaacggtagatcttcttgcatctgtgggagaagtcttgagtgatcgtgtgttaggttttatgccctaaataaaactctttacaatctgattagttatc

SEQ ID NO: 342710 - DNA, 838 bp, Cannabis indica
agaacctgatttacaattagttacgaatcactatgacatatgagattcttgaccttcaaccattcggatatcctcaaaccagcgattaaggcttcatacttagcctcattgtttgatgcgtcaaattgaaatctcaaagcataatgaaacttcaagccttctggcgaaattaatatcacccctgcacccgagccctacttgttcgatgcaccatccacgaataacttccatgtatccgcgtcttgctagacaagccgattttcatctggtgttattccttctattaagaaatctgccaaagcctggcccttgatggatgttcgagggtgataggttatgtcgaactgccccagctcaattgaccattttatcaatcttccaaaagcgtctggttttgataaaacttgtctcaagggggatacctcgattctacccccagtaaccttttactgacatagtaaacaggttgttggtgctttccctcttcttgcactattgatgcactaatcgtgtcttccgagatggctaaatagaggagtaatgtttctccagttactggtttcgccaaaactggaggcatcgccaaatgccttttaatgttttgaaaggcctcctcacattcttttgtccattcaaatttcttgttaccttgcaatacattgaaaaatggcaaacacttattagttgactttgaaatgaatctgttaagtgcagccatccttcctgttagggtttggacatccttgggctttgttggtgatggcatatctatcaaagccctaattttcacaggatttacttcaatgcccctcgcattgactatgaatcccagaaactt

SEQ ID NO: 342711 - DNA, 694 bp, Cannabis indica
tttgtaagtttcccaaaaaaaattagagatgaagctttagagcaattatgacaaacccgaatttaattattctcttctctttttatattttctagttttataatgttttttttgtgtaaacaattttttgtaattttgtttaaatttttggtatattatgtaaaaatatttttttaatgtgaattaattaaatataattttagtgatactaatcatattatataatttatcacgacatatgtaataatagcaagtataagggaggcactaaattttagatttggtgtgtgtaatccctccaatgtagcagcaaatggtacatcatatatgtcgtgtgactacagtgcacggcatatatgctgtggcactgtgactttcacccctgaatctggagaggcattcatatttgaaggaatcaaagtcaagtcaagcttaccgctagttacagccctgagggcacaaaggatgatacgtgcgggatgtcaagcatacttggccagcatagtagacaagtcaagagaaaccaccctcaagccagagaatgtccacatagtatgtgaattccaagaaatttttccggaagacctaccaggggtaaccccagatagagagatagaatttgtgattgagttagcaccaggcacagcaccaatcttgagggctccataccgcatggctcccaatgaattgaagg

SEQ ID NO: 342712 - DNA, 488 bp, Cannabis indica
ctgagtaagaaaaaaaaactaactacgctgtcagataatcactacgctgctgactcatgctctgttttcttccttgcataaactagaatttcgatcctactaactctaacaattaactcagatgctcaatttataacactatgtacaactgcaaaaatttattcaaatgtgaaacattgttataaaagttttactctttccaacagttccacagcccgataactcataagcttgcatgcttacctttctccactaatgttgacagtattctttggaatcattaggtcttttcaaggctttaggtaatatggctcagatattcagggataggcaaaagacaattttggctcaagatatcataagcacacaaacagaacccacaagcttcttactttcctttttctaagatcccataatattcccgaatttaccaagattgatagaagacatctctattatttttttttccaacatcactgaaatttttt

SEQ ID NO: 342713 - DNA, 587 bp, Cannabis indica
acctggagtgttcggtctcgggacatctgggaattgtattttggtagttgctgtgcgacgtgtaatgagtgtattttgggaatgttaacttttaaaagtttgaaaacgggatcccgacacttgtaaatattttattatattacaaagtttaatatttaatgcaaaagttttaatttgacacgtttttcgagaaatttctttgattagcaaagattgcacaataattgaaaaagcactgtagcgtgccttagcattagggcgttacaattttggtatcagagccgccaggtttgtctaccgaagcttgctatgacatgtacaatcttcatcagagaaagctcggttcacggttcagtaagcccgtacttgtttagtattttaaataaatgtgaatgtgaaagcatgttaggaagcatattagattttaattaattattttaaagtgtgttgcctttaagtccttaagagcggtgttaagttttgatcattgtctaacctacctggcttatggattggtaggctaagtcctataaaatggacgccccgtgaaatacaagaagtcagggtgacatggttgagactggagg

SEQ ID NO: 342714 - DNA, 987 bp, Cannabis indica
tttaaagttaataagttatgcactatacagatttattagtcggaataaaaggattgttttggttaaagtatgatttaaataatattttaaactgaaataaggtttttattttaaacgctaattcctattagctatgttttggtttaactaatggtctaatgagaatatattggtatatatttgggaaatcaaattattatgaaaatttggtttgttctcaatattatgggaatgtactaaaattattatattatttatacttttaaagaatttctggatgagcggtattagtttttatggaagaaatggaagtacaaatttgatggatgatgagctcctccattgtttagggctttggtgccttttaaggttttcgcgcatgatttatggctggctactaattatttagggtaattgcttaaaattacaagatatcatgaattgtaaaaatattataaaatttaataactaacaattatggtatacaattatgagattattgccttattagtttattatagataacataatattaattttgggtatataaattataaatatgagtttattatagataacataatattaattttggtatataaattataaatatgagtttattatagaaaacataatattaattttggtatataaattataaatgtggaattttgtaataaattggaggtagggcattaattgtgaattgagaatactttgttttattatttttatttttttatttttgggaagatattgaaataaatgggaagtaaatgctaataaagtattgagattattgccttattagttgtataagaagatactaatatgaatagtttttataataatttgaatggtataataattaggaggttatctatttaaacaataaataaggaagcattatgtcataataccgaattggattaattaatattagtttaattttattaattaaatatatgattaagtggtattaggaaa

SEQ ID NO: 342715 - DNA, 1164 bp, Cannabis indica
aagcataactatgccacgacagagtacataaaggggaacaccgaggtggaggccttgaaaaagattctaagggacgcccaggactttactcgtagtgagtacgctgggaatgtctggaatttaaatctggatcttttgaccgactggttcaaccacttcattggacctactctggctccctttgcctcagaactaatgagccattttcctgccgacctagttcaacttcccatgaagagatacgcagcctgtgcatccaccaacctagtctactagatccaggacgtgagcgcggccatgaccgcggtaagttcctatctgttagaggtattttcaggcttgtctttttcgtgcctgacataatgtattccttacacatacatttttttttctttgtcagattgctgcgaagactggtcgtctttcgaagactcttatcgaccatgggtacaccatgtccgagtttgggggcatggaggaggccatgaagagtctccgggaattggaggcacaaaaaagagctatctgggaggaagcccagtagaaagagtcccttaaggagtggagccatcaagaggcacataaggagaaggtcgatgagctgaaggcgaaggatgaggtgctgaaggccagggatgcagctgtggccactgcgaggcgggagcttcgggattctaaggaggcagagcaggatatgtccgccaagctgaagtgtctggaagagctgcatcaagcagatttgcaaatgatagccaacctaactgttgaagtgaaggggcttcgtgaatatagggagcaggctcagaaggaggcggccaaggcgaagagagatgccctcctggcccaagttactttctaacactgcaagaagcgctttgatgatggagtctttatgacctggcaaaccaatggccagaatataaacctcggcttttatcccaagcctgaagaggttcttgttcgcttctaggagaagaagaaaaggctagatgcggtactggaggagcgcagggtcctcgccttccacctcaggctgattgaattacttgtttatcaccattatcattattattttgtttattgttacatattctgtctttcccaccactttaagacaatttatctgtctttttttcttaaggggagacatttatggcccgtccc

SEQ ID NO: 342716 - DNA, 1189 bp, Cannabis indica
aaatggcccaatgaacctagggcttaacttgccccgccttcaaaagtgcctaatgcccttcacttgagaaactcgcaagaagacatgttctccatcttgaaatgtaatgtctctacgctttggatcagcataacttctctgcgtgctttgcgaagcaagcatccgagccttgatcttatctatagcttcattggtcctttgaactaattaggacccaaatacttcctgtctccagttttttcccaatggattggggaacaacacttcctaccatacaacatctcataaggagtcatttttatcatactctggtagttgttgttgtaggagaattctattaaaggcaagtaccaactccatgaaccctcaaagtccatgacacaggctcgtagtaagtcttctaatatctaaatggttctctctgattgcccatcagtctgagggtgaaaagctgtactaaacttcaacttcttacccatatctctctgtaaacttatccagaatttagatgtaaactttggatctctgtctcaaagaatggatctaggagctccatggagaagaactatctccttcacatacagctctactgatctactgtataggtagtctttaccgacagaaaatgtgttgactttgtgaaatggtccactatggcccaaactgaatcatacattctcgtggttcaaggaaacccaaccacgaagtccattgcattatcctcccacttccattcaggatgggctaatggttgcagtaaccttgccaacctctgatgttcaactttaatttgttgacaagttaaacatttagccacataatccactatatctttcttcatcccgcaccaccaataatagggtttcaaatcttgatacattttggtggttctcgggtgcaacaaataaggtgtagtgtgagcttcatcaaggatttcttttttaagctcaccataatttggaacacaaacccaagctttgaaaagtagcattccattattcaagatttaaaagtccttaggctgaccggccaatacctcttcctgaattttgactgctcaggatcttccaactgcgctcttttgatcctttctaacaaatctaattgaagtgttaagttgcgtaatttccaaaacacaaattaaatttcagccttaaccatttccgtggctaattgaggagctatcatc

SEQ ID NO: 342717 - DNA, 795 bp, Cannabis indica
ttaccaaacggcaccatagtttataatattttgttatttttttagttgttttcttataattttagtttttttgctgagaaaaaatgtttttgtaattttgaaacattaaaatcatatttttgaccatttaaaaaaagtatttttgaaaaattatatttatataattgcaaaaaaaaagtataggtatagtaaataaaatatatatatataaaaaaaaatatttatgaaaaaaaacctttttcttgaggaatttttttataaaattgagaaaagagaggaaaatatagcagtaaaagaattaaatataaaatattgcaagtaaaaatataaatcgtagttttttttttaataaaaaaaaagaaagaagaaaatatatatggttaaggtaagaattaataacatttcaaaaaaaaaaaaacggttaagaattaatgaaagaaggtaacgaaattcaagaaatttgaatggaactatgaattgaaatgatcaatggagtacataagggtaaaataaaaattccttttcttcttttttaagttggaataaaatcacagaatgtatctcatcctattttttgtagttataatttgactcaaaagacttatgtctaaaatggggtttggtttagttaaccgtgaactgtgaattgtgcattgtgattcataaacaaatcataaaaccaccccaatcagctgtagtgaaaatgaaaacggtaaaagcaaaccaaatttattacacaaatacaaatataaactacaacacgaaagatactagatgagatgagagcattgggac

SEQ ID NO: 342718 - DNA, 793 bp, Cannabis indica
gattggatcggatgcccaccccatgacagttttggaatgtgtaatgtgtgactttttcattgaaatgattcaattttggcctccgttatgattcttgactctttactcataaagaatatgaggcacatattcaagttttgaaagataaacacacattgggattcaaaacttatcttggccattctaggaggtcttgcttgagacctggctagacctaaggcttgatcatgggagttggctagctttagggttttaccctataaagcttgcctgttcatgcttgggtttggtgaccctagccagttattggttgagtcatgggaccctggcctcaaggcttgtgaaccttggccatcatggaccttggttccaagtaggtggccagttttctgtcctttcttgactttggcaagaaactttgtatgaaacttaatgacaagtctattatagtcgaatgttcaacttaagactcaatatggctaggttcgtgtaaggaactatgccttactcgtagcctggtacgtggcccctataggagttatgtccaggtatttttttgctatatgattctagcagggccttggcctcatgcatgcaaaccgatctcatatccggcctcaaggctttcatgttcctgctttggcctataggccctctatttttgaacactaccattgtttagccttaaatccatctataacactcatatgattgtcctggctgtatttttatggccttaataggtaaggctctggaattactttgtcaagccgaagtatgcctgcacaactta

SEQ ID NO: 342719 - DNA, 573 bp, Cannabis indica
gtaccacaattttgattctctatagttcataacttgtaaaaacatttatggatcatttccaactccaatattagatttaataaatacacaacatagcctttataaatctttgatttgacaagtctagtagatcttcttaagacttcaccaataggctcttggggaggagcagctggtttagtaggttgttcaatagttgcaggaaactcttgaacatcttgatctactagattatcattaccaacttgtggatcttcaacgattgataatggttgttcaacatctgtttgaactacaggggtgttaaccattatcaatcttgctcttgaagtagaaggttctgaaggatctttctcgaaacctaagtcctttgactgatcactcccactgatcaaggcattttcaagaaattttacattccttgattccacaattcttgtgctttgagagggacagtaaaacttgtatcccttagacatttcagcgtatcctataaagaatctgcttattgtccttgggtccaatttcttctcttgtgaattatatattttgacttcagatggacatccccaa

SEQ ID NO: 342720 - DNA, 680 bp, Cannabis indica
ctacttgatccatgttttgtatccttatagagagctatatcagatcccacctatagtgatctgaatagtattatctttaggtatcaatataactaaaaggggagtaggtcattactcgctaactaagggagtcgaacctctataaaaattcttgtcttatttactttattattcttgttgtgtaacacgttgcaagcatcaaattaatacgaccctgctgttggttgatcacttttcagggtcaatagtttggtactttcattgagagtgtggacatcgtatttgataaaatgccatggttaacacgagaagaaccccagccgcaccatctgcatctttaggttcccctcaagacccacagatggtagatcctaatgttcatgttctagccacaattggaattcccatgaacacaatagatgtggtcaatcttgtcaccacaatatgtgccacaagtctggccacaacagctagcaaaactgatataagcctcccgctggatctgaggaatttgcccctacctttaagggaggactttccataggtgcatctatctgaaggaagaatccctggggcacccccccgggaacaacatccaggtttcatccccggtactatacaagagagacaagactaggaattggtgagccccacgtggacttgggagaagatcttgagtt

SEQ ID NO: 342721 - DNA, 827 bp, Cannabis indica
aaaaatattatattataattatagatatacaaaaattaatatgctcaaaacattagaaatatatatatacaaaatgtttgaaatttaatttcaacgttataaattatttataattttctaaaaaaattacagatggtctttataaataactataacatatacgattatgaaaaaaataaactaaaaaactctactgaatgtcaaaacagaaaagagagtctacaaaaccacccttttggagtggtgaaatacaattttttttttaattctttttcaaatgattacaggttaactaatagtagtaatatcgtagaaaacttctttggtgcaccgatgcacttccttaatatttttgtatttagaagaattttttagtcaattaagtgttttcatggtcatgtatattgtagttattaaagacatcttacaaaattataaaattaagaataagttataatataaaaggtaatgttcaaatagtctataatgcccatagaaatttattcattacacttgtatctctaatataataataaaatatatatttataatttgtacaataaataagatgcaaaaaaaaaatacataaattcctattacaattatttataaaaactaacaaaaatataaatgaaattgaacatgaagagttagacacatgcattgcacgtgtagcctcacctagtatatattaagtatgttatatgatttatatatcagttatcagaacagtaagcgaacaaaccctcattcctcacccttcgacaaaaccttctccccctatgtccattttgttttattttcaacccaaaacttagcgatctaag

SEQ ID NO: 342722 - DNA, 556 bp, Cannabis indica
tattgtagtgcatatatatatatcaaaattaagtaaaaagaaatttctcatatgcatgcatttgaatttggaagctcaccttattaatattccttttttggactaataatataatcaacacaggtctttttaatgtactttgtatttttgtatttatagaataaaattaatcaattaattttgagataaatgaatattttatattcattgaatgtgaatacaattaattaattaatattctatatatgatcaaaattcaatatttattacccaattcaattgtttgaattaattgttaaaatattctgacaattgatgtgacacaaatactgataaagtatatcacctatcatggccggctttaaccctgtgcaagctgtgcaattgcacagggcccaaccttgcacagggcccaactaaataaaagctaaattttttatcatttttaaatttaaatctttttcagtttatttatttttttatttttttaattaatgacccacctctttatacctagaatctcttccaatttatggtagtttactatttttttttt

SEQ ID NO: 342723 - DNA, 641 bp, Cannabis indica
aaaattgcattaaaatctcccatcaggagccatttatcattagtatccagtttgcataaatcctcccataaggtcttcctgccttctctttcatttgctccatagaccaccgtgagaaaacaacaaaaatttccatctactgtagccaattttaagtgcattagttgactagtgcacttgagaatatccacattaaacttcataggatcccatgcaatcacaattttccctccttgatgccatgctatatttgacgaaaagcaccatccattaaaaacattaaggtacaaggctccaagcttgtgaaccttgacccttgtttcgagaagcccaacaaaaccaacttttgacccctaataaattgctttattagttgttgtttttgttggttgttggctccccgaacattccaaactatgaccttatccattaccaagagagggtcccccccccctctcttgtattagcaatatcatagtcactgttctgctccttcagttctgctacatcagctagtatctccatgtctacacattccgaaaggacctgaaatccatttccaatcttggtaactgaggactgcccctgctcctgagacttcttgcctttttgaacagtttgaaaaccttctgcatcaataa

SEQ ID NO: 342724 - DNA, 318 bp, Cannabis indica
agttcatatttagagtgttaatcaacatacttgtgagtagatctaagatcctggcaaaataaattccaacaaaagcatgctcaaaacaacccaacaacatcaacctgcatctcaatttcataagcacaacccacatcacatttcatgctctttcaacacttaaattcagaaactagaaaaagatcaaagccatagaaaactaccttaaacccaatggaagggcaagctcaaagatccacaacctcaaagcttcaattcaagccgattccaagaaattctaaatttttgaaataggttagggaaagagagagagagaga

SEQ ID NO: 342725 - DNA, 1878 bp, Cannabis indica
ggaatcgactccgggtatctgcttgcaagatacaagccgaacaggataccttgtatgcatgctcaagatgaaacaatcagcaacccgcacagaacgacaaacacttagctagcgaattcagctttctcatcgtgagtcatcaagagaattcctataacttggggatcagattacagagatatggcaagcggtccaaatcccaccatcagtgtattctgcatttactatgcaatctttctacttatatcaatcgtaacgagaaggaaaatacttcctctccaagcacatagccctataaatagtgatgcatattcactggacaaaagagtcgcaaacattctagttgagagatattgtgtaagaattgatattcagagatatttttgtcagagctataagaaaatgaacctttttccttgttcttgagttaatacaaataacaaggattaggctattaccgaactgctcggggctgaacctctataaaattcatgtgtctttatattgttctactatatttcaatcgttataaactacttgtcgcttacaaaaatagactcactgtcattgccttaaaagcgaggtcaacattttggtgctgtcattgagagcagaatcaagaatcactcttcattctaaatttaatcataaatacaatggtagtacaactcgtagggacgtggttgatctagtaaatccacaggcggtggatcctacattgcagaacccaagaaacacaagggttccgccggcagtaaatcctggacaatctacaactgcgggtcaaggcgtgacgactcctgtggatgagattgcgcctggtgtgcaagagactggaaataccagttcaccagccaactagggcgttcatagcacagctgttccacccgctaccaatgttgaaacgaccattggagatgacaccgagatccagaatctctgtgctgctctcggactcatacagggtcataccaacactatcaagatcatgaggaactccgcactgtggtgaatcttgcatttgaagagcagaggcgcatattcaccgaatggacggacaaagagatggaagcgttaagggctcatcatgcagtcattaacaatcgtagtcggcaagccactgtgcagatacgaaaaagcttatcaatctgtcaagcaccaaccccccgaatgtcatccccctggggtcgaaacagacgaagatccagcaatgaatacctctcagactgtaaatggtcagccgccaaatctccggtcacaggttccacctgtggggccaagtagtagatgggcaaaccttgtctagtaaatcatcaggagaagtcatacccaacaattccaaccaggttaatggtgtcggtcaacacattaaccaaaccaaccaatcattgagacaaccaggcattttcgtattcgatagggaacaactcatgatatcagaaacaatctgaataggaggagaggagtagacgatcagcttgatacgccgaatgtgcagcccggaacccgtgctcaaattcccgctaaaaaagatactaacgtgactcagatcggccgaaattccaaacaagttaatccagttgtgcaagcacagttggacgaactaaagagtatattccaaggcatggcttgtcagagaaacaatgatctcgagttggaccgagcacgtggaatgtaacaccctaactaccttaggcgtattacgtgatttttaaacgtactgtgcagctcgttgctaatcaacgaggtttatggaaaaacgtgattaattaaaattttgctttttaattaaacttataaaacaatattacaaaagactcgggatcccgattataaaatcatttacaaaagatttaactgtttaaccattacataaaa

SEQ ID NO: 342726 - DNA, 835 bp, Cannabis indica
gaatatgaattaatagagaaaaaaattaggaaaaataaataaaaaggtgaaataacgagaaaattagaaaattagtttctatggatggatagatagattttttttatttttatttttatatatatatataatatatgtcaattaaaagacactatgaattaatgtgaatatgaattaatagagaaaaataattaagaaaaataaataaaaagttgaaacaataagaaaattaaaaaaattagttttttagaaaagttagagcgtcatgtcactaatcctaataatagaattaaaacactcatacaacctgtcatctcacgtaatctaacaacatcattatataagtatgtagatatatagatagtttcttgaagagttagagtgccatggcactaaccttaacaatagaattatataatatataaatactctctaaaagttattatattaagttttatgagactcgatatttaattacactaatagtgatattaacacatagaaaagtattaagacaccactaatatattttaccatttggaagagatttcaatggttacatttttattgtaaccatcatggttacatttttttaagccattgaattactattcaatggttgtgattaatttaaaaataaaataaaaataaataataaataacttgtaacctgaaagtaacctaataatttatttccttataaaactttaattaaaattaattatattttaaaattaaattaattataactattaattaattttttgtagtttattattatataaggatttttaagcaatttatttttttggcacttaaattatttaaaatttta

SEQ ID NO: 342727 - DNA, 533 bp, Cannabis indica
aacttcttaaataataaataattctaataataattaataaaattgtgtatttagtttttaataagtaaaattattaataataatatgaaataagataatattttaataattttattgtatattagaattatatttttaagtaagtatttaatataatactaaaaaaaaaattcttcacggcggctatattacctaattaaataaagggggttttttatatatagctatatttgattcaaaatttatttttttttttattaccatgtgacaaaataaacaaaattaggaaaattaaagtttttttttcaaaaatacgatagagagacttcttccgcaaaagaacttctccttcttgccgagcaaaacaagtgagttgctctctattgttggcaacacttcaccagaatattaagggatggagatctaaaatcatcaacaaccaacgatgtagaaactttttgcaatctccatgagcgccggctaggaactttgggttgatctccattaacgccggtaagaagttttgcttagat

SEQ ID NO: 342728 - DNA, 628 bp, Cannabis indica
agacaatctggatacgactcggatgaggagcttcagtcgtatcatccatatataatgaataccccttttcctttgggattcaaaaacttgcatgtctcgtcatataacggaaccactgatccggtcttgcatttgaataactttaacacaataatgcaagcgagtaatgtgacgaacaatttacggtgtattttgttccccacctcgcttgttggagcagcgagcagctggtttaacaagtttactcatcattcaataacttcctgggagcaggtgtccagggattttaagaaacagttccaggctgctagggatagacgattcgaagcagcctcgctaaccaacataaagcagcagcccggtgagacacttaaggcatacttaagtcgttttagcacggttgcgggtagggttaggaatttggatgacagcacacaacttatagcccttcaggcagggatctctactgaacaatcaaccaaaggggcgagttgtgggatgacttacaaggtcgtctagtaagaagcatcactgagttcaacgaaagggctcaggtattcgttcggaaggaagaagcccgaaaggaaatgaatttggtgaaaacaagctcgggaagcaaacccagcaa

SEQ ID NO: 342729 - DNA, 845 bp, Cannabis indica
atttaacgccgtagaatctcgaaagaaaagtattattggtaagtattttaattttagtatggataaccctaattgtggcgactattcgtaagacttaaaaaagtatgaaataatggtagaagctcataagatagaatggccttgactcccgcctaaactggacaatgctggattctcatcttgatcgaataaaaggtagctagaatgtttatcattttagatgagcagacaactttattcaatggatggtatctttgactctcgccttaacgggacactaataccagtttgttgaaaaccttggaaattatttaggattgtatgttttagtatttttgcttgtcattcatactcgctaaatgctaataatttcttaatataattttgtgttaaaccttattttatttctttttatttttatttgtagtatccaacatgacaatgaccaatcccatggtatcactgttgactaataataagctcaatggagctaactttatcaaatggagacagaacattaacattactctcattggtgagaatgccatatttgtgttgactgaagaggctcctgcgtagcatggtgagaatgcaacaaaggtagtaaaagagaagtttgagcgttggcagaatgccaacaacaaagcttgatacttcatgttgcctagcatggttgacaccttgaagaaaaggtttgctaacactctcacggctgcagaaatcaagaaccagttaactgaactgttcggaatggcatcaattcatgctcgctttgaagcgactaagaatttcatcaatgcatggatgcaacctcatcggagcgtgcctgatcaccttctccagat

SEQ ID NO: 342730 - DNA, 699 bp, Cannabis indica
actgtaattgaaaaagcactgtagcgtgccttagtattagggcgttacagaaacctagttaaaaaagtcaacatgggcgcccggtgaaaccctaggtgcccatgttgacttttcagttgcaagttcgtgtaatttcaagtctcgggccttggattaggtttctccatgtcttcatggtatagaatactaaaagatagtgagttggattcaagttgggcacggggataaggtcccctcccaggtcaactgctatgacttgggtctactcaactttatgatgtcatccttcatgtcacgtgttaaacattgatgtacacgttaccaggaaaagtttccaggttaacattttcccacaagtcaactttacacatgtgtggctagacaaggttactcgacaaagactactacaaacaagaaaagagctagaaagttcctatccgaccagaagtttgaacaaggacttggggggaaaatataatcccaaactttctccacctgatgtgacatgtccacgtaagtcaagacatagtacattttggaatacaacctcgcaagtagcagaacaaagtctccttacaaaggtatggcaaaagtatcaagcagcaagtataaggagttatgcgagtcgtcaaggagttgtaccaccatatatgaccagccaaggggagtctatagaccgaccaagatgagcttgtatgg

SEQ ID NO: 342731 - DNA, 846 bp, Cannabis indica
tgctgagtcctcttcggtagagaattttgtccatcatgacataacggtgagcctgatactgaatctttctggacagtgccctttcttggggcaactcaccttttgttatgtattcaatgatggggaccatccagctgggttcttgcccaaccgttgttatggcctcttttactttgatgcttggctctgccaagcgttccacgggtactacccccagtttctcaatttcactgtccgaagctaacttagccagacagtccgcgtgagcgttcttttctgtggggattctttccactttatagtccgtgaactcgtggagcaactcccggactattgctacatacacaaccattctttctccgcgtgtctgatactctcccgacacctggttcactaccagctgggagtcgctgtagacctctactcttttggcccccaacgtttttgctagtctcagccctgctatcaaggcttcatattcagcctcgttgtttgaagctgagaagtcgaaccgtagggctgcctggagtcgaagtccactcagagatatcattgcgaccccctctccggatccgttctcgttggaggctccgtctacaaatactttccgtactgggactgatggtgtggctatgcgaggaatgtagtgcaagtgaaactggcttagctccatttcccatttgaggagccttccggatgcctttggcttttgtaggacttgtcggagtgggtggttggtcaataccttgattgggtgagctcggaagtagggtctcaactttctcgaggccattaggaggcaaaaaactagtttttcaatgactgggtaccgcgtctccgctccta

SEQ ID NO: 342732 - DNA, 1086 bp, Cannabis indica
tttttttgcaacccaataactagcaaaaaaccgtcgttgaaaaatacaaaatatataattaaactaaaaattttacaataagcgatggtttagaactgtcccgatacaactataggccacagtttaaaactgtcgcctataatgaacactataggtgacagttttaaactgtggcccatactatttttccgacggttttcaactatcgtctattttacctagtattcacgacgctcgtataggcgacggttttatggactgacgggaattattttcctgacggtgtaaaaccgacgggaatttgagttttttagtagtggaatattgatcccaacttccaacaatttcaaaaaaaaaaatgaagactgttggacaaagaatgagcactagccctgaaggatgaagttgaaaagctgcgcaacaacaacttcataattgaagctttttccccggcttgggtcgcaaatcccgtactagtgcccaagcctaacaagaaatggcgagtctgtattgatttcacagacctcaacaaggcatgccctacagaatgttttccacttccaagaatcgatcagctcgtagatgcaacagcagggcacaaaatattaagcttcatggacgcttactcgggctacaatcaaatcaaaatgcatccaccagaccaagaacacacaagtttccgaacatttatgggtctctattgctacaaagtcatgccgtttggtctaaaaaacgctggagctacataccaaagatttgtaaacaaaatgtttaaagacaagatcgggtgaaatatggaagtgtacgtggatgacatgctcgtcaaatccagaaaggttggggagcacatagacgacctcgacgaatgcttcaaggccctcaaaaaatacaacatgaagctaaatcccttcaagtcttccttcggagtcagctcgggaaagtttctcggcttcatcgtcaatgctcgaagaattgaagctaatccagaaaagattcaagccctactggatatgaactcgccaacaaaaacaaaagaagtgcaaagcttaacttgtcggatcgacgcgctcagcagattcgtttcaa

SEQ ID NO: 342733 - DNA, 515 bp, Cannabis indica
ttattttattatttttttttcaaccgaaggaacactctcagtccatataatataaaaattagaaatttttctaattaattacaaaaattaagcataaaaactcaaattttcctaatattactcattcatgggtaatacccattaagagtgcacccatatatatatatttatagaaaattagatttgagttaaaaattaattatttaatgaaatttagaccaacttaaattaagtaattttcataatatttatttgaaaattaatactaaggatagaaagtaaatttttattttagatcaatccaagtaaatacataatttataaatattaaattaaatatttttacagttatctaaattagtaatttttgattaaataaatatatgaatattaaaataaatagattacaataagtataaaatgaaaatacaatcctttaaaataatgggctttgctatgggatatttgatctccattgattgttctacatagttcttgttttaatgagattcatc

SEQ ID NO: 342734 - DNA, 1092 bp, Cannabis indica
taagtaatagtgtaagaggtattttggtaattaaaatcacataaaaggtataaatgttatccacaccttatgaagatatttttgtaaataaagtgtcaatttatattcactgctacttttagtgaaaactttttagtcttaacataatttttttgtgactaaatgtgacttttagtcacaacaaaatattacttgtggttaaaatatagtctttagctacaagttgtcgctaatttagttttagtcataacaagtattgtgacttgtaatttttttgactaatatctttagccacggactttttagttacaatatagaaatggtaatttataattagtcacaattttttttttaattttagtcacaaattttgttgtgactaaaagtaagattttttatagtgatttttcatataataattcctaattaaatataaggtgattggtaaatctctgagcaacactatttttgtgtgcaagtacagtaaagaggttgctactcatcatgtgtttgtttgagtagatattggaattggcgatctaagtcttatcaggagctggaaagagctttgaggtagatcaatggtgtaagcactccaagttcagaagaaacgtatagttgtaattgtaatacccggaattaagaaatggattagcaaaaccctaactagataattatgtataattgaggaaattatattattatataatttaatatatgtgaaattatatgaattttattatgttaagaccccgttggtgagccaggggcattttagtaattatgacccgagaagggtaaaattatgaaattaatttgattacgtgcttaatggaactatattattatatagtatacctgtgttgtcttttcaggtgtgttctgacaggttagcgcggtatagtcacaaccgggaatttcgggccgaaccgggttcgggcccgaaatgtaaattggattgataatttggcattttatttgatgaatgataatctgaaatttatttgaaattaattgagtattgaaatgacttatttacccttgtgagggtgtaggtgtgaataataagccatgagggcattttggtcattt

SEQ ID NO: 342735 - DNA, 868 bp, Cannabis indica
acatatcaaagttcattacaaaacagacatcaaatctgttagaacagataatgccaaagaactcactctcactagcttctatgcaagcaaaggagttctcaatcatcactcttgtgttggccgcccacaacaaaatgctgtggttgaacgtaaacatcagcatatactcacagtagcccgtgccttagcattccaatccaacttacctttattatattggggttatatggtcaagacagcaacatatctcataaataggacaccatccattcttctacatgataaaacctcctatgaattgctgcacaaatcatccccacaataccatcacttacgcaactttggatgcttagcctatgcctcacacgttcacatcccaaataaattttcaccaagggctcgagcttgcatattcataggttatcctgacaacatgaaagcctacactctccttgacatccaatctcacaccatcttccactcaagagatgtacttttttatgaaaatatattccctctcaaacacggtcatcacaacataaaccatcaaatcgacagtttttttatctcttcacctccatcagataactctgatgcaactacaaaccaacaaattccaactgttgacatcccagcagcaaccacaaaaacatatcctgttgtccaaaatcaatttcccattgctgaaatcccagcagaaacccaaccaacacaaccggttgtaccacactcacacattcccaatcaactatcagacaactctgataaacataagcaaaaaccttctcccactgctgaaatcccagcagccttaccaacaacaccatctgctatacccaactcccacattcacaccaaaagtggtcga

SEQ ID NO: 342736 - DNA, 599 bp, Cannabis indica
agagctaaaggcacaacttgcaaacctcccatactttcaaaacctttggactgtgcggaactgggaatatacttaactgtcacggaacttgccgtgagtgccatgctgatcagagaagaaaaaaacgtacaacatccagtctattacatcagtaaaagactcattgaggccgagggccgatatccgttgatagaaaaactcacctactgcctcatttaagcaacaaggaagttgaggccttatttccaagctcatcctattcgggtatataccgaccagccactacgacaaatattgcaaaagccagatgcttctggacggttactcaagtgggcagtagagttgggccagtacgaaatcacttttcaaccctgaacagcaatcaaaagccaagccttggcagactttgtggtagaatgcataagcaagaaagaaagcataccagaaagaaatcccgagctggcaccaatacctcagccaagtcacaatgaggatgaaccaacctggaaactacatgtggatgggttggctacagatcaactatcaactacatgagctggcaccaacacctgcacactgcagttaagtttggattcaaa

SEQ ID NO: 342737 - DNA, 858 bp, Cannabis indica
gacttggatcaactagatctttttggaaaacctctgaatcaggcagcgaaacaccaaccctagttgggttctaaggtgttcgaaaaagagagatagaactaggagagagagtgtctcttttcttgaaatttttcataattttttaaaatagaagaataaaaaggtttatactaactataaatattagcttaataaacattaaaaattcggattaatacttaacattaaatccctactaaaagacagaaactcaataggcaaaaagaccataatgcccttgccttacactaaaagtcataaaaaaaatcacttaagggtaaattggtcactttaaaatctcgactattcctgacattccccatgtctagctatactgccccgctatactaaaaatacaaaaatgtgattataatagccaaacgccgcgttccaatgttgccgggcacaaaacatgcaaaaatataaatttttatatatgatatataaaatgcattctgaattcaaataaatctccgtaaactgaaaaattcataacaaatatacaagtttcataattaaatcctatttatctgctaattttcaaattaacgttaagcggtctttacaattatccccgcattaaaaggatttcgtcctcgaaatctaacctgaacaactttggatactgagttctcatatcgaattctaactcccaggtgtgaatattttaccagcatctagatttactaacaagtctgttgattaacatcctaaatataaattctctaaaacaatgaaacaaacacataagggtttaagaaaacattacgttgattgcagtggaatataatgactccttccgttcaagatctctagccc

SEQ ID NO: 342738 - DNA, 526 bp, Cannabis indica
caatccgcacaagtgcggatatccgcactttgcggattggattggaatggatcgtgcagattggattggatcggctatttatgaacaccctaattaaaatatatatatttttttcttaatttttttttttaagaatcactgccccacctccaccttacttttatgtgagtccacttattttcctttccaaagaaaaaaaaaagatttttcatttttacacttcaaaataatttatttttacatttttaaataattatacatagaaatccctcttgcaactagcgctgcaacctaaattgcaacaaaaaatcgtacagaaacctctattgcaactagtgctgcagtcactttagaaacacaaaccgtaaattttaaaaaaaagttaaaaaaaaatagtatttggggtaattctccaaaaagaatctgttaatgtgttttttatattttatatattttataaactttaacttttttttactaaatttaaaatatacttacgtcaacagttttttgttttttttttttt

SEQ ID NO: 342739 - DNA, 552 bp, Cannabis indica
tttggtataagggattcaaaataatctgattaaggggaatattatgaaggagaatatgattatctgtaaacttattacattgtttggttattcatggcaatattaattagattactgttaattaaattatagtctttggttgagcacatgaatcttatatactattttagaatagtgaaataaaaataaaataataattattatatctctttcaacataattataaataaagtaaaattattatttgtaaaaacaaatatatttattaataaataaatttagttgcaatgtgtttgtccaattgatgagccagcaaccaaagttgcaacgacaagagagcgatgcgatgttgaattttaacgaaaaagttgtgataattttgtattgtttgaaagagtaaataggaaagatggtgagaataataaaaatggtagattaagttgtgataattttgtattgtttgacaaagtaaatagaagaagatgatgaggataatattaataacagattaaaagtgaagtattatatatatatattataaacatcttttct

SEQ ID NO: 342740 - DNA, 607 bp, Cannabis indica
tatgcaacatagcatcaagagaagaatagaatatatttagcttatcaatggcattcgtttttgttttttttttttgaaaataagaggttgcatagataaagaaattagacctcccagtcattacaaacgatagaaacaggtatggaggagactccataactcctgtaaaaatctgggcgaaagcccatctagccacattatgggcagcaaaattacaaacacgggatataaacacaaagttacaagaaagaaactaattagagagttgattacacaaagatacataattattaatattccaaatatagtgcattccttttgtgctttgataatcacttctgaattactctccactaagacatagtcatgcttcctgagcctcgccgtgttagaacgcaagctgacacgccgccgcctcaccaatcagagggtccctaaagttaagacaggacgtagcagcccacacaaccactcctgagtgatctctggccagggccgcaatgcacatggagtctccaccaactttaacataacagttgattttgatccagtctccggcggaggcgtccaagaaggcttgggttttatgccctaaataaaactcttt

SEQ ID NO: 342741 - DNA, 1473 bp, Cannabis indica
aattaattgaaatatgtggatataatgttaatttatttatttgtgaaataaaaatattttcaggtttgttgaccctgaagactcggtaagtggataaataagcgtaatttgttaattacagagatttatttgaaatacgtggatataatatgagttattgtgaaataaaaatattctcagattcggcgaccctggagacctaattagaggccaaaaatagcaaaataattttagttagaaatattaataggattattaagataagttgattttagaaatagcagggtattttagagtacgcagagttgaccaaatactctagaattaaagattttttagtagctaagaaataataaaataattattaataataaaaaatttattaatattactatactattatataattgttatactattataactgttatattattataatattaatattattaaaatttattgttagataagtttataaataaaatagtataaaagaaccctccattctctgtcgaacaagatcctcatcctttcttttcattttatttgattttcaacccgaaacctagcgatctaagctctagcagtagcaagatagcaaatcattgaagagggaaagcttaaggtatggtttaattttattttaagttgaaaaatgattggtttttttatagtgactttgtgatttagaatagttacggagcttttgacttcgtagaattgttatttggtagttataagactagtttcgatgtttacttgttgaatttgatgtgattttgagttagaaatcgagtttggaactttttaaatcttagtctgaacattaatggcgttttccgtttaagggctcgcttttaattttggttagttggaattgtagtagatatggtatatatgtgtcctgtaaaatttggaatgatttggatagatttgggggtgtttcgatgagtgaaaaatttggaattttcgtgttctaccatttttgaaaattcttaggagatcagaaatagtatttttatcataacttcttactcgggtgtccgttttggacgttctatataccgtttcgaagcttgaaacaaactctacaatatggtttatgttttagaaccaaaatataagtttaattttagcatatttataccgcgaagtttggttaaaaaccctaggttgtcttatgtgaatattaagtagtgttttgggataaacagttattagcttaccattgttgtgacatagggccaagattattagggatgtttctccacttgagttggccgacatgcatactactttaaaacttgtttgataattgtttgagaaaaaattaataaattacacatgattttgagatatgatataggcaatctttttggatcgactgaggttttcaagcctaccctattttgtaaatgttggaatttattttaccaggatcttagatctactcacaagtatgttgtttaa

SEQ ID NO: 342742 - DNA, 739 bp, Cannabis indica
agtctagtcttttcacttctataagagagagatagaaggaagacagagagagaataagagagaagattagagggatttgcttagggttctaagctgagagttctgttcttgaagagggtcaagaacaaggggtgtactcgggtgttagagagaaaactgtgactgttttctctggtgtgtgtcgagtaccatctgagctgtgattgctctggttattgtaattgtactgttgctctcttattcacatattaatgaagattggtgatgtttctcagctggagtatggccagggatcatattaatctctaggaccggaaccaggataaaattgtgtgttgttctttgtttgatttcagatttgagtcattgtggagattaattggtttatgttcattttactgtcaaagtgttgagatcattgcagattttatgattgaatcctcaaggttatttccgctgaaattacaacagtttgtaatgaaattgtatccaagttgggtgtcaagaacttctacactccaacttgaagggggttgttagacttagttatgttagttaagttcaattattctgttagttaagattttgttactctatcaacagagtttgttatattcagtcgagcctatatatatgtgctcttattcatttgtacaattcaaccaaatatacaataaaagagtactttttcttttctctgttttctctaataatagaagcaatcagtgttgctataatg

SEQ ID NO: 342743 - DNA, 895 bp, Cannabis indica
  modified_base (12)..(12): a, c, t, g, unknown or other
  modified_base (18)..(18): a, c, t, g, unknown or other
ctctctctctcnctctcnctctctctctctctctctctctctctctctctctctctctctctctctctctctctctctctctctctctctctctctctaagtttctatctcaatttggtagctctagggtcatccaattcgtagcctaaaatgttctatttaaattgcttgaaaagatagataaatccccatagaattaagatttttttttttttttaaaaaaaagataagtacggtgctatagcgcctgagacctgcgctatatcgcccatgagatattttttgaataacccacgtgttgaaattatatttttttttccagacctacgctatagtgcctagaacctgcactataacgcatagcaccatttttcatactccaacttgtttctcgactcggttgctccttgtttctgtcacctgattagtattttggtcataacttctttataacaactcagaattggacgattcaagataacccattaaagctaagagcgagatctaaaactttcatgttgagttccaagtccagttctacttttaaggtcatcaaaatttgcaattaagttctgccttgtaaaaccgagttcaaccattttctactaaaatgtgctaacatccctccaaatgactctaaatgcatgattaatctttaaaatattcaaaataattaaaaatcacactaatcaataatttaaagaatcaatttaagaatattaatacataaactgtttatatttatatgacaaatatggactcatcaaatttctccacacttgactcttgctcgtccttgagtaagttaataataaaatgaatgatacttaagaaaatcgatctttatgaaaaataattttagttttaaaaattgtgcatccacttataattccaa

SEQ ID NO: 342744 - DNA, 562 bp, Cannabis indica
ggcttcatcaatgacttggaggaatcatgtttctaagtcatgccaactcatttcacattacaatgtaggcttgatcatttcatctattcacaagtgtcacgggctcaccttttcaggcagcggaacacccgtgcggcaccttgacttctctaagccaaggtcagccttccaaccatccgagtaacaatgggctcatttttcgcgcgaccgtgtgcctcgtgcacacttccgtctctcgaacaactcccgccgagtcatgctcgcaagcatccatgagtgcatccatgcatcgaggctctctagccaagatactcacactgtccataggttcccaccatggtaagacaaatcccaacaccgacgctcaccttgtcactcgtgaccaaggtagcatgtgtggcaagatgccaacaccaagccaacgtgccaacgcctctatcatgccccattcgatactgtccgaatagtctctctcgtcgcccaaggactcccatacgtccatggaccaatcctcaaggcaccatgcctccacgcatgttggcaggccctcaagacaagccac

SEQ ID NO: 342745 - DNA, 1483 bp, Cannabis indica
ttcaaccaagactatataaatatgtggaaaatactcacaagacaaatattatcaagaaaatattattttacaaaatttcaccaaatggcaatgctttggcaacttggagcttcggccactcacaataatgttctaaaagaacactttcctttaaaaataaatcccataatatttatgtcataaatatttaagttttacttccagttgtaaataaatacctcagtttaattttttaagataataatacctaagttataattttgaaacttatataagtacctggttaaataaattggcacgtgacaattcctgattggtccaagtcattaaatttttattatttaaaaaaaaattagttcaaatataccaataagaaaatgacatgtgaatttaatggcttaatatttaacggttaggtacctacagaattctaaaaatataacttaagtatcattactacaaaaaattaaacttaagtatttatttacaactggaaatttaacttagacatttataccgtaaattactcttctctaaaatacagaaatttctacattttgctaccgtttaaaaacttttttttttttttttttgcctgaattgtttaaacacttttaattagtttccttttatctagttatgtaaatatatatacatacacaatattcaacttatatagtagaaaaaaacagagaaactatagtatctagtaaaaactattgtgtataaaaaaaacaaatcttggtaatgtacttttaaaaataggacaaatggtcaagatcactatgaagatgaagtctatgaatggcataaagaagaataggcattaagggcaagttgataaactttcttcaattcaaaagcattaaggtttagtactacagcctaattatgtatgcttgatcacctttttcagtactaaaagacaataaaaaaaagtatgcaagctgatttccaaatgaaaagttaggaaagaaaacaagcctttaatagtaaatggatccaattgctttgcaaagcactcttatattggaaactaaaggtgatataataacaccaacttgtgtagttggatattcataaatattataacatatatacacacactatctttttcatgtactagtttctactactaattataaatatataataagctaggcctgcacaagaatattttatacaaagaaggcactttcaatttcaaccatcaacaatgctttcaaagacaaaatggaaactaagacttcgagattgatctattggcattgagtggaagatatgctaaagcaataaaataaatatgtatgaataactcattaaacaagccatgactatgcgatgtatagataattaacttagtttttttcattaaatttagttgcatatagttagtcttgaatatgtgaaatcagaactaaaggttttgaattgtatgcatagtgaatgtgtagtgtgtacataccagcatgtaggtcgaaac

SEQ ID NO: 342746 - DNA, 673 bp, Cannabis indica
atgctaatgaaaattattttaaaaagcaagtaaataatacattatcagaagtaaccggagatggtgctggtggagcagctgcacaaggtgtggctggtggggcaacaagtggaggtgttggaatagtggccttgggaggtgttggaatagtggccttgggagctggtggagcagaggccttgggagctggtggagcagaggccttgggagctggtggagcagaggccctggcatttggtggagtagaggccctgccagttggtggagcagaggccctggcagtaggtgttgctcctagaactgaggtaacagcagcaaaagctggttcgttggatgctcccccaacacctgaaccagatgcatgtgaggtgcccgcaacaccactttggctttggactatttggaggagtttatttaataattcgtcttgtctacgacgatgttcctctgactcttcaagtcgcttctccacctcactcatacgatcattgtcatcgactctctttcttttaggacgcggggttttgaaaaactgtgtctgtgtgacaccaccccccattcctctaacacgtcctccatgctcttctgttcccaaggctagagtgagtatgtcttttgagccttctactaatattgtcccctcctcaacttgctttcgtatctcagcctacat

SEQ ID NO: 342747 - DNA, 777 bp, Cannabis indica
agagcattcctcaatctcatccgaaaacctcatgggattgaacacattacaagtcacttgttgatcattcaccctcatagtaagctcccctttttgcacatcaatcaaggtcccgaggaatggccttcgcaaaataataggaacttcttcatccgcctaataattaagaatgatgaaatcttccaaaaaaatgaacttatcaacttgtactaaaacaacttcaatttttccttccagatgagctatggaacgatcggctaattacaaagtgacggtggttggccttacttctcaaatccccaacttcttaaaaatagacaagggcattaaattaatactagctcccaaggcacataaagctctgcccacatctcttttgccaatggtacatgggattgtaaaacttcccaaatctgtcaacttaggaggaatttttctcttcagcatagcactacacccttccgtcaaagccacaatttcaaactcacctagccttcttttctttgtcaaaatgtccttaaaaaatttacatagttgggcatttgctccaaaactttcactaatggtatgttgatgtggagttgctttagaacatcaagaatcttcaaaattgaccatcttcttgctgcattttgaatcgttgaggaaatggtggaggtggcttgctatgttacttctctgctgcatttttatgagaaatcgatgtcgcattttgttcaagttgctctttttccatattagaacgttcaacatttttttctttttccactcgacttt

SEQ ID NO: 342748 - DNA, 998 bp, Cannabis indica
gtttgtttttcctcaagtagatccaaggacaattttaaaagttcctagttttctgcttgattatatcgatatgttcacttcaacaggcaacatcgcttccgagccaaaggctagcgagaaaggagtgttacatgtagctgtcttctcggtagttcctgtgggcccagagcacctaaggtagctcatcaacccatctgcctttggcagcgtctagcttcttcttgatagtatcctttagggttttattaacggcttccacttgtccatttgcctgaggcctggatattgacgagaagcttttgctaattttattcctctcgcagaattcagtgaacaagtcaccatcaaattgggttccattatcggataatatcttcatgggaattctaaacctacagataatgttcttgataacaaagtgaggactttcttgcaagttatggaaacgaggggttcggcctccgtccatttagtgaagaagtcgactgctactaccgcatacttaactcctcctcacccagtgggtaatgccccaattaggttaatttcccatatagcaaatgggtagggcgagatcatcattctaaattctgttggtggtacgcgaggtatatttgaaaacctttgacacttattgcatttcttgacaaactcgtgtgtgtccttattgatcgttggcgagtaatatacttgtctagtgatctttttagacagactttgccagcccgcatgatccccacagaagccttcatgaatttcttggatgatttcatttgcttctgcagggagaacacaccgaagtaggggcattgagtaccctcttctgtatagtttgccttcgataattgtgtagcaaagcactaaatcaatagtttcgtgcctcgtttttttcatttgaaagttgtacgtcgagtaaataattgataaaggcatcatccatgttggagagctatctatcatctcaacgtcttcagtttcacatatacttagctcgctca

SEQ ID NO: 342749 - DNA, 1062 bp, Cannabis indica
gacatcacaagaaattcatagtgtccatattctgtacagaacgcagttttcgggatatcttcctctcgaattctcagctgatgatagcctgagcgaagattgatcttggaaaagaccgtcttccccttcagttgatcaaacaaatcatctattcaaggtaaaggatacttgttgttgatggtgagcttgttcaactcccgaaaatcaatgcacattcgcagggttctgtctttcttcttcacaaacaaaactggagcaccccaaggtgagtagctcggtctgatgaatcccagattcagtaattcttgtaattgtacctttaattccttcaactcaggtggagccattcggtacggtgccttagatactagatccactctcggaaccaattcaataactaattcaatttcccgggtaggtggaaatctcggcatatcttctagaaagacatcgaggaactcgcataccaatctcatattctcaagccctattatcacaggttggctggtatccactgcggtaactatgaaccccagacaacgtctgctcatcaggtccttagctttcaacagtgttattcttggtatgcgtgtaccttgaatctgttggaaattattttaccaggatcttagatctactcacaagtatgttgattaacaccctaaacataaacttctaaaacaattataaataaacacatataaagtatgagaaaccttacattgggtgcaacggaataatatgtctcattatcaagatctgaacccgaatgtccttcttgttgaatttctttcctcacgatcttccacactatgattgaggtactacttgttgtgtgtgggcactactctatcactaagagggttcgaaacaatcaatgaagaagaagaaaggagagtggcagctaggtttagtgtgatggctcaggtttttctctgaaaggaataagatgcaaagttacttttcctgaagccatcactatctatttatagcatgccacatagggttaagtttgaattatttggcattaaaataataaaaatattaaatgataaagcctac

SEQ ID NO: 342750 - DNA, 539 bp, Cannabis indica
tcagagataagctcgactcatggtgcagtaagtgttgagagtaaatactttactgcttatgtgatcaattaattaccgctttctattttaggcagtatgtaagcatctaaggtatttatgtgatatatgatgccatgcttaaaatgctatatgttaagtgtttaattatatgaagtaaatagttaagttagggtttaaggtattaagtgcataagtgtggtattggtgcttaactcgctggagttgttgattacaggggtacttataaaaatggaccctccgcaatcatctagaccactaggcgagcaagtagagcatggtgtagaacaaaccaatccaccagcaccgcctgcacctctgtagaattcggaggataatgcaggggttggcaatgctaatcctcctgctgactggcagcagatgttccaagaaatgcgaggtatcatacttcgtcaagaggaagaactgcgttgattaagggaaccgtcaccggctgcccatgttgagcaagtgttaccaccagcgcctgtgctagtgat

SEQ ID NO: 342751 - DNA, 762 bp, Cannabis indica
ggggtttatgatgccgcacatagattctgtgtttgaacattttgtgaagctgcaacctccaacttttctgggaggtactgacataattaaggctgagcagtggatgagtacaatcacccgtatccttgataatatgggagtgacgggaacagagagagtgaattgtgcagctttcatgttacaagatcatgcccgcgtctggtgggatattgtgggacagactcgtgacgtcagtgtaatgacttgggatgagtttaagaatttgtttgaagaaaaattttataacatcgcagtgaggacttcacatatggaagattttgtgaaactaactcaggggaagatgtctgtggccgagtacactatagagtttgatcagctgtccaagtttgctggtgatctggtgcccacagatttcaccaggaaacagaaatatgtgagaagactgaatgccacaatcagtcgggacttgaaaattaccacttcacatgacactttgtacaagaaagtggtagagctagccttaattgctgaggaggctgagaaacatgtagtgaaagagcagactgcaaaggatgccgtcacggcagcgaaccctcctgctagtggtaatatcagtaaggggactgacaatggtaaccctgatcacaaacggaaggttgatgcttctggaacatgagggggtaatagaaagtttcgcggaaacagaggtggtcgtcagggccaagtctaacaccctaactaacataggcgtattacgtgatt

SEQ ID NO: 342752 - DNA, 782 bp, Cannabis indica
ttatgttctaaaaggcctcttcgaactcttttgtcaactcgaactttttgttgcctcgaagtatgttaaaaaatggcacacacttatcagttgacttcaaaatgaatctgttaagtgcaaccattcttcctgtcactgcttgtacttccttaggctttgtcagtgatgacatgtttattaatgccttgattttttcaggatttgtttcaatacccctcgcattaactatgaatcccaaaaactttcctgaggaaactccaaaggaacatttttcgggtttagcttcatgttatacttctttaatatcttaaagcatttcgcgaggtctgaggtatgatccttactttttattgattttgccaacatatcatcagtgtaaaccaccatgtttttccctatttgggttgcgaacattttgtttaccaatcgctgatacattgcctagcgttcttcagcccaaacaacatgactttataacaatagagtcccatgtttgttacaaagcttgtatgttcttgatctgagacatatatttttatctagttatatcaagaatatgcgtccataaatgacataagctcgtgcccagcagtttcatccaccaactggtcaatcctgggaagtggaaaataatttttaggacacgccttattcagattagaaaagtcgatacaagttctccaagtcccgttaggctttaggacgagaacaggactagctatccacgagggatagaacagctcgcgtataaagtcgtttgactaacaacttgtccacttcct

SEQ ID NO: 342753 - DNA, 794 bp, Cannabis indica
aaaaattattctattatttattgtgaaaaatgttaaagatattaatttgcatatatttatcaagtatcatccaccacttcacttatttcacaataaaattgaataaaatgtgatggaagaactttttagtaaaagttatattccaagaagtattatttgcaagtcgtatattttaaagagcataatttagtaatataaaaaatttaaggactaaaatattatttattctattaaaaataataactttttatttttaatggttcaatgcgataccaaacttatatatatattgaacaacttcttcagttctttttttttttgattaatgggacccctggaagcgccagggaacgcaaacaacaaaccaggccaagcagcctaacaggaaacatgcacagaaggaaaaacagcaggctaagccagaaaaagactaaacaactaccaataaactaaactaaaattaaaaatagtcagtccaacaaacagctactaacaaagaggaaggatttaagtcatccaatctctgtaagaacagagcgtagaggaccatcctcaagggacaaatcaagccagccgaaacagttgttttgatttgcccatttcgccaatgaatgggccacactattgagatttctgggtatccaagaagcttcccagagattgaaaatgctcgaaataccgataaacttaagcaccagctcctggatattaaaattcagcgagttgatatcctgcaatttggttttcagggcagagattgcattagcacagtcattttggaagattaccttcct

SEQ ID NO: 342754 - DNA, 1499 bp, Cannabis indica
ttggggtctggatccccatctatatctgggtctgggtcagggtttggggtcccaagtctgtttctgggttcgattctgaatctgggtcccggtctcggtacttgttcaagtttggatctaggtctgggtttggttctggttccaagtctgggtcccgagttccgatcccggtcagggcttggggtctgaggtcgggtctgggtttggttgtagttctgggtacgggtctgagtttgagtcttggtttagggtttagggtttagcggttataatttaaggtttagggtttagtgtttagggagtagggtttaggtttcagggtttagggtttaacatttggcgtttagggtttaggtttagggattaaggttcatggtttagggtttagggtaattaataataaatgtaattatcattacttattattaacgcaaatttttgttaactaattaacaagcctttttcgtaataaagttgacaaaaactataagaaatttgaaaagaataataaaaacgataatggcaccatgtttttacgtggttttgcaattaattcggcatagtccacgagtctatcttattcagatatttcaggatacggtgtattacaattagtgatcttttttctctaggatttttctgtccttttttctgtatattctgcccctatttatagtaatataggttggtagttgattacatttgaattcaaattgcataacaataaatctcaaaattttgtgctttaattacgtcccatttaaacacgtataaataatattactaaatcacacagctgtgatttaaactgtctttaaggtggtcaacgctgacatagatgagaacatcctaccaaaggtatttcgctggacgcatcttgccttgtacatagatgaatgacttagtttattcatatgttttccagcaatggcatgagcaccagtgtactgggcaaacttaagaactgctctttgaccataaggtcttgtagcctggataatcatgtcgtacatgttcccagttatcacacttagttatataatgtgagttatacgctaagtgtttcaacaaccaattcacctcgtcaatactttcttagcgagataaatgcctcgctatgtattatcagtaactcttcgtgtcgcgaggtggatgcctcaatatacattgtccgtaattacctcgggattatgctttctgagacgaaatggtttttcgtcaatacagaaattgatagtttatgtatccttgtctcgcttaagactatgtagtcaatgagttatgaatatactctattaattctatatttaatgagtgttgacttcgcttttagccaacgacaatgagtctttttgataagcgatgaacgatatgtcgtaataaaaatataataaagcaataataagacacaggaattttatagaggttcagccccgagctgttcggtaatagcttaatcctcattatttgtattgacttaagaacaaggaagaagattc

SEQ ID NO: 342755 - DNA, 619 bp, Cannabis indica
tgcttcttctactgctcaccctaataataaatatgtgtcttataataggttaacacaacactttcgagcagcggctcttgctgcccatacctttgtagaacctaccacctacaaaatggcaacaaaaaatcccatgttgaaaaaagccatggatactgaaactgatgctcttgaacccaatgacacttggatcgttctcactcttcccgatggtcaccatgccattgactgcaaatcggtatacaaaatcaaatacgatgttgatggctttgttgatcgatgtaaagcacgattcgttgttaaagttttcaaccaaaaacaaggtattgattattttcacacatttgcccctgttgcaaagtttaataccatgaaacttatgctcgctgttgcggccattaacaattgatctctgtaccaaattgatatcaacaatgcctttcttcatggaaatttaaatgaaactgtctttatgacacccccaaaagggtacaaacccaagatcatggcaatttaaatgaaactgtctattgttggaaatattttaccaggatctagatttacgaccatgtatgtttcattaacatcataatatgtttctaaaacaatgaaataaaca

SEQ ID NO: 342756 - DNA, 482 bp, Cannabis indica
cttaagtatgccttaagtgtctctcgcctggttgttgctttatattggttagcgaggccgcttttggtcgtctatccgtagcagcctggaattatttcttgaaatccgtggacagctgctcccaggaagttattgaatggtgagtgaacttgttaaaccagctgctcgctgctccaacaagcgaggtggggaacaagatacaacaaaaattgtttgtcacataacttgctcgcattattgtattaaagttgttcaaatgcgagactggatcagtggttccgtcatacaacgagacatgcgagtttttgaatcccgaaggaaaaagggtattcataatatctgggtgatacaactcaagtgcttcgtctaagttgtatccaaattgtttccctagttcccccacttaatatctcctgaacttttcctccaactcgtctattcggaattggatgggatcctcttgttggatatttattttacca

SEQ ID NO: 342757 - DNA, 525 bp, Cannabis indica
ttcggaccccacacggggatctaactcatcttcttcagccacttctggctcaatggattcccggaccattagtaccggcaggtgggttgcgacattgtaacattgccttgcttccccctggtttcctctcaccgtcccgatcccagcttcctgggtagggaactttaggcacaggtgccgaatggatgtgaccgcgccaaaatctaccaaggccggtcggccgaggatcgcgttgtaagcagttggacagtccaccaccacgaaagtgcagtatttaaatgtgctctggggggtgtccgggcacaaggtgactggaagccttacttttcccatcgggataagtgtcgtcccattaaaccctgtgagttgggacccactgggcgagaggtctcggtccgtcaagcctattgcggtgaaggcctccttgaagagtaggttcacggaacttccattgtcaattaagactctggccaccactttattagcgatgggggtctctatgaccaatgggtcatgatgagggaa

SEQ ID NO: 342758 - DNA, 969 bp, Cannabis indica
tgggcagatacaagttcataaaaataaaggatttcagccaggctgggccaagcccagcctctggcaacataaaaaataaacaagcctgagagcaggcgatatgcttgggggataagttggtaaggcgcaaggccaataaaaactaagagattgatgaaataatcctgaagcggtagcattgccccggacatgaggtgagtctggctccaagctctgaagccaccataattatagttgggtgtctcctcgtctctgggaagacggtgaaagactccagaaatagaaggcatgatcccggccatagtgacgatcttctccagttggtgaacgcaggttagagttgaatgcaactcatcagcctcccagccggtagatcggcaagtatatttctcctggaccacaggtcccttcatcacttccttaagggtggccatggtgttagaacctttgtctaaggatttcgctccggtcgtggggatagacatgtctcgagattagtaagattctgaaaaagcgaaatccagcagttagcccccaaacaaaaccctaacataaaaggagggaatgggggtcccctaaccgctggaaagaggcccccttcggatgtctgccagaaataaatccatggattttccttggcatacatcgggtgcaaatatcccaaaggcagcgaaagtaggagaaaaaggaaaagacaaaaagagagagggacataagtttgaaaaccgtgtcatactcttaacagtccctaagcaaaaaagtgtttacaaaatgaaaaagaaaggaagtagcagaacacagatgaaaagatacgccatccaacggccttcaccaaaatattcaaccgtagaaatcaaatacgactctaccaaaaactctgctctagcatgcaaatgaatagcaaaagcaaaatgtacccacaaaacttacataaaggtaatgaactggaagttgatgatgatcgacggt

SEQ ID NO: 342759 - DNA, 1125 bp, Cannabis indica
tacactatctaaattgaagtaattgctaataaagaattgaagtaattgctatagatcaatcaggtacgcatatttaattattatatattattattgtattctatgttatatacaaattcatcttgggttaattattaatttttctattagatagacgaaatccaagattaaaaatatgatagtccattctcgtaggagtcatctccaatcacagatcaacaacaatgttataggttttaaaggaattcatgtttctaaataggtagaaattcatattaaggttaccgttatggattaaaagtaatttatttaaaagttatctatgaaaattctgtcaaataaacaaaaatatattctgttaaaatttgatagaatagaaaaacataagaatgctaaataacattctgttatataatcaattttaatatagataaagatatatttatattttctttcctaaataatatatttatataggcaaacgcgtcataaacatatgagaaacatatgggattgatatgtcaacaattcaacatcatataagaagaggcttttggggctcaacatactatttaataattatacttttaagtagaaattaataagtagctagccccaacaggtgaagtacatgacttttcgcatggagtcttcagactgtttaaaagtgtcatctgatttagttaaaaattgggagagagcaagagaggagtgaggacagagtttgttggcctgagagaatgatcttatattggtctttgtctggctatggaatgatcttataacaaagttccatctacaaactcccaattggtccttcaatgcctcaactactgctccaatacttgcggccacaacccaagctgatctagtagctgaacccataatattattctctcttaatcttaattacaatttacaatttatcatccaagttagaaaccaaccaaaccggccgctatgtgtaaggatcttgtgctagtattctagaggttaataatgacctatatattaagtttggttattggggtgggttttcttataaacatgtagtactcttgtagataactataggtagaatctaactatagtggacggtgtccattaataatgaattaatttaat

SEQ ID NO: 342760 - DNA, 873 bp, Cannabis indica
tttacttttttcctattattttctcttaaggattcttactcatacttgtatcctttcccagcttgctgctgaggccggccgcctttccaagacttaattaatcatggtttcgcctatctgactttggtggcatggacgaagttatgaagatccttcaggatttgactgctgaaaggcgcctttaccaggaggacgccgagcgccgggaggcccttgccaaaggccagtgaggaagaggccaggcggagggaggcacaagcggaggcgatgatccgggaggaggcccttcagggggataggctggaggccaggcaccaagaagagctgagggcggagggcgaagctgctgctaaggccaggcgtgagctttgggaggctaaggaagccttggatgaaatggctaccaaggttaagtccttagaggaagttcaccaggcagacttggagtctagggccaacctggccgtggagctgaaggagctcaaggacttcaaagaccaagccttgaagaaggcaaagaaagatgagctcctttctcccacttcctacagccggtgcgtcaagcgtttcgacgacggcgtctacatggcctggtctacaaatgaccagaatatcaacttgtatcccaaacccacgaagatgattgcaaaatttcgggagaagaagaagaagcttgatgccatgctggaggcgcgcattggtcctcgccttcctcctcgtgttgacaaggccgctctgagttccacccattactaccaggatttcacccttctctttttttttttatatatttacagctaattatcttgtacttaagacaatttctatttcatagctgttttatttaagggagacaatatttaaggcctgtcc

SEQ ID NO: 342761 - DNA, 523 bp, Cannabis indica
ggcagggtgccttgggtgccagatgggtgagtcctccgtccaagatttcggaggcacgcactccgcactctcgaccaggacgaatacctgggcgagctggactgctacattcccgcccacgacaatcgcgctacaaaccctgataaggggatgtgcgcctggtcgggggctcacggccagcaaggggcgctgatgcccttgcacaagtacttccgggatgtggcggacttcttcggcctctgcccggctcagatcactcccaagggcattaagtatttgtccgctctcttcgtcctctacgcttcccagggatggggcgctccttctccccacgaggtcgcttggttcttcgacctgaagtctacccccaagcaaggcaggtcggggtatttttacttctctcagccaggcttcaagcggttgagcgggacagaccacaaggccatcaccaaaatagggcgttttgtggatgagtacttcatggcgaaggattcgaacatcacccggactcggtttcagtaga

SEQ ID NO: 342762 - DNA, 485 bp, Cannabis indica
aatgtgcaaagtaaacataaaagaaatcgagaacttactcaaggatcgagtatctggattcaagttatgccaaaccaagcgagcagttttgatgaaagcacttcagcaaacttgaatccaaaaacctctcttttcgctctgaacttacttagcaaggaaggttggtgaaaatgagtttgtggacaaatgctcactggtatttataggcaaacaacgaaaaggggtaatcatttcaaaagaacctcagacgtctcagttccccccaaatgcgaatataggaaatcaaaagcaatcaagtgcacccgtcaaccgtggtaagagaaaatcaaatttcgaaatattaattgcgtcagagcatttattagttgaaaaccgaagggacgcccagttagcctcacatcaagtcacgaacacatgctcctaacacgtgtcacccattcaaacgcaaagacagctcggagaagtctacacgcaacttcgaaagt

SEQ ID NO: 342763 - DNA, 1180 bp, Cannabis indica
aaaatctaaccagatattttatcaactttcaatttttattttattttatttaaattgaattataagattagataaatgatattaatttatcattttattttattagacatttaattttattatctgttaaaaataacaaaaattttgtaaagttagtggatatttttgaatagatgtttatgtttgttaaaacctgatttttcaaatttattggtttaattttaaaattaataatttaatttaatttaatttaattacttctgttatacacaaaattcagctaccatttcaatagaggacacgtgtcaagataaggagactatggatcgacgaaatcactttcaatcagataactcattaattacgtaagtaacagagtatacttgcaactcgctgactataaggtcttatgcgaggtaaagatatacgaactgttgcctcgtgtattaacaagaacatacgtcattggatgcataaagcgagacatcaacttcgttacccttggggagacgagagcgatgcatattaattgtgaatacacttagcacataatatacaaactaagtatatcagttgggtaaactcaaggcctaataagcgaggcgcctatctcgctataggaaggagcactcctattactttcaccaatcaactttagacatctttcagtgagacttatagtcttgacgagtcagaagctgacagtagaatgatggctgctgaagtactctttttgtcataagaactgtgactgtaaaaatgaagtgttatgccttcaagcaaagaaacaacaaggcgtacatcgtcaatctcggaaggataggggaaacattccagcttgctatcaagctaaataatgttgagttcctgtttagacatcccaaaatgatgtgatttaaaacgtgtttaaatacacgatcgttttaacccagtaaaagcggataagtcacagctgtgtgatattcaaataataaccgcatttatgctacgtgatatgtaatcaaaccccatgatttcaggagataaacgctgtaaagattacaatcaactctgtaatcaattgcctactatttgattataaatagtggcaggttagatcacaaaaggcacgaaaaaaatcttaagagaaaaaggccctaaaaaactatcagaaatctaataagattgactcgtggattat

SEQ ID NO: 342764 - DNA, 930 bp, Cannabis indica
aaaaattcaattttatcccaaatggattcaaacctttcagaccacctaattaggccacaacaaacataatttaagtaataaaaccaaataataacctctgaaatagaattcggcattaaaggagaaagtttgagcttaaaagctgaaactttgtctaggctaaaaaaaactacttaaatagcccataatcaacttgaataactcaaaagtaatagcaaaatcaacattcaaacaaaattaatcaacacagcaactaaaactaacaaaattgcattctaacctaacctaaaaccaaaaaactcaaagaaggagaagagaactaccttaccttgagcttcgattcttatgaatttccctagaagaaaccctctgaattactgtgaaattggctgaaatacttggctctaggtggtagccgacctaagcgagagaaagagaaagagtttctattttttttttgtttgattttgaatttttgaggaaaatgtaaataacaaccttaatttccattcagcataaccctagactaatgatacctcacttactacaaattccctcaaaacacttaaagataaataaataataaaatgactaaattgcccttttacttccttaagaagtaacttagaatctaggggcaatatggtccgaacacaaactgcaaacattcttgacattctaaatgtctaactaaatcgtcctgatatttttaaaatactaaactacaataaagtgactatataggccatacgtcgcattcctctgttacatgagataaaatataaaaatcataatattttacatagaacctaattagcacacctagaattcaaatatatctccataattacataattaataattaaaagtctaattctaaattaaaccttaattatctactaattctcatattaaagctaagtggtcatt

SEQ ID NO: 342765 - DNA, 1502 bp, Cannabis indica
aatgaacaactgttattaattgaataggcccaaaacctaaatgggcctaaataaaatctatcatggtgtgacattttatttagcaacctagtccattttaattaaaaaaaatttctacctatatgcatctaaacacaaagtaaatatataggctcacacagacacatacctgttacaaattattgacttgacctattgacaattgaaccatgggttaaaatcagattattggatctgtcaacaagttaaccatggcaatttagatcaagcaataacaggttttataaaacttattacacaaacaagataaaacacatacacctgcaataagttggatagttgggtatagggtttctttaattttaaatttaatttaaattaatttaaaaaaaatcaaaaataaataaataaataaataaaatatttttctttattatttatttttatttcggaataaataaattaaaaaaaattaaaattaaacctataattttgaaaaattggttttcaactaacctaagaatctttttcaaaaaaattgctaactacttttcaaattgcatgttattttaaaattaaatattcaataaaataaaatgataatttaatatcattttactcattttataatttaatttaaataaataaaataacaaaatttaaaagttagcacaatatcctatttttatttaaaatatcatgattaaattaatcttattttaaatttaaataaggtcaatttattataaaaaatagaataattttaaaaaaaaatattaatttctgaccttaaatttaaaataagataaaataatcataattttaaaataagataattaattaagaaaaaaagatagatttttacctattttcaaattcaaatttcactaatatcttaaattaatttaaaaatcagaatacaaaagtacacaaaaaatccaaaattaatttcatgaaaaaccacgaaaaaatgaaaaaattggagaaatattgcatgtggtacggatggtatgcattgcataccatccgcgtgtgcgtgctaggttgctcagccgaggaatcacgcacagggatgctgcgtgcagcatttccgcgcgcgtaggaggtccttcagacagcacacgggcgagctccttcgaacaaaaccttgtctgaatgcgcgtgacactgagtgatgcctcgtgtccgcccgcgtaaggaaggcgcacccgattttagattttttaaaattttcaaaaaatcataactaattcaaataaaattgaaatcaagttttgtaaaaacctaaattgcttaattttttccagactatccaacaaaaataattccaaaaccaaaattcaattatttttcttaaaaatttcacaaacatcaaatcaatcatcaaataacacgcagatcaacatggaaccatccaaatcacacacaaatcgttttaggtccaaatttcatgaaagtaaatcaattaccattgctctaaggccaattgttggaattatttt

SEQ ID NO: 342766 - DNA, 650 bp, Cannabis indica
tttcaaaataatttgaaaaatggcggattgaaggagagagcgacaaagtgtcgctcatgcatttgctgctgaaagagaagggctggcgcaggtggacacgtggcgtcgtgaggagggctggcggcttggagctgatgtagagagaaaggacaggcgggtcccactcgctgacgctggcaggctggcagcaggagaagacggcgcccacgcgcctgtgtctggggtggaacacatgcgcgcgactggagccttgatcagtcggacggacggctggagatggcttcgggttgctggcgcgggtgggcttcttccaagcccgaaaaatctgattctttttttgaaataattactcattttttcttcaattcttcattcctttcaaaacaccaaataatttaattcctaaccaaaaaaaaaaaataataaattaaaattatatcaaatattttcaacataaaaatatatcttattaatttcataaaaatattaatttatttttaatttatattaaactttaagcttattaaagaaatttttacattaaaaatacaaaatattaattttattaccaaaaaaccactacacggttacccaaacatttatacccttttcttttaattttttacatttgtaccacatgcacacacaat

SEQ ID NO: 342767 - DNA, 752 bp, Cannabis indica
ttgttttataaaatacaatatttttaaaaaaaattctgcgtgataatattttggtaaaaattaactcaaattttagtatatttgtaagttttcattttttttttacaattattgttgcccttgatttttcccaaaatacgtgaacgcagataagaacaacacgtggatttgaaaggattatcacttatgaaaatcaactaagtctcggacaaaagaggaacatctcagggaagatgcctcctagaggaaggcataaggagtatccttactctctgagaggtcaaaggcacgttaaggcagttccgggaggagtggagatctcttgaatagtcctttcgcatttaatgccgcacagaggaagacgtattgaaatctctataaacgacgtgacagttggcacaagccccgttctacggctattacgttgtaatcgatgggtctagtgacggctactttatgagatatcacatcagtcaagaggggataaaatattacatctacctaactcctaagatacctacaacataggtcatgtatttgttgggttttatgccccaaaaaaaactcatttcaatataatcagatttacttattaagatcagaaataatatttaatgttgcatggttcacatgatttatttcatgattatttaaataatgtatgaattctatttaagtccagaatatatcaatttgttaatgattatagtgttgtcaacacagtgaaatataatcttaattatatgttcgaa

SEQ ID NO: 342768 - DNA, 589 bp, Cannabis indica
atttcatttatttttctttttatatttttatcttttactaaatgttatgtgctacatagctaaaaatatattatttttaacatttctattgcactaaagatatatttctattattatttttttatcaatttatatattttaaatatatttctttgtaaataataaatagaaaaagtgctaagaaaatcactattgtaatgttgttacttattgcttaacaaaataatatctttttattattattattattattattattaaaacaaaaaaagtatgatatttctaaaagcctaatgaggattttcgccccttaaattttaatatgtactaaatcatgccccttgaatttttttaaccattacaaattctctccgaactattaagattattgaatttaaggatttttgtccaatttcattcaatttactaatttagtgattgcttatgtactaaattatgctctccattttaatgtctactaggggtgttcgcggtgcgggtgttgcggtttttgagcattttttcaaaccaatccacacatgtggtttttctaattttccaaaccacacccgcatcgcaaaactaaaaa

SEQ ID NO: 342769 - DNA, 519 bp, Cannabis indica
aaatactctcataaataaaaaaatactcgtgtattaaggctcattaatgccccaaccacataaaaatctcatgcattaaacttcctacagctttcttacatatattattaaatggttgccgaaaacctcgatcaacatatatatttttggaaaagtgaataagaacgagagagatgaatatctattctatataaaatatatctatttaactgaatttttcggtttaacgatattttttgaattttcatgttaactttaacagaatatcttattacttaacaaaatattatttcttaattttataatattaatatatatatatatttaaaaataaaaattatatgaatattttatataaagaaatttaaatttaaaatattataaatattttaaacaatattttatattttattattatttattttatattttaaattgaaatggttataataaggaattgattgcttttcgttttagttatggtaaaccaattcacacactatatttttcgtaaagttt

SEQ ID NO: 342770 - DNA, 750 bp, Cannabis indica
ttataaatgatcctttaattatatcacaaaatacttattaaaaaataatggattaactcctatatcgataaaaaaaatattagtaacaaaaaactaggaccactcatcaatataaaagaacaataatattcccacagttatgtagtcaccgaatagatagatataataagtcaataaaataccaaaataatatctagcatccatcattcctcatttctaactaaaacttagctaatttaagtcatccaaaccatccattccaacttaaatacgaaattagtttcataagtaaaagagtaatttgcggcataaatacctaagtttaactctcagttgcaaataaatacataagtttaatttttgacggtaataatacctaaattatatttctagaactctgtaggtacctaacccttaaatgttaagccattatatccacgtgtcattttcttattggtatatttgaactaatttttttaaaataataaaaatttaatgacttggaccaatcagggattgtcacgtggcaatttatttaatcaggttcctacagaagttccaaaattataacttaggtattattaccgccaaaaattaaacttaggtgtttatttgcaactgagagttaaacttaggtatttatgccgcaaattacacataagtaaaataagactaaactaataatgactttcttcctcaacggtatcatcctcatccaatagcatcaaactgagttcctggaatgggaga

SEQ ID NO: 342771 - DNA, 484 bp, Cannabis indica
tagatctatgccatatagacatatatagatgtgtgagagcaacacgtaggtctatgccacatagacatatataggcgtgagagagtaacacgcatgtgttatagaaaatggacaaacagtgcagtggcaccattaattatgtgatatatatatattgagattaaaggttatgcgtttaaggcataattaggttggactcggtaaccataaccgagatgaaccattctaaggccttattgtaaataggcgtgtgagagcaacacgtaggtctacgccacgtagacataaatagacgtgtgagagcaacacgtaggtttacgccatgtagacataattaggcatgtgagcgcaacatgcaagtctatgtcacatagactgatttgaatggcatttttgtttatattatatgatgagcatattattgatatgttttatactgtcttggtgggcttggctcatgggtgctctactgtgcaggaaaggg

SEQ ID NO: 342772 - DNA, 609 bp, Cannabis indica
aagagacatagaactgtgatcaaaacccctcagcaaaatggtgttgctgagaggatgaatagaacattgattgagagggttaggtgcatgttactaggagctagtttggacaaaaccttttgaggagaagctcttaaaatagcctgctacctaatcaatagatcaccatctgtgccaaacaacttaaagaccccacaagagttgtggagaggtaaaacaccaaacttagatcacttgaaagtatttggatgtactgtgtttgtgaatgttagacaagataagttgcaacctaaagcattgaaatgcatgtttctaggctccctgaaggggtaagggatatagagtgtggtgtttagaacctagatacaagaagtgtttgattagtagagatgaggttttcaaggaagatgaaatggccatgaaaaccaagagcacttacaaagatagtgaagctggtttagatgagaatgtttagattgaggtggagcaggttgctcttacagcaccaactaatgatgttccagatggaattgaagcaatagaaagggaagacaatgaagatcagcaggaactaaacaactatcaattagcgagagagagagagagaga

SEQ ID NO: 342773 - DNA, 669 bp, Cannabis indica
acaaaaatacagtgattcttctcttagagctctacaatgatatctctgagtgtacttttcttagattaactttttccaccccatgcccagtgagaatggatcatatcattatttatagggttatgtggttgagggattatttccccttcttttacaatgtttataattggtaagattacacattaaatgtatagaatacactgattgagggatttggagagcttgagatatctctgtgatacgatccaagatttaaagagattgtttttatccttcatgatgtaaatgctgaggatgctaagtgttgatatgttgttcggactgtctattgttcggctaggaggacctcgtccgtgctggtatatgtggcgctctgctcggaacacctatttcgggcagatatggagaatcggttccacgtgtcaccagtgtgtgatgccacgtcagagtgccaaaattaggataacaaagtgttttatgtattactaattagtaaataaatttagaatataatatatataagaataataaacataaaacataatcaaatttgtacttgctccaaaaagaaaaactaatctatattttcttaagaaataatgtgtatataaattatattttgttttaatatcaaataaaagtaaaaaaaaaattaattaaatttataat

SEQ ID NO: 342774 - DNA, 761 bp, Cannabis indica
tcttcatgcctggccactagaacatgactttgaggtcttgatacatcttcgttgaccctggatgaactgagtaaggagttgtatgagactcattcatgatctctcttttgatactctcatccataggcacacaaacgcgattcttgaatcgcagtattcccgtttcatccactgaaaaatcactagctttcccagctgaaacactatcttgggttttttttactaactctggatcttgcattactacttctttgatttgctctaacagagtagattgcagggtgatattagccaactgccctacaaccaactcaaccttagctcgggtcatctcatttgctagatgctaagagatttgtttcacagtgttcaactgactttgaccctttctgctcaaggcatcaacaaccacgttggctttaccagggtgataaagaatctcacaatcataatccttcaccaactctaaccagcgtctctgtctcatattcaaatctctctggtgaagaagtatttcaaactttcgtgatcagtgtatatcttacatttatcaccatataggtaatgccgcgaaatctttaccgcaattaccactgctgcgagttctagattgtgagtagagtacctctcctcgtaatcctttaactacctagacgcatagactattacctttccaacttgcataagcacacagccgagaccctgtctcgaggcgtcacaataaaccacaaactttccttatcagaaggaagagttagtac

SEQ ID NO: 342775 - DNA, 891 bp, Cannabis indica
acagactctctctgtgatctagttgatttaatatggtccattctttcaaacaaccctgaaatcaataatcccaacaagtcatacaccaattccacatttacacactccatgccaaaacccttactaacacatataatttctttctcaaatataacttatttacacctgatcatgcttttcattaaatagcaaatgtttttagatgctcatatgttgcctattacaaaagcaaaaaatatttaatcacataagcaaataagtatttactctcaacacttaccgcaccatgagtcgagcttgtctttgacaatgattgtacatgttcaactcgtcttcagaaagtttaaaaacattagcgctatgataccaaattgtaaagtcctactttgaaaaacgccacgtgtcgtgattacaatatactaatcctgttagttgacgcccataagccaatcgatttgaaataaatattaaacttaattaaataaataacttacaataaacatactttattttaaactttaaaaatatttaaagttacatatccgggatcccgtaaaattattttcaaaatattacaagttaattcatacaggtcgacctaagtggcaaaatagaatttctatgcaatttcctattggacccaaccctcatagtctagcttggtcagaacatgtacatgtcatcttcaaaactctcgagttcatggctgacccgacactcacccttgcctacataatagaacactcgtgagccaatgcccatcaatacagaataataatacagtaagaacaattataatacagtagaacctctatttaagaatactctattcatgaataacctctaatttgttataaaaaaaatgaagtcccaatttgggccaattataaa

SEQ ID NO: 342776 - DNA, 705 bp, Cannabis indica
agcaaaagggaaaccttccctcatgcatttagccctataaatagtgatccaaaaaaggttgaaagaattgcttcagagagatcttagagaaaacactaagagatttcattgtgagagctttgagagaggaaacattgtattcttcgttctcaaatcaatacgatctaaggggagtgggctattatcgaagtaaagggaccgaacctctttaaaatcttatgttctttattacttactgatttttgctctgtcttagttacatttcttatcgcttattaattgactcattatcgtttgctaaaagcgaggtcaacattttggttctttcattgagagcaaaaatccaagtttgatctttaccttaagttttactagacacacaaaatggtggtgcaaactcgcagaggcgtggttgaccagagtgacccactgttaacagatcttgcattgcaaactcctggaaatacaagggtcctaccaggaaccaatcttaaacaaccaaacacgcagccacctactgtgggccaaggtgtgacatccccccctggctggggatcacaccaggtgtgcaagagactgggaatacaagttcggcagcggatcagatcattcctagcactagaatcccactccacaaccaatgctcagacgacaattggagatgatactgagattcaaaacctccgcaatgctcttggactcatg

SEQ ID NO: 342777 - DNA, 631 bp, Cannabis indica
gtattgattataaaagtgtgttaatttagagttgtttggacctttgaatttgaatggcctcaatgttttcctatgctattttattatgtactctcttttaggatcttctgtatgaaaaattccatgcaccggaaatgatcaactttccagtttttgaatattaagcaatgcacagaaccaaacaattgtgctaccctatcacacattgtagattctgctttgtataggctaactcaacagttacaatctggtacttgtagcaggtgagagagcccatatttggaaaggaagctcgctcggagcttgcacgaatgtggaacaaaggtgtagaccaggcgtttggacctgcaatccagtatcttagctcccacggatggtagattttgtgcaataccattcccaatcatatacaatgtatgtatggaccctcctcattcatacaatgttacaacattcataactttgaatcatttgcatcttgagacaatgaccttgattttccaaggtcttactatactaataataataatatggccttctattctttcccttgtttgttcttcttgcaggatttgaatacctaaattagttactaatgatgagggtcccccatggtgagatatgaccgttt

SEQ ID NO: 342778 - DNA, 986 bp, Cannabis indica
agggatttgccatgttatccatcgatatggaaacttttagtttcaagtttattatgtaagcttgtagattcaatttatgtaagttgcacaataataaagaccaattaatgagtaaaaacaatgtttcaattcaaatatattgtgtctaaaccacttgctaacaaaattaacttcttaattttattctttagttagttccacatgcataaaaaaggtagcaccccaagtaaattcttaggcaaggtctatgaaacttggtgaatttcaagtgaccaagagactgcaagtctgcatgctcacttagggggcacccacaccgtacattgcatcgaactagcacagagaacttatgtagagaaattttaacgcttagtatgagctactaaacctgcctctaagtcaagtgcaagcatactttagcttggcataaagaaaagtaaatctagatacttatatgtcaaggcaataagaagataaccaagattaaagactgcctagtcggtcacatatccatgataaaaagcgcgagggctaaacaatagtaatgttcaaaaatagagtgcccataggccaaaagtacgaacatgaaagccctaaggctaaaaataagtagtgttcaaaagtaaaaggctaattgaccatacaaaacatgaaatcaaaaagtcaatgcaaataaagtcataagtctaaattactaattgttggaatatcttttaccgggatctagatttactaacaagtatgtttttaacatcctaaatatgaatttctaaaacgatgaaaataaacacataaaaggtatgagaaaccttacattggttgcagaagaattaaatgacacctaccgctcaaatctctaacccttgtatcctttctatcgcagagtatcaccaagatctgagcccgaacctccttcagttgtttggattcttcacagtcttacatactatgattgaggactcacttgttatgtgtgggcatgcact

SEQ ID NO: 342779 - DNA, 644 bp, Cannabis indica
tttctatagcttttattttttcctgtgtgaattcattactgtgaggctcaaatttagttaacgaaaatttgcgttaacaaatacataatacaaaagggttatgggatttgtttttaatttttttttttacaattatatgagcttttttatgccatatttttgtaaaaaaaaagtggaaatcccatacttgtaaaacaacaataagtttagctgaaaaagtcaccgctaccggagctggaaaaatcacaagaaaagttaatgtcaccggaaaagttgtcggcaaagtcactagaaaaattactatcgccggaaaagtcaccaaaaaatttaccgtcgctaaaaaagtcaccagaagtagatgtctcagatataactaaaaatataaccggttctataaataaaaactaataattcaaaccagttataattgaaatataactgattctgtaacataataaataacataaaataactccaaccagttataattaaaatagaatcggttctataacagtgttataatgaataaaaaccaataacaagaaataactcaaaactagttgtaactaatatagaaccggttatataacataatgaatacaaacaagtaacgcgcaataatttaaatcgattacaattaaaaa

SEQ ID NO: 342780 - DNA, 882 bp, Cannabis indica
accaaagtgaggtcagacttgaaatataataataataaaacagagtgaataaactgaaaactttatttctgatcagaaaataaccaaatacataaatgtcttaaacaaacataaagtaaagaaaataccaactcccactaaatcatgatatcctcaagcaatactatacccatatgagtagtgtgcccatgaaagatcttgggtggtaatccttttgtcagcagactcgctatcatggagtttatcccaatgttctctatggatatctgtccactctgcactctttctttcacaactaggaactttatgtcaatatgctttgacttggaggagctcctattgttattggaataccgcactgctgatttattgtcacaaaatatcttgagtggtctttctacattctccaaaatacgcagcctagtggcaaagtttcgtagccatattcccttatttgatgcctcatagcatgctacaaattctgctgtcatagtggaagaagccataagtgtttgtttgactcttttccaggatatagctcctccagctaataggaaaatgtagcctgatatagaccttctgctatcttggcatccaccgaaatcagaatcagaataccccacgacctccaaatgatctgacttcctgtatgtgagcatataatcttttgttctctaaagataccttataaccttcttggctgctatgaaatgatccataccagggttgcttaaatatctacctaacatcctaacaatgtacgcaatgtctggacgcgtacatacttgaagatacattagactccctacaactgatgcagagggaatctttttcatttcctgaatttcaaggttacttttagggcattgactaagactgaat

SEQ ID NO: 342781 - DNA, 1129 bp, Cannabis indica
aatcttaataatttagattaacaattattcataaactttgaattgaaaattgtaagtgttaatgtggtattatctctttggagagatgaatataccatagatgttgtatcaataataaaacacaaacatatacaaacattataaaaatataaatataatcggtactgacatacacaagataaaaaaaaagtaaagatcaattcataaatgcaattcattagtaaaagagaaaactttattataatattctaaaaaaaatgaattgtctgcaataatatgaaaaagagggaataaaatcccaacccaataattgaaatcgaattgttcatagattaaaacaattaattaaaaaattataaaagaagatttcgagcttcatcttcaatcttggacaatctccacccttttgtccaagcatcaacctcaactcgctaggatagcaatccatgtttaagcagctggagctgaaataagaagaaaaacaaacatggttagtagatccagaattaataacccaaagggataataattctctaaaacacatgagtttatagcatagaaataaataccttgtttctttgctagaaacttagggcattggggtttccagtggcccttttaattgcaatagaagcattttccttttggcttttcacagcttgaacaggcttcttgctattattcaaatttttcttattgttgggtttcgaagtagaggcaatgtttgcctcagccttagccgcaccattagcagtcctagaattaggagctttagctcctcctttctgtggtcctccaatcaaattttctaatgtgtgaaggttgtcgattaactcgtgaaagtcaagctccaacttattcatgacataatttgaagtgaagggcagaaaggctggagtcaaactgttcaagatcaaaatcacttgagttgtttgattataacagctccatgattctcagcttcctggaagtaattggtcatctagagaaggtgatcactcatgctctgatgaggtttcatccgcgcattgacgaatttcttggtcccttcaaatcgagcttgaattgatgccatcccgaacagtacaattaactggttcatgatttttgcagtcgtgagagtgtttgc

SEQ ID NO: 342782 - DNA, 525 bp, Cannabis indica
acaacttcttcttgtctacgaatacatgccaaatagcagccttgacagattcttgttcggtaataattattatatatatatacatgcatattacataaatataattttatctcaactattattattacaaaatggtaatatatattggaggtttcttcgataggtgtgtggaaaaaaatgttaaaagatatcagtggtacttagtattcttttatgttgagctgttcattggacgtacatctaatagatttggacccaattgattcaatccaattatttattggatattggattttgtcatccgatccaatcgaatcgaattaagtcattcgatttgatccgattcaatgaatatattggattagatcagttccaactattagatgcactgagtggttttttattagattggattggatccctctaatctattttagctaccttttaagttgatttcattaaaaaatatatatatatatatataaaaaatataactctaacctacataataaacattagtttagt

SEQ ID NO: 342783 - DNA, 504 bp, Cannabis indica
ttttatattctgcctgttctgttttgtctctgcaaaattggtttctgcagtaatagaagtacattctacttctgcaggcgtatacagttttgtatttcgtatattttcgtatttattattgacatttataaaaactcgatttttcaataggcgacagtggaaaaatatcggtataaaataatttccgacaatttaaaactgtcggccatagttgagactatgggccacgattttaaattgtctttatagtggatttccccaaaaaaattccttgccttcatcctcctcaaaacaaagataggagttttgtttggttttaagatccccgaatacctgagatctttgatgatctgtgaaatacaaaaatctcaaaaatatataaatcctaaaataaaataaaataaaataataaagaagttatgagaaataatggacgagaaagagaagactgaccggtgctcgtggtcgctcttctgtcttcggacgagagagagagagagagag

SEQ ID NO: 342784 - DNA, 658 bp, Cannabis indica
tccggttaaccagttttacaggggctgtaaaaccagttaaccggttttacactaggtaaaccaaaaatttcgaaacttgaccaatttgaacccaaatcaaaccaaaccttccagacctgcttaatactccccaataaacatattccaagcaacaaaacaactaaacaagcccgaaatcaaaatctaccattaaagagccaaacttgagttcttaaactaaaagtttgctcaaaccctaaaacaaccaccaaaaccacttcaattcaacatattaaaccctaaataaacttcagaaaacaaactcaaacactgtatactaccacagactcctaaatcaagcaattcatgcaaaaaacccaactataaacataagaaaactaaagagaaaggtgtcaaagctattatcttcaaaggattcaccaagaatcaactataaaccgacaaaaacaagatgaagaacaccacaagctgctggttctccaagggtttcgagagagatagagtgaagagagataaatgggtttctttgattttctaattttggctaaaataagataaagcttatgtttatctaattaatttaagggataaaaatcggaataacatattctactaaagtccactaaagcacaagaaatcaattaggcaaaatgaccat

SEQ ID NO: 342785 - DNA, 1394 bp, Cannabis indica
aatcctaagaaacttctaacttcagttgctgtcttaggttgtggccaatctcgaacagcttcaatcttcactggatctaccggaatcccatccttacttaccacgtgtcctaagaaactcactttggacaaccagaatttacacttcttgaactttgcataaagcttgtgttctcagagacgttgtaataccatacgaaagtgttgttcatgagcttcttctgattcataatagactagaatgtcatcaattaacacaatcacaaagttatcaaggaagtccttaaatacccgattcattaagtccataaatgttgctggtgcattagtcaagccgaaggacatcaataagaactcgtagtgcccatatcgagtgcgaaaagttgttttgggaatatcctcttcccgaatcctcaactggtgataaccagatcgaaggtcaatcttggagaagatggtctttccctgtaactgatcaaacaaatcatctatctttggcaaaggatatttgctctttattgtcaacttgttcaattcacgataatcaatgcacatacgtaacgacccatccttcttcttgacaaacaaaactggtgcaccccaaggagaggtactcggcctcgtgaatcgtagatcaagtaggttctgtaattggactttcaattctgtcggttccattctatatggaaccttagaaactggctcaaccctaggtactaattcaatttcgaagtcaatctctctctttggtggtaatcctggtaactcttccgggaatacatctagaaattcacatactactcgaaccttttccggtccctaaggtgtatcttttgtggtatccaacacactagccaggtatcccatacatccttctcgtaataattccctggtcctaagtgtcgatatcaatggaatccgagatccctgcacctttcccataaaaacaaatgggatctcaccctctggttcaaaagtcaccatctttctcttacaatctatagtagcattgtacttagtcaaccaatccattcccaggattgcatcaaaatcttctaagtctaattcaatcagatccactgacaattctctcccttctactaacactgggagagaccttacccacctcctggagattaccacttctccagtaggtaacaaggtaccaaatccactagacatgatatcacatggcctactcaatttctcaatgattctactagaaatatatgaatgtgtggcaccagaatcaatcaaaatagtaaacataataccaccaatagatatctcacctgtaacagtcgaagggccagcttcagcatctgcttgggtcaaagcaaacaccctagcaggaaccacaggactttctttcttagcctcgggcttttgtagctg

SEQ ID NO: 342786 - DNA, 921 bp, Cannabis indica
tgttgctcgaggtaaaatcagcattgataaaaatttttagagcaaacctggacgtttttgcctggtcacatgaggatatggttagaattgatccttctgtaattttgcacgtcctaaatattgatcccaacttccgaccagttcaacaaaagcgaaggctgttggacaaagagcgagctctagccctgaaggaagaggtagagaagctacgaaatagcaacttcataattgaagctttctacccggcttgcgttgccaatcccgtaccggtacccaagccaaacaaaaaatggcgagtttgtattgacttcacagacctaaacaaggcatgccccaaagactgttttccacttccaagaatcgatcagcttatggacgcaacgtgttatcccaatttatgaactttgacgtggcatcacacgatggtgacacgtggaatcgagtctaggtacctgctcgtaagacacaggctgaacagggcacctcatacatttgctcggatgaggtcccctagaccgagcagtgagcaaaccgcgcagaacaccaacacttagcgaattcagctttcgcattgtgagtcatcaaagaaatccctataactttgggattagattgcaaagatatggcaagctgtccaaatcccacgattagggcattctgtatttactacgcaatctttctgcttatatcaattgtaattaaaagggaaagactttccctccaagcttatagccctagatatagtgattcatattcactgggcaaagtgttaagagattttgtctaagaatttatattcagagatactgttgtaagagctctaagaaaaggaaccattttccttgttcttaagtcaatacaaataacgaggattaggctattaccgaattgctcagggctgaacctgttggaaattatttt

SEQ ID NO: 342787 - DNA, 503 bp, Cannabis indica
atctatgaaaaatgtatttttttctcaaaaataaacattaccttttaatgatcacgggtggtggtggcgacgggtactgctcgtggtggcgatggcctctgttcggtgtcgacgatcacgggtggtggtggtggcgacgttttgtggtggtccgtggtggttcgtggtggtcactgggtcacgactcgatttggctactgaccgagagagagagaaagagaaaattaaatttctggtccgtggtggttcgtggttgggtcggggtcgtgggtggatggccggagtgggtcgtggtcgtggtggggtgttgttgggactgtgatgttgggtctgttaattccatttttggcatattcaattgaaaaaaatattttattatttaatgtatatttcggctggcatatattgatatggtttccatatttgtgtaaatcaaacttgaaaggaaagttgtctagctttcctatttttggaaaaaatgtaaaaatggtaagtttggttac

SEQ ID NO: 342788 - DNA, 1252 bp, Cannabis indica
cattccccccaaacttgattaaagcttatggcataataaggtacgttgaggatgaaagtagttaaagataacgaattaagcttagttaagtggtgaaaatttttgaaataggctaaggctcaactttgggtatactacggataaaactttttaggtgggcttgaaaggctcaatcaatccaaagaaactcgcctaaatcattttccaaacaaaaatcatcaaggatttcgcttcaagagagtatgtcaaataaattctattccatgtcaagcacacattccacaatccaaatagaacaaatgtgatacatgtcaaaaataaatgttttgcatccaaatgaacaaccttttaacacaacatccaattcaattcaaagagttgtgactcaagcacacggttaagatttcaatccattgcacaagtaaacaacagtaattcaatcaatttttcaagctcagatatcaacacatgacactaacaaagactaactaaaaatgaaaacaaaaaaaaaaactgaaataaactgaaaaaactgaaaaaatttaaatctctccccccaaaataaagatgcacattgtccccaatgtgtgaaaataaatctgtggttgagagagacttacctgagccccattagaaggggtttggcagaggtggctgatcataaggatggaagcggggcggcattgcaaagtagttgggttcttccacaccgacattcattcttgtgattagcgtgttcaattgttgcacctgctgctcatcaaaaatgctcctttcggccatgtaattttgaatgtgtatgttctgctgaatcagatgattcagctgatcatgcgtgtatttcatggctgggtcaagaggcccagcaatgcgtggtggtacaatatcttcatgatcctctcgttcttccacaggaggatctctctgagttggcggttgaccatgagggtgcggtggtttgaatcgaagcaccgtggacaggaagatactgcgttgtggcgctgcctttgtatcataggagtattgcggtactccatgtgcctcacacaaggtagtgacaatatcagcaagcccggcttcacccccacaagatccctcaatcatcatatcaaaagttactctaattatgtcccccacattcaggttgtaacccttcataattgcttaaacaaatttaagcgtgtcgatctgagcatcagaataagtttgtttgaccaaccttgcactacaaagtatagccatgccttggcta

SEQ ID NO: 342789 - DNA, 864 bp, Cannabis indica
ttctccaaacaactgctccacccccaagagtgtgtaccatcccatatgtagacatcctgtcatcaagacaagcttagaaatctgagtcggtatagcatacgagattgaaagcaccaccattgtagatgaacacataagtattctagaatatgcttcactgctatccaatgttcctttcctgggtttgactcatacctgctcacaattctcactgcatagcaaatgtttggtctagtgcatagcatagcatacattagacttccaactgctgaagcataaggaaattttctcatatcttctacctcttggagatcagttagacattgttccttagatagtcgcacaccatgtctagaaggcataactgcccatttagtgttgctcattgagaaacactctagtaccttatcaatgtaagttgcttgcgagagagaaagtgatttgttcttccagtttctaataatttgaattccaagaacataattagcttcacccaagtctttcatttcaaattgagtgtttagtcattcctttatgtcagtcattttcttgatattgttactaatgatcaaaatgtcatcaacacaaaggaccagaaatactaccacttgattatccttgagttgttaaacacacagttcatctttattttggtgaaagccgtaggttttgattatttcatcaaaccttttgttctaagagtgataagcatgcttaagtccataaatggaactatttatcttccaaactttctcttcttgtcctggaagtttatagctttctagttgctccatatagattgtcttgtcaagaattccattaaggagctgttttgacattcatttgccaaatttcataatcaaa

SEQ ID NO: 342790 - DNA, 715 bp, Cannabis indica
tttttaaattaaattataaaattggataaatgatatttatttatcattttatgttattagatatttaatgttatcttttaaaaaataacataaatttaaaaagttagttgatatttttgaaaagatatttaattataaacttaatttttaaattataggtttaattttaaattaattatttaataatttttcgaaattaaatattttttatttaaagattttcgaaatttacttaattaattatttaatttaaattaaataaatcttataaccaactatacaatgttgttacatgtgtgttttatttattgttcattcaaacttgttttataaaacatattattatttgatttaaattgctatggttgacttgttgacagatctaatgatataattttaaccatagtccaattgtcaatagatcaaataaataatttgtaacatgcacattttgtaaccttcttttatctgtgtataaacctagaaacatgataggatccatacaagagttagttgactaaaattattttatttaaagtattattcacttcgtttaaaaaaaaagtattattgaacaactaaaaatatatatatgtaaagcccgcttagttaatttggaaattagcagttatttatgattaatcaggaaattatttatagctatttaaataatttatcattgttatttacggaattcagatatgcatatttatgt

SEQ ID NO: 342791 - DNA, 1214 bp, Cannabis indica
gaaagctatattaagaacccgacctcttctgttgagaaggatctatcggaagattggggatgggaactccacatccacctggttcgacccttggctccctggggacaacccccaaccggccccatctcggaatgcctctgatggtattagcctggttagcaactttatcatcgacaaccattggaacgaggatctgatacgaagctagttccgttctgaagatgctaggaggattctgaatataacacttcctagtagggctgcacacgggtcgggtttttagattttcgggtagtcaaatttgggttttcaaattttgggtgttggaagtgcacaactgaacccgattttcgggtggtcggatatggcgggtttcgggtcgggtatatcgggtttcatgtggtcgggttcgggtattatttgaatgattcacatttcctctcgataacacaaaaaaaaacatgtatattatataatacatatatatagttatagttaattaaaatatatatataattgatagtatacaatagcagctattgtatctcgagaagcaaaatgtgcaattaatatccattagtattatatatattatatttattataatagtatagagagaagcaaaacaattaatagcggctattgaatagccattagtattatacatactatatttattataatagtataaagagaagacaatacaaagaagagaaaagccattcctctccgagccaaagagccttccaccgccgtaaaactcctatgactccggctggtccctccgccgccatcgaattctccacattagcgatggtttgggttcaacatggtcattttggagggattggaatacggaattgaaattgatatgatgagtcatgagtgtattaagtcgtttttgtcactgtgatcgggttacgggttagaacccaaccaataaataaccaatttttgatacccgaacccgaaacccgtatggggtattttcgggttagacccgaccacacgggtttttaatttttcagtttttttggcagcgggtcggggtgggtgaccgggttttttgggtctgcgggtctaaatgttcagccctaccaatacctccattagatcggatcggatcggatgactcaattcgatttgattggatcggatggcaaaatttaatatccaataaataattggattggatcggttaggtctaaattcat

SEQ ID NO: 342792 - DNA, 515 bp, Cannabis indica
ttgatccatattgctacctgagtatagattcagaaaaataatcaatcaaatcatccaattcaattatattatatagaaaaataataaaatagaggatttacctccacccattttcatcatcaccctaaacacctattcatttatttataataaaacaagggatatttatattgcaatctttcctataataaataaatcttttgtgattttgcaacctaataatttgtttatataattaattaacattctttatatataatttgtttgtctcaaaaataaaaataaatatagaaagtttaaaggaaccgaaaaaagaaaacctttctaattttatttctagttcttactattttccgttagctatttatacacaaatattacaaaaatatatatatttaattgaaaaaaatcaggtttgttgaatcacagactttattatagggccagggccggccctgggcataggcgggctaggcctgtgcctagggcccccctagtccaggggcccaaaaaaa

SEQ ID NO: 342793 - DNA, 719 bp, Cannabis indica
agggcataaacccaacactgcctactcctcggtaagaacagccacagtggctccaatctttattgagctagatgaaaagattacaaggtgttgatctccaatgtgtactcgacacaatctctcaatgaagcacaacttcaatttacatacatcctcacttgtggcactatggatcaaacacattataggccaatacaacactcttcttttctctctttctttctctcaactagctcacaaaaagcctccgaacactccctcaactcataccataaacagtagtaggaaatggctataaatagccttttgttgttgagctcaatactaattgtcataactgacagttagttaaaatagttggaagttggtagagctaaatgtgtttcctcactgaaagaccaatcacaacaattatccaccttggtcattaagagaggaaagagccattgagatctgaggctaaattggtcttgaatcctcatctagcacttgaggatgtttagtaagtttaggtaaagcctaaacttagctaaactcaaatatttttgtcatcatgtctgcagggttctcattagtgccaattttcttcacattttactttttttcagctatgatgtctcttatgaaatgtagtttaatatcaatatgtttggacctctcgtggaacatggaatttttcatcaaatgtagggcactttggttgtcacaatgcactgtta

SEQ ID NO: 342794 - DNA, 462 bp, Cannabis indica
gctccgggatcaaatcaatgcaaaactcgatctccctatcaggtggtaaccctggtaaatcctctggaaacacatccagaaaaccactaaccactgatatccaagggcactggtctaaattcctagagtcatcatcgattgcaaatagattcccataacactctaagtttctctttccacctaaatgtgcccttaagataggattttgtctcactacactcatgttggctcgataaacaatgaaagcaccactaggggttaaaagagtcactcttttacgtgaacaatccacaatagcttagtatttagacaaccaatccataccaagaattacatcaaattgccccataggcaacactaataagtttccaggtaacttgtgtccctcaaactcaatacaaactgacctacatatgctggatacctccccgtgtccccccataggtacactcaaatgcaatg

SEQ ID NO: 342795 - DNA, 522 bp, Cannabis indica
aaaaaatttgaatggacggaggaatgcgagaacgcctttcaagagctaaaaagggaacttgcaaaacccccctgtactatcaaaacctctggacggagaagaattagggatatatatggctgttactgaacacactgtaagtgccatactgatcagagaagagaacaatatccagcatccagtctattacatcagtaagagactcgttgaagcttaaagacgatatccactgatagaaaagctcacttattgcctaatcttagcaacaagaaagctaaggccttactttcaagctcatcctgtttgggtgtacactgaccaaccattacgccaagtattataaaaacctgacacttctagacaattacacaaataggcaatggagttgggctagtacgaaatcatgtttcaaccccgaacaacaattaaagggcaaaccttagcagattttgtagttgagtgtacgggcaaagaagatagcactttaaaaacaacctgaagccagtacaagaacctcagctg

SEQ ID NO: 342796 - DNA, 362 bp, Cannabis indica
gaaaaagaaaactacaaatacaaaatagattactcaaagacagacaccaacatcaaaagaggattgggcaaccagaaaaatgaaatcgatatggtaattacattccaacttgtcaacaaacatatagtaaccgaaggagctagcataacgattttgagtaaaagatggaatgtatcagaaaacaagatagtaactgaaggagcagcgcaacactaggccaaagacatcaacaccagcagcatcaaaactcacacaaatgacactaacggctcctcagtcctcacctcatttaagtaactgcaagagagaaaggaaaaataaaaagaaacattatatcacattataccaattctatagtttca

SEQ ID NO: 342797 - DNA, 1673 bp, Cannabis indica
taaaagtactaataaactagtttgtaatattttgaaaacaggggatccctgtagttctcattacttatcttttactataaaggagtttttatatgcttgattttaattatcaaaaatttaattacccacacttttggtacaattatatagtacttaaataagaattttataaaaacacacacatgcggcgtccctattggacagggcgttacaacatggtatcagagcgccaaggtttttagatcctgaagactgatttgatatgtacattggctgcgaggactcgttcgactcatggtttagtaagcttttagtaaatggtaatttgttaattatctgaatgcctgattatatgaattgtgctaatattggtaatgtgtgggaaggactatgatatatggaaatacttatcagtattgttattacctggaatgtgactgcaggtgtatagattatgcacctgaggcagactggtaggggtaaccgcgagctagctgggctcagggttgctggtgagggcgagaaccctctagcaccaccaaactgggaagaattatatgccgctatgtaagagactatccagcaacagggtgaacaaattagagaattgagggagcaacgagctcagcttgctctaaaccctaatcctgatcctccggcacctctgatagtgccaccggatacaaggaatcatttggaaccgttgtatgagtggttcaggaagcagaacccgccggtgtttgagggtggtactgatccactcaaggcagagcaatggatgagtatgataacatgtatttttgattttatgcgggtcgaggataatgatcgggtcaggtgtgctatctttatgctgcgagatgatgcccgtatttggtgggagattgtgtctcacggtcatgacctgaataacatgacctgggatgccttccgaaccttgttttatgagaagtattatacaattgactcagggcaacatgacaatgacagagtatgccactaagtttgatcgactgggagagttttcttcagatgaggtggctgctgaagctgctgaagctgctagaaaagtaaattttattcgagggttggatgaacatatcacacgggatgtgattgttgcttctaaacaacctgcgtttgctcagacttatggccagatagtttaactggccctagtttcttagggtgcagaagatcagatacgaaagaaaagtatttcgagaagatattcgtggaagaaaatgtcaggtgttggttctggtaggggtactgatctcggtgaccgcaagaaaaggcctagtgaatcatcagatgcaggcccaaacaaaaggttccagggtaaccaaggcttccgtcgtggtggaaatgaaaactggcagacttttcctgaatgcctgagatgtaaaaggcgccaccagggcgagtgtcaggctaaggcctgtttccactatggggtagtgggtcacatgaagaggaattgcccacagctactacaaccagagctaaagaaggatgatacacctgctcctgcccaggtgtttgccttgactcaggctgaggctgatgctggtccttccactgtgacaggttagctttctgttgctggtactttattgactgttctgattgattctggtgtgacacattcttatatttcaagtagaataatt

SEQ ID NO: 342798 - DNA, 714 bp, Cannabis indica
ttacaagaatcagagcaatcacaaccctgttggtactcgaaacactccagagaaaacagtcacagttttctctctaccaacccgagtacaccccttgttcttgaccctcttcaaaaacagatttctcagcttagaaccctaagcaactctctccaatcctctctcttattctcctcttcaacctctctcttaaagtgaaaaaactagacatatttataggcccaactcaaacaaggatagcaccaactaactaactaacataacagaaggttagttaagttagttggtttaagtgagttggaaaaagagttggtttagaggatcaacttccacattgtgattaattggctattatatagatttaccattttcaaataaattatgaaaattaataaatcattgtaacacgtttagataagagtatttttattaggtaccagtggtgcttaatattttctagacgtgttgtcttccgattgctagcgatacttcttaaaaattattactttaaactatatgagactcaataattaattgataagtaggagagtgttaaacaccactgatatattttataatttttcttaaattaatatgatctcaatttaaaattatatgtagctttatagttaaactttaaatacatgtgtaatgtgtacatttaatagtgtgtgttaacatcatatagggttatgcaaaaaaaaaaaaaaaaaa

SEQ ID NO: 342799 - DNA, 640 bp, Cannabis indica
cgattttttttcgtcgaaaaaattggctctctagtgattttgtacacatgttgttgccttctgttttcttcaacttctttcgcttggcctagaatgccttttgtaaaatctcggttgaccgagtcaaagaaaaaaaaaagaaagtagtatatatataataataataaataataaataaataataaaatgatatgatatatttatatatataaattctttaaaacttagcagaacgtctctctcttttcatctttctctctcttcaagcttcaaataaaacccacaaaccaccatcaccaccacactccggcgacccacctccggccaccgcccgaccccacgagccggagaaatcggaagcccaagtgccggcgacctcacccctctaagcggggcggcttctctcgccgccgttagcttgggatcgcaagtcaaagtttggggtttcaaactttgaatggatttttcggtcacctccggcgtccgtttgacgaatcgtcttcaccactaaactcagctcgtcgaggagaacaacctacactaaaccattttcccggttcgttactttttccggtgacatttttgtagctccgcccctttccggtgacatcgtgtaccgttttgacaaacggttggcatg

SEQ ID NO: 342800 - DNA, 1393 bp, Cannabis indica
gtttaatactatcattcaagcaactgactatctctttcacaaggtgacccgtattgaagcactcaagtatgccttaagagatttccctggttgttgctttatgttggtcaaagatggcacttcgggtcgacagtctctttcagcctgaaattacttttgaaagtccctcgataactgttcccaggatattatggaatgatgggttaatttatcaaaccaactgcttgcggctcctgttaagaaagttgggaataaaacgcaacacaatttatttgaaacgttgcttgctcgcataataatattaaaattatttaaatgagcgactggatatgtggtctcatcgtattgcgagacatgtggggtcttaaatccctgaggaaattctgaatttaagatatctagatggaatggctcggtttcttcgtttaaatcacaacttgagaattttccatgttctccatcttgatattttctcaatttatcctctaattgaattattcgtaattggatgggatccactggttgttgatttgcattttggttaaggttatcacacaaattaggcacatttcgatttaggtgctggcgaaggtcaggctgcctttaattaatctctcgtggaaattaggttcgcgatgcctttgttaatagttactgacagatcttgtcttagtagtagttctcgaactgataactacgtgagttacttatgcttttctggtcagcataataatgtcaggatctactcccatctcgcgtttgtctagttgacctacaatgcccgagggatcgcaattgtcgtgtgcttgagcttgcttcatctcgtgttggtcttcttcttcgaaagagattagacacacattctctactcaagtacgtgtgcacattttctttatttgtgcgagaaggatgttgaggatgtcttgatggaagaccacttgaccttggttggtttccatggtttctctcattatcacgaggaaatccgtaattccatggtcgaggctgccttgcctcttcattcatgcgagatgatttttggcatcttagtttattcattcccttggttagccaatcaatggaaagttttcgtcgatgttcttgattccttgcattactaggatttggttgatttgctatatccattgggacatcccttgtattcccaggttgttcgtcctgagattttgggattctcttggtttgcttcttgtctcttagtcctagagcctcgaggtattcctcgcgtgttggaattattttactaggatctagatttactaacaagtatgttattaacatcctaaacatgaacttctaaaacgatatgaaataaacacatataaagtatcgggaaccttacagtggttgcagcgaaatataatgtctcctt

SEQ ID NO: 342801 - DNA, 851 bp, Cannabis indica
ttgtgccttaccattttgtgaagcttgtattttaggaaaacaacataagctgaagttcactccagcaaggcatacaactaaaaagatactcaaatatgtgcacgctgatctctagggccatacaaggtgactgctcactctggtaagcaatattttctttcaatagttgatgacgatagtaggtgtgtttggacctatttgctagcaactaaggatgagtgcatggaatagtttacaatttggaaaactcaggtggaaaatcaaacacatcttaaaattaagaaccttaggacggataatgggttagagtttattaactccaaatttgacaagttatgtctataatttggaatcactacgcatagaaccatattgaagacccctgggcaaaatggtgttgctgaaataatgaaccaaaccttgttaaacaaagttagatgtttactgttcacttccattaaaaaaatctttttggggggaagctctagcaacgacaacctaccttataaatataagctcaaatagagtgatagacttaaaaacaccttatcaaatgtagtacaacaaaaccctcaacctaacgcatttaagaacattttggagtatagcatatgtacaccaatctattgataagttggaacctagatccgtgaagggaactttcctaggttatgtgttgtggtaattttaacacgcaagtttatgtatcgtaacaagtattactcacaaaagtgaggtcgatcccacgaggattgtacttaagtacattaaaattaaactcttacttctatttggctaaataaaatttgagataaaattaaactataaaacaataagaataataaaactca

SEQ ID NO: 342802 - DNA, 655 bp, Cannabis indica
aagtactgaaccaccaaaatgaaacatgcattttcttttaaaaggaaaaatgcgagcataccctatgttaatcaaaaagttctttttaattctaaaaattactttttagggggtgattgttatacccatacttcgagcaaataataaggtgatgccacgtattaaaaggctagaaaataaactagcttgtgttatggagcaataaatgagttcaataaactcgcctaaaataatacaattagtataaatatttgaactcatccttctaaagataagggcgagccgcaactgccactttgtgagaccagtgagatgaaaaaaaatcaacataaaaggtctatctcgagatacacagagtacacaacagaacgacagtatgttggaaatggtagataatgaatttttttaagagcttgtagctcattaatccatatactcgtgagtatgttgaaaaactaaggaaaatacatcccattataattcatcttattaccacactattatagtgcctcgcatttgcctctttcaacatcacataaggacaagagaagaattttccatattacagttagacccaaaaaaagttatctttagaactgaaagcaatcctaaagagaaacgttcatattacgagaaaaaagaagaatagtcaaca

SEQ ID NO: 342803 - DNA, 639 bp, Cannabis indica
acatattttgtatatattaaaccataaacatgaaaactacacgtaaacaaaaatgacttcttatctttcattgataacaaatcaaattaaattgaaatggattttatttagggcataaaatcccaacatgaaacgtgtcaccttttgatttatcttgttccaatggtctttgcattgctttccagttctttgttgatcatctttgtagtgggtgttgaagtaatttgcgatccgaccccaaaaatttgcagaagtttggtcagttcccacaacagcatccttagatgtattaatccatgtacttatcagaagtatatttgcttctttgctccgtttaagtttatttttttggttaatttggttcctcttcactatgtaaaatgagttttgctaacccttcaacaccattttgggttagtttggaaaaagttagggaaacacatgtgggagtaaatgtctttgtgtaaagattggaccatgtttgggagtctcaaaagagctaaaattttggtaagggaaagaggagattggataattgggccaagatgcaaaatggccctaaatctaacaattaagttaataaatgtccctttttataaaaaattaacaaaatgtccattatgttaaaagtttgatgat

SEQ ID NO: 342804 - DNA, 639 bp, Cannabis indica
aatcatagtgtggaagactgtgaagaatccagattcaagagaaggacattcgagctcagatattggtgatactctgcgacagaaaggatacaagggttaaagatctgagtggaaggagacattaaatttcgccgcaaccactgtaaggtttctcatactttatatgtgtttatttaatatcgttttagaagttcacatttaggatgttaaacaacatacttgttagtaaatctaagatccttgtaaaatatatccaacaactccctcaactggggaccacctaacaactgacaaaggtacaaggtgcaagaccacctcttgcccttttgaggtgcagcatgaaagtgacactttgtccccttggggcaaccatgtacctcaggacattagagcctataaaatacccttgtctgtaatgtgataaggggttagaaaatcatacttgtaaaacgatattgaaagtaatagaaatttctccattattctctccatttcaagatagcaatttgagattatatttcatcatcattttcatctcatttcagaacttgaagcggaatgttgtttttcggtcacaagttagttgacgagttctcaccgtcaatagtaatggggctacgtcaactttgagtttttatt

SEQ ID NO: 342805 - DNA, 550 bp, Cannabis indica
ttataattaaataattctaaaaaaggaatgtctatttaatcaattattttaataaaatagttaattataattaattaaatctaaaaaaggaaagtctacctattagtaacctgctattacaggttaaaaaaaaaaatgtaaccatatggttacaataaaaatgtaaccattgaatagtcacccatatatcataatagcaaaaaaagtgaaagtgaaaaagacatttaagagtctaagtgttttttatcttgtaatttttcttttatttctagatgttgtaactttgctgcccataatgtggctaaatgggcgctgccccaaaacatttcaggtttcgtggaggtatcctcgataccaaagactatcatttgtaatgaccgtgaggtctagttttctgatcaatctatcactttattttcaaaaaaaagaaaaagacatttaagagagaaaaatataagatactttttaaagaaaaattagggttgaaaaatacaattgttttccactctctctcctcactcatgcatgcccccccccccctcctctctct

SEQ ID NO: 342806 - DNA, 534 bp, Cannabis indica
cctctcttgaaaatctagctttttggtgtgaattgcttggtgttacttgattttggagcttgatttggaagaattttaagcttgggattgaggtaatttcttgctaagtatatttgagatttagtgttgtaattcttgctgaaattattggggtaaaagcatattttgagttgttcttctcttgaggttgcatgtgcttgattttgattttaatcttagtaaattgagtgagtaattgcatgatttggttgggattcatgtttgttgagcttggattgtgattatagggtatttttctagcttgaatccatgttattttgatatgtggctgctggaaaatagttgagtttgatggatttcttagctcaagttcttgagcttgagtattgctagtttgaagcatgaattatgtgttttatgcaatctgaaattgtgaattttatgcatgaagtatggttttaaactccatgtatgatgattaaaaacctattttatggtttgggagttttggttgtgaattggggtgatttgatt

SEQ ID NO: 342807 - DNA, 1161 bp, Cannabis indica
catccctatgagataaggcttaccatatatctttaattacgcgttcatctcggtccaataaaaccgggatattcacagctgtgtaaaaacctcatttgtttggcttgatttgtaatcagattccacaattttagggataatgtttgtaaacacattttggcgagctttgtaattaactgacactatgcaagaagggggatgaaaagaaaaaactcttacgcaagaggccttgaaaaaaatacttagaaatctgaataagattgactcgtggactatgtagaattttaactgcaaaactacttaaaaaaccatggtgttcattttcttatttatctatatagctttattttttccgtgttgaattatcattgtgagcctcaaatttggttaacaaaaatctgcgttaacaatataatttacacattaaacataatcatgaaataaatcatgcgaaccatgcgacgtaaaattatttctgatcttttattcattagtaaatttgattatactgaaatggattttatttaggacacaaaacccaacagttagttgttcgacttggtgactattacggatcccttttggtgcttgggaagggaaatttctgtgagtatttgttatggtagctactacattaggttcgaacaatcgttttgttggttgtaatttgagtttgatgaggctattttgaagaagaatctcaagcttgattcaacccaatattgactaagcatttctcaactctactcaccaattcactttcatttaattattttcttttatttgatttttatgtattgtgttggtggttgtaactattgttcttgttggtgttattactctttgtttttttttgtgttgagtagaaactgtacctctccaagtgtggggtgttgattccttagttatgatattaattgagtcacccatcccagtttttatttttgtagtcatttgttgattttgtcaattttggtaggagtgaggaagtttcattgtcttagtgtgctcaatgattaatcataattttttattaaaaaaatcatccattcttttttattgccttttattgtgttattgactaattgtattcataagtgttcttgaagtgataaaagttgtgatgaaagtatttttcccaatatcatgtgcatagcttga

SEQ ID NO: 342808 - DNA, 799 bp, Cannabis indica
tgtgtgtgtgtttctcatcctatctcttctctcttcatcgatgttctcgatacgactccaatgagccaccgtcagcagctccactgctcgattttctggtcctatgtttctctctctcatctattttttctcttcgtggtggacctcactggagccaaagctccaaggctccaatatttgagccatctccgagtcccagtgagcaaatcgaagctccacagaaaacccacgaccaaacccaataaactccaagcccgatcccccatcttcacactcgctctcccaatttagtttataattttgggttgttgtttattcagaaccggtgagttcgatatcatggatttagtttagaaaaaattgggggtgggatctatggggataatggtgatgttgattgtgatttaaattttatttataattttgggtttaggttaaggtggtgctggctattgtgatttgtgggatatatatttttttttgttgttgtgattttaggttagttctagtgtggtggtggttctagtggtggatatggtggtagtggttaggggtgttcatccaatccaatctgcactgcattgctcagtgcattcgatcagcactaagtgcgaatttcattttctggatgcaatccaatccgcacaatagctcaaatccaatccaattcaattcgcaaaagtgcggattgaatcagttaatttacattggttactttttaatattaaattatttaatatttatgaaaaaaaaaaatttacatgactagcaacaaataaaacaaattatatattatttt

SEQ ID NO: 342809 - DNA, 611 bp, Cannabis indica
agtgttcatcgttggatcctcgtacgtttctcccaagggaatgatgttcggcgattgctgacctatagttttgtaggctcttcgtatcagcacggtggcttgccgactacgatcttcaatctctgcatggtgagcccttaatgcttccatctctttatctctccattcggcgaacatacacctttgttcgtcgaacgtgagatttactgcagcacacagttcctcctgatcatgatgcagggtgttgttatgaccctgcatgagtccgccgagcgcatcacgaagattttgtaattcaatggcatctccgatagtcgtctgggcgttggatccaggcgaaacagtcatattatgaatgccctggtagtgtgcagaactgttattcccagtctcttgcacacgaggcgcaattccatctataggaattgtttcaccaatccccacgcttgccggctgttcatgattaacaccaggcgaaacccttccctgggttctgcgatgtaggctccagcgtctctgaattttctggatcagtctagcctctacgagtttgcaccatcgtcttggcggttggatgttgaataaagaacgattctgttggaaattatttt

SEQ ID NO: 342810 - DNA, 693 bp, Cannabis indica
atgtccaccataccagagcgtcttcctgaaattggaatgtggcacaggccactctatcattgccaatgacgcccataaaattaaagattctagtaatcacagttagccattgctcgactttcttgacattaggacctcccaggaaaattggatgtgcttgcttacgaaatctttcatacaagggttccattcggttcactgcagctacaggttctgcctacataataggggcaggagctattggtatttctggagcagggattgtaggagcaccctgctgtctcaattgtcgaatctcttcatcttgtttattaatcttgtcttgcaaatctacaaacctattttcctaatccaaggtaacttgggcagcctgtggcgagttaacatcaccctgaccacgtgccctgcctctaggacctctacctcagccacagatattaaggggaatttgagctccctgaccaccagtggatccaactgaaatgcgctggctcttggtctttcgcctggcgtccatactaattagaacagcctgcgtaagcaagagctagtctggtcagatcgtgatcaagtaaaaacttactaattgccgcttatttagaaattaaaaacatacacctattatactatcactctactaacatgcttcctaacaggcttttcttaaatcatactattaaaataaactactaa

SEQ ID NO: 342811 - DNA, 760 bp, Cannabis indica
cttgccgcagattcttccaagaagctggctaagaccacgcaggacaaggggaagaaagtcatgatcgagccaactgtccgagcccgcgattttctggctatgcaggagaagttcgtgggcgaggagttcatatccaaggcggagaagatcccttctgaggagcttgttccgcgttctgtggagttggcgtcgcagtcgatgactctgtttatgaaagctgttgccgctggttctaaggaggctgactcgctgaagaggcacaatgctcagctccaggagaacatgaagagactgaagcaagaggcggctagaaaggacaaagagctcgaagaccttcgcaagtctaaggagcaggctgagctcgaggctaaaaactctcaggcgaagatcgaggagatggctcgcgacttggaggtcgagaaggagaatgggaagaaacagtatgatcaggcagtttctgattatatttacactactctttctaaaatcccagacttcgacttctctatcctcggagcagaggccgctgagatggccgaggcttttcgcgccatgtcgcccactcaaactcaaggtggtggagggaatcttcctgaagaggccgagggcgcggatgctgaggaagtcgagaacgaggccgttagcaaagtcgcggatgaaactgctcctgctgctccagatgcttgacttttctcttctatgttaaaactgttatgcttttttgaatttacttgtttagtttttatgcggtacaggggta

SEQ ID NO: 342812 - DNA, 663 bp, Cannabis indica
atccaaagtagtgaagaaaaggatgaggaagcaagcattccaagctggtcaacatttgttgctgctcataatgctatagcattatcacagcaaaactgcccagtttttgaaaaattcagcaagagcatattttacattcctcaagtcaaagagcttatggtaatggaatattatgtttatgaagatcctttttggccaccaccatctcccccaccattggcatggtaccttggcatccatcatgccaattcgtcgaagtcaagaaaagttgaacatttgcgctcatcaatacaacatattgccaagcttgaggacgaccacaacaaagacccatttgtgagggcatatgccactctctatgggcggaagccgctctttgatgagtgcttctcaaaaagtcaagccgatgactttaaatcaagcacttctggggaggcaaccaaagttttctaaactttatctttatttaattttaaattcaataaatatgcaatgttaaatggttttgacaattgcattgtagttttttgtttctctcttgcttttctctttctctcttgtaggtgcgagcataaagtcaaatgtaattgggcgcacttatggaggttgacactagcaattttgcacatcattgaaaggggagttcttctttaactcttcttt

SEQ ID NO: 342813 - DNA, 751 bp, Cannabis indica
caaatgtcataaatgacattaccaagaaaagaaagaatgtttttaagatttaaaataatattagcaattaatttggtccttaaattccactcactctaggcactaaaaagtgttaaaatattcactaaataaatgttggtgggtattgtgaaaaaaatgaaaaagttgaactgttcaacaaaaaaatctgcactccaccttttccaagtggtttatattttatttatttttcagttattggtataccttttgtgtagactaactttttttctttatttgttttgttaagaattaataatacttaatcatctctaatttatacatttttaagtatcgcattaagaaaatatatatctatataaaaataattatatcttaataaaatatatacatacataaaatttatacattatttatgtaaaattaattatattatttcaaattataatgcgtacataaatattatatttaatcaaaaagaattttattataatataatagtagggattgttaattattatggactaaggttgttacattaataatttttggtatttcgttttgaatttttttctttatagtataattctatttaattgtaacttcttaattggaatataatttgattagtcctaaatgtattcttaaatagaggttcaccgtatatatttatggggtaagttgaaaaatacctcttttattaatcaattaaccaaatttgcctctaattttatatttatttgaaacatac

SEQ ID NO: 342814 - DNA, 253 bp, Cannabis indica
gtatataatattttctaagtttggtttttacaagtttataattttgaaaggtgaatttcttttgtgatttgggggtatttatttagaacatttacacaattaattatatttgtaattaatttatttatgtatatttttatattaattaatttttcaatttatttataaatcaattaataaatttagttaatatttttttactttaattcatatgaatttacattacttttttcttatgtgctttttatggctt

SEQ ID NO: 342815 - DNA, 515 bp, Cannabis indica
acatttggtggttgttattcatcgatgataatcaagcagccaatcgtcttgccgcattgtcaaaagactcactcttctcttcatcggttataccattcactgcgagaagctctaggtcgtaaaacttgaaaaaatttctcataccgttgatgctctcccagatgtgcctaccaaaaaattttttaagtattagtgtcttataataatttgactagaatttgatatatatatatataaggttaattagattaaagaagagtatacatcattccaaacaacattccctggttgccgatgaagtcacataatgcaacctgctacaaatcctttctagatagcgtgatctgagtacgcggtgctatgaatcccttaggcataggaattgtgattatatcacgtttatctttgaggttcaggaattcaacaatcatgcattttagcaatttagggatcaagtacatcttcttttcgagaataattcatcttctcgtgcaccaccgtccttgtggagtaaa

SEQ ID NO: 342816 - DNA, 680 bp, Cannabis indica
tatcccgaccaaacactcatctctcatgttgtcttttgtagatgaacccttgtgagtttcggggaagcgaacaccgtattgaccaggacttgctccaacttctgtacgaggatcaccctcgtctttgtgccagtccgtcctcttcaagtgacagattttccaattcaagctttacatccagccacaggatgatggctcgaacaaagtagacgatgcgtaaggtcaacgcatctgatccccacgtggcccagctcgccacattatctagcgccgaacagcatccacctgtccaggaggagggggatcacgtaggggatgctgaagtccaagagattgaggaacaggacgatgtccgtcctagcagtccttccgaggtagaggaagaggaggaggctgcacctccaaactttgggggatacaacgaggctggggagccagtagatgcggacagcgaagtccttgtcgaaggagtggactacgtcaccgaggagcttactactgcagttcctcacaggaggcagggtgccttaggtgccagatgggtgagccctccgtccaagatcactgaggtatgcctaagggatctggaccagtccagctatctgggcgaactgaaatgctacgtccctacctcaaatcatcgagcctcaaacccgaagaaggggatgtgtgttggaaaa

SEQ ID NO: 342817 - DNA, 1082 bp, Cannabis indica
acaagcacctacaagttataaagggtaattggtccatggatgataattcgaatctgtggaagaatttttggaagattaaagtccctcctaaagttctccactttgcttggcgtgtattaactgattgtttggcaacccgtgttcaacttcaaattaagcgagtcccggttcagaatcattatttattttgcaactctgcagctgagactacccttcatttgttccttgattgccctttctcaaagtcttgttggaacatatcagctgtgacaattccccggcccttcgactgctaccagctttcttgactggtttactgtagtgtggaatcggcataaaggtgatgccattgaagaagttttaatgatcagttggtctatttggaaagcccgcaacaacattgtttggaacaataaaacaagtacggctgctgaagttgtttctacggcacatcaagttcttggtcaatggaaatttgctcaaagctgtcgctttgagccgctgcacctaagctcaaataacagtagcagcaacgattattggacaaaaccagcagaaggaatgatcaagattaatgtcgatggtgaaacgtttgaagccaacaattcctacgggacaggtttcattgttcgggactcgaatggagctgtcatttttgcatcttcctattattcgacgggactttcaagtgcacccattgctgaaatgataagcatcacactacaagaataatgggtaataccaacgccactattaccaacgccaaaaagtcctcattaaaagtgagggtatcaataacgacacttacttgtcgttgggaaatatattcaatttttttttttaaaaaaaatagtaaatcactaacgacttttttttcaataacgacaatgtcgttattgaaaaaagcttcaataacgacattgtcgttgggaaaaattttattatattttgaaaaatgtccgttgcattggcggcaaatttccccccttttttttacaatgtcgttggggacttctgtgacagtcagtagtcccgtgatccgtaaggagaaataccgggtaagctgtgcaatcccacaccgc

SEQ ID NO: 342818 - DNA, 774 bp, Cannabis indica
atgaaagtagaactgtgagtcaacagactcagtaagaaaagcatacaacatatcatataattttcgacttgtacttaggcgcccatacaccgatttacaagacttaacagatgagtacgaacgttccatactagggtatagccactgtaccacatgcactacgtacctcaatgtacgggtgttggtagggtttgttcataccctgagtactctagagtaatataccacgcactcccagtacctcaccgtacttatgctcgtatcacggtactctcagataacatccactataccaatgcactctataccataaccgtataagtgttgataatgcaaataacattttaagcatgcatatacacttagcatatacatacactcgtatattcatatcatacattatatagagttattacctgttttccgaattcaagtgtgctggccgacctgatcggaaatgcttgtgctagatggatgccctaatcaaattaattgtaacacagatgagtgactcgctaaatcactttccggggacttaaacttgaaactaaaaattcccttatcgataaaccacatagtaataccctaaatatcttaaaattggaaaaaactagggttccaaaaattcccccaaccggtagatcggtcccaaccggaagtccatttctggaacaccaaccgatcgaccggttggtacaggtcccccagaaccggtcgaccagttctgtgctgggaacacaaaaaccaacccccttaactcaattcaatcccaaa

SEQ ID NO: 342819 - DNA, 506 bp, Cannabis indica
tatctctcacaattttgctcattaatttatagaaatgggagatgagaagagaggtagcattgcctttttctcaacatatagaccaccactaccattggacatatactcgtctcctcttttagtaacatcaagaaaagatgagcttcacatgactgatggactttcttacaattacaatgcccaaattattccatcaaatgctcttaaaaagattctcactcgaccaaaaatggcttctgaaggcaatgaggccgatgtagactcaggtcgactctcggccatggtttttgtctctgagcgcgaaaacctcgaaacacttcacattgctctccaattcaaaaatgatgatgaaaactctcttagagtgaaagtctttagtttttctgatgttttcgacacattcaatggtattcgaatggaggatagcggttgcattgcaggtgatcaaagctatttatttattatttacaatttgacatgttaagatgtcttacaccatatcaaca

SEQ ID NO: 342820 - DNA, 1494 bp, Cannabis indica
actactttacaaaagatgcatgaaactttgtatgaagtgttggatatagaccctcttctgtatgaactgaaaatagaggtgtgttacatgtacatgaaagacaatatgataccgtcgaaagttttagtgaaagatagtcaagtaagaatgttcttaagaataaaggcaaaaatgagtgtggagaacttgctgccactgtttgtcactaggttaaaaggcatgcgattttggggccaactccaccaattgtccccccaagaagtgttgttgagagttttgtcccagaaacagatctagcggtaggtttgaatgagcaggcccctactaagatagatgaggatagggttgacaatgtatttgaccagtttgatgagtttgatggtcccttttacaacaataatcctgtggtagatttgaacgaggatggtgatgcggagttgcaagttgatgaagctatagaggtacctactttgaggttagaattacctccactacctccactgcctccaccatttccaagggaccaaaggaaagagcaagaaagaagaacccctcgtagtgaaaatcaccaaacaccaggcaccagtagcagacggtcaggtcctcctcgtagtaatgtaccatctaattttgaagtttgtacaaaattcaaacctattgtgtggacaaatgaagacatagaggaaaataatacttatacaacttctcttactagtacacattcaggggaaatacatgttggcaagttgtacacaaataagactgaattgaaaaacgtagtgggaaggtttgcattgaaaatgaattttgagttcatggtgaagaggtctgggatcgatgtttcttatgaaacttgctagggattcaaattgcaaatagagagtgtgggggaggaagagagcacgttgtgacatgtttgaggtcactatattccacaatgaacacacatgtagcctggattctagacatgctggtaaccgtaaagcagcatcgtgggttgttagccaccttattaagaacaagttcaaatcagatagaactaagtacaaggcaaaatacatacaaagggatatgtttcaggattatggcatcaagatgagttatgagaagacttggaggtgttgggagaaggcacttatgtatgcgaggggtacaccagtagaagcttatagtctgttacctggttacttttacatgctagaacagaagaattcaggtactattacagacattgtcatagaggacaataggttcaagtaccgtttctggtcactagatgcatgtaggagggatttaagttttgtcgtcctgtgattagtatcgacaatacgttcttgaagacaaggtataggggcacaatgctagttgctatagcgtacgatgcaaacaaccaattgtttccgattgcctttacaattgttgacagtgagaatcatgactcttagaaatatttcttgtagaagttaagggaagcgattggggaggttgaaaact

SEQ ID NO: 342821 - DNA, 662 bp, Cannabis indica
atacttgtgagtagatctaagttcctggtaaaatataattccaataggtatgaccctgcatgagtccaagaacagcactttggttttggatctcaatgtcatctccaatggttgtttgaatattggtggtgggcggaatgactatgttatgaatgctttggtcggctgctaaactggtattcccagtctcttgcacaccaggcgcaatttcatccacaggagtcgtcatacagtgacctacgattgacggctgtttaggatttacagatggtggagcccttgtgtttcccaggttctgcaatgcaggatccacctcctatggatttttcggatcaaccacgcccctacgagtctgtaccaccatcatacgtgcgattaaatttaaaatgaagagcgatccttgattctgctctcaatgaaagcaccaaaatattgacctcgcttttggccaacgacagtgagtctaattttgtaagcgacaagtagtatataacgattgaaatataataaagcaatttaaagacacatgaatttatagaggttcagacccgagcaatttggtaatagcctaatcctcattatttgtattgacttaagaacaaggagaaaggttccttttcttatagctcttacaacaggatctctgaatatgaattcttaga

SEQ ID NO: 342822 - DNA, 634 bp, Cannabis indica
aggctgcttgcctttggtagcagtagatgccttgattgctgaagatgctcgagtaggtgctggagcagattttgccaaaggagactcgggttcgagttcagtgtcttcattgtcagaggagactctgatgtcttcatgaatctctttttcagaatggagagactcagatttggtttttcagaatggagggatcctccatgggttcttcttcttcagaacttgaagaaaccgaggggggattcaatttcagcttcttggatggaggagctagtttgtcatagcttcgtttcgtgcaaagttccttctcgatagatgcttgctgggcacgagtgcgagtggaagcacctgttggagttgatgcagcaactcccttccctgatgcagcaggaggcgatgtagtggcaggtggaggagatccctttgaagatgaagacgataaagtccaacatttgtagggtcccacaaattttttaaccatttgtttaggaattcgtttaggcttgggcttcacgggctgagattcacgttgaggaagcgatgaatttcctgggtttgaagcagttgcagcagcaggcagcaagattggagcagcaggaggagcattcgagggggcttgttcgaattccaccatttt

SEQ ID NO: 342823 - DNA, 766 bp, Cannabis indica
attgcatgctcaaaataacacttatatagagattaataatcctgattcatgctttcacttgattagcaatattattgtacatcatcactttcttaccttcatataaattctagggtaataaccctagaccgcattattatcaaactcaaggtactaatttaccgagtctaacttaattatgccttgaacgcataattcttgattagcaatatatttagcatggcatagcatttacacattaataattactaggttaataaccctatgtaaataccgcttagtttaaatttagaaattagaagataattgagatttaattatgaaaattatttatagatatttaaataattatttatgttgtcatatttgaattctgaatgtatttttatgtcagatagtgaaatttcataattttgcattttcggtgcccggcaacatggaacgtggtgtatggctcagtaaaataacaatttagtattttagtatagcggggcagtttatttagacattgggaatgtcgggattggtcgggaatttagaatttcgtaaaatacccgttaagtgccttttaatccttttagtgtgggaggggcaaaatagtcattttgccccataagcttttgtcctttagttgacttagtgttatgtaactatgtgatttatttgatatatgttagctgaaataaagaaaagatttatgcatttttatcatttattcaaaataagaaatttggaaaataagggagttcatcctctctctctctct

SEQ ID NO: 342824 - DNA, 510 bp, Cannabis indica
tgaatatgaattcttagacaaaacctctcaaccaaaatgttctcgaccctttccccagtgaatatgcatcactatttataaggctatgagcttggagaggaagtatttcccttatcgttacaattgctataagcagaaagattgcatcgtaagtacagaatacactaattgtgggatttggacagcttgccatatctttgtaatctaatcccggagtcgatttcacgtgtcaccatcgtgtgatgcgaaagctaaattcgctaagtgtttgtccttctgtgcgggttgctaactgcttcgtcttgagcaagcatatgaggtatcatgttcgacctgtatcttgcgagccgatacccgaagtcgatttcacgtgtcaccatcgtgtgatgtcacgtcagagtgcagaaattgggataacagttattaatgtttccgaacattttttatacaaatttataaacaaaaattaaaataatctttatgaaatagaatagaaacttacttttattt

SEQ ID NO: 342825 - DNA, 672 bp, Cannabis indica
aggaaaaaaatgtacaaagctattttctgccaaagcccgtcgcgccgggcagaatccttcgccgcaacggagaaaaagcttcgccacaacaggacttggcagaaagctttccaagttgagaatgctccagccgtcatgacgaggaataagcttcgccgcaacgaagccttcttgacgacaaaaatgggcagtttcataatttcatgaattttaaagagaaaacttggctcattcaaaagggaactcgtgattttttatcattattaagaattggagccctagaaacaaaggaggagactacaagagcggcttgtggcgatccggatcgatctttccaaccagatctttcttctctctttaatttttcaatgctaattcctgtgtcaattttaattatggatttgattatggatgttatgcactaaactcctatttggggagaggatgaatgttgattgatattatttttagttaatgataattgctacttctcctttcttaattgtgaatttttccatatttgtgtttaattacatgtttaagattgagcaacttttccatgctttatgatcccaattaaaaatctcaaaagtaagaatggggaatggtgaaattggataaactaggttttgatgtgaaacgaaagtatttgcatagcctttgtgacattta

SEQ ID NO: 342826 - DNA, 649 bp, Cannabis indica
aacggtgggagtacctcagtaacttcagggtcatgcttgagaacgcatgccccttgagtcactgagtttctcccaaccatttttagaggtatatcgcttagctcaagatgcgtgacttattcgcaggttgcgattttagttggactccttgaaatggtgggtgtctcctcgtcacctcagggtcatgccgaaagacgcatgtcgctgtggtcactgggacactcctaaccattttttgggactttttctattcgcacatttagtactcgctctgcgattttttatagtttacatgcgggtgagatcacttattttgtttttcacacattcaccacgctgaaaagatcttctatctttcagatgagcgacctgtcagacagtcagctgcttggctcaggaggcaatgcatttgacggtgatgaggaccagagggaagatagctttatcccgacttcgatctcagaggaggagatcgcacctactgtaggtatagaattaggtccgatgtcttctgcagacatcgagagaatggtgcaggagctcgctgaaccaggggccattgagattagagacagcgagtctacggtgtcagcccacgattatcttatccattccaggcatgcccctgacgttgaggtcgaggagatgg

SEQ ID NO: 342827 - DNA, 531 bp, Cannabis indica
aaataaaaattaaaagtcacccaaatatcagttcaaatattaatgagatttgttttattgttattttattatatataaataatattttattattttattaaataaaaattaaaagtcacccataaatttctcaaaaaccaagaattttagttatataggcacactttatatagaatagatatatgaaaactaatgagaaatggttatttttaattactatgcatatacacacatatttttaaaaggtttttagttagtaatttattattgtgtttatatatatgtatatatatatataaatataataatgatggtgtatagtaaagactgtaaagttaaagatgattttctttaaatttttaattttttttgaactaattttaaattattgaaaccaagattcaagtaaccttaattgcatgcttgtttcaatattgatttcaacatcttaaatcatatttaaaattttgttgagagatcctcttgatcagtgacgaagcgagaaatttagttgagtgagggcttgaataa

SEQ ID NO: 342828 - DNA, 945 bp, Cannabis indica
aagatagaaaattcaccattggcgaactagtcctacaaagggtctttccagccacccaagtacctggagtgcgggacctgtaagctaaaaagaatggatggatccacagtgcctagggcctggaatgctgaccacctctgaaaaatattattagtagttaaaaatgaagtttatattctgtaaaataacttgtgccggacaaatatacccaatctcctgtgtaattttcaaagctaactgacctaaaaacttattttcatgtcacttagggggtattaaggcataacatacgggcaaaaaataggatgaacataagaaagtaaaaggctaaataaatcgaaaagacgtacaaattattcaaaagaaaaaaaaagtaaaggcctggggccgggccataaaaagtctgccctcaaaagaaaatagaattgtcttataaatgaggggaaggacaaaataaaaaataaaaataaacattacttaatcaacctggggaggaagacgaggatccctgcgctcttccaataccgcatcaagcctcttctttttctcccaaaaatgggctagaacttcctcaggcttggggtaaaaaggaagacgaaggtcaaagttgttagctgtccagcacataaaaactccatcatcaaagcgcttcgagcagtgttgataggtgacaagattcaggagggcatcccttttggccttggccgcctccttgcaggcctttccttgaactcacggagctccttcacttcaacagttaaactaggtgtcgtatttaagtgattttggtgcagctcctccaaagatcgtaacttggcagtgagttcttgaacttcttctttggaatctctaagatccctcctggccgcggtaatgatctcgtctctggccgccaacacctcctgatggttttgctccataaggacctgttgggttttgtgccct

SEQ ID NO: 342829 - DNA, 563 bp, Cannabis indica
tatctcacacatgataaataccccaaggagaagactgccaaaaaagaaaagccacttcgtaggacaaaaaaagatgttcaacaaactccttcaccaaaccacacaaagggcaactcacatcctcaatatgaaaccttaccctgatcacaacccaagttgggagagcgctactgtaacgccctaaataattaggcacgctacccaatatacttatgaaaccctaatcccctaatcgggactactagtaaaataagtgcggaaattaaactttttaataaacggaatggaaataacttgtaataacttaaaccttataatttaaaagttacaaaagttggaatcccaaaagtatttataaaacactattacaagttcgtttcctctagccgacctaagcggcaaaacagagtctcaaaatacatcactggtagaccccaacccgctcggtctagaatggcccgaacatgtacattcctcgtccagctcctacactcatggctgatcaaacacagctttaccctttcctgcacagtagagcacccgtgagccaagccccagcaaga

SEQ ID NO: 342830 - DNA, 1065 bp, Cannabis indica
actaccatgttcccaaggtataagtattaggaagatccacttggtcaactttaacgaacaagtcaaagaacatgaataatacatttaagctagaacccaaccatctcaaaattaagatctattgacctaagatcaactaagtgatattgacttagaaagatgtaacggtaagtttatgatatcttatccaatatcaatatcgatccagttcgatgtatactccatacatctgatattagtatactttaccaatgccttagaaagaacataccgcatttcattgtgtaagtaaactttatcgctgattatcacgtcagagtaaatctagtatactaataaatcatgggacttagaactttaaacatataatcatgattattttccactgtgtagacaacactataatcataaataactatatgttcaagatttaatagaatatatacattaaacatataatcatgaaagtaatcatgtgaatcatgcaacataaaatgatttctggtcttttattaattagcacatctgattatattgaaataagttttatttagggtataaaattccaataatggtctactattttgactggcagagaacctagaaaaatgacttgtcgtctttacataaatgacctagcatttttcaggcagttctctcgtgttttctcgatatttaggactttagcatactatttatcgataagaaaactcttagttttaagttcaggtccctaaaaaggttttagaatattttttttatccattttaagtgattgtgatatagggcctccgttcagcgtataattttctatgcaagttcaccggcacacttgaattcggaaacgaggtaagattagcatagaatatatatttatgtatatgtgtatgtgtattattgcatgctgtttatatgattcatatgttaccaacactagtacggtagtgacactgagtgcattagtatagtatatgaagttcaaatggtacgattcggtgttacctacactagtacggttaagtacgtagtgtatgtggtacaacactcagtagtactcagggtacg

SEQ ID NO: 342831 - DNA, 716 bp, Cannabis indica
gcatctattgccaatgactaaagtcgttggtaattctttttatcaccaacgactttaaatgtgtctgtaatggtacccatcaccgatgaggtatcaccaaattttttttactgacgacatgtcgccattgatattcattactgacgaaatacccacatgttactaacgaatttttttctcattaaaaggcatgattcttgtagtgtttggtttgagatggtgctcagtaatgaacctcccaatatcaaaagtggtttcacattcaaaaattcttgtgaataaaataacgaattctaaacatgatctctctgctctttttgatttagtgaggaatacactgctggatgacctcctactcatggctgaatacacttgctattcttcttacctgtaccacaaaacacccatgagtgacagtgactcagcaagaaaagatattacataaagaaaaatcatggaaagtgatagtaggtttcattacaacagattatacctaccgataggtcatactttttcaatgtacatatacatctcaacatctatacgaacaaacctattacaagataaaaagtgtttgtagccatatataatcaacaacctctgtgttcataaaacaccctaatcaacaaccttagtgtttcataaaacaccctaatcaacaaccttagtgtttcataaaacacctaaacattaatcattataaatactcatcatca

SEQ ID NO: 342832 - DNA, 618 bp, Cannabis indica
aggaggcgggttgggcctgacttggcttgggctcttcttgggctgctcctttattattgctttaattttcttttatttttcagatttgctacttcttttctttcttcatttttgcttttagttcttttctcagaaacaacacaccctaattcttatatattaactaaatagaatgaaaatcaaatatttttataaaaatattaattaaaactaaacttattttattatttataataaataaaagtatatttttaaccataattaagattttatttgatgaataaatttaaatgaagattaaattttataagaaaatgctcactaatcgtaagacaccaccataaagtacctaataaaaatgctcttactgtaatcatatattagcaagatgagttgagtccatccttcaaaaagaaataatagtctttcatttattacattttaaatacctctttaaactaacgacaacgtggctataataatataggataatgcttaggtagagtcatgaaaaatgtatgtacttacatttttttcattatgtgtcattgttttataccaataattacttaattccttttatattaatttttttaataatttcatgacccttaataa

SEQ ID NO: 342833 - DNA, 695 bp, Cannabis indica
gccattcagacatgatagggatttaccttaaagttatttgtgaccatctaaatatcaacccgaattactcagtgaagagacaaaaaagacggccattggattctgaaagacaaggggcacttaaagagaaagtggataagttgttgactaatgactttatacgagaggcattctacccctcgtggatatccaatcctgtccttgtaccaaaaacaaatggaacttggagaacgtgtatcaactttttagatttgaacaaggcgtgtccaaaggattgctttccactaccaaggatcgaccaattagtggaagctactgctggacacgaccttatgacgttcatggatgcatattctagatataaccaaattaagatgcatctccttgatcaagagcatacaaacttcgtaaccaacattggactttattgctataaagtcatacctttttgtttgaagaacgctggggcaacatatcaatgactagtgaatgagatgtttgaaaggcagatagggaggaacatggagctctacgtcgatgatatgttggtgatgttgataaaaagtggagaccacacaaaagacctcgcggagtgcttttaaatactgaaaaagtacaatacgaaactcaacccaaagaagtgttcctttggagtctgctcaggaaaatttatgggattcatagtcaacgcaagg

SEQ ID NO: 342834 - DNA, 755 bp, Cannabis indica
aaagtggtttcacattcaaaaattcttgtgaataaaataacgaattgtaaacatgatctctctgctctttttgatttagtgaggaatatttgtaattccttatcaaactttcttaaagtgtcagttagctttgtttctaggaataataatgcaacaccctgactttcagggacgccacgtgtgtgctttagaatcttattatcactaatctatattagtttaggaaaaaggtgtggttaggttttaaactttggttaaatttaaactaaaaacttccattataaatacaattgtaatatggggatcccctgctagtaaagttcttttaaacctaatatacaaaacaactattacaaagtcaagattacattttcaaatatataaaaaaaaaggtcaatcctgcttccaggaagccaagacaccacgactgatatgtacattgctggatgacctcctactcatggttgaatacattgctattcttcttacctgtaccacaaaacacccatgagtcacagtgactcagcaagaaaagatattacataaagaaaaatcatggaaagtgatagtaggtttcattacaacagattatacctaccgataggtcataccctttcaagtacatatacatctcaacatctatacgaacaaacctattacaagattaaaagtgtttgtagcaatatataatcaacaacctctgtgttcataaaaacaccctaatcaacaccttagtgtttcataaaacaccctaa

SEQ ID NO: 342835 - DNA, 962 bp, Cannabis indica
taaatatatttttttttaaaatagctagttttaattattatcctctttttttaacgattacccatagtaacattgttaagtagcataacctttttaagaagaagaaaaaaaatcttcaatattattcttatttagtttgttttcaactaacattcaaaatattcgctttttttaggaggtcaaaaaatggacttagaaccaaaaaaaaaagggactacatacattttctttaaaacaagaccaaatacatattatcaataaacaataataaaaataatatattattttataaggtaatttgtgtcataaattataaataaatacatttttattagtagtattatttaagttataattttaaaatttctgtagctacatgtatatcaataagaaagagaaatgctaaagggcaccagtggtgcctagcactgtgtcaatatcgctattggtccaactaagtatcgagttttaatataatagcttttagggagtatcgcgagccaatcgctacgcgatatgtcgagaaggtgctaggcaccactggtgcctaatagcaatgctcgataagaaaataacaggtaaataatgacataatatttaatggtcaaatacctaaatttaagtatttgagagaccaacacttttttagggaacaaatattcactcatataaatatgttcatagacaaatgtacaaaagttgtagggttaggcttgagttaagcggactaggtccgcgcttaaggcctactcggtacaaagaccaaaaaaaatatttccctttaaaatattacatattttttgaattaaatgtctaatatttttattttcttaagtatccaccaatctcaaagttggctttgtggctgtggtgtcttgcctctgtgacaaagcaaaatatgtaaacctatatgcctaagtattgagtaaagagagaaaactcaaaagttaaataattttttt

SEQ ID NO: 342836 - DNA, 542 bp, Cannabis indica
acataggaagtctcccttaaacaaaccataatccagtgaatgaacctagtaggaaatctgtaacttttcaataaatctttcaagaaatcccaatctaccgtatcgtaggctttactcaagtcaattttcagcgcacatcttggagaagcatttttcctactataattcttaatcaaatcctaaaaaataaggatattatgagctagagatctacctttaacaaacgctccctggttttggccaatcaacaaaggaagcacttcaaatagatgcacttatgcagagtagtgtagtaggcaattggcctataatccaccgctttacaaggcacttcatttaaatcttttggcatcctcccagtttcaaagaattcaagaatagcctcagttatgtcatccacgactaatttccacattgctttaaaaaatccagaagtataaccatctactcctgggctttcagtacttgttatactatatatcgctttcctgacagcacatcctctttagtaaacttctttattaagttcaattgaagctcaa

SEQ ID NO: 342837 - DNA, 552 bp, Cannabis indica
ttcttataacaatagttatcagagtactattggcatggctccatatgagatgctttatggaagaaagtgtcgttcgcccattcattgggatgaagctgatgaacgtaggtatcttggacccgaggctgtccaaggccattgaaaagattcgggctcatatgtttgcctcatagagtagacagaagagctacgctgatccaaagcgtagagatattgaattccagattgggtattttgttttccttcgggtgtccctaatgaaaggaattcaaagatttagaaagaagggaaagttgagtcccagatttattggcccatttaaaattcttgaaagggtaggtcaggtagcctatcggctagccctaccccctgctttatctggagttcacaacgtatttcatatttcgatgcttcaaaagtatgtatctgatataactcatgttttaagttatgaagatatcgagcttcaattggacctgtcatatgaagaacaaccggtgcagatcttggacaggaaggaaaaagtattgcggaataagactattctgctag

SEQ ID NO: 342838 - DNA, 565 bp, Cannabis indica
taaatataacaaccaacaacaaaattaaacaaagaaaaatcattacccattaaattcatatataatattccattttaaagaaaaaaacaaccaccaccaaagcaccgagcttataatatagtctgtataaaaatttgtgttatttgataataaaatgagtgaaaagaatgaattttgtgagtgaataaaattgagagatgagagaagagagaagggggaaatgctgcgtgaagagaagggaaggaagagaaagaaatgttgttattttggctgtaggggtactatggggattagaattaaattttgtttagtctcttaatatttcacaatataagtttaggagaataattttcccctatgcatgaaaagttaaattttgtgtcttggaacacaacaagaagaaagaaactaaggaggcgtttggttgggaggaatgaaaatataggaatagaaatgtgaatgagaataggaatatgaatggaataaaatttaaaatgcatacaaaaaattgataaaaaaataattatttttttttacttgttacattggaatggtcattccttcc

SEQ ID NO: 342839 - DNA, 693 bp, Cannabis indica
tgtacaaggcaatacaaacaaaaaaaaattggagaatggagaaactagagctaaagagagaaactaatacaaattttgaaaaggaaagctaaagacaaagttacatgcattcaaatagaaggaggaggcagagggatgctggcagctgtgattgtcgatgtgtagcgttgatgctggttgttattatcagtgtgtagtgttgatggcctggcggaggaggcagagggatgctggcaatggtgggtacgttgggagggcaggagatggcagaatctagagttccgttggggtgttaatggctatggatgagatttgtgtgaagggcatcttaggtaatgcacttgtaaaactgggtatatttcaatcaaatctaatgtggaggtatttttggttaactaatacaaaaaagggcattcctcaacttcccccatatatatttatatattacttagaagacatattataaaaggggaaatttgattttctatacttagaaaatcaaaaaatttgatttctaaaccaataatttaaaccctaaaaaactatacttttttttcaaaaccccaaaaatacccccaaactaaaactatctctctttctctctctatctagccggtcccaagaatcccacaccccaggtccgatggtcggaccatggggtccgatggggtccgaccaatcggacccatcgga

SEQ ID NO: 342840 - DNA, 903 bp, Cannabis indica
tcatacacaaatttagaaaataaataggaaggaaacatgtttgcaaaaataccaaaataaaacatatttaattattttccaaggtttccaacaagttgataaaatatcttttttaggcgagagtcaaagatatcattcattgaatagagtagttagctcatctaaaatgaaaataattctgccaaccttttttcgatcgaaaagataatccgacgttgtcccatttaggcgagagtcaaggtcattcctatttcatgagcttttaccattgtttcaaacttggtaagccctactcttagcagccagtattagggtggacattactaagaataaaacacttacaataatacttatctttcaagattctacgacgttaaattattaatgaacgtacatatattagggatgaatctcactaaaacaagaactgtgtagaaccaacaatggagatcgaatgtctctttgattaaagctcattattcaaaataatgtatttttaattaatcacttattttaatcatatattttaataataaaattaacttaatttaagttggtctaaaattaattaaaaaattaattttcaactttaatttaattttcaaaatttataaatatataatcttgaaattatataaaatataataaaataagtactttaaaatatctaatttaagttgttgtaaaataactaaatttttaacttcaataatttttaaaatttaattaaataacaaattaagtatgttgaactaatcaccttaatttgaaaaaaaatatccctatttaagttgatctaaaattaacaattttcaacttaaaaatatttttaaagattatatgaataattaatttcctagaaaaatctacttaattattatttaaaaaaaaaatctaatttaa

SEQ ID NO: 342841 - DNA, 676 bp, Cannabis indica
tttatgttttcaaatttacttatgaaggtataaaacgatgtaataataacaaatgtgaatacaacttaaatattttaactaaaaagttataaatggtttttacctggattaactttaaagaattttaatagttatagttttcaaaatagatatatgattccttttagcataggggttatttaaatttatactattatattatcatgttaaaagttagggaaagagtcaaaccaaaggggtttccctttggttttgactctataacaattatactctaaaatttgagttttaaatttaaatgaacttattggtttaattatctcatttgcaggttccttttcagttttccaggcagaagcagttgctttactagtaggattgcgttgggctcaagatgtgggacttcccgtggagaaagttttttctgattcactttctttggtctcagctttggagggccagactgtgtatttaaatgaactgggggttatcttttctgatattaaagtcctattgtctagttttcctggggcatctctttctcatgttagccgcaactttaatgttgaggctcatagattggctaagcatgcccttaggatagacaatgaactttcttggatggaagaaatccccctccttctgtgtaacttttgttaccgttgttatcttaacc

SEQ ID NO: 342842 - DNA, 565 bp, Cannabis indica
gcttcctggaaataactatccatctagagcaggtgatcacaaacattctaatgaggttttatttgtgcattgataaaaattcttcatcgcctcaaaccgagcttgatccaaccccatcatgaacatttcagttaactagttcatgattactgcaaccgtgagagtattagcaaaccttgttttcaaggtgttgaccatgagagacagcataaagtaccgagctttgttgttagcattctgccaatgctcaaacttttccttgactgtcttggtcgcattctcacctggctactcaagagcctcttaagtgaacgcaaacggggcactttcatatatgagtgcaatattaatgttctttttccatttgacaaagttagctccagaaagcttgttgttagtcaacagtgacaccatggggttgttcatactcatattagatactacaaatatcaataaatagaaatcaaatacggtttaatacaaaatcatacacattcagaaattattagcacttagcaagtcagggtgacaagtaaaaatacaaaaacatacaatcttaaataat

SEQ ID NO: 342843 - DNA, 582 bp, Cannabis indica
ttgcttatgatgtcatcctattttttttctatgaaattgaatggcgtagatgactatattctagacattctatcctaaaatgatataaatcattgatcttagaaatctcctacttgtgtatgcttacttaaggcaacctaaacgtagagttagattagtagtggtggtctaaaaaagaatcattactcaagaaatatttgatataaatttaagtcgttggctttaaattttagattctaaaaataaatttaatatctattttctgtcaatggattcgaactgtatgtttatgtatggaatatgagttttgtattctgtgacaagaatccacttggactattctaagaactctttgttgtaactagacctaagtcatcaaaagaccacaaccacaacaataatatatctatggcatttggatctttttcatagtagttttgacaagatcagtctctacaaagagaaaatatgccaatatccacttgaaagtaagacatctatattctaacatatggatgtacattcaggggtggatatgaattatcattttattcttaaacgatcactctagattttacctta

SEQ ID NO: 342844 - DNA, 942 bp, Cannabis indica
ttaaatggttagaattggaaaaataacattttttgagaaaataaaggaaggattatcaaaagtggaaaaattccaaaatggggcccattagtgtggccggccacttggttggtaatttacacttaatatttctattattttaatgtctaataaatcctaacctaaacctagttggttgcctataaatagatagtgatggcttacatttaaatgatgaaaaaaatttaccttcagtcaaattttcctgagccttctattctattaattttgaaccagccacttctctttccttcataatttcataccttgagtgatagagtgagtgcccacacacatcaagtggtatctcaatcatagtgtgtaaggctgtgaagaatctagattcaagagaaggacattcgggcttagatcttggtgatactctgctacagagaggatacaaggtttaaagatctgagtggaaggagccattaatattccgctgcgcccaatgtaaggtttcctaaactttataattttttatttacattgttttagaattcatatttaggatgttaaacaacatacatggtagtaaatctagatcctggtaaaacatactccaacagacatattgtttctcattaatacactaagtgccagctcgtatattgactcctcgcctaagaccttacagtcaacgggttacaaatatactctgatacttacgcaattaatgagttattccataaaaagatattgcaccgattcacattccattttccttgacacgtgtcctccagccgaatttcgggtataacaaaacttaattatcaaataaattaccatttaatttatttatcaattagacttaataaagtcttttaattaacaaataaaccctaaaacctcttttcttcacaattaagcccttgcttagtgaaaattcataaataagacata

SEQ ID NO: 342845 - DNA, 673 bp, Cannabis indica
ttattattattaagatttataccgtacattcaaagaaatatccctaataagatgtacttgtggagtatgtagattttaactacaaaaccacgtaaaatatcatgtgttcattattataattaaattctgtagtaaatttattacgtaaaaggccatatatttggttaacgaaaagttgcgttaacacattcaaaaatagactctcttttttgagaattttcactaagttttggcatttttgagaagaaaagagaaataggggtttatttgttaattagtacactttgtgggtctaaataataaatatatttaaattgtattttatttgataattatttataattattaaaataaaattagtatttaaataattagaagagataagtagtaaaattagaaaagagacgttatttcatttaaataaaataaagtggcataaatctaaccctaaagcccatgaggaattcagccctagagttagacttcagcccatgtctctattttaagcccaatctcatataacctagccctaagagaagcctatataaagaaagtgatgagaagagagaattaacttgagttttcattgtcagactactctcttctcctctttctttgtatattttgaaaattacacgtattctctctcaaaaatattgttctaaaggtgttt

SEQ ID NO: 342846 - DNA, 593 bp, Cannabis indica
gtgtgcctgtgtgagcctatatacatggtgtgagtgcaatcctaacaatagaagaagacggtgtacaacaccctatatactacatcagcaagagactaattgatgttgaaatttagtacccactcatggagaagctgacctacagcttgctcttggcatccagaaagttgaggccatacttccaagaacaaccaataaaggtgtacaccgactaaccattgtggcaagttttacaaaacatggagcatcttgacaaatactcaagtgggccattgaacttgtcgaattcaatatcacatatcatctgagaatggccataaagggtcaagcccttatagactttgtggctgagtgtacaaacacatctcttgaaatctctcaagatttttttttttgataaatcaacaagtttattgatattccacaatcatttacaatcaaatacaattatctgagcatcttttaatcaaaagatctcatgaaaacagtaaaggggattcacaacatgtgaaaccaatctctatcttgttgtcctacctttttaggccaaaacaactctattctatgtttaacactatgtttaactttctgta

SEQ ID NO: 342847 - DNA, 852 bp, Cannabis indica
acaccatgcagacgaacaatttctctgacatataactcagcatactaatcaatgtagaaattcgcccgaacaggtaaaaagtgagaaaactttgtaaacctgtccactatgacccacacagagtcaaattgccccgtggttctaggcatacctaccacgaagtccatagctatatcttcccatttccattctggtatattcagtggttgcagcaaccctgcaagtcgctggtgctcagctttcacttgctgacacgtaaggcacttggcaacagattcagcgatgtcgttcttcatgcctggccaccagaacatggctttccggtcttggtacatctttgttgaccctggattaaggggtcgtgtgaaattcattcatgatctctttcttaatgttctcatccatgggcacacaaactcgattccaaatctcaacattcccgtttcatctactgagaaatcactagccttcccagccaaaaccctagctcgggtttttatcaactctgaatcttgcttttgtgcttctttaattctctctaaaagagtggattgcagggtaatattagccaattgccccacaaccaactcaatctgagctcgagtcatttcatttgctaactgtcgggagatttgcttcatagtactcaactgactctgaccttttctactcaaagcgtcagcaaccacattggccttaccaggatgataaaggatctcacaatcataatccttcaccaattctagccaacgtctttgtctcatattcaagtccttctgggtgaagaagtatttcagacttttatgatcagtgtatatctcacatttctcgccataaaggtaatgccgccaa

SEQ ID NO: 342848 - DNA, 1797 bp, Cannabis indica
actcatcccagacaaagccaacaatgtcaatattcttcttccaagtgtcccacgacccttcaacgatgaagcaaaccaagatggcatgacagtacatttacgttggtacaactctgggaagaagtgttgccgcctcctcatcatatggaaagccgcatccaaatgatgcacaacacatacaaataagtcagcacaaccacattaaaacgttaaaaaataaaacaaataacaacggtaaataacgataaataacaaatcataatacttaaacttacatcatcagaaagccattctttgttcataagtagcttctgaaaccaattcacgccatgtacaccggtgaagacatccctcagatacttgttcccgatggttcccaccaaccaatttcaaaaactatgtagtagcttctcatcaatgggccgaagtgggtcaaaattcacattggctatcgatggcttcatcttcttcttcatttcggtgtactcgtcaaaccaccttggccttttcttcggtctcttctccactggtgttggaacggtctctaaaacctgtacctctgaatcttgggtatctccaatggacgtgatcgacatgttctgaggtgtatggagtacatcttccacatcatcaagtctgtaatcattgggaagaatgaactcatctcctggagagacggggtctggctgtggctctgcctctgcactgggcctttttggatctcccatgagtgccaatagggtcttaaaataacccattatctctgtcttccctctcagaatatccttctggtcttgcttcaaagcaagctattccctctcaacacgctttaatcttgccagtatggcagaagatattggttcctgaggcggtgaagtgttgggaatagatgctgacgggccaacaggaggatcatctgatctaggagatggtacaggtggtgtagcctctctaaatattcgagcttcatctgcatgctcttctaatgttgaggcaagcttttgggcttggctgcgcagagcatcttgagtcggttgcacatcgtcgcccaacactagttcttccaagtcaacaaatatcggcccctcaccatcggtgatagtcctcacgaactcctcttcatttttccgggacataacataaagtacactgtcaactgaaaatgaaaaccaatgtcttattagatagaatttaaaataaaatatatatgactgcaaagcgtaaaaaaaacttacatttttagaaaataatcttgtaacttcatccttccgagtgtggtcttctccttactctcccaattaaccattcttggaaagcgatgcgatttcctcactgcatattcattgcccaactccaagatggcctcataggcccaatactgtaaagctgcagtatagccgtatgatgagtattttgcctccttctgagaaactcccttctctatcttcttgtgcatccgagtcttccctctacaaaatctttgttgcaagtttccatcaacttgttacatgagatcttttcccacggatactcatagaagaaatccaggttatcaaccatttttatcacaaatggaggaacaacagtcttctcctccttaccggtgaggacgcccataacaaacaacgccatgcccaacttgtacacatcatctgcttttgtgcaagtctcgaaaactttgcgcagttggccaaagctgatggatgaatcaccgttgaagtactcgacaatcaccttttcgaatttcctttttcttcaatatcttcttccgtaggcccgggtaacaagttcaacccc

SEQ ID NO: 342849 - DNA, 858 bp, Cannabis indica
gcataaaacccaacagaaacttgtcttgttattttcttgaatttgaggaaaatggataggttgcatgcttagttttggattattgttgatgctgtgtttatgggttgtttttcagaggtttaagcatgcttgattgagtggaatgaatctgattttgatgcatgcttggttgattttaagctagtttagaattttgactcaaaactatgatttttgataaattgtggaattagttgctgtagtgagtgtttgtgcgtgagtttgatttctgcagttgttttatgcatgtttgagtagattcaagcaaagcttaatgcatgtttgttagatgtaaacaaatttgagttttgaactcaaagcttggatctttaatggtggattttgattttgtgcatgaagcttggttttcttgctttggaaatgttccttagggtctaaataacaggtttggaagttttggtgtggtttgggattgttttgactgagttatgaatttttattcatttcctgctcagaaccagaattccggttgtgcaaccgaaattctggatggtgttccaggattcccaaaaccggaattccggttacagaaccggtctgccgattgggggatttttgggagccctagtttttctcgcttttatgttgtttacggtattgccataatttttgtcgatagggaaacttctagtttctagtttaagtccccgggaagtgatttaaagtatcacttatctagtattgtgattgttatggtttaaaagcctgtaaattaccgtgcagttcattcccctcaggttgactggcacacatgaatttagaattgaggtaattttagcataacagtatgcatatgta

SEQ ID NO: 342850 - DNA, 511 bp, Cannabis indica
cgcctaagatagttagggtgttacaataatacatgcaaaaagaacttaataaattaatatatatatgtataacggtcgatttctaattttttgacggtttattacaaaaaaaaaccgactattcaatggcgattttaaccgttagtagttttttcggtttcagttccaaagatgttcgctaaatcggtttaaacggttttttagttttttagattttattctcacccctacttggagattattattattattgttatttttcaagattaaaaatttatttatgtcaaaggaaattttttaaaaacttttatcacaattttcgctaataattattttgagagatactatatatttacattattttatattatattttataattaagtgggatattaaaataattaaaggtggagttggagagataaaataatatgtaagctatatatatatatatatggggacacgattttgtcccgtgatgtaatttttacggaatgtattccgtgatgta

SEQ ID NO: 342851 - DNA, 991 bp, Cannabis indica
gtgtaatttttcattgaggtcgtccggcgcacttgaatttggaaataaggtaagattagcatagaacatattatatatgcatgttgtatttgtgattgtatatgttttgggtgatattatagtggcacaaccactgtgtcggttcgacagtatatgcatcgtactggttaagagtgatattcaccccagagagtattaattggtgctatcatagcgacacaaccattgtgtcgattcggtagtacgggcatagtactggttaagagtgatatcatggccaattgtactcttaggtgttattgatgttatcatagcagtacgaacatagtgtcggtcccgcagtgcgatcatagtactggtagtggatgatatcatggtcaataacaccaaccattaagaacgtttttaatcatttggtaagccctgtgaataggtgtgtggcgcctagacaagtcgattatttatattttgttgtatgctttttttactgagtctattggctcacatattctacttttctgtgtaggtaaaggaaaggtgaaagctgattaggagtgagttccaagctcgagtaatgattgtacatgtcaagatagagcaatctcgaatgttcggtcacgagacttcttgggatatattttgtagtcgttatgcgacaagtttgtaaaaatattttcaaaatgtttatagaagttttagcacgggatccctgttatataatatatatacatttatatgctcataaagtttattaattttattcaagttttgatttgacacgattttcaaagaaaacccttgattagcaaggtagtctgttatttggaaaattattgtagcgcgcatcagggcgttacacttttagtattttattgacggcttctgcttgtccatttatttgcggccttgcaaccgtagaaaagcttttaatgactctgtgttggttgcagaagtttgtgaattctccgcagtcaaactgctttccattatc

SEQ ID NO: 342852 - DNA, 852 bp, Cannabis indica
gatgcctcacgtgtcagcagatcaaggctaatggcagatcgacaaccaaaaagtcttgcattatagtggtggataaaggtgcttcgcccaatgttaatggaagctcgattattctttgactggcaacactgtcgcttgtaaatccacacagatttaccatgcaaggttttagtttggctttttcaagccccattttcctcagtgtatccttataaaggatattcattgaacttccattgtccaccaacaccctttttatcctcttattggcgagcttgatggtaattactagtggatcgacgtgaggatatctcacgtgtttttcatcttcctctgagaatacaatatgaggttcttcaatcttagctttcttagaaggttctggagtaaatgcaaactactcgttcttcacttccttgacatatctcttttgagcattattactttcccctgcaatatgtggccctaccaagataataagaatatcctctccttctagaggaggaggttgtaatccttggttgcttgggttattgggcagatttggctggttttgtccattgccttatttttttacatattgcttgaagtgacctcgtgcgatgagactctctatctcgtctttcaacgacactcttccgtcgtatgcccaatgtccttgtgatacttacaaaatttggttgcatctctcttacgtctcgcatgcctcatgggctcaggtttatggaatacgaccctgtgctcgtgtgcgagatagatgttttcctaagtttcattaagcttggtataaatggtgtaaattagcacgtacttgtcatgcttctttttctttttcttatctttggctgactc

SEQ ID NO: 342853 - DNA, 571 bp, Cannabis indica
ataattaaatatattttgtctgaagaacaagtccatttacgaatattgtattaaatgtgtctatttaacggatattgttagtttaactattttttccgttaaaattgactgttaaaactaacattgttaaatatatataaaaaattaatattaaatagttaaatttaatttacaagtatcaataaattagataattattattttttttataaattttaattaaattttaaattagacgttagttattaattaattatttatactttataataactttattagttatattatttaaaatatctaaacttatttatttattatattatttattaaaattaggtatatatattttttataaataaatttaaaattgaattaattttatatattttaagaaaatataattaaattatattagatttagttttattattatttaaattaataatttagtaatacattagagcttttattcaataatacacttggactaagtaaatatattttaattaagagattataattaaatagagttatactaagaaaaaaaataacaaaacaacaaaaaaat

SEQ ID NO: 342854 - DNA, 1221 bp, Cannabis indica
gcctagagaatgaaatcaattagtaaagtctcaaataactacaaatgcaagttacttaaacaagtttagactccctctagatctataccacaatcctttgtaattcacttcatgaatctgattttgaaacatcaccaaacaacgaactcatttcatctttgatgtgtgagtacttacttcctcccgaagtaaggcttgaactagtcttcccccgaagacctttctcttatttaatcaagttgttcaaccaatcctaagggcagtataagaataataacatgaacactaaaacctagttgaacaactaggttctcacaaaaagaactttctcctcactgataagaaaatatgaaaaaatggaaactagaagaggtaaattgtttagctgctctctaggttctatttataaaacatagaaacgctggagacaaccacaaaaataatttcacagttttacaaatcttccttaaaaaaatttctaatttggagcattagaattggactttgtagcagcagatcattaggaccagtaaagaaactttccaaatttgaacaaaatcatgaatttagacttcaaacctgccaaaaacagtttatacaacatagaaactctagaaacaactacaaaaataatttcacagttgtacaaaacttccttaaaaaaatttctaatttgcagcattagaattcaactttgtagcagcagatcattaggacgagtaaggaagctttccaaatttgaacaagatcatgaatttagacttcaaacctacctatatgatctgatcttatgaagacaaaactgaaatcattaaagaaaaaggaaaagtcaaagtttcctaaaactaaataactttccataagagaattccttctcttacaagaagtttcctaagcaaaataagaccagctaaaaatgaatctttccttagaagaaaagagtaattaaaggcatgaattcaatgtaataaaattagtttaattgcacaagaaaaaaatatattaaataaaaaatattttgacacctaatttattaaaaaaagactttatagaaaacattaatgagaataatatagggaatgaacaaatttttaaaagtatatatttgattttatttccattcaatgaaaactgaatggaataaattatgggtgactattcaatggttacatttttattgtaactatcatggttacatttttttaatggttgtgattaatt

SEQ ID NO: 342855 - DNA, 630 bp, Cannabis indica
ataagaaaaaaaattaaaaaactgaaaggggaaaaaaatttaccttgctcatcgcgtactcaacggatgggttccctccgtggggttgtgggttcgatggggattcgtgggtggtgcgatttcaaacgctagagagaaaagggaggaagagagagagagagagtcagttaaaaaatgagggaggtaaaattgggtttaagttaaagtcatcccattttacaaattatgtatagttttagattaggataccaattttattccctaatatgcatataatttcaaatttctctttttaaataaataaagtaaattttaattattcacgattttcaataacctcgttgattagcaacaagttgcacattacgttaaaaatcacgctaacatgcctatattaggtagggtgttacaaaaaagtgtcatacagacactcacagcttcatccacaatggaggcagagtatatggcgtgttatgagactacttgtcaaataatatggctgcggaatttcatttcagcactagatgttgtagactttatcacgaggccgctgaaattgtattgtgataattttacagcagtagctttctctaagaacactagaagtacttctcgctcaaagcatattga

SEQ ID NO: 342856 - DNA, 1158 bp, Cannabis indica
agttcttatttaagtttacagtactaaaagaattttgttttaaacaatgagatctcatccttggatatttttcaataaagaagtatttgtttgtctttatcttattaaaatgttttatacggactatcctatgtgacatctcgagaaatcggggtgttacagcttgcatttgttcttgtatacggactgttgtggttagttgaatgattccttcaaacaccacagtttgtgtaacatgtgggaagcgtcccacggtggctgctggtgttgaggtttctctggcgtgactggtggtttcaggaaacaaattgaggggagtgaccatggcacgtcccactcctccattgattgtgtccacaggtgtcgttccattacctgggagtggaacgttcattgttccgatattaaaagatcttgtgtatttatctccattcgtctggtttccagccattatgattttcctctgaaatcaacaataaaattcattcccacagacaatgccaaatgttgttggaggaatttagacaacaccaaataatatattaaaataagaagataaatgaaagtatgcgactactccacctagaatggcgagtattcaaactatagacactcagatgtactggaaaatataaataacacaaaggaagtatagcggttcaatcaagtcacggtctgcttagtccactgttgtaagggttttctcttttgtccatttcatatcggatcacttctttatatacaaggcaagtgtcctttgattacacaaaactgaattaattattaatccgtttttacattcactactacaaatatagcctttagtgacactctttagtgacacgcttaaaggtgagagtcactaaatgtatagagataattttagtgacacccattattcaacactaaatatttaactttatgtcccaaagtgcatgactctaaaacatatgaagtgtcactaaaagttatttaattatttaattatttaattatttgtaaaaaaattaattagtttgcacgtcactccacgcgcgactgggataatttttccagtcttacatagagcgacgttatacacaaagaatattgaaaaaaaatcaatttataaatattacttatctctctcggttcaatcaaaagttaaaataatgtttt

SEQ ID NO: 342857 - DNA, 964 bp, Cannabis indica
aaggcaccatatagatcttcaatagcgaggttatacagaggctcatcaccttaagagaattcagaggattcatttgcgtggctaatgttgggatctggctctgataccactttgttagggattattttactaggatctagatttactaacatgtatatttaatttaataccctaaatatgaattctctaaaataataaaataaacacatataaagtttagaaaactttacattgatggcagcagaataatatgactcattctgctcagatctctaacccttgttcctttctgtcgtagagtaataacaatatatgagcctagatctccttctccttcagtttggttaaccaccatctttcgcactatgattgaatacttgactagctatgtgtgagcatgatactctatcactaaatgctcaaatttgatgaagaacaacaagaagggtcgaaatcactatgaaaggagtctctcatctactagttgtctgacagagttagaaaattaagtttagattggttgaaggggttggatgaaaatgagagcatcatgttccttttatagtatttcagctagagtttatgatttaattatacaaattaaaaaaagataaaataatggcaaaaatacactaagtggccggccacatatgtgggcctcactagttacaattttgccactttatttcaattatttatcttttctttcaataataccatattttccaatttaaatcctataaatgtcaaaactatttatttaataattataattaattatcaaataaaattatcatttatcttatttattaattagaccttacaaagtctctcaattaataaataaaccctaaaatctcttagagaaaattaaacccttgcttagagaaaaatcataaataaaatatagtctaattttagaattataattgattaattaaaaccaattaactgagtctgcaag

SEQ ID NO: 342858 - DNA, 669 bp, Cannabis indica
tcaaaaatcataagtttagaaaatagaaaaaattgcaaaaactctctctcttttcctctctttctctttcggctggagggtgttccaagggctggaaaattctgatttcaagctatttctcttgcattctaagtgttcttcatccttggtaaagtttctaaacttttctttttataattttagaaaaaatgtgtgaaaaggtgatgatgcatgcttgattttaatgtgttcttgctgctgtgaattgaggttaatttcagaggtttaagcttgttagattagggttatttaaagttgttttgatgcatgattattaggttgagcaagctatagctttttatatgcaaaaatgtgattgagttttctgagacttagttaagcttatttaagtagaattaagctagtttgaatgcatgtttgagggatttgctcaagtttgagtttagaactcaaagcttcagctttaatggcaaattttgtatttgaggtttctgggttgtttttgtgccttgaaaatgttctttggggtatttagagcaggtctggaaagtttggtttgaattgggtttgatttggttgagtttggaatttttgaaaaaattcctgcgaggaaccggaattccggttgtgcaactagaattccggatgagggtccagtaattcccagaa

SEQ ID NO: 342859 - DNA, 908 bp, Cannabis indica
aaatcgacttgtaaagggaccctgaaattgatactcaagagatcatactcttgagctccctctctcaaattctaaaaactcacttgaggagtgaactcttggagaacacaactctggagaactcacctcaagcattgagatcaataacactccaagtggactagcctattaccgatgaaagggggtgaaccactataaaattcttgtgttcgttttatggtgaatttctttttgtcaaaccggcttactttgattaattattgcttgtgttcatcttgctcgttttacgatcttcttagatccgttcacgaaaaaccgcatcaacagcaacggacatggaaaccaccagaaaaactcctttagaaacttaaactgtaaaattaaaaaaaaaaaagttaaaaaatagtatatagtgtaatttcttcttttttttttatttttatttttattttttaatttcaaaaaaaaaaaaatacgttagtatattttttgttttgttttaatttgttttaatttgttttttgttttgttttgtttttgtttaaggagattagattgaaagtagagtagtgatagacactacaaaaaatcttacttttagttacaacaaaatttgtgactaaagataaaaaaattgtggcggattataaattattattattgtgttgtgactaaaaagtctatggtaaagtattagtcacaaaaattataatttttttgtgactaagtgtgtttttagttcacaatatttgttgtgactaaaactaaattagtgacaacttgtaactaaatataatattttagtcacaagtaactttttgttgtgactataaaagtcacatttagtcacaaaaaaaattatgttgtgactaaaaagttgtcattaaaaatatcaattttttgtagtg

SEQ ID NO: 342860 - DNA, 1137 bp, Cannabis indica
gattagggaacctgatatgcctacttgaccatccacccttacggaggcaaaagggaaagccgtcttggtggagcaggaggaagactcttaagacaatggtgtcctgtctatgcttattcggaaaaatgctcatacccacctgcagggtatttttaacttgcacttacttcttctatactatgcttttacttcatatttacttcaacgtcattttgtttgtgtagaaatgtctcaaaatgtactccaagccttgaagaaaagagtgggggacaactcgggccattctccttcgcccaaaagaactaaaggcggtgagacactgtccaaagagaaggggccagttgaagaggtcattgacctttctgaggaacggcctgttgtggaccctccagtctagaaggtcttgaagtcaaagagttccagaagggggagctcagatgggtctgatcatactaggaccccttcatgttggaattaattttaccaggatcttagatctactcaacagtatgttgattaacaacctaaatatgaacttctaaaatgataataagtaaacacatataaagtatgagaaacctcatagtgggtgcagcggaataatatgtctccttccactcagatctccaacctttgattcctttctgttgcagagtataatcaagatctgagtccgaatgtccttctcttggatttgatccttcacagtcttccaaatctatgattgaggtactgtttgctgtgtgtgggcactactctctcactaagtatttcgaaattgtatctttcttgtattgtgatgattttatcaaaggagaagaagagatgggcggctatatatagagagaaagggaaggatcaactttctgaaagaagcattttcttgaattactgagtaattgcataactgccttatttggtgtgagccatcactttccatttatagataactgctaggtttaggttagtaattaatttggcattaaaattgaaaataataattggaaaatacacacacaagtgcccggccatgggtgtgatgggcctcacttggattttgcagtttccacaattttatttctattttcccaaaaaggccaattttccaattctaaccatttaaatgccaaaactaat

SEQ ID NO: 342861 - DNA, 733 bp, Cannabis indica
tttatatattttgattgtatgattatttattttaaataatatttaattagtttttattttattaattacaatggtagtatataattttgttatcatggtatgtatattttaattgtgatatataatttagtttgtatagtataatatacatatatatatatattagtaatatatatttttattattattattttttgtatatatattttggtgaatggtatgtatattttttgttatacggtatattaattttttttttaaaaaataatatttaagttctattttctattgtacttttgttggcatgatatataattttattagcatcctatatatttttatttttatttgttgttattattatatatatttctattgtaaggtatatattttatgttatatggtatataagttttattgtatagtatattattttattttagataatgcatgtttagtttttattttagtatacataaatgtgatatataattttgttaatatgatttatataattttttttaataatattatattattttattttattttttattgtaggtatatacgttttcttgtatggtaaatggtgtttgttgtctatagtatatcatttatttaagatgatatttagtttctattttattatatataaattttttggtatgtattcatattttaacagtggtatatataattttattagcatgatatatatatattgagtattaat

SEQ ID NO: 342862 - DNA, 1747 bp, Cannabis indica
aactagttatgtaagtatgggcttttttttttctttttttgaaaatagtgatatcttatttaagtttatcttcttttagagattcttagaaacaaacaaggaacattaggaaataatgtctccaagaagatcagttcgaatcaacggcaatagaaacatccacgtggatgcagctccagcacccgcaaggggcggaggccgaggtgatggtcgacgcggaggccgacgtggaggccaaagcggtaggggaggtagacaaggagcatcggtagcaccggtagatgaagtagcactcgaacaacaacaagcacctcccaatgctcaagctgagatactccgagaaaacgctcgtatacgtgaggagctaactcaagaaattgcaaggctacgagctcagaatgaggagttacgccggaatcaaaatccacccgttagaaacctagctcttcaaccagctgcattgaatccagaaccaatacaacattttgaacctgtgtacgagcgattcaggaaacaacaaccaccaatattcaatgggagctcggactcacttgaagctgaggaatggttgcgctcagtggagtccatattggaatatatggacctcaatgatagggaaagagtatcctgtgctgccagccttcttaaaaaggatgcacggatttggtgggaagtagtaagacaagtcgcaacataacaactatgacttggttggactttgttgatgtgttcaacaggaagtactacagtgccgccatactagctgcaaaagaagatgagtttatgaatctaaagcagaacaatctcactgtcacggagtatgctaggcaatttgacagtttggcaaagtttgcacaagagatcgtaccaaccgaggcccttcgggtcaaaaggttcttgaaggggatgaatcctatgattaaaaaggatgtgaaaatcatggtggggaccaacacggtttatgctgaggtgttagaaaaagctctcgaagctgagttgctcgaaaatgatataaagaaggagaatgctgctaagtgggaagcccgaagaaacaatggaggaaatcaagagaataagagaaaacacgagggaaatcacggtaatgatcgtgataaaaaggggaaagcagtggtccaaaataacaacaatggggtgaaaaggtcctatgtagaattcccaatttgccccacatgcaataggaaacatcttggggagtgtaagatgaagtcaggggtgtgctacaattgcgggcagccaggccatctgaagaaaaattgcccaaagggacaaaagaaggagaaccaagccgctcctgctcgagtgtttgctctcaccagaggagaagcggccacaagcaacactgttgtctcaggtcaggtttctatttacggattgccttgtaatgttctctttgattctggagctactcattcttatatagctactagggtaattgatagtatagataagccatgtgacctacttagatgtggtattgtgacggaattaccctcgggagaaaccatgttatcaacaagaagaatgcgagatgtacctatcataatcgaaagcaaagaactcatgggcgacctaatagagctggaaatgaaggaatatgatgttatacttgggatggattggctatctagtcacggtgcgacaatcaattgccgaaagaaactggtcgtttttgaaacaaaggctggggatcggtttattttcaagggcgacaagctggccctgagga

SEQ ID NO: 342863 - DNA, 1511 bp, Cannabis indica
agagagagagagagtacaatttggtaaaaagttatatttcagagacaaaaattccaaataaagtatattaaaaaaaaatcgtagttaaactctctcaactattatttcactcgcacttaatcctccaagctcaagttttagcagtaaaaatcttccaaagtactgaattactagaaaatttaaggtgtcattcaatttttcatagttaactgccaacatgaactgcttatgtgtatactctggtacagatgatatatttatattgatacacctaatattattatttcaaaattataaaatattatttcaaaatttataatatttattttttaaaatattttattttttttatataattttatttaattttaaaataaattttaaaataataatattaggttactacaaaaattttacttctagtcacaacaaaacttatgactgaaaataaaaaaaaaaatgtgactaattataaatcatcattcttatgttgtgcctaaaaagtccgtggctaaaagtattagtcacaaaaattacaatttgttgtgactaattgtgttttaagccacaatacttgtgactaaaactagattagtgacaacttgtagctagatttagtcataagtaatattttgttgtgagtaaaaaacataattagtcacaaaaaatttacattgtgactaaaaaattttcactaaaagtagctgttttttgtagtgggtgtactaatataaaaattgtcatgtgtacaagagtgtacacataagcagtctatggtgatagttgtaaccagatgatactttaaatttgctaacaattcaatagtttaaaaaattttactgttaaattttaaactttaagaatttagtgcaagtgaaacgataggatgtttataaaataaaaagcattatgtcaattatacttaccaaaaagagaaagttattaaataaggacacaactttaatcaatcaagtacttgtatcaaaattggactctacctagatagacacacactactatgaattaattaagcaatttttacatatctatcatatcttaattatataacgtcaaatctaaataagaagtgaaaagaattaaaatgagtaaaatcacaacaacaaaaacaacacacatcatgtagaacgacaaagttaaatagtaattaaatataaaggtaaacataataaagggatatcttttgaccattattgttattacctacttgaagatattcaacactatatcgatatagcgcgttatagagttcttcactttttttctacttgcctgaccccaaagcaccactactataaaaaacatcctttaatgctcctttttcatatccaacaaaatagtaaaggatatgaaagagttcttgggagtttttatctccactattattgggcatgaaaaaatcactataaatttttttacttttagtccaacaaaaaagagtaaaagtaaaaatattgtgactaattataaatcatcattcttatattgtgact

SEQ ID NO: 342864 - DNA, 645 bp, Cannabis indica
ttagagattttattacaatagaagataaaccaaaatacatacaactcaattgtaaaaataatacaagaacaataaaacagattttgattaaatatatgttacacaatacacatatatacactatatatatattgcatatatatatttatgaaaagtagaaggagaagattacaacacatgtaatatatattatatatatatatagcaagagaagatatatatatatatatatgtatatatactcacttacaaccttgagtgtatcaccatgacttgaacaatgtattacacctttgtccaaaagcttattttcccttatctctaagcactaagggaactctcatggaaatagttttgggaattatcaagccttttatgggttttctagcaaagtgctttcttgatagaaaacttgatcactctcaaatgagcaccaaaagacctccttttataatgtttaggtgatcacacttagaattcaaacactccatctcattcctctcacataataagaattaatataattgtaacaactatatttaatttcataccttttgaatcctatcatcaaattgtgtaacaactcttttgttacactaataatgtgtgataaacacaagagttacaagtgacaacaaattgtaa

SEQ ID NO: 342865 - DNA, 615 bp, Cannabis indica
gataaactcgagaaagatcgtcttcatgtagcctaagaaagaccgtctacacgtagctcggagaaagaccaactacacatagcttgagaaagatcggctacatgtagagagccttgatctctgcacagacctcattctcctcatcatcaaatcccatttcctgaagccgagatctctttcccaacctcagaaaattcctcgatactagaaataggttggcgcaaagatcttctggcgcaggtttgggtcttgggtgggctagattctctgataaaaaccacgccaacttcctttccagattcatctgaaaccatgccaactttcctctaggattccttatcagcctgaggaggacctttaaaatcactcacaagatctatgccctcaaggattacttgtgaggatcgcccatggcgggctacagggttcccctaatttggattggttggaagctcctcaaccttggaatccatcatttctggctccaattgaggcttaaagtctttaggcacaaatggaaaatggttggtgtatcttggtattatgagtttggaaggatgaacttctgaactcaaaaggaacattttggcaagaaagagatgatccattctgaaa

SEQ ID NO: 342866 - DNA, 493 bp, Cannabis indica
gcaaacccagaaaaaattcaagtcctcctgaacatgccttctcccaagaagcaaaaagacgtacaaagcctaaccggaaaggtcgccgccctaagccagtttatttcacgatccacagacaagtgcattccgttcttcaacatcctgaagaaatgccaaaaattcgaatggaccgaagaatgcgaggaggcattcaaaaaattaaaagaacacatggctaaacctctaatcctgtcaaaacccgttctcggagaagacttgttactatacttagccgtcttcgagaatgcggttagcgtagccctagtttgggaagaggaaaaaactcaacaccccatgtactatgtcaacaaacacatgatatgggcggagacacgatatccagtgattgaaaaactagttttttgcctcctgatagcctcaagaaagttaaggccctactttcaggctcacccaatcaaggtgttgactaacatgttggaattattttacc

SEQ ID NO: 342867 - DNA, 655 bp, Cannabis indica
agttctatggtcatacaacacgaatcctcgatccacgactggcgagacacctttctcgctctcctatggatgcgaggccatggtaccagtcaagattggggcaggttccttacaaagagatgttttcagcatttcacaaaacgaagaaaaacagtcactctacctcgaccttctggaagaaaaacgcgatcaggctcacctgaaaaacgcgacttaccagcgacgaaccgcaagatatttcaattccaaggtcaaagcaagagtactgcgagtaggagacttggtccttcgaagagtaatgccaaataccaagaacccagcacatggggtcttcagggataattgggagggaccatacctaatcacagaaaagattggtgacgccacgtaccgactcgcagaactcaatggtactgcgattcaacgggcttggaatggcgagagcctaaaattctattatcaatagtactcgcattttctagtttgtactcgccttgtatttatacttagtcattttttatataaaaaaaaatcctaagtatagggggtatataccatgatgtactattgattatataaaggaaattttttcaagtttgaaaattttcaagtttctataattttctatttattacaccaagttgtaattaaagtc

SEQ ID NO: 342868 - DNA, 594 bp, Cannabis indica
gttgaagacgtgccattcccaagtgatctctcttacatgaaaaacatcgtgcatgcgagagtcacgtagaacttttatcttgcttcgacttctttgaaagaaggatgaatttgcagaaaaattcaagcttagacttcactttaaaagatcaaatggagaaagcaccacgaggagtaagacaaacttcaagtagtccttccagtccaagaaggagggatgaagatgtaacaccctaaataattaggcaggctacctaatatacttatgaaaccctaatcccctaatcgggataactgataatgttagcgtggaaattaaactttattaataaacagaatgaaaataacttgtaataatttaaactctataatttaaaagttacaaaagttgggatcctaaaaatatttacaaaatactattacaagttattttccattggtcgtcctaagcggcgaaatagagtctcaaaatacatcactggtagaccccaacttgcttggtctagtgtggcctgaacatgtacattcttcctccagctcctacaatcatggttgatcagaaacagctttaccctttcctgcacagtagagcacc

SEQ ID NO: 342869 - DNA, 640 bp, Cannabis indica
ttctttacatcataaatttctacattatttctaataagtagaatgtcatcaatataaagaactaggaataccactacattacctttaatgtatttgtaaacaaagactttgtccttattttttttgaagtcatactctttaatagtcttattataggtgatattccaagatctagaggcttgcttcaatccataaatagatttaagcaacttgcacaccttttgatcttcccttagtaacacatacccttcttgttgttccatataaataatttcattaagatcgccatttagaaaagcggtattgatgttcatttaccatatctaataattataagtggaagctatggaaagaagaatgcgaatgtatttaagcattgccacatgagagaaggtttcgtcataatcaacccattctcgttctgtgtagcctttggctacaagcccagcttaagagctctctaccttcccttcaacatttattttcttcttgaaaatccacttacaccctatgggtataatatcttcacgtagagtttcatatttttagactttgtcagtctgcatggaatccatttcttaatccatggcattgttccacttgtttgaattaggcgttggaatttattttaccaggatct

SEQ ID NO: 342870 - DNA, 562 bp, Cannabis indica
aaaagacaactttccaaaagagaattgcttctcttttaagaagtttccaaacaaaggaaagttcagctgaaaagtgcaactttcctaacaaggaaaagagcaactacaaaccgaataaacaaggtaagaaatcggttatgaatgcacaagaatcttaccataagaaaaaatattttgtcaactaacttgccaaaaaaggactttacaatctccccctttggcactttagatgaacaaaatattttttaacactaagtacctgcaaagtaaagttagccataacaaataactactccccctgagtaacacaatcgaaaatcaaaaataactaaagaaacatgctaacttttaaatcaaaatagttcacaagtactaaacacaactccccctgaaaaaagggtccagagttggtccaaacaaatagttaaaatcaaaatattactccccctttttgtttatctaagggccaaagataacaaataagaaaatagtaatatgtccaatcaaaagcaaaaaaaaaaaaaaataaaaacttagtctcggtagagtttgaccaaggagg

SEQ ID NO: 342871 - DNA, 501 bp, Cannabis indica
atttttttaaaaaaaaataaaatttaatgacttggaccaatcaagaattgccacgaggcaatttacttaatatttaacagacatgtacatacaaaagtttcaaaattataaatttaggtatttatttgcaactgcaaattaaatttacatatttatactacaaattactatattttaatttgtttaagtgtcgtttggtaacacttttgttttctaattttttaatcacaaaatgaaagtaaaatttgaaaaacaaaaatgtgttccgtaaccacttttgtttttcaattttaaaaacggaaaacaaaagtgtgttctgtaaagtttatatttattttcatttttttattttatttaagtccggtctaggtccggggtcgaattcggatccgggtcagaggtcgggtttagcacaagggtcgtggtagaggatttgggtccatatcttgtcggagtccaaaatattgattaagaaaaaacctgtttaaaaaaatattgaaa

SEQ ID NO: 342872 - DNA, 1597 bp, Cannabis indica
agatttgaatgtgagaagttgaagtctatgttgatattttcttgctgaatattgcaagtaattttattagatttaagctctaaactcttgatgttgattagttcatgttgaattgttgataattgtgtttatgtgattgttgttataatctgaattttttatgcatatggacgaggataaaaggcatttgcttgggttatattgagaataaatttatgtaaaagatgctgatattttttatggttatgcaagctcttgatttgggattttcgctctagtaaaagcttgctgaaatttatgattattgatgcatattttggtgttgttagagagtgaattgggtgtaattcttctctaattatttaatttgtgctaggtgaaagtctgttctgattgtgggcttgtttagcataaaaattagtattttaggatgcattttcgtggctggaaactgggtttcctaggtttttaaacccagtagccgcgaccattttatggcagcttattgtatttttttgggtttttgttttggccataacttttgactcgggactccgtttgggacattctttatattattggaaagctcgttccgagctccatgtgaatatctgtaattgaaatgccaattttttatattgtagaaatggatttagggattaaccctatacttgtgtatcccgggattgtgactaggattaccggcacttggttaggagcactcggggactttgaatctctatatttacaggacatcaggtaagatagtagctagcacgtagagttatgcacggtggtgcttctatggaatatgatatatatgagtaactagaaaccggaattagagttattactctaaagtgagcggtttattggcctagggttattaccctattgaattgttaataagtattgatatgccatgatatatgtatgtatattgagattatgaattgtgcgtttaaggcataaataagctagacttagtaaactagtaccttgagcttaattaaatgtgggctagggttattaccctagaatattataaaggtaagaaagcgatgatgtatgataatattatttatctagtgaagacatgagtgatgttattttgagcatactataatatattatatgagtgattatttagtatgcaagttagggttattaccttaagattctatatgttatagtataaagtgtgggcatggatttatgctaagagttatgtgaataagacataactaggttagatctgatatatatcaccaagataaacctgaaataacataatatatggattacgtatatatgtaaataggtataaccgaatcagactcagtaactagagtcgagaggatctgttctaaggccttattataaatagacgtgtgagcgtaacacgtaggtctatgccatctagacacaaatagacgtgtgagcgtaacacgtaggtctatggcatatagatacaaatagacgtgtgagcgtaacacgtaggtttattccacctagacataaataggcatgtgagtgtaacacgtgggtctgtgtcacacagaaaaatgtgaaagggcattaatatttatgtgatgtg

SEQ ID NO: 342873 - DNA, 644 bp, Cannabis indica
aaattaagaacacaaaaatacttggcaaaaactagaaatacaataaacacaagagagtatagtggtttagtcagatcacggtctgcttagtccactgttgcaaggattctatcttgtccatttcacggcggatcacttctttgtatacaaagcaaatgtcctatcatttacacaagaattgcattcattatcaatccgttcatacattgaattacaataattaaactaaaaaacgtaaacataataaataaagaacagtttccagcttaattcactaaatacaacaacgtatgtgacttttataatgcaagttggctgttcatattcttgcataagctcccaggcttaggatgcatttgagactagtcaaatctaggatgtctttgtcctttttaaagtcgcttatacagacatcatataataagctgatagagccaagacatgcgagtctatattggtttatcaaggctgttgggtcaacgggaccagctcgcaacatagagaatcgatcttttatgtgttcacagaaggatcgcagggatactcgcatatatcctaatatatgcgagtttaaagccgttctttggtcctacataatgcgagtcatacgaatgcaattagactcggtcatattcgcatcatct

SEQ ID NO: 342874 - DNA, 861 bp, Cannabis indica
tagaaggaatggtgtcgaacatgggggactggaaatcgaagtggttctacgtctttaaagtccctgggattagaactgactttaatcgcagacctagtatgtcgcgtgtttcttaacttaggcattttctgatttattttgagattttatgctaactcgcttttccttgttctcgcagatagaccagctcgaccggcccttgacgagactcatagggagacagctaaaatccttgggagccttccggtacaagatcgcgactggcgattactgtgtacgactgccaagctgcgagaacaccagctgattccagagaacgcaagtcttcaaagagagccagtatacaaagaactgtctgagaggcaacaagagcggatagacaaacacctctccaagcaaacttcacgaccaatctcaggtaatttatctcttgttataaactgatgtcttgagttttatttatacttatctttcatttatccttgcagagatgaattttttgaagtccgcgcccatccttaagatccagccgaagggtggagcaacgacgacctcgcccgttgtcgcccagaagaggaagagcgatgtggtggctactcttaccaccgattcttacaagaagctggccaagaccacgcaggacaaggggaagaaagtcctgatcgagccaactgtccgagctcgcgacttcttggccatgcaggagaagttcgtgggcgaggagttcatgtccaaggcggagaagatcccttctgaggagcttgtcccgcgctctgtggagttggcttcgcagtcgatgaccctgttccaaaaagctgctgccgctggttcgaaggagctgactcgctgaagaggcacaat

SEQ ID NO: 342875 - DNA, 533 bp, Cannabis indica
ttttctcaaaatcacacttcaaagtgaagaaaaactcaattttctctcaacaaccatatccaatttcaaccagccattaaaaccacttaattcaaacttcaacacactccaaaacaaacctaaaaacaccatctcaaaccaaactaaacctacagccacgaaatcccaataccctcacccaaaaccaacctaaaaccaattaaattcttaagacaaagcatagaacttaccttgattgcttctaggttgggcctaggttctacaagctgcttcaattcaagaataaagggtgaaattttgatcccttgctggctggttttggttcacacgaaggggagaagaagaagaagtttacttgccttgtaagctttctccttaaatagggtttttcatctcatttcatttcatttctttctttctttcttttttttttttttatataggcagctaaaaagaaaagtcaaaagcaccatgaatttactaatctacccctcttccataatttttttttaaaaaaaaacctaggggcattt

SEQ ID NO: 342876 - DNA, 709 bp, Cannabis indica
agcggagcatcaccaagacctgaacctggatctctttctctccttccttgatgctaattctccttcttgttgattggattcttcacaatcttccacactatgattgagataccacttgatgtgtgtgggcagtcactcattcaatcaagattcgaaattgaagagaagaaaagagaagaagagggtggcggctatagtatagaataggaggctcaactttaatccgacagagttaagtgtgaatgtgagccatcactatctatttataggtaaccactgtaacaccctaactagcataggcgtgtttattgagtaatggcgaacaccctagcaagagtgggtctcgtcggagcctttggtgcttctgttctaagttgagggcaatccctcttgtagtgtcctggcatgccacactggaagcacccctaccctctactctcacccaaatggtgccttttacaactggggcactctgggtaggtatatcgggtctcaaagctaccctaatgactgcctcgactctggttccctcagaatctcttgttctgacccgagccaccggttgcagtggatgcttttctcttcttgtccatggccgaaccactacctcccctgctaaaacctgatgcaggaggggtaggggccccgccacccagtggagtcctagctgactcagtcatacaccaactacgccctcagctcgtagtgc

SEQ ID NO: 342877 - DNA, 576 bp, Cannabis indica
tgtacagatgcccactcttcttacctcagttgctaagaccacacttgctacctcgagcacctcaacgaatttccttgttgtgaacaagatcctcagaactgtccagaacgtggtcgccggcgttcacgtcggtttcgttgccgacaaagtgtaactttgtccccgattactattgatgtgtcctttccactggggaagctctccacggtgcttaggacctcaaaacgatcaagatcaaccaaagaaaagaggcccaagttggcagatcgatgttgtctccttcgttggcggtgtaccgtctttaatggagtcaaaatcttagtcctttgttttgaacgttaaagtttcgttttcttacatcaaaaacaatccttagggtcgcatacactcatatctaacctcccttgacccaagaacaagcttaaacacgttcgaatttgtgtccgtttcaagtcgtacgtaccttcgaagcttcaacaatggtgaaactcgaaatagtgacctctgacccttatacaacgttaaaaggcttcgttaggtcgtacataagttatctcaaacatccactttcaccca

SEQ ID NO: 342878 - DNA, 729 bp, Cannabis indica
ttaatatttttatttaaaatattttattaatttttttatcaagaaatataatttctatcaatcaaattgagtccattacatccataagggattctccttcaaaagagaaatttacaactctttcatatttttaagaataattttatctatgctagacaactttctttccttacaaataaaatttatttttgaaactctctttaatgcaattatatatactactcggattcataagtttaacacataccaaaaaatactaacaacaaacaaaaatattttcttctttaagttattattgatctgagcaagcccaaaatgagagaacataagggtgagtagaagaactgctgtggtggatatagaaaagtaattctattgtgaaatattaattaaataataaaagttataaactcctccactataactatagtacagctatcttctttaacttattattggtctaatttcttaccctatgctatagaaacaaaatcataagccctactctagatattccctatatatagggtataactataataggacagaccaatattatcttataggtgggaaaactttttcagccgttaataatgcatccaatgaggattaaaggcaaaggtaaacagtaaaaaagtgattgtgagtgcattgttgggttttatgccctaaataaaactctatttcaatgaaatccattttattcaacatcaataaagaaacagaagt

SEQ ID NO: 342879 - DNA, 1032 bp, Cannabis indica
ggtgtttttgtcttgatttcgtgctggaaaattggggttttctgggtttgaaacccaggggtgcggcccaactttttgggcgccgcggcctgcctctgttaaaatcctaggttttaaacccaggtgccgcagccccatgtggggagtgctgcggcccgcccttcatttttgggtagattcgtacgcgttcgaatccttgtaactttgtgatccagactccgtttcgggagttctatatatcgttgaaaagctcattccgagctctatgttatatattgaatgccaattttgtattatgtgaaagtggatttagagattaaacctatacttgtgaatcccagaaattgtgactaggattactggcacttggtcaagagcacccggggattaggaatctccacatttgcgggacatcaggtaagacagtagttagcacgtagagttatgtgtagtggcccttatattgaatatgatatatgggagtaattagaaatcgggattagggttattaccctaacatgagcagtttagtggcatatggttataaccctagtgattattaatatgtaaatgctatgccattttatatatgtattgagattaaggattatacgtttaaggtataagtggattggactcggtaactagaaccgagatgaaccgttctaaggccttattatatttagacgtgtgagcgtaacacgtaggtctatgtcacatagacataaataggcctgtgagcgtaatacgcgggtatgtgtcatataggcaaatgggatatggcattaatgtttatgtgatgtatttttgggatcccaaaacctgtacttttgattgtaaagtttaatgttattacaagttttattttcattctattttagtttaaagtttaaatttctcgcgcttttcttcctggtaatcccagtttaggggattagggtttcttaatcagctagggtaacatgcctaattgttagggagttacagtttggtatcagagtgccagggtttttaaacttcctgtagaccggc

SEQ ID NO: 342880 - DNA, 1195 bp, Cannabis indica
atgtctgatcttcggcctatcgccttatgtaatgccttgttcaagatcataacaaaagtcatggttaatagaatgaaaccgttcatggattccattatatctgaaaatcaaagtgcctttatcccaggtagattgatctctgacaacattcttgtttcttttgagattttacactatctaaagaggaaacgtaagggtaaggatggttttatggctttaaagcttgacatgagtaaagcgtatgattgaattgaatgggattttcttaaggcaatgcttcgaaagctaggctttgttgagaattgtattcagcttgttatgaagtgtgtgaaatcggccagctattgtgtgactcatggcaataatgaagttggcccaatcatccctacagaggtataaggcagggtgatcctttatcactgtacttatttattctttgtgctgaaggttttacagctttgctgcggaaatatgaacaaaaaggatggcttcatgggtgtaaagtggctaatggtgctactagagtatcccatatgctttttgcagatgatagctacctatactgtaaggctactgaagttgaggctcatcggattcttgaagtgttatccaagtttgcacatgcctcaggacagaaggtgaacctaactaaatcttctatcttttatagtgctaatactttgaattccatgaaagatagaatcaataccaccttgggtatggttacggctactgaaggaagtttgtacttgggtttacctagttctatgggaagaaacaagtcggttgctctgggtttgttgaaaaataaagtgaagaatagactcctgggttatggtacaaagttcctttcaagggcagggaaagaaatattgattaaaacggttgcacaagctcttccaagctatgccatgagtgtatttttgatctcgcaagaggtcacacgagatatggaaagtttgatgtccaagttctggtggcaatcatcgaacaattctcccacaggtattcattggatgtcctggaaaaagctttgcaaacacaaaactaaaggaggcatgggctttcggaacttgagaagttttaatttggctctattgggaaagcaagggtggggtcttctcacaaaaccgaaaacgcttgtttcaagaatttttaaagcaaggtattatccacgtggtacttttttcactgc

SEQ ID NO: 342881 - DNA, 930 bp, Cannabis indica
tctatctaagagagctgacttgacagagtagtgaatctccttgaaagatgtttggagctaattagtgaagataccatgagtatgccttcctatagcgagatggatgcctcgttattcgttgttcaagttcattcaactgttatgcttaggttgtataatgtatattatatgctaagtgttctaacagtcaacatgtcctatttacatatcttcatccgcagcgaggttggtgccttgctttgaacttctgacgtagaatggtttctcgtcaaagcgcgagacaatagtttgtatatccttatctcgcttaagactttacagtcaacaagttataaatatactctatcagctctgcatttaataatttattccattttattatcttctaatataattatcattatatttgttgatccgtccatgtccttctctgaagtcccagacgaattttgggtataataattgccccttaaaaagttctttttgataaaatgtaattttgaaatgattataaagtatatttgtcataatcccttttgaaaaaatgcatgtcctctgatttcggtggttttgtggttttaaggtacattagcaattaatgaccatcttttccacttctttttcaaattctacccgtaggatcaattatctcactgatctaatggagattaacccaagagtataaaatagaaaaaagggaccatctttgcattacctttgctgttttagaaaccatgagaactttttaagcttttccatcaaaaaaccattaccagatttgctcgaaaatttgcatgccatctctgtcattagtatttttcctacgagtttcatccaatttgattttcgacttcaagcattcggaggaatcttcacaccgttcgttgattcacaggttgtagagctgttcattatcccaaaaaccaacct

SEQ ID NO: 342882 - DNA, 648 bp, Cannabis indica
tcttctcctgaagacccacgcttgttcaaagcttctctccaacctattctaagaatagtatcagatcataatacaaaaaccaaatcctagttgaacaatctaggtttttacaaatgaaacactcttctcacaaagaaatatatgaaaatatgagactagaaaagataaaattgtttggttgctctctaggtcctatttatagaacatagcaaccctagagacagcacaaaaatgatttcccagttgtacaaaactttcctaaaaaattcttgatttgcagcattagaatcgggtttcgcagtagtagatcaagaccagaaaggaaactttccaaatcgaaccaagatcacgaatttggacttcaaacctgccaaataaagataatttgatttgttctaatacaggacaaatcaaaatcatccattagaaaaagagaaagtcaagtttctcaaaattagataactttccataagagaatttcttctcttacaagaagtttctaaacaaagaataagccagcagaaaaatgattctttcctaagatagaaaagagtaataaaatgcataaaatcaatgtaataaaaacaatttaaaagctcaaaaaatacacattaattaaaaagtattttgacaactaaattgccaaaa

SEQ ID NO: 342883 - DNA, 545 bp, Cannabis indica
gtttttaaacttcctgtagaccggccaaacatgtacagtcatcgttaaacaagctcgactcgtggtgcagtaagtgttgagagtaaacgctatactgcttatatgatcatttatttaacgctttccattttaggcagtatgcgagcatctagagtatttatgtggtatatgatgccatgattagaatgttatatgataaaagtttatttaattggaatgaatagttaagttaggcttaaagccaataagtgcataagtgtggtattggtgcttaactcgccggggttgttgattacaggggtacttgtaaaaatggacactccacaatcatctagaccacagggcaagcaagtagagcctggtggagaccagaccaatccaccagcaccgcttatgctgttgtaaatgcaacatctaattaacaaagatcaaacaatgtccatgtaacatatgtgaaataagatattaatataattaaattattattttaaactaaccaattaaaattttgaaaatttagggttgttaaaacaacctaaaatatc

SEQ ID NO: 342884 - DNA, 556 bp, Cannabis indica
aagttcaaacttcgataacttatttccaattcactatctttcaatattctatgccatgaagacatgtagctatcaaatacaggccacgggagctgaaattacacgaacatgcaccccagaagccttaggcacttagggttttacccgtcacccaagtttacattctaatctagggtttaagtttttgggactgtcgtagtacaaatgggtcaaactttgcattgagacatcaactagacataccacagacatatttgaggcatcagaatcatattcgaagcaagttcatttttaagcaactagagcaccctctagccgggcacccagggcccaagttcacaatttgtcaatttgggcaccttccaagtgtcagattgacgatccaaattttgcatcatcttcgtcttcatcaaaaatgggggaatatgtacttttgggaaagaaacaacacttctagggtgccagaagcaaggcccggcgcttaagttgacattttgtctgttggaatttattttaccaggatcttagatctactcacaagtatattttttaaaca

SEQ ID NO: 342885 - DNA, 659 bp, Cannabis indica
ctcatcatagatgtttccttctccacaagattctctaacttttgcagatatcgttgaaggctctgcatagtctcatgatagctttgctgaaactgtaagaaattagctgctaacatttcaatgagctcaacagtagtaggtttttcactatatggtgcaacatgagtagattgttgaaattctacattattttgttccatccgagtagtagaagcctccaaagtgttgagcagatcaataagagaatgatcttgatcttgtggtgctacaggaggatagtaagaagttggttgaacatattgattgatctcactgttggaagtgctagaataatctccccattgttaattgtatgtgtaagtgtcataatagggatcatattgatacacttgtggcaatgtataatatggatcaattgtacatcgtcatatttctaaagaaagatctaaaaatttaaaccacaactagaagaacaacttagtaacaaaaattaaatataaataatcaaataaaacaatagtccccggcaacgatgccaaaaatttgatgcgtatcgtaagccacaacaaatttactaatatttatttctaatgcctctaattattttagtataattgtatgtaaggatcgatcccacgagtactatgtttatttaatta

SEQ ID NO: 342886 - DNA, 786 bp, Cannabis indica
gaccattcttttctttttatactaattcacttagggttacaattaaattatttggaatgaaaaatgataaaataatagataaaatatgacctaatggccgaccacatgtgggcccaatactagttagatttttgacatttttctcaaccatttatttatttttcacaaataccacattttccaacttcaatccgataaatgtcaaaactatttatttaataattaaaattaattataaaaaaagttgtcatttataatattcattaattagactccacaaagtctcttgattaacaaataaaccctaaactcctatttcttcacaatcaagtcatatcttagtgaaaatttaaaaactagacatagtctaattttagaattataattgattaattaaaaacaattaactgattctaacaagccatttgtctcaactagtatggggaccatgggcctatataaccgagcttctaaaaagtagatctagaatttaccaagtaaattccctaacttattaattcctccttgcaccaatatagatttggaatcgcactcttaattttatagaacgctctatatgttccacgatatagatacgctatgagttatccatttgttattttcctaataaccaatgatcatctatagatgatttacattgagtagggacaaatttaccgttacacctttcaatgtattttatccttaaaacacttagcttcctatatatgatatttcagtgaactaatataatcactaaaatgagtgctctattatttatctcta

SEQ ID NO: 342887 - DNA, 630 bp, Cannabis indica
tttttaataacagaaatttatgtgaagaacaagtgcgagtattcaacctagagtggtgagtactcaaactgggaatgagaaatgatcaacagaaaactggaaataacaatgagacacaggattatagtggttcagtcagatcacggtctgcttagtccactgtagcaagagtttcgtaggtgccatttcacggtggatcacccctttatatacaaagcaggtatccgatcagtgatactaggattgcattcattgtcaatccatttttacacattgaattacaataattaaactaaacaacgttaacattaataaatgaacaacagttactaagtttatcaacgtatgcgtcttccgagtctgcgagttgactgttcatattccgatgttaaactcgcaggttatcattatgtttaggatatctgcgtccttaaatggtcgccttttgtggacatcgcatgacgagctgatagaacctagacatgcaagtctatattggtttatcaaggctgaagggttcttaggaccaactcgcatttatagaaagtcggtctcctggtttatgcacggacatggggaggatactcgcacataattcgatatatgcgagctactctcttgtctcgaatg

SEQ ID NO: 342888 - DNA, 527 bp, Cannabis indica
tatatatatatttatatatttccagtttgctgcgatgtatatattaattaataattttctgatgaaattgatttacaaattaaatattgcaggatttagataaatacagggacgttttaagaaaagcagacccatttgatgaaggtctgaagatgattgatgctattcaacggctaggaattgactatatcttcgaggaagagattgataaaattatacaaagccagtctgcttataagttttttagagaattcgagcatgatcatcatcatcatcaagatctgtatgatgtagctcttcgttttcgactcttgagacaacacggtcacttcgttcctgctggtcagtatatataacaaataattagttctgttgattaattatatcactcattagataattaataataataaggctaattaagatttttgcacatccaattttgacacggaccaaatcatgtcccttgaatttttaagattgttaaaaatacctcaactattgaaattcaggggcatgatttagta

SEQ ID NO: 342889 - DNA, 802 bp, Cannabis indica
atatcactaaaatccctacaacccgtgatcatgaatatatcatagggattaaggggttttaaatcccaactcgtgtctaaataacttaccctatctgtcatggttccatattgctcgactatcccataatatgactcagtatagttaattgggatgtggaacctgggataccaactatcgaacctatgtgtactatgatctatgatgagggcattccatgtgtaaaagttatggcagctatctcaaaatgaaactagagtattaggctcggccctaagcacttgtgggtgaccaatcacattgattacctcaggatgctccttcttcagcttcccgaggggtagtattctggaggtattgtgcctgcgccacatgatcttgagctttctcctcgtctagcataggaacctactaccaagaagaatactggggatatttataatcacaagtaaactccttatcagttaggagatccacagaactcaggttgacctcgttcagaagaaagtcacatgacctaagaccgtatgggagagtcaacaagagcctgcattgctcgaccatctcaggagtaggggcaggtcttttcgacacagctgtcaaaaacaaagcaaaattacaattagctaaacccaaataaaaggcatggattaatttaagccagccttgtgcaaataatcacttacgtataatgcgaaaagtggttgtgctgatgggggagagactgtcttccagaagaattcatcattgaaggaagttttgtttggcaaatccacaatgacctgtgtgagtcccaagatag

SEQ ID NO: 342890 - DNA, 690 bp, Cannabis indica
  modified_base (144)..(144): a, c, t, g, unknown or other
cctgggagtaacagaggatgacccgacgatgaatacctcccagacaaccaatggtcagccgtcccatccccggtcacgagttccactcgtgggccaagaggtaggcgggcagaccttgtctgggaattcatcaggaggagctanacctgatggatccaatgagaataatggagttattgcgcctgtcaaccaagcaaatcaaccgctaagacaaccaggctcttctgtgttcgataggctgggaacgacccatgacctaagggacgatctaaacagaagaaggggaacaaacgagcagaatattgcaacaatcttccagtccggagcccatactcaaatccctgctcaaaaagacgctgacgtaatccaaaccgaccaaaatacggaacaagtcagcccagccgtacaggcacaacttgacaagttgaagaatatgtttcatggcatggtcggacagcgtaacaatgatcttgagttggaccgttctcgcaaaactcctttctcaccagagatcagtctcctgccactacctcacaagttcaaaatgccaacgtggaagatgtacactgggagagaatatcctctttcccatctcaagtacttcgagatgcaaatcgatttacaaggagtacgaggggatgtatgctacaaaatcttcccgccactctgtcggaagccgcacatcaatgg

SEQ ID NO: 342891 - DNA, 645 bp, Cannabis indica
ttatttagggcgttacaagtatgttataagcttatggcaggtgaacaactaagaagtcttgcataacagtggcagagaaaggtgtctcgcctaaggttaatgtgcgctccattatgccaagattgacaatgctttctctggtgaatccgcaaagattcaccatacaaggccttaatttggctttttcgagctctattttctttagggtctccttataaaggatatttaccgagctcccattgtctattaacactctcttgattctcttattggagatttgaatggttatcaccaacggatagatgtgaggatacctcacatttttctcatcttcctccgtgaatacaatgggaggttcctcgattttcaccttcttagaaggttctggggcaaaggctaattgcttgttctttatttctttcacatatcttttcttggcattattgctttcccctgcaatatttggccctccgaaaataaccaggatgtcctctccttccacaggaataggttgtaacccctagttatttgggttgttaggtagagggggttggttgtaaccctagccctatcttttcacatactgtttaaaaaggcctcgagcgatgagactttctatctcatctttcaattggcgacattcat

SEQ ID NO: 342892 - DNA, 630 bp, Cannabis indica
tactttttcacccagaaagacttaaacatgaggcagagaaggtggctagaacttgttaaggatcacgattgggagattctgtatcaccccaggaaagccaatgttgtggctgatgcgctaagtagaagaggtcccaggcaggttcgcaccacagttttgatagcccctcaactagtttctgagatgcttagtgcggggattgagtttgtagttggaaagttacacaacttgacactccagtctgatttactagaaagaatcagaaaggcacaactagaagattctgagctagtcaagattcgagatgaggtattggctggtcggcctaaagactttccaatctcgaataatgaattgttactgtataaagctcgagtgtgtgttcttagtgttgatgagcttaagaaagagatctttgatgaagctcacaccacaccttattcactgcatccaggaactaccaagatatatcaggatttaaaaccctacttctagtggtatgggatgaaaagatttgtggtagactacgtgtccaaatgcttaacctgccagcaaatcaaagcctgaacatcaaaggccggcaaggttagtgcaacctttagtccttcttgagtggaagtgggaggacat

SEQ ID NO: 342893 - DNA, 644 bp, Cannabis indica
gatgatgctctttgggcctatagaaccgctttcaagactcctttgggcatgtctccttaccgtttagtttatggtaaggcttgtcatttgcccgttgaattggaacacaaagcttattgggccacgaagaagttgaatatggatctccaagcggcgggggaagctcgaaagttacaattgaatgagcttgaggaaatgaggttgttttcgtatgagaatgccaaactttataaagaaaataccaagaagtggcatgacaaaagaattcaacctcgagtgtttgagaaagggcagcgagttttgctttttaactcgcggttgaggttatttccgggcaaattgaagtctcgttggtcgggcccattcaccataaccaaagtttatcctcatggagctgtggatgtttgtaatgagcaatccggaaaggaatttaaagtgaatgggcagcgtctaaagcattatcttggtggtgaggtcgatcgagcaaaaacctcaatcactttggaggatgcatgaagcggaaggtggttgggttgccttgtgttcgaattgtcaattctatttttaggcaacccaatgttggaaaaagaacaagtattgtaaatatttttgaaaaaaaaaaaaagaaaaaaaaaagaaaaaaa

SEQ ID NO: 342894 - DNA, 746 bp, Cannabis indica
gactttacagtggatgatacgggtatgctacgatttataattcgtgtttgtgtgcctatggatgatgatattaaaagaggaattatgaatgaatctcatacgactccttactcagttcatccagggacaataaagatgtatcaagacctcaaagttatgttttggtggccaggcatgaagaatgatattgttgaatatgttgctaagtgtcttacttgtcagcaagtgaagaaggcttaacaccagaggcctgcagggttgttgcagccactgaatattctggagtggaaatgggaagacattggacagtacgactctgtgtgggtcatagttgacaggtttactaagtcagtgcactttttacctgttccgacgaacttctccattgatcagtatgctgagttatatgttagagaaattgttcgtcttcatagtgtcccaaagtccattgtttcgaaaagagatccgaaatttacatcaagattctgggagagtctatatcgagccatgggtactcaattgaaattcagcacaacatttcatcctcagacagatgcactatccgagaggactattcagatattagaagacatgcttcgggcatttgtgcttgactttgaaggatcatgggtaaagtaccttcccctgatcgagttctcgtacaacaacagctatcaggcaacaatcgggatggccccttatgaacttttatatggaagaaagtgtagatcacctattcactggga

SEQ ID NO: 342895 - DNA, 521 bp, Cannabis indica
aaatcacgaaagctagaaaaagggttcaaagaaagaaaagcaggatccaatggctccaatcctgagaaaatgttggaggaggaaggctcttttaagtgaggtatttggtttttgagtaaggaagacataatgcaggaaggataaacgaaaaacccagctgaactaacccagaaaaagaaaagagacttgaagaaaattcttagatgaaaaaaagaaggagctcaacgagaagcctatttatacaaaaaattgcatgcagaataatgaagatgccataaaaacggaaatgaagagtcaccttttttggcattaaaacacgtgccaaccaaaacacgtgcacacaaatttcgagaagcatccttaagagtatatatgtctttccactttccaaagctgataggcaataaatacacttaatagagccacagctcccccaaccttgcttaaaacaagcacaaaacataggaagagacaacagggtaataaatgcaaacctattcagagattacaagtacgggtta

SEQ ID NO: 342896 - DNA, 758 bp, Cannabis indica
gcaagtttttgagctctatcccttagagcaagagtgagaggagggcggtgatatgtcagaatctgctggaaccgagtgcgagtgatgcccgtgccatccaccatgaagtactcatcagcaaagcgcccaatcttgctgatggccgtatcgtccgtgcccgtcaaccacttgaagcctggttgagagaagtagaagtaccccgacctgccttgcttgggggtggacttcaaatcaaagaaccaagcaacctcgtggggagagggcataccccatttctgggaggcatagaggacgaagagggcagacagatacttgatgcccttaggagtgaactgggccgggcagaggctgaaaaagtctgccacatccttgaagtattgatacaaaggcatcaacgctccttgctgaccatggccacctgaccaggcgcacatccccttttcagggtttgtggcacgattgctgtgggcgggaatgtagcattccagctcgcccaggtatccgccctggtcaagagttcgaaggtgctcctccgtaatcttgggcggaaggcttacccacctggtgcccaaggcaccctgccttctatgaggaaccgtcgcagaaagttccttactgacgaagtccacgcccttaaccaggatggctccgtcagcatcgattggctccccagcctcattgtcctccccgtaatttgggggtgcaacctctgcctcttcctcctcctcaaaggatctgccaggacgtacatcgtcctg

SEQ ID NO: 342897 - DNA, 664 bp, Cannabis indica
tttagggcacaaaatccaacaactgcttgtatgggcatgtgagagaggaagtgaagaagaaataaatagtcagaattaggcttagagcttggaggcaagattttggcttagattcagcttaggttttctaggttagagttaaggcctttatgtaggaagcctaagccctagattacaacttaaaaccctagatatttgtatattttattagttaattacaaaagaccaaaatgtcattgaatctagatattattcaactattctgatgggcttttagggcccaattcgcagcccataggatgttgttgttgggattttatgccttaaataaaatccatttcaatttaatctgatttgttatcaatagaagattagagtcatttacatgtacatgtagttttcatgtttatggtttaatgtgtacaaaatctgttaaatccagaacatatagttattcacaatcacagtgatgtcaacacagtggaaggtaattgtgattatatgcttcaaaagataatgtcctttgattcatcagtgcactggatttacactgatgtgatagtcagaaataaagtatacttacaccttggataagtgttatgctctttccaaaatattggcaaagtatgctagtttcagatatatggagtatacattggactag

SEQ ID NO: 342898 - DNA, 750 bp, Cannabis indica
tttcaagtggagatacatattgatttgcagaaaatgatcttgtcaaaactaacatgaataagatgcaaatgccatagatatataagaatgtggttgtggtcttttgatgacttaggtctagttaaaataaagagttcttagaatagtcaaagtggatcctggtcacagaatactaaactcatattccatacataaacatacagtttggatccgttgatagaaaatggatattaaaaacttgttaacgtcatactataatgtccaatgtattctaggaaattatttctatttggaatctaaaattttaaaatcaaagacttaaattgataccaaatatacaagagtaattattctagcttagactaccactactaatctaactctaagtgtaatttccctaaagtaagtatatacaagtaggagattttaaagatcgaggattcatatcattttgagatagaatgtcgggaatatagtcatctgcactattcaatttcataagataaaacagaatgacatcataagcaaatgatttataaaccattcatctaatgatatactaggtaagcaaattcaaaatgaataagctaagaggaaaaattaggataatttcgatttaaaataagaatccaacgatgtcccgataggtgagagtcaaagttattcttattttacacgaaatttacaactataattaataacagaaaaaaacatggttcaatataaattcatacacaattcagaaattat

SEQ ID NO: 342899 - DNA, 503 bp, Cannabis indica
aggacatgtatcttaatttctgcatggcccaggcagccaaagaaaaccccaaggtgaccacctctacagctcccaccgaccagaacatcgaagttcctgccctctagactaatgatcctccagctccttcagaccaaattgatccatatcaagagcctgagactcctgctgtctgaatgtctttcttctctttttatatgtttgttcggcctataggccttcttttaagacaaaatgaccggccaagcgatttttaaacttggaatatatttttcaattttaagacaactggctgactaggcaacttttaatcccgggtttacgtgctttgttatctttaatgattgtcgttccttgttacgatcattgtgcaactattttttttttcatgcttgttatttgtttttactaatgctatgtacgggtatagtttcccctaagtgaccgagcagacttttgactcttggtcacttgcattttacaagtatgatttttgtctattc

SEQ ID NO: 342900 - DNA, 575 bp, Cannabis indica
gtcttgctcgtagctcttgtttgtatccagatcatatatttaacgaggataatgttcccgctgattttctttctattgtaatgattgaatcttcttattaataaagttaccatttttcttcaaaaaaaaatttagaattgatatatcttttgatgacatggcaatatattattttaattaagatttgttaatatatttttataaattaatttatatttgaattgatatttaaaaaagttctaataaaatttagaggaattaccccatatactatttttttaacattttttttttaaatttacggtttgggtttctaaagtggttgcagcgctagttgcagtaggggtttctgtacgattttttgttgcaatttaggttgcagcgctagttacaataggggtttctatgtagaattccgtacaattgcaaaaaaaaattattttaaagtgtaaaaatgaaaaagaccttaaaatttatctcataacacatgtaaatttctaagctatatatattaatatataactaggctaatattacacccaaggtatacttagttatattcttagtttttattt

SEQ ID NO: 342901 - DNA, 824 bp, Cannabis indica
agatcctggtaaaataattcccaacagatttataggctcctaaaccataacaatcacaacactgataagtgatacactaaatcacttcccggggacttaaactagaaactagaagtttccctatcgataaaaagcatggcaataccctaaacaacataaaaatgggaagaactagggttcccaatttttccccaaccggtagaccgttctacaaccagaattccggttctggaaaatcctggaagccccaaccggtaaaccggttgctgcaggcttcactgagttagaattccagtttagtgcaggaaacaatcaaaattccatacctcattcaaatcaaccccaattcacaccaaaacttccagacctattctaaataccccaattaacatttctaaagcaataacacaacccagaaaacacaaaatcaaaaatcaccatgtgagctccaagctttgagttcaaaactcaaacttggctaaagctcacctacaagcaacacaacctgctcaattcaccatgtttcaccataaaattactccagaaaacgaactcaagcataaacaacaactacaactgcttaatcaacatttcaccattgaaaatacaagattttgagtttaaaagcttcacacatgcatagaccaacgactaacaacataatcagctcaaatctattcaatcaagcatacttaaactttagaaaacaacacataatcacagcagcaacaacaactcaaaaactacacatgcaacctatcatctttttttaattttcaagaaattaaagagagaaagagtaaagctaacctagagcttggatt

SEQ ID NO: 342902 - DNA, 1422 bp, Cannabis indica
aactttattcattagataaaataatgcatagttatactgataagtgatatcctcaatacattttttttttgttttgtgtgatacagtgcaatgaataagctagtgggagatgcaaagtgggatcgtggttgcttgttggatttggactccaatttctatatttttttaatacctgtgtgattttggaataatatttttttagacttataagttatatttgatttatgttgtattattttgtgttttagagtttggacttttcactagacattataatttgtatggttgcacttgtaaaatgtagaatgatgtgtttagagtttgtattaatgtgcttataaaataaattttattatattttacacaaaaaaaaatcggtttggtcagttttaaccgaccaaaccgcggttcacattggtcggttttaaggatgtttctggattggtcggtcgattttcggattgaaccaatccaaactgaaaaccgaaatttggatttttatttgtaaaaaagctgaccaaactcaccgatgctcagccctaatttcaagaaacagttccaggctgcaagggatagacgacccaaggcggcctcgttaaccaatataaagcaacagcccagcgaaatacttaaggcatacttaagtcattttagtacggctgctacaagggttagaaattttgatgatagtacacaacttacagcccttcaggcggggatttctactgatccatcaaccgctgggggcaaactgttggacgacctacagggtcgtccagtaaagaacaacattgagttcaacgaaagggctccggttttcgtccgaaaagaggaagctcgaaaagaaatgaatattttgaaaacgggctcgggaggcaaacctagtaatgtttcaacaagtaccgtctcaacaagagttgataactctagtgcctctgactcaaagagaaaggaggattctaaggaatcgtcaaaggataaaaagaaacagaaaatcacgataagtacgtgccaatgtatacaatttataccaagcttaatgaaactcgggaaaatatctacctcacacatgagcaaaaggttgcctttggcaagcccgagcccatgaggcatgcaaggagaaagagagatcccaccaggtattacaaataccataagaaaattgggcacaaaactgacaaacgctgctagttgaaagatgagatagaaagtctcatcgctcgaggacactttaaacagtatgtgaagagataggacaatggacacaaccaacccaatctgcccaacaaccccaaacaactaggggttacaacctcttcctcttgaaggagaggacatcctggttatttcaggagggtctcatatgttcgaaattattttaccaggatctagatttactaccaagtatgtttcattaacatc

SEQ ID NO: 342903 - DNA, 547 bp, Cannabis indica
ctaaccttaaatttaaaaataagataaaataaccaaaatttaaataagatagataattaaggaaaaaagatagatatttacctaatttcaagttcaaattacactaaaaattgaaataggaatagtaaatatctaaatacaaaactacacaaaaaattggaagttaattccatgaaaaagcatgaaaaatcgaagaaaacgaaaaaatttgcaagtggtatggatagtatgcattggatactgtccgcgcgcgctcacgagcgtgtctagatgaggtttctcggcgctggaggctgcaagcagccattccgcacacgcaccaggatgatttcagacaaggcgcccatgtctgaccgagaaaactcgaacacaagcctgtctgaagcccacgcgtccgatgaataaggctcatccgcgcgagtgtgtggggtgatgcttccctgataatttctgattttcaaaaattcataactaattcaaataaaatcgaaattgagttctataaaaaaagtgaatcgcttaattttctccaaactatccaataaaa

SEQ ID NO: 342904 - DNA, 1310 bp, Cannabis indica
tagtgtgtaagactgtgaagaatccaaacacaaagaaggagtttcgggttcagatcttggtgatactttgcaatagaaatgatacaagggttagagatctgagcagaaggagtcatttaattccgttgcaaccaatgtaaggtttctcataccttttatgtatttattttatatcgttttagaagttcatgtttaggatgctaaaaacatacttgttagtaaatctagatcttgtaaaatatattccaacatatatattcaacttgtaaaatcttttattagtatatcagataaaatagacaaaaataatacttgtggtattttcaaaattgtgtctaatagtttattcattaaatttgaaaatatagtttcattttcttgtgtgaaaaggcttttcaaaatcaaatcctattcctatttgacttattgtgaattaaatatgagtttttcttttatagaatattttattttatcctttgctttttaaggaatttcttattcatattttatttcttttgatctgatttcttgaccaagaaaccgtgtacaactatgggtattaatgttgccaaagttgccttatttgtttatgaaaactttgttgaaaaactgtccaggtttaatgtacctgtttaaacggattgactgtctatttaagcagattttgacttttcttttcgtgaagattttcatttactgacctgatcgtttcttggttgcttgaccacgatatagagggtttctaacatgtataaatacaccattaagtcgttggtattggttggctctcttggcgtatcaattctaaattacttttaaaagttagagagtgttttcttttttgtgtgaagaatttgagtccaacaagttcttactattctattattgtgttactctatattgtttcttgttaaaattgtgcacattgaacactttggatattgttaatcaagcttcgggagaagtcttattcgtgagtcacctttcgggaggaaaagtccatgtgagtcactcttcgggaggaagattgcaagttagtcactcttcaggaggaagattgcaagtaagtcactctttgggaggaagatttcaagttagacactcttcgggaagaaaattgcatgtgagacactcttcgggatgaagtgtgaaagtactacgaattgaagggagttcaaggtctcgacacttcgggaagaaaattgcatgtgagacactcttcgggatgaagtttgaaaattaaatatctaagttgattttcatcatgatacttaaatattttttttcatgacacttaattaaatagaaaa

SEQ ID NO: 342905 - DNA, 741 bp, Cannabis indica
tcatatgtctagcaaaatctcttcgaagcaaatgagtttgaactatcactctcacatattttcttcatgctttatgctaactttaagattaactcaaatatatattgaaatacataatcttattataaagacattttctcaatatagtgaacttgatttgattcaagatttgcacattgccagaaaaatttgttagttatttttttaaatactacttactgacatattctggggtaaaacttttgtgaagctatggttgactttttccaagtttgaatatatggtaaaggcttcaattctcaaaggattttgccagacaactcaaggcccaaacaagtctcaaaggactttgcctaacaacaaactattccctctataacactatgagaacactctaaaaagaaagtgactactttttatagagttcaaattcacctttgaatatttaaaaattatccaccaactccatggctatcacaaaatattttattggatgtttatgaacacaaataaaaagatcatacgaccaattagaataagtaataagttgcaaaataactctaaaatagagttgttatgtacctgatgacgacacattgtctgatgcacactataggcacttctgtaaattctaagaaaaggagagaagtcgcaagctactttaaatttttaattcttcaatgagtgtagctattttttttttctagaaaatccttcgacttatttcacttttttactttt

SEQ ID NO: 342906 - DNA, 656 bp, Cannabis indica
gaaaatacccccaaataatcaaggttccaatctattaactaaagcagacaagtattgtaaatatttaaatggtgaaagtaaaagacaggtgaaattgtgactgttgaaaaacaaagatgaacaattaggcctttaagtgttcgagcatcaattcatcaataaaaataaaaaaatactcaaaaccacattaaagtaaactataccatctttactgcatgcctttcctttcattcataatgcatctcattctattagattagacacacatttaaaatactatatgaatgaattagtaaagaatttaacttacattgtcatcatcttgaagtagcgtaggggttttttaggcaaagatcatgtcgaatcccatggcagccaactttcgactttcactaagaaagactaagagtaagcaaggacttcatgttggaattattttaccaggatctaaatttactaacatgttattaacatcctaaatatgaacttctaaaacgatatgaaataaacacatataaagtattagaaaccttacagtggttgcagcggaatataatgtctccttcgactcagatctctaacccttgtatcctttctgtagcagagcatcaacaagatctgagtccgaatctccttctcttgaaactggattcttc

SEQ ID NO: 342907 - DNA, 678 bp, Cannabis indica
aacatacttgtgagtagatctaagatcctggtaaaataaattccaacaatagctacactcattgcatcataccaccatatgatagtatacaatcagactatcaaccagtttctctctcattctccattcgggttgatattttgagcttagggtttgcattttcttccttttcttctttttcttcttctccggtgtgtgtgggaaagccattgtcgttcgaagctagcttcgatttccagttgctgaagctcatgtgctctgtttttagtgattttcgaggtcagcttcttggttaagtgaggtatgtaataaattcttcataaatttttttgtaatgtgtttagttttagtgattatagttcggtattgagatgtttgttgattttctttttcttgatgattttccatgatcggctgggttttttgggtttattgttgtttttggatgatcgattgggtttttagggtgtgtttggtgttttggtgtttgttctttctaatttttttaagatgtgttcttattttggttgttgatcattgttcaatttagttaatttttgttttaagtttgagtttgtgttgattttgttattttctctgttaattttccttaaatcttcatgaattttctagggtttttttttatgtttgtttttgtgttgaatctgttttagagat

SEQ ID NO: 342908 - DNA, 571 bp, Cannabis indica
taattttcaactttaattaaattgttaaataaatttctaaattctaatacttataaaaatatattttgaaagtaataattaaaatataataaaataaatatcttgaaaatattctaatttaagttgttctaaaataattaaattttcaacttaaacataattttcttatttgattaaatatattaaaataaaattaataaattaagtatcttcaataaattaacttaattattaatttatattttaaaaatattctaatttaagttggtctaaaattattaaattaaagttcaacttcaaaatattttttttaagaaaatcaaattaattaagtatctagaataaatcaacttaattatttactttcttattgaattaaatatcagaaaatacaaattagttttctaaaaattaattatctttaatttatttcattaaactaagtgtatttttcttaaattaattttaaaataatctaatgaaaaattaatttcatatattttaaaattaattatgttcctaataaattttaattaggttaaactaatataattaacctaatacaattatt

SEQ ID NO: 342909 - DNA, 761 bp, Cannabis indica
ggatacgactctgacgaggagccaaagccgtaccatagatatcatgaacactccttttccccaaggatttcaaaaccctcatgtctcattgtatgatggaaccactgatcaagtctcgcatttgaataacttcaacacaataatgcgagctagtaatctgacaaacaatttacgttgtatcttgtttcccacctcgttagttgcagtagcaagtaactggttcaacaaatttactcatcattccataacttccttggaacagctgtccaaggacttcaaaaaacaattctagggcgcaagggataggcgacccgagccatcctcgctaaccaacataaagccatacccaggcaagatgcttaaggcatacttaagtcgtttttgcacggctgctacaagagttagaaatttggatggcagtacacagcttacaacccttcaggtggggatcactattgatcaatgaaccgctgggggcttactgtgggacgacttacagggtcgtccaatgaagaacatcactgagtttaacaaaagggctcagatgttcatcttaaaagaggaagcttgaaaaaagatgaatttgttgaaaataggctcgggaggtaagcccagcaatgtttcaacaagtactatcttaatacgacttgataactcaagggtctctggctcaaagagaaaggacgattctaaggaatcgtcaaatgataaaaagaaacaaaagaagcatgataagtccgtgccattttatactatttata

SEQ ID NO: 342910 - DNA, 652 bp, Cannabis indica
ctacgccaaagcacttcaaggatacactaggtactgggtatcgcctttggcccgcggaggctcaacccacgtgtgttaggctacgaactcagtgaccaagcttttccatgtacgatctcataagttgtctcccacgaaatgctatcaaacggagcatgcgtgtccttttgtattgagctaaatgatcgaacaactaagaataggggaaattcaaataggaatcggccctacggtgacacgcgttcgaggcccagccggtacaatctgacacccttagaatgccacatgagaaatatcctacctaccaatctaacggtgggatttcatccctttggtggtccatccaagacagcccatgcaatagaattaaggatagttaatgccagaaccaacgtaaaaaaatctggtttgttatttccttatttacgccattattactttcttaagctactaaactattttgggcaaccgaatattattagatcttaagaaagtaatacggccataaataacaaaataacaaacaaattttttttacatggttcaggcattaactatccttagtccacgagttcatttaattagattcaatggtcggtgactgtttatacaaagacaaatacaatggacttttactcctttccaccgtgtt

SEQ ID NO: 342911 - DNA, 1138 bp, Cannabis indica
ttgaagggtagaacggtaaatttgtccctactcgatgtaaatcatctatggaggatcttttattattgagagtataataattgataattaatagtgtatttatatttggaacatataaagcgttctatataattaagagtgcaattctgaatcaatagtttagtcaggaggaattaatgagttagataatttactcgataaattctggaaccttattagaagcttgattatagggtcatggtccccacactagttgagataatactggcttgtagacttagttaattagttttaattaaataattaaaattataaattagactatctcttatttatgaatttcactaagaaaaggtttaattgagaagaaaagaggttgtagggtttatttattaattaaaagactttataaggtctaattaataaataaattaaatgctaatttttatttgataattaattataattattaaaaaaatatttttgacatttaaaggtttaaaattaaaatatggcatttgtgaaagaaaagatgaattattaaataaatggtaaaattgaaatttagtgggttccactaagtgacagaccacttaagtgaattttaacccattttttaatctttttttttattctatataatttaaacctaaacctagatgaaaagcctataaatagaacatgacagattcataataaaataacattagtgtattctatcagaaaattgaaaagagaggctcctctttaattttcgagttctctcctttttctctctctaaattttgtccctatagtgataattataaaaccctaaataaaactcatttcaatataatcagaattaatatttaatgttgcatagttcacatgatttatttcatgattatatgtagataatgtataaattcatctgaaacccttttcacatacttgatcatgtttattgtgtcgtcaacactttggaaagtagacatgactatgtgaataaagtttcctagatttatcagacacagggttttactgatatgataatctacaacaaaatttacttgcatttggaaacgctatgttctttccagagcattggttaaagtaaagctcaggttggatgcatggagtctgcatcagaagggac

SEQ ID NO: 342912 - DNA, 643 bp, Cannabis indica
tatgtatatatattattttttaaaaagatttttttattctttttcttttatgtaggatttgtcttttgttgttaatgtggaagagtctgagcctaatgttgcagtcgagaattttgttaatgttgatgagatcactcctcctgttgagaggagaattgcagtctccttatgctcagcagttgagttcatcatttaaggttgttgtagttacaagtaaggttaaaattttgtgtgctttggaacaatctgttgtagatgatgtcaatgatgaagatgagaaagcctttgatgcttggttcaaatccggtttgcttaagagacccacgtatgttattgttatgtttatatctatgttatttgcctatagaatttttttttatatatatatgtgattttatattaatacttttgtttgtttttgtgtttataggaagtatatgacgggtcatttcgtgtattttggtcctgctgataataagcttgagccaagttttgattttggttgtgaatttattcagggaaagatgtggttgcactcgttgatttattgtgatcagtttcttagtgattctgtaagttttttgttgttttgttgttttttgttagttatgtttttgttcattcatcttttcattttttcagc

SEQ ID NO: 342913 - DNA, 490 bp, Cannabis indica
atcaataataaaaaaaaaaacacatacacatacaaacatataaatataataatttgataattgttaaataagataaagtaatgaagctcaactcaatagattgcaatttatttgtaaaataaaaactaaattataaaatcataaaatgtttgcaacataatgagaaaagaacagggaataaaaacccaaacttgaaatccaaattgttctgaaactaaaacaattaattcaaaaataaataaataaacgagcttcatctttatcttggacgaactccacccctttatccagctttccaattcaactcgctaagatagcacctgagttcaaacagcttgggctgtaagaaggaaaaacaaataaacaaggttagtagtcgagaattaataatccaaatggataataattcactaaaacacatcagtttatagaaagaaataccttgtttctttgcaagaagcttaggacattggggtttccaatgaccttt

SEQ ID NO: 342914 - DNA, 715 bp, Cannabis indica
catctcagtcgacgccttccccttcacaggtggcgccttccccttcgcagtcggtggtgttggtcagtgcatcggcggttgctcttcccagtcccagtcgaaggtagtgacagtgctggacaattccttccatctcgcagtcgaaggcagtgacgggatcttgcttccatgtgattccagccgcttccagtgacgtcgacagcgacaaagttgcagtgacgacgatgacgttcgtctctgttattgaagaactcgggcattgaagttgccgcttccatgtgatcactttggtctctattttgaagtccttggttgtttgatgatcacgcaccatgatttcgacgatgggattctgcagcgacgtaggcagcgacaaggggatcttattttgagtttggtttaatttctgtgtttaattttgttgcttctatttttactgttagtatttaattctaattaggtttttatgggatttgattcttagttattttactgttattagtttatctagtaaaatttttgtcttttgtcttccgctcggttccgttacagtaagtcttgtcttttgtgacatggtgtgattgttttatggtctaagtttggttcttggtaattggtttgagattgttctagtttttgccattgttttctagtttgacagtctaagttttctaggtggagatgttttattgtaacaccctaactatcttaggcg

SEQ ID NO: 342915 - DNA, 1160 bp, Cannabis indica
aaccatgcctctttgttattacaaccattacatgtgaacaaggcatttcatcaaattgaaagcgttgacatgtgcatgttttttttctccatgtctactatataagactttttcacgtcatggactaggtatatcattagatttgatgtttcaacctgcatttgtttagaaaagtttgcatgtgttatttttttatttgaaaatgcataaaaattacagtaattaaactaacaccctattcaaacaatatttgtatgaaacaaacattcaaacaaaataccaaacaagatgcttaaaaaacaacagcaatggctctcgtttacgggaccaaaaccaaattctatcaatattagtggtccatattagattgtgttttctcaatcttctattatacatgagttgcatttgaacaaggaaaagtaaaaaaagttcaataaaatggcaaatataatataaattaagaaagcaaattaaattttcagtccaaactgacaactcaaaacccatatgcaataaaacacaacaccattacaacgattagatgcattttattgaagaagagtttgtatgtgttatttaattaatagattaaatttattatacaaggcagtatactttatatttgaggctcatttttctttgctgcaatagtgtttcttcagatatttttgccagatttgtgaatattcccaatgctctattcttgttgttccaataccacttttgtacaagactgttgaggcattctattaattttgcaactggtaattccttgatttctttgattgctgcattaactgattcagctatgttatttgtcataattgcatatcatttgttggagctgtatattcttgtccatttgccaataccaacttcatcaaacaagtatggttttatcctctcatcaatactgtccaagtctctcataaattcttcaaattcagtttctgtgtaagttctagaagcaccattgaatgcattttttagctcatctcctcctttttctgaatttagactttatgtttttgaacaagtgatagcaacatacaccatgcatcaaatttgggaaattctcttttgctgcccttgcaatgccttcatatctgtcgaaaataatgcattgtccatctctttccccataggattcttgtaatttt

SEQ ID NO: 342916 - DNA, 974 bp, Cannabis indica
tcagttttagtcacggattttttagtcacaacataggaataatagtttataattagtagtcactaattttttttttttttacttttaatcacaaattttgttgtgacttaaaaagaagtaaattttcttttgtagtgggacataaaaacattaacaagaaaatgaactaagtacaaaagtaaggaaacaaaagaataaaatgaagaaaataaaaaacataagtctaaatgtagagtgatgctgcactatcatcactacccctattgggtttggacataggatagaaaagccatcatatcatggctgagatctcaagttagctttttcaagggcgattcgacaagcagaattagaagtactatctttacagattgcctccctatgtaaccacaataaatctttgttttctgcttgtgctgttaagtttgttagtaaaaacagattgtgtttggtgaatgagaaaccaaaaacaatgacaaataatcgtacacaatcatatattctaacgtaaaagtatgagtcattacatacctagttagaaattgatagatgagtcttatttttcacagtacctgaaattatagagatattccatgacacgtggatagtttgaaagctttaaggtggcgtttggctaaaggaaatgaaatgaaaaagaaacaacttttgttctatttctttattcagttttattttaaagtattgaaatgttatttttattctagctatgttttcatttcttccgaccaaacaccacctaataaggtgtttgttatgtaagtttgagttagggagagtaaagttgaagggagtagagttgaagggaatataaaactcatgcgtttgagaggattaacattactactattttaatttaaaaagtgaaacctacttagaaacacaaatccatattgtcattcaaatttaatttaaattttacattttcattgccatcaagtctaaatctcatacca

SEQ ID NO: 342917 - DNA, 750 bp, Cannabis indica
aattgagtgggagcgctaatagagataaatgaatgagtgttcaatttagtgaagggtgtaacggtaaattttgtccgtactcaatgcaaatcgtctatagaagatcattgattattaggattataacaaatggataatctcatagcatatctatatcgtggaatatatagagtattctatataattgagagtgcaattccaaatctatagtggtacaaggaggaattaataagttaggaaatttacttggtaaattctagatctgcttattggaagctcggttatataagtctatggtctccatactagttgagacaaactgcttgtaagactcatttaattgattttaattaattaattataattttaaaattagactacgtctagtttatgaattttcactaagatatggcttaattgtgaagaaattagattttagggtttatttattaattaagagatttgtggagtctaattaataaataatataaatgaaaattttatttgatagttaattttaattgttaaataaatagtattcgcatttataggattaaaattagaaaatatggtatttgtgaaataatagataaatagttgagaaaatgacaaaaatgtaagtagtgttgggcccacattgtggtcggccattaagtcattattttatcatttttactcaatataattcaatcctaaaaccttaaatgaattagtataaagagaaaaaaaatggtctcataatccaactaa

SEQ ID NO: 342918 - DNA, 654 bp, Cannabis indica
ataactgctaaaaaagcactagactttgttatcaaaaacataatgtgttgatatggcttgcctcacaagatagtcttagacaacgagaagcagtttcactgcaaagaatttcccgacttctgcaaccaacacggagtcatcaaaagcttcgccgcaaataaatgaataagtagaagcggtccataaaatcctaaaattttccctaaagaaaaagttgttggcctgcaaaaacaattagcctgaaaaattgccaagagtgttataggcctaccggacaaccccaagaacaaaaaccggccactcgccgttctcaatggcatacggttgtgaggcaatggtcccgatggaaacgttatttccatcccacaggagaacgacttacgatccaacaacaaataaggctttattacaagaagcgttggatcagattaacaaactgccgaatgagtctcaaatacgaatggaagcttatcaaaacaaggtggctaaacacttcaactcgaaggttaaaaataggaaatttactattggtgatctggtcctaagatgggtcttcccagccactcaggaatctggagtgagggtacttgggcctaattgggaaggaccatacaaaatcgaggacaaaatcggctccaggacttacaagctcaa

SEQ ID NO: 342919 - DNA, 520 bp, Cannabis indica
aattattaaatagataaaattaacatttgaataattaggatagaaaaatggtatttaaaaaaaagatggaaagtttcattaaatgaaataaataaggaaacttacaaaaatattgacttttggtcaaatttttacaaaaatactgccacacggcagaaataactttatactgtcttgacctattttttttttttctttttatactataaacaccaaaaaaaaaaatagagacctctatctttcacacccacaaacagaatcactacaggaacactagaacaatcgaaaaacaactattaattccggtgagattgagaaaaacaatgaaatcgatgtcaaaaaaataatcatggcaaaccaattgtaaaacaacactaaaacaaatcaaataaaagaaagaaaaaaagaattaaaaaactaacaatgttctgcatagcgtcaataccatatgcaataacaactatatttgcaagcctaatcttagaaaatcagaataaaaaactactaaaacaatacaaaa

SEQ ID NO: 342920 - DNA, 936 bp, Cannabis indica
tttaaggcaacaagtgcataagtgtggtattggtgcttaactcgctagggttgttgattacaggggtactagtaatggaccccatgcaatcatctagaccacagggcgagcaagtagagcctgggaatgcccaaacaaacccatcggcaccgcctccacctccgcaaaattcgggggataatgcgggggttggtaatgctaatcctcatgctgactggcagcagatgtttcaaaaaatgccaggtattatacttcgtcaagaagaagagttgcgatgattaaggcaaccggctccggctacccctgttgaacaagtgttaccaccagcacctgtgccagtggtgggtaaccaggggtttctcatgccgcatagagactcggtatttgaggggtttgtgaagccgcaaccttcaacttttttgggaggtattgatataattaaggtcgagcaatggatgagcactattactcgtatcctggataatatccgggaactgaaagagtgagctgtgcagccttcatgttaccagatcatgcctgcgtctggtgggatatcatgggccaaacccgggatgttagtgtaatgacctgggaataatttaaaagtttgtatgaggaaaagttttactacatcgttgtgagaacttcacacatggaagactttgtgaagcttactcagggaaagatgtcagtcgccgaatacaccctagagtttgatcgactatctaagtttgctggtgatctggtgcctacagatttcaccagaaaacaaaagtatgtgagaggactgaacaccaaaatcagtcgggacttgaatattaccacttcacatgacactttgtacaagacagtggtagagctagcattgattgatgaggaggctgagctgttgggttttgtgccctaaataaaaccctttacaatctaattaattat

SEQ ID NO: 342921 - DNA, 554 bp, Cannabis indica
tttttagatgttttcctgaagaactttcgggtttaccacctcagcgtgaaattgattttgttattgatttagcacctggaggggaacgggtctccaagggtccttatagaatggctccggctgagcttaaagaattgaaaattcagctccaggggttacttgacatagggttattcggcctagtgttgcaccatggggagctctggtattgtttgtcaagaagaaggatgggtctctgagaatgtgcattaactatcgggagttaaataagctaatagttaagaataaatatccattacgtaggatcgatgatctttttgatcaacttcacgggaagacggtcttttcaaagattgatctccgatcgggctatcatcagttgagaatccgagaggaggacattccaaagacggctttccgtactaggtatggacattatgaatttctggttatgtcatttggactaaccaatgctactgcggcattcatggattcgatgaataggttattcaacgatttcctcgatatctgtgtgattgtgtttatcgatgaca

SEQ ID NO: 342922 - DNA, 563 bp, Cannabis indica
gcatattaggctattcctaaaaagaaaatctcactaatgtaaaagagtatctctaataaagtgttataaaagcagtatattgtcatattttaaaacactagcaaaatgatattgtcattgtgatgtaaaatatgtactaaatttggttcatactaaacttatgtcaaatttaatacaaaatataacataagttaaatttgcactacaatatatatcacaatttttatttattatttttccatcaatgtaatttacaacgtgttatttaatttattatttaataattttatttatatatttttaataaattaaagggatagttgcagctaaactacttgaactttacggtttgtaacacttaaccacaaaaactaaatttttaacggctaaactacctaaaccctggttccgttttgctttgcacacctccgtctaaaaatcacagttaagtgctacggtggactgtccacgtgtacacacttgtacacgtggcaagtttttagtggtcaacgtaatattagttttaaaaaataattatagatacttaaaaaaattaaaaaata

SEQ ID NO: 342923 - DNA, 789 bp, Cannabis indica
tccttccaaacactcgcctacccagagaaatggatcgcaatgctcctgctctgtcgttaccttttcaccattacagaccactaacctcgtcctgtctaagcttcagactggtcgccgagttccagtcgtttctggaacccatggacagggtcaagcggttgttgcaatatgcgtctcttcttccgaagtttgatgactcgtcccgggttgactcgaaccgagtcatgggctgcacagctaaggtatggctggcggcgagtttggataaggaagggagaatgagatttgcggctgaaagtgattcggagatcacgagagggttctgttactacttggtttcgattctcgatggggcggcaccggaggaggttttgacgatgaagagatttggaggctttgaacgtggggtttcctggtgggcagcggtcgaatacttggcataatgttttgatgagtattttgagtgttacaaatacaacttggagggtccacttcttctacagaaaaaagaagaagaaagaagaaagaagaagaaaaaaaagtaaaaaaaagtaaaaaaaaaaatatatatttttttaaattaaaaaattaaaaagaaaaaaaatcggatttcttaatttttttaaaatatttataattattttttaaaactaatattacgtggaccactaaaaacttgccacgtgtacaagtgtgtgcacgtagacagtccactgtggcacttaattgtgaatttttgacggaagtgtgcagagcaaaacagaaccagggtttaggtagtttagccgc

SEQ ID NO: 342924 - DNA, 574 bp, Cannabis indica
attactgctgagaccggccgcctctccaagactttgattgaccatggctttatcatgtccgaattcgggggcatagacgaggccatgagaatccttcgggacttgtctgccgaaaggcgggcattccaagaggaggctcaacggagggaggcccttgcggaggcaaagcttcgagaggaggccaagcagagagaggccgaagtggaggcgaggcaccaggaggcgctcaaggcggagggtgaggccgtggctatggctaggcgcgagcttcgggaggccagggaagccatggacgaaatggctgctaaggtgaagtccttagaggagttgcaccaggcggacttacagtctaaggccaacctgacagtggagttgaaggagctgagggacttcagagaccaggccttgaagaaggctaaaagagatgagctcataacccccgtctcctgcaagcagtgcgttaagtgcttcgacgacggtgtctacatggcctggcagtcaaatggtcaaagtattaagcttgacttctatcccaagcctgaagaggcccttgccaaatttcgggagaagaaga

SEQ ID NO: 342925 - DNA, 545 bp, Cannabis indica
attttataaatatattactttatgtttctaattaataagcaaattttaataatcacattttcgttaatctccttgattagcaacgagctgcaccagtacgttaaaaatcacgctaacatgcctaagttagttagggtgttacaatttggtatcagagctcccaggttgtcttccgaagatcgtcatgacatgtgcaatcatcatcagcaattagctcgtttcacagttcagtaagcttttatagctttagtagtttatttttatagtatgacttaagaaaagtttgttaggaagcatgttagtagcctgataatagaatatgcacatgttttaatttccaaataagcgacattagtaagttttcacttgatcacgatctgaccagactagctcttggttacgcaagctgttctaattagtatggacgacaggcgaaacaccagaagccagggtaattaggttggatctaatggtggtcagggagctcagagtcccctaaatatttgcggccgtggtagaggtcctagaggcagggcacgtggtcg

SEQ ID NO: 342926 - DNA, 1029 bp, Cannabis indica
ttaaacaacatacttgttagtagatctaagatcctggtaaaataaattccaacatatacatgcactctgatattgatatcacacattatatacagttctgagcttctttccagattcaagtttgctggccgacctgaatggaaagtctcgcactaaatggatgtcttaatcacataatgaaactgggtaaatcacacgatcaaaaccctaatctgggaaacccaaacccacaaccctaggttctgttatactctctaggggttactctaactctggaaatagggaaacacccaactacgacactgaaatggacgagaatctagaaaatgaagcgtttggtgacgctgccaaaaccgactagcctgttttagagttactggtaaaaccggctagccggttagcactagttaaccctaaactttccatttcttgctcaatcctccaccaaatgcaaccaaaccttccggaacaccgatacaatgcatatacaacatattccagccagtatttcacagaaaaacatacaaaatcaatttatgccattaaagacctaaacttgagtttcaaagctcaagcttactaaagtccctcaccatagctcaaaactaataaccagagcttaaaatcaattcaaaataagcttagaaattcgactacacaatctttaaaccctaacagccaccaacttcaaaaatcacaactcaaacgaagtaaaaacttaacgaattcaataacaaagcttctagggtttaccttggttaagaaatccattaatcccagctgaaacaccaaaaaactagcagcaattcccccttgttctgggctggttcaaagagagagagggaagggaagagagctctctctatttttggtcttttctttcatttttcattaatttctcaaagttaaatgtgtaaccttggctgaagtaatctaatgctaggtgtcaccatacaaggaagccaccaaatctcttctcttggcaattactaaaatgcccttttctcttaaaactagggtattttcaag

SEQ ID NO: 342927 - DNA, 505 bp, Cannabis indica
catgttaaacatattaaaccattagcatgtaaaattcatgcaaacatcaatcacttcaaatttcttatattgataactaatcagattgtaaagagttttatttagggcataaaacccaacatagataggatcttccttttatgcaagttggagccagtaggtaggatatcataatatgctctctaaatgaaatgtttggttttttgagggaatcggttgtgaccacaaatttttccaccaggtttgtagtgtttagggtactagagggtgagggctcatggttatgatttacgctatgtgctaggtgatagcccgagttgactgtataactaccatgggatgtgaatggccaataataagtgtcgggggaagggatgggaatgagcgggatggattggattgcttgactaatatcagggggaaagatggtatgaatgctaagaggtattccattggtgagagagataataagatcagagacttttggtatccccctacgacaaat

SEQ ID NO: 342928 - DNA, 996 bp, Cannabis indica
ttttactatagtattgatgtaattttttttagattatacttgagttggattctttgggaactccagttcaactttttgagatttgcttttcatggatctaaaaattgaggtcaggacattagttttatgcaagttaaactgaatttccagttgaatttagtttcgtagtagttttctacacctttttttatgaattcgaagcagcccttgttttaattgatttttgtcgtcttcttaggtgaagtcgccaaaattaacagtggttctctttctgattgaatttttgtttcggttgcgttgggttgatgcgtagttgcacgatggttgcgcgatagttgtccaggaagcatggatcctgggttgaaggttggtatttgtgtaatttttttagttggactgtatatttgtttacttagctagctgaaagtatttttgtaatattgttacctttttttgttaaaattgaaaaaagcccttatttgttttagctaagttttaaacttggtattagagccattttcttcaccgatggtgaacaactccatgcccgaacaaactcctcgtggtggacaagatgagtcaacaaccaagtctgcttcaagtgtgattgctcaacattcaagtccgtcgatggctatccttcgaccgcaagttgccagcaccctaactcagccttttgcactaaagctagattaaaataactacacgctttggaaagcaatggtatctgccattgttcgtggtcactgtctagatggatatctcagtggaacaaaggtgaagccaatcgagtttgttatacccaaaatttggctaacacttcagagaaggacatgtgtcaacttgggagaatacgaatgtaaagaccgcttagtttaatttggaaattagcagttaattatgtttatttatggaaaattatttatagctttttaaataattattatgttgttattgttgaattctgaaatgcattttatgtcatttagtgatttt

SEQ ID NO: 342929 - DNA, 1005 bp, Cannabis indica
atgccaaattgtgaacttacctcaatacacacaaatccaattacattgtggactttaccaaatacaccctaggtgttaattctaggattagaaagttgttcacaaatttagatgggatataaattatacttccaccattgaattaatggtactaaaagataaatgagtaattagaaaggcaaaacaatatttttgactaaaactaattaggaaccaacacatgaaggattaatcactggaactgattatatcaatggacactacagtaaaactcagtaaatataattctgtaattactaagagttcaatttcatatttatagtggagtaatcatggaattaataaacaaaaattatttggttgatgagactcaataaataatctagtttattggagcttagatttataggttcatggtccccgaattgccaccttgaaatactgtcaagggaagagataaagagttgtataatgttgttcgaaaaaatctattttgaattagaaaaaaataaataaataaatttttaaattaattaaataggaaaagacaaaatttgttaaaattaatttcgtcgagacaatatttgttgagacaaaagttgttaggaaaaaagacaccgtccttgtcttaattcagacatggtaggtgctatgtccctattggttttatctttttgggtttaattaaattagataaaaaatttgaatttgaaaaaatggttaaagatatttcaaagtagttgagatattctctcaagtaattgagaaattccctcataaatatcaataatcgaattcggttatagatatttatttaaataattaaataagatttaattaatagaattcaactactataaatagaagcctaatttgtagagatggaaattggtcggttaatgtacggggaatgcaatccccgcccccatccccgctacctatttatactcccatccccgtctaataaccaacggattcgggtaggggaatacccatcggttatgg

SEQ ID NO: 342930 - DNA, 646 bp, Cannabis indica
agcatgggtttttacatgccacgacccgctaggtggaaaattctaggtttttccccagaagctgcgacatggcttttaagtgccccagcccgttgcaggttttttcaacgcagatgtgttaaacttgataagcataactttttattttgaaaatcattttgtacgctttatatgttgttggaaagctcattccgagctttatatgcttatctgtaattggaatgcaattgtgtaattatgtgaaagtaaattttgggattaaccctatttgtgaaatcctaggaattttgactaggattatcggcacttgcttaagagcacctgaggatttggaatgttcacatacttaggataccaggcaagacagtagttaacacgtagagttaagcgatgtggcactcctatttgatattatgttgtgaataaatgagaatctgggattagggttattctatatatgttaagataaagaattgggcgggtaagattattactctagtgattaaaggatttgtaggtaatgtcattctatatatgttaagataaagaattgggcgggtaaggcataattagggtagactcgataatcagaattgagataaacaagtctaaggccttattataaatagacgtgtgagcgcaacac

SEQ ID NO: 342931 - DNA, 662 bp, Cannabis indica
ttaaagtggtacaggaagatattaattcttgtcattgtcttaatttatttgattttcgattttttctcaacttatggggttactgagttgtcattgctagctaaaaattttagtcatattgacacaccattctttagtagtagagaggtttatcctccatggcactatatccttagcatgttcattaagtgtaatggtatacttttttcttcgagaaatagacaatgtctaggagtatcgaatggctactttagtgttttagtggcctgtaatgttttctgatgtgtgatttaagtcaatgcaaaaccagtgagaatcatttaaatgtgtaaccaatcgtggattcatctctttcatcccaatgtggaagtagtgtagcaacaggaactagagctaggctttttggaacacatatttcaggtggtgtgctacgtgctgcttcagctcatggtttgcctcccttggccttagtcgtttgtattcttatgaagcaggtaagaaaggatattgtttctttaattcttccttcttagttgcagttttccacaatgtactttgttgtattttttctttaactaaatttgtagcatcttcttccaacttcaaggacaggtttgcttatttatgcaccataatatgtcttgaatgcaccatcggcatga

SEQ ID NO: 342932 - DNA, 510 bp, Cannabis indica
actttaccgtcaacccataacagccaaacctccattaaaaaaaaaaaaaaagtaaaaatcaaaatgaaaaaggagtaacatgtttaattgttgctccagaataccgcaggcaagaattagcgaagaaactcatgaacctgcttgaggacataagtgacaagattgataaaggttattttgtggatctattcgtacgaataggtaaaaattcaatatatgtaagactaaacttgaccaacgaatataaatgcaatgcaattgagacattttcaacaaagagtatcatgcaaccatgcatggcaagagtatgatcatccagcgaaaatgaagcagggtgtgttcttgaaaaaaaattcattctaaagtcaaaattttaatttatataaaaataagtttaatttttgtaaaaaaaaattgtaaatattataattaaatgacttaattgttaaaataataaagccaacagatttttatataaataaaaaaatatttataaattttaattgctaa

SEQ ID NO: 342933 - DNA, 623 bp, Cannabis indica
aaagagagagggaagagagtaggatttgatagatgatggatggaatgatgactaagtggtatttgtgtaataaaactaactttgtaagtaaaaatgtagacataggcgtgtagaggtatttaggtaataaattgtgcaaaatggatttttcatgtaaaaatttcaatatttaattgtttataaattataagttagaaaaaaatgatatattatatcattttacttatcaaaaatttataaatagtattttaaatatttaaataacctagatttttttgtagaaatttgaaaaaggcttaatttgagatattttgacgtataattaggataattattatttgtttattattttattcttaaaataataattgcctaaccatatttattttaaaattagtttattttgtcattttaattttattaaattataagattagaaaatgataatgaaaatatttatttgttattttcaaatcatttttcttattagatatttaatttaatttaataaaaaaattcaaataaacttagctattttaaattagttctatctttgaattttaaattttgaaaatatattttaggttgtttttaacaaccctaaattttcaaaatttagttag

SEQ ID NO: 342934 - DNA, 946 bp, Cannabis indica
agttttgttaaaaaataaaggtgaagggctcatttcaataaatggaatgttttaaaagaaatcagaataaaataaaatagaataaaggaaaaaaaagattaataattctcctctaattaatttctaataacttagcaaaaaggttttataaggcattttaatcattgaaataacccaactaataaccaatactattaaacctactataatgccccggaataaaacaacgctatactatacaacatatgactctctaaaggcccaacgccgctttccacagcttccgaacacaatcacaaaaattgagaaattacataaatagcataataaatatatatgcactcaaataaattcccataatcataatattattgataataataaaatctcatacataaaccctaattatttaataattcaaagtattattcatatgcggtctttacaattatccccccgttaaaaaggatttcgcccccgaaatctacctgaataactcaggatgctgggccctcatatcagattccaattcccaagtggcttcttccactttactgtttctccaaagtaccttgaccaatgatatggttttggttcggagaaccttttcctttttatccagaatttgcactggttgttcgtcatatgataaatcaggttgcaattccaatgcttcgtaactcaaaatatgcattggatcagacacgtacttcctcagcatagaaacatgaaatacattatgcactgctgataatgctggaggtaaggctaacctataagccacttgcccaactttttccagaatttcaaaaggtccaataaacctagggctcagtttacctttctttccaaaacgtctgactcccttcatcggggatacacgcaaaaagacatgatcaccaggttggaatgtaacatcccgtcgcttgggatctgcataactttt

SEQ ID NO: 342935 - DNA, 1163 bp, Cannabis indica
tttaaacttgtggggcaatgccaagacattgatctcaggtgagaaaggagttctgcgtgcttggtccagctcgagatcattgtttctctatccagccatgccatggaacatatttttcagttcgtctcgctgtgcctgtacggttggggtaacctgctcggcattttcgtccatttgaattacgtcagaatctttctaagcgggaatttgagcacggcctccgggctgcacaatcgtcgtgacattctaatcgtctactcctctccttctattcaaatcaatccttaggtcgtgagtcacccccaacctttccaatacagaagcgcctggctgtcttagcgattgattcgcttggttgacaggtggaatggcacccttaatttggttggaatcatcaggtatgatctctcctgatgaattactagacaaggtctgccgcctaccacttggcccacaagtggaactcgtaactggggattggacggctgaccatttgcagtcggggaagtattcatcgctcgatcttcgtccgtctcacccagggggatgacattcggaggttgctgacctacagttttgtaggcttttcgtatcaacatagtagcttgccgactacaattttcaatttctgtatgatgagcccttaacgcctccatctctccgtctctccactcggtaaagatacgcctttgttcttcgaacgcgtgatttaccgcagcacggagttcttcctgatcatgatttagggtattgttatgaccgtgcatgagtccaagagcttcacgtagatcttttgtaactcagtagcatctccgatggttgtctgggtgttggctcctggcggaacggttgtgttatgaatgctctagttgagtgcggaactgttattcccagtctcttgcacactaggcgcgatttcatctataggagtcgttacaccgttacccacgtttgccggctgtccaggattaacagcttgcgaaacctttgtatttcctgggttcggcaatgcaggtgttcttgaaggaattttacaacaccaaaaatgaattataataataatacgaactaatgaacaagtgcgagtattcaacccagaatggcgagtactcaaaccgagaacacaaatactgagctgtaagaaagtgagagaaggattttta

SEQ ID NO: 342936 - DNA, 773 bp, Cannabis indica
atcacacacaaatcgttttaagtccaaatttcttgaaagcaaatcaattaccatggctctaaggccagttgttggaattattttaccaggatcttactaacaagtatgttgtttaacatcctaaatatgaacttctaaaatgattataaataaacacatttaatgtataagaaaccttacagtggttgcagtgggatatgatttctccttccactcagatctttaacccttgtatcctttctgtcgtagagtatcaccaagatctgagtccgaatgtccttctattgaatctggattcttcacgatcttccacactatgattgagataccacttgatgtgtgtgggcactactctatcactcaagggattcggttcaataatgaagaagagagaaagagaggtagcggctaggttaggtagaaggcactcaggtttttctctgaaggaataagatgcatcatcttttcttgaagccatcactatctatttatagtatgccacctagggctaggttagaattatttggcattaaaataatgaaaaaaaattaaatgataaaacctacataagtggccggccaaggctatggatattgggccccacttttgtaattttgctgttttatcatttctacatctcattttctcaaaaatgacaatttttaaattcaaccatttaaatgccaatttcagctatttaataactaaaattaattattaaataatattatcaattaatatatttattaattagactaatcaaagtctcttaa

SEQ ID NO: 342937 - DNA, 925 bp, Cannabis indica
aagctgctcaggatgcccaaaattggggaaataggtttgcagcaatgcaagcccggatcaatgaacaagataatgaaattcgacagttgagacagcagggtgctcctgcagtgcctgctccagaaattccagtggcacctgcccctgctgtctaggccgaaccagtggtggtagtaaatcggatggaacccctgtatgaaaggttccgcaaacaagcacctccagtttttctgggaggtccggatgtcatgaaagtcgagcaatggctaacaatgattactagaatcttgaattttatgggtgtcactggtaatgacagggtggtttgtgccaccttccagtttcaagaagatgcactggtctggtgggacatggtgtctacgattcatgatgttacgacaatgttacgacaatgacctgggaaaagttctaggaacttttcaatgctaagtattacaatgaagcagtcagaagtgataagagaagaattcactcatttgactcagaaagaaaatatgagtgttactgagtacacaacggaatttgaccatttggaaaggttggcctcgggaattgtgccaatcgactacagtaagaaagaaaaatacatggacgggttaaaggctaagatcaggcacgatctactgattactactgacgacaataccacctatgctgaaatggtggataaggcactacgagctgagggcgcagtgggatgcatggttgagtttggtgggactccggttgttggcgaggctcctacccctcctgcatcaggttttagcaggggaggtagtggttcggccatacatcagaaaagtaaggcatccattgcaaccagtggctcaggtcagaacaggaggtttcgggggaactagggtcgaggcaatcgccagagtggcactgaaacccgatacactta

SEQ ID NO: 342938 - DNA, 688 bp, Cannabis indica
acgcctttgttcgtcaaatgcgagatgtactgcagcatacagttcgtcctgatcataatgcagagtgttgttatgaccctgcatgagtccgagcgtgtcacggagattttgcgattcggttgcatctctgatggtcgtctgggcattggttccaggcggaacagtcgtattatgaatgccctggttgggtgcagaactgttattcccagtctcttgcacaccaggcgcaactccagtaataggaactttttcaccattcaccacgcttcctgtctgttcgggattaacagcacgcggaacccttgaactctctgggtcctgtaatgtgggatccaacatttgtgaatttgctgggtcaggctgacctctatgagtttgcaccattgtgttggcggttgagtatcaaataaagagcgattaatgatccttctttcaatgaaagcaccaaaatgttgacttcgcttttagccaacgacaatgagtctattttataagcgataaacgatatgtagtatgataaagcaataataggacataggaattttatagaggttcagccccgagcagtttggtaatagcctaatcctcgttatttgtattgacttaagatcaaggaagaagattcctttcttatagctcttacaatagtatctctgaatatataattcttagataataatatagtctt

SEQ ID NO: 342939 - DNA, 799 bp, Cannabis indica
accgagttccatgttaccgggaaccggaaatgccaaattatgaaaattactaaatcacataaaatgcatttcagaattcaataataacagcataataattatttaaatagctataaataatttttccatgattaaacataattaactactaatttccaaattaaactaagcggtctttacaatctcagtgggggaaacaagtgaggataaacagaatatggatcgatacagtcactttttatggaataactcattaattatgtaagtatcacagtatatttgtaacatgttgactgtaaggtcttatgcaaggaatcaatatacaaactgttgcttagtatattagcgagaaaccatatctcgctgaatgtgaatagcgagacatcaagtacattacctctaggaagacaaaagtgacacatgtcaactgcgaaagcccttagtgtataatgtacaaactaagtgtaacagtcgagttgggtggagacctagtaagcgaggtgcttatctcgctatgggaaggcttcttgtaactttactcagttaacttcagtaagatttacaatcctgacgagtcagaagataacattcaaacgagcttcgaagaactctttataaataagaaccttgattatcacaagacgttcatcatcgacctcggacaaaaaaattgccccagcttgctattatgatcctttggaccaagcttctgtcgagacatccctagatacaacgattaaaagcgtgttcaaatacacgatcatttagacctgataaaagtgggaaaatcacagctata

SEQ ID NO: 342940 - DNA, 931 bp, Cannabis indica
ttttttattaacgtattaatacaagtcaatattgttagagattttatacatcaatgaaagataaatcaagatacattataactctattataaaataatacaaggatgttgagttttgtgccctaaataaaacccatttcaatataatcagatttactaattaataaaagatcagaaatcattttatgttgcataattcacatgatttatttcatgataatatatgtttagtgtataaattctattaagtccagaacgtatatttattcatgattatagtgttgtcaacacaatagaatataatcatgtttatatgttcaaaaagttcaaatctcacgatttgtcagtacactggatttaaactgacatgataatcagtgataaggtatacttacaccttggataagtgttatgtcttttctaggggattgacaaagtatgtcagtatcggatgtatgaagtatacattggattggaccgatattgaacttggataagatatcataaacttaccgttattgtaatgaccgcatgattcaattatggattagtaaaagcaattagcattaattattgatattttatgaatttatatttattgtgggtcccattttcataaataggcattggagttgtaatttctcatttctggagattttattaatttaagtgtattatttagaatatatacaaaatttataatttttatgtttttcgcttggcgacaataaaaaatgcaatggaaggcaaatttatcacatgggttagttagaacctttcttttagcgtattatacataagaaatatttggaatattggattttagacggggttatggtgtcggaccattttaccccaaagttacttcatcttttaagtttgttgtaggggtattgtaatgaccgctttagtaatttggattagtaaaggca

SEQ ID NO: 342941 - DNA, 784 bp, Cannabis indica
gccttggaacatattttttaattcgttcagctgtacctgcacggctgtactaacttttcggcctcttggccgatttgagtcgcatcaacatctttctgagcgggaatttgagcgcgggttccgggttgcacgattggtgtatcaagatgatcgtccactcctctcctcctgttcagatcattttctgagatcatgagtcgtccccaacctatcgaacacagaaacgcctgactgtctcagtgactggttggtttggccaatttgatgaccgacgccattggagttactgggtatgacttctcccgatgaattactagacaaggtctgcccgccaaccacttggcccacaggtggaacctgtgaccggggatttgacggctggccgtttatagtctgggaggtattcatcgttggatctttatctattttgcccaagggaatgacattcgcgggctgctgcccagcagtttgataggcttttcgtattagcacagtggcttcccgactgcgatcgtcaataaatgcttgctgagcccttaacgtttccatctctttgtccctccattctgcaaacatgcacctctgctcttcaaacgcgagatttaccgcagcacggagttcctcctgatcatgatgtagggtattggtataaccctgcatgatttcaagagcagcacggaggttctggatttcagtgtcatctgtaatggttgtttgaacattaatagcgggcggaacggctgcgttatgaatgccctggtcggttgtgttggaaattatttta

SEQ ID NO: 342942 - DNA, 551 bp, Cannabis indica
tctctctctctctcttttaatatatataaatgtatagatatatatatatgcagcaactaaaaactatagttctaagaaacaaggatatcacaagtactaattaaatctataatcaccacttcattggtgatatcaccgttacacgaataattctagcagtataggagcatatatattataaagttaaggtaaaattacaaagtttaatatttttatgggcagatttaacttaccgaatccctaattatggatattaatgtcccacggagaatcaattaataatattaatttttaaaagaaatctgttagcggatactttcaatttcgcgataatataacaaacttagaaaatacactttttagataaaataaataatgaattaaaaaaaatgagctatgtaactatatttattcttaataaaatatggctatataattaatatatatttggctatattattattttttaaaatatatatttgaacataatatataaaatttgtattttgaaataataatttctcttatcaaactcaaattttgtcaaaaaa

SEQ ID NO: 342943 - DNA, 506 bp, Cannabis indica
ctttaaacacacttacacaaacagcagaaccagggtaattacctaaataagacaatatgagccaaaagctcattcggtgaaaaagtgcagaaaacagaaacgaagtcagataaccctgaagccccgcttacaaattgctaagataatatatgaaatttcagaaaggtatactaaatctattttcacaaattccatacgtgatgtcagtgttaagattataactcttcagctttttttcttcttttctttcttagtaccatctgctaattgcctagcaacacaaaaatgatttgaacagaaagaaaaaagaaaggccaaaacaatgaagatttgacattaaaacactaaagatcattgactttaggcgaagtaatacaaaacataatcttcccatagcacataatcatatacatataaacaaaaaaatttgaagaggacagaccatcctaatctaaaatttaataaaaaaaggtggcaagatatctaagaagatctgaaagatttaa

SEQ ID NO: 342944 - DNA, 1144 bp, Cannabis indica
tggactatggcagacataaaaggaattagtccaatgatttgcacgcacaagatactcctagaagctggctataataactccattgagcatcaacgaaggttgaatcctgttatgaaggaagtagtgcgaaaagaagtgataaagtggttggattatggtattgtatacccaatttcagatagttcatgggttagtcctgttcaatgtgtgccaaagaaaggaggaatcacggtggtagctaacaagaacaatgaattgattcctactagaaccgtgactaggtggagggtgtgtatggactaccagaagctgaataatgcaactaggaaggatcatttcccgctaccatttattgaacaaatgttggatcgtttggcgggtaaagagttttattgtttccttgatggttattcgggctacaatcaaatttctatagcgccagaggaccaagagaaaacaaccttcacgtgtccgtatggcacctttgcctttaagaggatgccatttgggctatgcaacgctcccgccaccttccaacggtgtatgatgacaatttttcagtatttggggaatcttttggcacgtgtttggctaacttagagaaagtgttaaagaggtatgaaaaaacaaatttggtactcaattgggagaaatgccattttatggtaaaaaaaggcattgttttgggtcacaaggtttctcacaagggtattgaggtggacaaggctaagttgtcattgaaaagctaccgcctcctaccatagtcaagggtattagaagcttccttggacatgtggggttctataaaaggttcatcaaagattttttaaagatttaaaagcctctttgttcattgttcgaacaaaatcgaccatttgagttcactaaggagtgtcatgaggcttttgtgactttgaaaaaggcattggtgacagccccagttattgtagctccggattggactttgccatttgagttgatgtgtgacgctagtaattttgctattggtgtagtacttggacagcgaagagaaaagattttccattctatttactatacaaccaagactctcattgatgctcaaattcattactcaaccaccgaaaaaggagctgctggctgtggtatttgcttttgacaagtt

SEQ ID NO: 342945 - DNA, 594 bp, Cannabis indica
tggaatgtggcacaggtcactctatcattggcggtgaagcccataaagttcaaaattctggtaatcactgttagccactgttcggctttcataaaatcgggacctcccaggaaaactggaggtgcttgctcacggaacctttcatacaggggttccattcggttcactgcagctacaggtcctgcctgcatagtaagggcacgagctattggtatttctggagcagggattgcaggagcaccctgttgtctcaaacgccagatctcttcatcttgttcattaattctagcttgcaattttgcaaacctgttctcccaatcttgggcagcttaggcagcctgtggacggttatcatcatcctggccacgtgccctgcccctaggacctgtacctcggcaacaaatatttaggggaatttgaactccctgaccaccactggatccaaccgagttgccttggctcctagtgtttcacctggcgtccatactataagaacagcctgcgtaaccaagagctagtctggtcagatcgtgatcaagtaaaacttactaattgttgcttatttgaaaattaaaaacatgcgcctattctact

SEQ ID NO: 342946 - DNA, 714 bp, Cannabis indica
ggctactaacatgcttcctaacaggcttttcttaattcataataattaaaataagctactaaagcaataaaagcttactgtaccgtagaaggagctaactgcagatgatgattgtagatatcctgacgatctttggaagacaacctggcggctctgataccaaattgtaacaccccaactaacataggcgtattaacgtgatttttaaacatactttacagctcgttgctaatcaacgaggtttatggaaaatgtgattaattaaaattttgctttttaattaaaacttatatattacacacaaaatagttcgggatcccaattacaaaatgctttacaaaagtttactagttcttacaaaatacttgtcacccagcgactaactacaaaagcactgttctcccgaggatcgtatgctccaagcctaaccgccccgacatgtacaatattcatcggctcgtcctcaccgttcctcagctttggccttgcccttacctacacataaacatagcactgtgagtcgacagactcagtaagaaaagcataatataataaacatactaaatcccgggtcataatcaagcgcccatacacctgaccataaccctaactgaatcagggacgtccatgacaaagtatgattaaccgcaaatctagcctatactcggtactctaggcgtaccgatgttgtagcagttaatccatactatctga

SEQ ID NO: 342947 - DNA, 609 bp, Cannabis indica
ttgaagatattttggtaaaggttggtaagttcatcttccctcatgatttcttaatacttaacatggaggaagatgagaatattcctatcattttggggagaccattcctagcaacggggagagcattaatagatgtgtagaagggggagttaaagttaggtgttcaaaaataagaagagactttcaaggtatttaccgcaactgaaattcctacttgttgtcgagtggaagttgtaaaggatggtcgagaagtaactaccaacgagaagaaagggaagtctaaagaacgctttcgaacttttcgacgacatatgaaatgactgttgtgtgggaattatgaaggtgactctcaatctaaggaaagctttaaaaattgcaacgttggaggccatttttcttcgtttggcacaaaggcccgcatggatgcaagaggtggattctactcgccaccactaccaccgccatactaacatggcgctcaggtaagctcccttccctttagttttaaatgtcacatcgaggacaatgtgtcactttagtttggggggtgaacttaaattttaaatttttaacttaagttttttttatttttagttctaaaattaattt

SEQ ID NO: 342948 - DNA, 604 bp, Cannabis indica
tctgggatggtgtttactcttggggatggagcagtggtttgtagaagtgctaaacaaaccgcaatttcagactctaccatggaggcagaatacatagctgcagcaaaggctgccaaagaacttgtctggcttagaaagttcttcaccgaactcagtgtcattcatggaatggaaaaacctctggttttgctttgtgataacactagagccatagccaacagtaaggagcctcgaagccaaaagagaagcaagcatatagaaaggaaatatcacatcatcagagaatatgtggcaagaggggatgtactagtggagaaagtggacacaaaggacaatcttgctggcccattcaccaaagtcttggcaggaactacatttcaaaagcactgtcataatttaggattaatttgatgtgtaccgattagttttatattagtgcaagtgggagtttgttgggttttttatgccctaaataaaactccatttcaatgtaatctctattcttttaaatatcaataaagaaacagaagtatttatcactcatttgtgtgtcatttggttcatattatcatttacttgtctcttttatttataaattcatcca

SEQ ID NO: 342949 - DNA, 1321 bp, Cannabis indica
ttgagtgagaatggacagttacacgcagtatctgggtattgcggatcttgaaagataggatcattccagtcaacctcgttttcttcaacgtggtgttttttataatgattcatatcttcttctagtcgttggagatactctggcaaatagtattcccatggtgcgtcctcttcaggttttggccagatggcgtctggaatcaccatgttaatggcaaacatgtatttttccaactgtcttgcttctgagctacctatcatgacaagtgggtgttcgcttgacttgtgtattttgacacttgctgtaaaggacaaatctggattgacatgtagcctgagtagcaaaattgtgaagcagcgcaatgggtttgtcatgtttttagtgactgggcaattgagtcccacgggtcttttgttacggaccttttcccactcttgcgtaaggagtgtgtccaattcgggcaatattttgaaccattgcaacatagtcattggatgttggtaggcaggcctgaggtcagggcgttggatatagctacgaactgatgttcggagccctaccgtgtggatctcgactgcaatagtatatgaacttgccaaataccagtatagatctgtcatcttttttggcatgaatatgttgtttttcatgtgtaacagtttggcaaatgggtagtctgggtagaagccaaattctgcggatattatctttccatatcccctgacaggagtggaatgaacttctagggctctttgaatttctttaacccttgggtttttgcttttgacaattgtttttgcattactgggaaatgtagggatgataagcgataagttggctatgtagatcagtgggattggattgttggtgtgtgagttgatcatatttataataggtttgcctggaaatcagaaatcacatttgtttttcttttgatgagtttgatttcgaacgtgtagcgcgagaaccacatggctaaccttagcagttgagcattgactgctttgttctttttgaacgtgagcatcccttgaaatgggaaaaaatctgtttccactagaaaattgtgtccaatgaggtggaacttgaattttgtgatggccatttttaccgctagtatttctttaagagtggaatggtagtgcagttgagaatctttgtaaccgcacaccttgcgtttgccacgatcgtcttcttccagtagaattgctcccctgtgtttgtcgcttgcgtctatctgcaagattccttttccgtcatagggaatcttaaaaaaataataataaaaaaaaaaacttgtgattcataaatttcctgaggt

SEQ ID NO: 342950 - DNA, 562 bp, Cannabis indica
gtaaaataatttccaacatgaggaaccgccaactttcttcccaaacctatagggaaggggcacgtacaaaccccagtggggggcacacgacgaattacacccaagggaaaagaacggggcgtgaaaaggtgagtgttaccttggggcgcacaagaattgacagccggtcaacgtgaggaagagaaagtactcatcgcaataatgatcgagaaagcacaggcacgagtaagactaccagtcactcaaggacgaggtccataagtaggagacagtccgtgagtagaacgaggtcccgtagcagttataaacaactggatctgcgagaacacttgaactagaaaaaacttgatcttcgccaacaactcagtccaaagcaaggggatccaatccaattgtgaatagatgatttggaggataagtttaggaggtatcgagtcggggagcaaggaaaataatctggatatgactcagatgaagaactcgagccataccatccagatatcatgaatactgcttttccccagggatttaaaaacccccacatctcgtcatatgatgggac

SEQ ID NO: 342951 - DNA, 545 bp, Cannabis indica
attaatggtccacagtaatatcgctttaagattgaattcttatttcctaaagcatcatgtgcaggaacaccctcataccacaattgactcaaattatcaactagaggggctaagtacacatcaatatcattaccaggctgtgaagggcctgatatcaacagtgtaagcatagtgaacttcctcttcattaccaaccaacgcagaaagttatacatcacaagcaaaactggccagcaactatacttattgctaagggtggtatgtggattaattctatttgcagaaagactaagacgaatattcctaggttcattgccaaatccaggccacctagcatcaattgatttccaagcgggtgagtcagttggatgtctcatcttaccatctaactttctatccctggcatgccagatcaaattttttgcatgattgacattttgaaagaccccagccaaacgaggtgttgggggtaagtaccataataccattgcagggacaccaacctttacctcgtcggaattttttttcttttgccacctagactc

SEQ ID NO: 342952 - DNA, 638 bp, Cannabis indica
gaacgctgaactagagcgtgatgaaaccgcagctagggcggcacaggggactaacactcaaaatcaacctgaacctggtgtgagaagagaacgaggcaagcctcgtggctcacgaaccaggagacaggaaaatgtccaggatgaacaacctagggaaaatgagattacccctgaaaattaaaatgatcagccagaaccctctcatagaaataagaatgggaggcaacaagaaattgacgaacaagaaattcctcataaaaatgaggaagatcttgggattcaacgtggagaacctaggtcacctgcaagaaatcatcagcgttcttcctgaacccatagagagagggctcgcacaaaccctaatgggggaaatacgacaaaccacacttaggggaaaagaacagtgcgtgaagaagcaagtgtgacctcagggcgttcaaggaccaacagtcgatcaactcaaagaggagaaagtactcgacgaactaatgattgagaaagtatgggaaccagtaaattcgtgagtcactcaaggacaaagtccatgagaaagacgaggtccatgagtaggacacaatctatgagtaaaacgaggtctggcagtaattactcccaaccagatctgcgagagcacttga

SEQ ID NO: 342953 - DNA, 644 bp, Cannabis indica
tgaatttataaattaaataaatagctagatgaacacatgaaccaaataacacattaaataagtaatgaaaataaatctatttctttattgataaatgaatataaaagattacattgaaatagagttttatttagggtacatagcccaacagtacatgacccagctgctataaggtgtatttataatcaatatacaccttattgacagctaacacacggtctgaacaagaccacaacccactagacaatttcctaaaataaatcttcaatcagcccagtaatttttatttctgtacctacaaaatcgtgagcactaagtgagactttccttttatagaaaatgaaagttttgcttcgattttctcatcaagagatttgatcaaacataataggaaactcaacacagctagatagatagagaatggatgagtcaccaaaattacattctataccttattttccataaatagaaaagttagacaattttccttccatgtataaatcaattaatacacaaatgtaaaagttaaatacacaaaatataaaaaccaaataataaacacctcagccgaattgaaataagaaattataaaatattttatcacattaaagatgccaaaaatagaactaacatctctcaagtga

SEQ ID NO: 342954 - DNA, 1205 bp, Cannabis indica
cctagttgaaacactataaaaggaacatgatactctcactcattccaactttttgtcatcttaactattcaaccaaacctagatgagagtgttccttctatagggatttcacctccttcgttgttcttcagcagattcgaaaccttgagtgatgagtgttatgcccacacatagcaagtcaagtactcaatcatagtgagtaagacagtgttaaccaaacccgaaggagagaaagaaatacaggttcagatcttgataacgctctactacagagaggaatcaagggctagatatgtgtttattttcattgttatagagaattcatatctaggatgttaaacatacttgttagtaaatctagatcctggtaaaatattcccaacacagggttacctctctctgtaccctcttggtgagggggtgaaggtagtcaccacaaataaaggtcaagatgctggctctcccctagataattcatgtgcctggacaaaataccacattgaggctggggcgacctaaccactacatgattactttcgagatgtggcgaaatactttgacgtttccccggtccaaattgctcctcatgggtacctaacattatctacttcgttcataatatatcaccagaagggatggggaaggccttctcctcacgaaattcattacctcatttccttctggacttgcccatctatgaaccattcagaatacttttacttcataaccgagaacgggttcaaccgtttgtttctggtattagtagcacacctcgcggaaacaagcatcggtcatcctacttttttacgacccctatggacactacccaacgtgctttcaaccatacgggtacatatctcagaccagtcccaactgaggagatgatacaacatgcgatagctttgacagccatgccagcagctgagaaacatgccccaacaattgtaactgtgaagatgctcaagttggtagatgctaccgctggtcatgaacttatgtctttcatggatgcgtattctggatataaccaaatacccatgaacgtggcagaccaggagcacattggccaaagaggagcattttaggcgcactaagatcccggctccgtcaggtgctaaggcgcaaagagctcctcagctgtcaaattatctcaaggacctaatgggcacgaaccgacccaattggctcccctcatgtacccatga

SEQ ID NO: 342955 - DNA, 776 bp, Cannabis indica
ggtgagaattgcttgatgttggtgttggattaagctttgtaattgggaattaagcttgattgtggcttgaatttgaggtagttcttctcctcaatcttcaattttgaatttgtaactgagtttagaattggaaagcatgctcttttaagttttgaatgttctttgttgcatgttaagtgaattgatgttaatcttgttgaaattgagcttgttgttgttgtatgttccattgttgagtttgggaagagattttatgatgttttctaggttggaatttcatatttaattagtgttatgttgctggaatttaatagggatgtgttgggttggagttcatgttcttgaacttggaattttgttaagttgaagcaagattggtgttgttttatgcaatttgaattttgagatttattattggagattgatgcatgaattgtgtattttaataccctatctttgagcttgataagttgtgaacatgttttgagagtttgaatgttaattgggatgattggattgagttgtgttgctgaaactcgtgattttggttgctggtttctgggttttcaacccgggtgccgcggcatgctcccgcctccttttggggaacctgggattttctcctagatgtcacggcatggcttgggcatgctgcggcccgccctcgattttcagggcagtttgagtgcaaactttgaaaattcatatcttgtgatttcgaactccgatttgggagttctttatatcgttggaaagcttgttccgagctctatgtg

SEQ ID NO: 342956 - DNA, 1708 bp, Cannabis indica
aacgaggctggacagacgacaccttaaaaatgtaaacggaacagtactttggagggttttcccaccaaaatatgaggttggatggttttttgcaagtaaattgatagtttggggggttttgccgcaaattactcctatatatattatactctcacttagaaaaacataaagggaccacacaccttaaaaaataaattatagaaaacaaccgtaaaataacactaaaacataccaaaaaaataaaaaaaaataaaaaataaacacagtatactgcagtatgaaacttataaaaatacacagtaaaaaagtaaaaaataatgcctgcagtatttttgtaaaaaaatggcgaaagtcagtataccatgtaaattttccattaaaatttaagtttatgtagcatatcaaatggcttttttacaccttttttttttagctttttacataaaatactattttttttctttttaaatatttatacggttatatagtttcagttttcatttttaccattttgtttaaacacatatacggttattatttaaaattttacattaaatacgactttacttatgtcacttaacagcctaaacgtttccctccattctgtcaaatatcaatcacatctcctgccaagtatcactctctaacccactctctcgttattctcattttattttgaatttcttcttcttcatcattctcatcatcatcttcttcttttttttttcttttttttttctaattgttctttctttattttatctttgtttttgaataatggttgttactcaatctcgttcgagttcattgtccccttctcctaagaaacccaaaaataagcctattaaacaatttaaacccaaattagttgctcaaaaaattttgaaaccccctaatcagaaattcaaagttgttgttgatgttggtgagccatcatctggtgatgctaggaaagctaagaggaagagaaataataatgacaataatttctttgttgttcgtcctagaaaagtattttttttgttctgttattttctttttgttgttcattttttattaaaatgattttttatctatttgtattttgtttatttaattaatttttcgagtttatggttttttttcctttgttgatttgatgttgtgggtttcaatcttaattttttaaaattatttttgtatgttctatgttctttgtttatttgtttatttataattttgttcaaatttctttaatcctatgtgaagttttatatgtattttattttttttttgtttgattttttatttgtatattgtctcgggatttttcatgttttaacttagagtttttttgtaatatgtttttttttccatgttttttgttcaatttttgttggaaattttctttttaggcttttttttatctagaatgtgattgttttcatataattttgttagttttctgttgaattatattttatttgattatttgttgatatttaggtttttctgtttatattttgttatttattgtttctttgatgttgttagttttattttctattttaaaatacaaatgcatatactctatttttattggttttttttcccctattattgttttctttaagtttataatttgtttatttatttgttcttagttcttgtttgtttatgtattatttatttatattttttttaatagttgttgttttactgttttatt

SEQ ID NO: 342957 - DNA, 768 bp, Cannabis indica
cccagaatttggatgtaaattttggatctcgatatgaaactatcgactttggggcaccgatatacaaatcagcatattgatccactgtatacgttgttcgcactagtaaaaaattgtgcagactttgcatatcgatcaactatcaccaaaatagagtcataataccctactgttctgggcaatcccaccacaaaatctatggtgatgtcttcccatttccactcgggaatctttagaggctgaagcaaacttggtggcctctgactttctactttgatttgctggcatgttaagcatcttgacacatattcaacaatatccctcttcatacccggccaccaataaaaagctttcacattatgatacattttggttgtacccgagtgtaaggagtacggtgtggtatgagactcatcaagtatctcctgtctgatatctttgtcattcggtacacaaattctattcttgtatcgcaataatccatcagatgagaatgaaaaatcttttgccgacccaacctcttacttctccttatgtccctgtaactcaggatcactttgttgtgccactctaattctttccaacaaatcagactgcaaggtaatattggcaagttttccaatcacaaattcaattcccgatatagtcatatcctcagccaactctgttgaaattttctttagttcacagacttgccctggtccttttcgacttagagcatccactaccacatttgcttttctagggtggtagagaatctcgcagtca

SEQ ID NO: 342958 - DNA, 1353 bp, Cannabis indica
ggacttgaacttgaggcaaagaagatggattgagtatgtggaggactatgatttcactttgcagtatcaccccgggaaagctaatgtagtagctgatgcactaagtagaaagcctcattgtactttggcatgtttggctcttgaggactggaaaaggacaatcacaatgggtaattataacttgcaatactttgaaggggaagaagtagcttgtatctctaacatagtggctacaccagtgctacttcagcaagttaagcaacgtcagtggcaagatgaaaagctaagatttatttggaaccgaatccaggatggtgagcaactagacgggtggacagttaatggtgaagggtatctataccatatgggaagactagttgttgcggatatccctgaacttagggagaccattttgattgaggcccatagatccaaatttgttgtacatcctggaagtacaaagatgtaccaagatctaaagagacaatattggtgggaaggtatgaaaagagatgtggccagctttgtagctaagtgtatagtatgtcagcaagtaaaggctgagcatcagagaccctcaggtttacttcaacctttgcctataccagaatggaaatgggacaaggttacaatggactttgttactgggttgccattgacacctttgaagcatgacgttgtttgggtgcttgttgatcgtttaactaagtctgctcatttaattccaatcaggaaggattacaagcttactaagctagcttgactttatgtagacaatatagttcgactacatggagtgctttcaaccattatttatgatagagatcctcgatttacattaaggttttggaaggccttgcaacaagccttagggattgaacttcacttgagtactgcccatcatccacagacagatggacagtctgagaggaccatacagactttggaagacatgcttcgctgttgtgttttggattttggaggtagttggggagaacatttgtcactagtggaattcacatacaacaacagctacagagccagtataggcatggctccttatgaggccttatatgggagaccatgcagatcaccattgtgttggacagaaccagatgagcatgtcactatcggaccccaaattatcactagtaccactgaaaaagattaatggaatccaagaaagacttaaggttgttcagagtcgtcagaaaagctatgccgatctccatcaacgggaagttgagtttgatgttggtgattatgtcttcttgaaagttactcctatgcgtagcgtaacgagatttcgagtgaagggtagctagccccgaggtatattggacctttttgagg

SEQ ID NO: 342959 - DNA, 516 bp, Cannabis indica
taattagcctttttttttttaatgatgaaattttattgaatgtaaatttcattcaactagattaactcggcttcaacaatattatcaacatcaaaagggagattaaacgctgaaaaaatacgattagcatataaacaagctgctctagtcgtaagatgagcagcccgattagcagattgtttgacaaagcgtaaagaaacatatttaaaagaagataaaagttgtttacaatcctcaatgacaccactaaaaatgaatgacaaaatattcaaattttaacagattgtaccaatacacgaaaattggattcgataatattaacacacgaaaaaagcgcttcaaccatgataacacttccttgagagctacgatttcaacaatctctgaaagaacttgcccaatccgcagtcccgtaatcccagtcaccacctgatccttgtgatcccgaacaacctcactaaaactatgctttccctcctcgtcaaacaatgcagcatcaatattcaccttgagttt

SEQ ID NO: 342960 - DNA, 563 bp, Cannabis indica
ctcctaattccctcaaaccttatatcaagttatagagtaaaaataacttcaatgcaatgcaggtgcagctcctctcatgaggaaaaaaaaaatgtcaatgtgagaacgtagctgcaacaatggcgtagctgaaaccggtcttgaacgctcttgctaattttttttttttttttgttcgttatataaattacaaaaaacccaaacttgagattcaagaaaaatgaaatggaatgacaatgggtgtgggtgtggatatgaaggagatgaaaacgacgacgttttacgtgggatgtcgttttggggtggcggtggtcgttttgattatgggtttgtttgttgtgtgctgttattaagttgttaagaaataatggaagaaaaatggtggagaggatgagatccggtagaagaagaagaagattgacacgtgtgaacaaataaacgaattattattattattattattttataattatctattttattttaattacagattttacaaaaaataagaaatattaattgatacagacaatttattttctttttttacaaaaaataaaata

SEQ ID NO: 342961 - DNA, 517 bp, Cannabis indica
tagatgtctcctccaattgtctttctgggtatgtctctcatgtactaaatttacaatgtccgagcttaaagaatctagatatttcttataacttagacatgtcattgacattcaactccaaatatcctatcatccccccatttcaattggaaaccataagtttggcttcttgcaagttaggtcctaaatttcctaattggctccaaacccaaacaaatctcagacatctagacatttctaattcaagtatttctggtcctgttcctaattggttctcaaatataacttccaacttgaattatttaaatatgtctcacaaccttcttaacaacaacttgaccaattttccactttcacaagaagtttatcctgtaatagttgacttaagttccaaccaattccaaggttctatcccaccttctcttctcgttaatgcaacccgcttgtatctctccaataacaaattcaccgatttcagttcttccctactgtggagcaaatgagtgggacaagtcaa

SEQ ID NO: 342962 - DNA, 533 bp, Cannabis indica
taagcccaaaagcaaacatataggctcacacaggtcaaatgatttggatgttctctctcatgttactaggtttacacaaatgaaagaagtacaaaatttacctgttacaaattatttataggatctgttgcccctaatttttgtccaaaatacgtggaccaactagaccgagacacgtaggctaaaggagtttaacgtttaaataattcagctaagtctcttaaaccaaagggatcagcatctaacatgcctcccgaagaaggcctgtgaatttcacatattcccggagagaaaagttacaacaaagcatctccgggaggtgtcaaatcctacctgaacagtcacctcgcatttaatgtcgcatgggagaaggcgtattgaaactgccatatgtcttaatgtctgacggcgtaactattgggaattattttaccaggatcttagatctactcacaagtatgttgtttaagtggccgaccatatggtgttattgggccttacttaattttgtaattttatcaaattttatctct

SEQ ID NO: 342963 - DNA, 981 bp, Cannabis indica
attttttcatttgtaatgtaattgtgttctttaaatttatattttgtatattttgttgttttgagttgatttatacgttctataatagttgcattgttctcctgtttttttctttttgtttttctgtaggggaaggagaaatcccttattcttaatattccttctgattctaggtttgaagagccttctactgatattgttgttgaggtttgtaggctttttttttgtttgtttgtttttgtgttatttttgagttgttttgagtagatatgcaagtttttttacccaggactggacatgtaaatataggcgttcacaacattatcattctaaagtaataatttctggttattattcattcattaacgatattaaaactattctaaccctaacccagttgaattttttttttcccaaattgtagttggtcacttccttcgaattccagagtacattattcatttctaactattgcatggtctgttgttgagggaagttcaacaacctaacgagatggattttctgtatccgtcgctggaaagtttcttaaatttagtgtagaggaatttaccttagtgcttgggctagattgccacattgaatctaatatttttcagttcaaacaggataagaatacgctagttgaacattgtttaaaaggtaataaaaaaattaccaggaattctattcaagttaccttcactgctaacaactatagggataatgatgatcttgcagttaagttggttattttgtattttgtttagtgttacttgctcataggtcctcctagaaaggttgtctctattgaggaacttgatattgtggatagtgaccgttataatgagtatgggtggggacaggagtgtttgagatattgaatctcttaaaggtaagattgatgtcgttattaggactgttatgaagaaggataaggatggcgagttttataggttgttaggttttccttatgcaatgcaa

SEQ ID NO: 342964 - DNA, 908 bp, Cannabis indica
ctcaagtgtgagaacagaaactccatcacaaattagtaccaaaaacaatatgatcacttgctagagctgaaaacttcagtgtacatttcgttcaaataacaaatgtgtacttggattaataattacaatccaaaactttagatgcacaataacaaataaaaaaaaaggtgtctactgccaccaataaaatggtccaaatcaagcagagagtatagcctaacattataattcaaaacaataaaataaaagggttaattgtcaataaaggttcacattaaagcataacttctctgctataccacaatcaatggaggagaacaagttcagttgagatttaacatcaaatttccaatgagacaacaaacaactttttaaccacaattgtattggaaaaaactcctagtttgttgtaggcatctctgttctagcaaactcatcaacccaaacaatcaaaacactaaaaggatgataccttttttttaccatgccaatatctcctagtgagatggttggtgccaaatattttttttcacattggaattacataccttattccttttgcttctcttagtcaataggctcgtcctttatcttttccctgtaaattatatcttttaatgagttttatcacccttctttaggcatttgatcagcaacaacaggaccttgttgatgatgcttctaaagctctttcatatacagaggatattattgagttaagaaagcacaacatacaaaatcttcctattgtgaaggaaagcaatcctaaatatgaggtagaaattaaaaattaacatcatcataaatctgtataaaattaatatcgcatactgctttcatctatatataaatctgtatagaataaagggaaaagatattgcggggtttttttgcatgatatttcatat

SEQ ID NO: 342965 - DNA, 1316 bp, Cannabis indica
tttatgctgtattttgttccccacctcgcttgttggagcagctagtagctggtttaacaagtttactcatcattcaataatttcctgggagcagctatccagggatttgaagaagcgattccaaaccactagggataggcgacccaaagcggcctcgctaaccaatataaagcagcagcctgacgaaacaattaaggagtacttaagtcggtttagcacagctgccgctaggcttagaaacttggatgacaacacgcaacttacagcccttcaggcgaggatctccactgatccattaactgtcgggggcgagttgtgggatgatttacaaggatgtccagtaagaagcatcactgagttcaactagagggctcaggtgtttgtctagaaggaagaagctcgaaagtaaatgaacttgttgaaaacaagctcgggaggtaaacccaacaatgtttcaatcgggactacttccacaagaattaataacttgggggcttctggtccgaaaataaaggacggaattaggcaacagtcgaaggttagaaagaaacaaaagaagcatgaaaaataggtgccagtgtatactatttataccaagcttaatgaaactcgggaaaatatttacctcgcacatgagtagaaggtagccttctgcaaactcgagcttatgaggaattcgaggagcaaaagagatcctaacaaatattgtaaattacataaagatattgggcatacgaccgacgaatgtcaccaattgaaagattagatagagagtctcatctctcgtggtcattttaaacagtatgtgaacagacaaggctagggatacaaccagcccagtcagcctaataacctaaacaaccgggcattacaacctattcttgaggaaggagaggacatcctggttatttcgggagggccgcatatcgcagaggaatgcaataacgctcagaatagatatgtgaaggagataaagtacgagtagtcagtctttgccccaaaaccttccaagaaggtgaaaactgaggaacaccgcattacattcacagaggaagatgagaagaacgtgagatatcctcacgtcaatccgctggtcataacaattcaactcgccaataagaggattgatgtcgcccaattagttacactccggccgcggtagtaaatgggctgtatgtcgtatccatagggaggaaaagtacactcaaaaggacagttagtaatttcacgagcataaaacaagaaccttgaatgtgacgagaatattgagaaaatgattttaaaaaattaaacaagtaattaaaatgagaaatgat

SEQ ID NO: 342966 - DNA, 727 bp, Cannabis indica
ttacaaccagtcaaccatctacggtgctcatacagacttaaaagagaagagagcccttcagcacaaatcaagaacaagtacggagatataggatcaccttgacatatcccacaagctggaacaatcgaccccaacttctttcctccataagtgacatgatatgttaccgtagacacacaaaacatgataagtgtgacaaatcttaagctaaatctcattcgaataagcatagcttcaagaaaagcccaaccaactcgatcataggctttgctcatgtctagtttaactgccataaagccatctttacccttcctctttcgtttcatataatgcatcacctcataagagatcataatattgtcagaaatcaaccgtcccggcaaaaaagcactctggtttgtagatatgacactcggcaaaacaactttaagcctattaatacgaaaaagaatggagaattaataagtcttgatatgatctctctctttatatatataaaggagaaatatgaggcggtaacatgacattctaagatctctccagttaatattatttgttatctttttaattctctcattttttattagtttcataaataataacccccaaatttataattaaaaaggaatatttaatagtattattaattatttaaaaaaatacaaaaatcatctaaaatctatatcatgtctctttttttttttttttttttattttttttacaaag

SEQ ID NO: 342967 - DNA, 600 bp, Cannabis indica
ctaagaaacaaactacggtggctcaatctacaatgaagtttgaaatgattgcactagctactgctagtaaagaagcatgttggttgagaagctagctagctaagattcttttatgggaaagacttatatcggttgtgttgatccgttgcaatagtattgcgactatttcaaaagttcaaaatcgttattacaatggtaagagacgacaaatatgttgtaagcacaacactgcttgagagtttctctcaacagaagctgttagagtgaatgatgtacacactgatgataactcagtcgatcatttgacgaaaggtttagttagagagaaaaaagaaatgagactattgctcttggattgataaatcattcataatgataacccgacctatagactgaaaatctcaagaaataggttcaatagataataacaagttatgaagtgataagagcagggccggccctgggcataggcgggctaggcctgtgcctagggcccacctagtccaggggcccaaaagaaaattttgcccttttaaaattacacaatttttttgctgattttgaaaaataccattttttttctaaatgagggcccaaaaa

SEQ ID NO: 342968 - DNA, 1622 bp, Cannabis indica
ggcataaaacccaacacgttcacccattcactgggatgaagccggtgaacgcaggtatcttggacctaaagctatccaaagaacgagtgagtctattgaaaatattgaagctcgtatgcttgcttcacagagtaaacagaaaagctacgctgatccaaagcgtagagatgttgaattccagattagggattttgtcttccttcgggtatccctaataaaggaaatttgaaggttcgagaagaagggaaagttgagtcccaggtttattggtctgttcgagattcttgagaaagtaggtcaggtagcttatcagttggctctaccttctgctttatctggggttcataacgtgtttcatgtcttgatgattgagaaatatgtatctaatacaactcatatcttaagttatgaagacatcgagcttcaaaccgacttatcatatgaagaacaaccagtacaaattttagacaggaaggaaaaggtgttgcataacaagactattctgctagttaaagtgatgtggcagaacaacaaggttgaagaagcgacttgggagctagagtcgcagatgcaggagcagtatcccgagctttttaggtaaatttcgaggacaaaatttctataaggggggatagtttaatatcccgaaaaatagaatgatatgtaattagacaaatttattaagtatgtaattattttagtaatgaagtaagattatgatcttacttagggtaattagtgaggatttattaaatagttatataaagcgtaatttattaattacgaagattatattgagatatgtgggtatcgaggatactattttttaaataaaaatatttttcgggcccagcgactgtggaagcttgatgatgtggtcagaaatatcacaaaattaatggatgaattattttgaaggtattccagactagtttagaattttagaatgtcggtaggatagattagtaaaattatcataatgcccctaggttataatttaagactaggtttctttgagaggtagattagtcattttatattttgaaattttgacttatttactttgtgggctgattttttattttaaaaaagaaagaaataaaaggaaaattcttactacataacttaagaaccaagtaaccacaccaaaaacaacctactccctctctttctctctcgtgcaagccttgaagccagccaattttgggagaaaccttactgtaattcagcgctctctcttgctgaatcactctttagagcagcataaaagtttgaggtaagttcttgttgtgttttcccctgatttcttatggttttaagttagttttggttagagttttgaaatttcaaggggttgtaaactatattaatgatggaatatgattttagggtagtttttgaggttgtttaaacttgtaatagttagatgtaggggctggtttggattgaataagttagatgaggctaaagtagagtttttcttcacttgagtatgtgaatttgattaaatgattgagttgttgtgttttgaagcttgagatatgttgttttatagctattatactgttctaaaaagtttggttaggtttggaggagttttgggtcgaaattggagaagagaa

SEQ ID NO: 342969 - DNA, 638 bp, Cannabis indica
tcgttctgagctctatatgattaactgaattttgaatgccatgaaggtattttatgaatgtggaatcaggggttaaccctatatgtgtaaatcccagaattgtgactaggattaccggcacatggtcaggagcactcggggatttggaatctctactattccgggacatcaggtaagacactagttagcatgtagagttatgtgcggtggcacttatactggaaatgatatatgtgagtaattagtaaccagaattatggttatcaccctaacatgagcggtttaataacctagggttattaccctagtgatatatgatgtgtaagtgctatgccatgttatgtatatgagtatattgaatgttagggttatgtgttcaaggcataaccgggttggattcggtaactagaaccgagataaaccgttttaaggccttattgtatttagatgtgtgagcgcaacacgtacgtctatgttacatagacatagataaccatgtgagcgtaacatgcaggtctgtgtcacacaggcttacgagaatggcattaaagtttacataatgtgttaaatatgtttatcaatattttatactgtcgtgctaggcttggctcatgggtgctctactgtgcaggaaaggg

SEQ ID NO: 342970 - DNA, 801 bp, Cannabis indica
ttttaggcctccaacccttcaccaccggttgaaacccctatgtatcttccccattcagtacaatttcttgtttcttcatccctttcaccacccattcttgcttcttagtctccttcttcctgcattcatctgtattgtgtcccattcccttgcaatgtttgcaaagaacaggcttccagtcatagttgacaaccacagaaacatcagcaccaaattcattctcaaaatagatcaggcttggaaactcttgctccattgaaacttcaataaggattctaggaaaaagaagtttatccctttccttagtaacctcatcaaccagtataggttttcctagttgcccaactatcttgaacaaggatttttggccccaatacttcaactctaagtcctctagctgaatccaaataggaatggtttgaatattttctttctgaacattacaattagggtcccaagccttcattatgacaggcctcttgttaaagaagatataaccaccagctagaatatcatctctatctttaatactagtaaatctaatgatgaaaacaccataagaaaccatacctatcttgtccactctgtccttccagatccgtcttgcaaagccctcaagaacagcaagtgggggattggcacctagaacatagcagacaatagccgattctaggttacgcatcactggttctgctctaagaaccgaaggtgtagcttgaattcctttcgagatagaattttggcattcctattagcagctaagaaatagccaaaatcagcagctatctcatcttttcgctt

SEQ ID NO: 342971 - DNA, 498 bp, Cannabis indica
cattccttattagcagctaagaaatagccaaaatcagcagctatctcatcttttcgcttcaataacctcaacgatgaatccggagatagaggaggctgatcatgaatcaaatcaactcctactttgtcttcctcttcatccgagaattccactggttcaacaccaagaatttcctccatggattcggtcttccttacatcagcagatgaattcagacctttcttcttggcctttttgtttaaaatttgcgattttcccacagtcttggacctcgtttttgccatggcaccaactcagaggagagttgcaaggagcgaagagagagagaaaatctcaaaatattgcaaggttaaaaattattattaaacttcaaatcttcattgttggtctaacatgttttgttgttttaatgggacaaatccctaatggattttcaccattagacatacataattgtgttagatctcgaaagataaatattgtaaatgcaacatctag

SEQ ID NO: 342972 - DNA, 1117 bp, Cannabis indica
actaattaatagattaacatcataacgagccacagtttgactacccattattgacttttcatttccccgcttatacataattttatgtttatttaggttagtgattgaactgaaataaattatattgaggtaagatttgataattaaataaagttacactagaaaaatcaaaatactaacaacaatgacaataaacatttgtcttttttttttttttaatgaaaaatgtaattttcattaatgaaaatgccaaaaaaaaaagtaacaaattagtaggaacagacttcatactgaaggtacgatcagggtacaaaatagagactttagcaaagctatgagccactaaattagcagatcgtttaacaaaaataacctcaacggtacacaattcggcaagcaaatttttacaactttgaatgacttgaccaaccaacgaaatcatacaaatagaactacgtaatgcttgcacaaccccaagacaatcactctccacagtcacatggtgccactttctctttatccatgtgagagctttcttgacagtaatagcttcagccaagattggctccaccatatatactcgaagaaaagatggttcggccctcaaccaaccaacctttatcatctattgccaccatacttgaaccaaagggtcgaccatcattaaataaagctgcgtctacattaaccttaattaattttattaacaagtggagtggaccaatgctctgcaacatcatgcacctgatagtaagaacatgatgagccaatgacagaattttgagcattattccattgattaattaaggtagtttttagcaaacccaacaatgtcatcaacacaagtcgtctttcctttccaaacaacttcattgtgtgcactccaaatggcccaacacacgacagccacaagagattttttttttctgcatttatcttgctgaaaaccgaattacaccaatcaaagaaggaggaacatggtgcgtttatagtaccaatccccaccctattccatcatgttttaatcacatggcaagtgactaataaacaatgtgttatagtctcatctttagcacgacagagagaggacagatggggcttacctccacatgcttgc

SEQ ID NO: 342973 - DNA, 577 bp, Cannabis indica
atttttagaaattcaaaataatttacaatataaaatagttttaaacaatttattttacacgattatataataaagagtcacgcgtgcaatcaacgatttgaaccctatttttgtgcgtgctgtgcgtgctaaaattttttaaaatttttaaaattgataaaatatcttaaataactacaacgtacatgaacattgaaaaaatagactaaaaaattattttaaaaacaaaatagataagggtgcattctccttttaaaagttttatagacgaaaaataaatataaataatgatctaataataattaattctcaaactttatatctatattaagaatggcaacaaataagatatgagtaaattttacttattctacggtactacaccctaaaaaaatattgtactatccatactctacactttaccttattattttttgggagtaaggtacatgtatcactttaagaggagtgttattgtcaatcttgtgttacaacctcttagtcaaccttcacgtctgaaaacacatgtcaaaatatttttttttcaaattttatttcacgggggtgttcgttatgc

SEQ ID NO: 342974 - DNA, 665 bp, Cannabis indica
gatctgaaaccagattgcatcttcaattgactgcagaattttttaatgtggccaatctttccacattgataacattgtcgattgtctttgatctttaacttcgatcttgatggtgactggttgttccttgatgatcctctctttggacttcttcctcttacaagataggcttcgtctttcctaatctccttctcgagttgcatttcaaagtcctttgcttttaatgccgcatgaacaccctctaacaagatcacatcccttctacatttgattgatgctttacttcttaatatgccattggcaattatctgagcaatatgattgcttgactttcttcatctacctgatgatcaatggtaattaaaccaaaaactatttcattaaatttatcaatattatcatctaaggaaagagaagaattcattctaaacccgtataatctttcaagaagattaatcttgctcgatattgatggtgccatgtacagctgctctagtttgttccacaatccttttgcggtcttttcttggattagctttcttctaactccattggacaggtacatgatgatggtgtagtatgccatctcctccatctctgcaatttcctctagcttcttctcagccaacaacttttcatctccaagtacctttgccaccttttgg

SEQ ID NO: 342975 - DNA, 515 bp, Cannabis indica
atgagacagaggcgttggttggagttagtaaaggattacgattgtgagattctttatcaccccgggaaggccaatgtagtggccgatgccttgagcaggaaaggtcccgggcagatagctagcatgattcagatctcaccccagttagcagaggacatggtcagatctagcattgagtttgtagttggcaagcttcacaacttaaccctgcaatctgatctgttagaaagaattaaagtcactcagatgactaatccggagttagtaaaaatcagagaagaggtttcagctgatcaagacagggatttttcagtgtcagacaacgggatgctattatttaaagctagggtttgtgttccaaatagtatggaactcaggaatgaaatttttgaagaggctcatactaccccttattccctacatcccgacaccaccaagatgtatcaagatcttaaaccttacttctggtggagcggtatgaagaagaatttggtagaattcgtattgagatgcct

SEQ ID NO: 342976 - DNA, 457 bp, Cannabis indica
atcacacagctgtgattggtccgcttttactgggtcaatgcatacgtgtattaaatacgttgtaaagcgtatcgctctgggacatctcgctaggagcatagcaacaataaccctggtagcgagccagagcttttctcatgtctttccgaggttgataatgtaaatctcgtcgtttatgctattgaagacatccatctgacaatcgcagttcttggtgacaaagtgaacttcaccagtcaacatcatttgaatgtcagcttctatctgagagagctgactcgacggagctgtggatctcattgaaagatttctggagctgattagtgaaggtaccatgagtgtgccttcgtatagcgagatggatgcttccctattcgtagttttggattcgttttgctgttatgcttagtttgtataatgtgtattagacgctaagtgtcttaacagtcatcatgtc

SEQ ID NO: 342977 - DNA, 596 bp, Cannabis indica
gcttactaaaggcaacttaagcttatagttagattagtagtggtggtccgagaaagaataattactcaggaatatttggtataaatttaagtctttgactttaaattttagattccaaatagaaatttttaatttcaatttctaggatacattggacaatacagtaaaactttcacaagttgttaatattcattttctacaatgtatccgaattgtatgttaatgtatggactatgagttttgtattctgtgaccagaatccacttgaactattctaagaactctttgttgtaactagacctaagtcatcaaaagaccacaaccacataacatatatatctacgtcatttgtatcttgttcatagtggtttttacaagatcattctctgcaaagagaaaacatgcctatatacacttgaaagtaagatcttctatattcaaacatatggatgaacattcagaggtggatatgagttatcgttaaattcttaagacgatcactctagatttaccttatgcaaagaaatttgaaatgtttaagaaatttcatgaatttctagcaatgttgaaaaacattaatgtaagtggttaaagat

SEQ ID NO: 342978 - DNA, 1209 bp, Cannabis indica
aaggaatcccggagtcgttgctcggtggagtgtcccccctccgggtccgcttagaaggctccacctccaccatcttacccttccgcttaagctcaagggcggccggatcccccacttcaccttcttcaacttcctcctcctcgtccaccaagacgattgtgcctgaagggacgttggaggaggacctcccgggagtaaccagctgggaggtagccggaggtggagaagcatcaggactgtaagcctcagcaagagtagccaagaggtcatccatgggcctggctgctgcaataaaaaataataagtgctaggacattcatgagacagcatacacttagtaaaaaagcgataaaactagtcctaccctgactctctaattcggccctagcaaagtctcgaatcatagcactggattcatcatcccctagaaaactgtcagagggaagaaaccagctggaagatacgtaggttgaatgatccaaaggaacaggcgccggaggtccggaacccatccgggaccgacctaaataatggcctaagtgggaaaagtaatactccttggcatgatccccccaccgggtagaaggcattctaaacctacggagacgctcatcgaaccctatgggcctaagacgggaatgctcacagacgggaggaacataatgtattgataaaggagacttaccagaacccaaagtgctggcatcgggagctccgtatttgggaccgggaccacaggcttgggcctacgggtcctccgctccggcggagcttccaggcgcagagtcctcccagcggccgcctgggccttgatataggccagctcctgttccctcttgaagaggtacttctggtacttgtcctccgccatggcactaatgtcgtcccggaacaccttttctgcggccggagccctcatattcgggcagatgactttggagagattgaagtcatccaccaactgggtccccgaaatcaacttggccttccgacagttatctgtcgtgaccaactccccgacatcgagggccttcttgtggtacgtggcaaaggtcttggcccgttgaagaaatatttgggtaggcttagtccgcatataaggagggatcctaacccactctgtgagaagctccgggtgtccatggcctggaaaccggaggagaagaagaagcggtgacaatactccttcaccctacaatgtattttatc

SEQ ID NO: 342979 - DNA, 741 bp, Cannabis indica
tctcagaaattttatcaatgctaattttacttcgagcaacaaaccttttctaatttttaactttctagccgggatatctggatcgatctcaatctcttctaactctactacaggtccaacattgctgcttgggtctccaagtaaaggatccacatcttcatcccttccttgggaagttccctacttggaaatgttttttcattatcaatcattgttatggccaccatcttgtttgctatctatacctcaacgaccaacgggtcattgtgcgagaatttgattttgacaacatctttgtcgttgaaggttatggtaggccctcctgcccatgggattttgggtttcctttcttctacggccaggataacttcttcttgctcgtactgtgctgttcgggcatacctctcccgagctttgcctgaatctctagctatgtgcggatctccaatgataacttgcaaatgtccgtctaccggtggaggtagaaactcttggttattgtcattcctctgactctgatcgtttttgacatacctctgtaagtgcaggttatttttccttatcaagaattccatttctcgcttcagattgttgtattcattggtgtcgtggccgtagtctccgtgaaatcgacaaaactgggtcatgtctctcttgctaacatatttcttcatgggcgtgggtgttggagattattttaccaggatctagatttactaacaagtatgttggattaacaac

SEQ ID NO: 342980 - DNA, 760 bp, Cannabis indica
atcatgaatttaagaaaagctagaattgttaactttggtttgcaagtttgatagccattctaaagtgattataagtggaacatcctgtggtcattaagataagaaagtgtttgctttaacaaatactacttttctaagaaaatgactaaatctgaaagtaaaaaggtagagatatttttattctaaagtgttatatcatcttatactgtataagatggtcgcactgcttctgtcgtcttgacacaaccgatgaggtcaacaccataagtgttcctagatagaaagtcagggtacttcgtcgtagtgagagagtttcaatgaactcaccttgttatgacttgaaagacacttgtgaataaaaaatccattgatagtttaaataagtaatggatagtcagaataaagaataagaggcaaagccaagagaactagggttaaaaccattcatatggagtaaccaaaagatttttattacaagaacaagaaggaaaattttgataataagtctattcaatggacttaacaaaacttcccaatcttagtattataggtttggaattctctaaacctatggcttgtggtatgcttggtaatttacttactctagtgcaagcaacttactttagtaagattcttgagtatttttctaatggctaattctaaaggaagtcttttgactcctagacatatagtttatttatctaaagaagagtttcaaatatttcagaaaagataaaagtcatgaaaggaattccttaag

SEQ ID NO: 342981 - DNA, 872 bp, Cannabis indica
gttaaccatgagctacatatgtcgctattgttgcccgatacaacgaacaataagtaagaaacctatccgcagtttcaagagtaattactcgtaacggtaacaaccaaccctcggtcataactgaggcttaacaaacatatattcaaattctcaatcataatcgagactataacaacacaattgttaatcacttaaccctaagtgatacataacacttttcttacctctgtccagaaatcaagtgtgcgggcccacctgagcagaaacaaagatgggcaatcctggttctatgtctcgataaccaaaactccataaatgccttaaaccaaaactccggaaaaaaactctaaattcgaaaccagacataacctaacttccaacaatcccaaagtaggctacacaacacctaaataacctaaaacaggtactaggtaccaccccgagccaaaacagaatttgaagaaaaccctaaaaaatttcccctacatggcaaccggtcgacaggttctggtgcactagaaaactttgggttttcttccccaaactcgaaccaaaaccattccatacctgtccaaatattcctaaacaatataataccacaaattcaactcatcccaagcatcatttaatcacaatttaatcattactcaaaattacatactcaagtgaaaatcaaacttcatccaattcaaatcaatctaaatagcccctatttctaatcaattcaaactcaaacaagcataaaaataatcctagaaacttaccctaaccttaattaacttcacaaccccccaccaaacctaaaaaccctaaacccaaaaccctaaacgtactaaacttaacttttttttttaaaaacttttttaaaaaac

SEQ ID NO: 342982 - DNA, 686 bp, Cannabis indica
tcatttagtggtattatatatatattgtattattttagaactcatatcatatggctgttggaaaactttttgttatgccatttattgatatttaacaactttgctctattttgaatttactattaggtcaatgtaaatgttattatagtagtttaatataacaagtctattttcattttcaacttagttgttatgtcgaaattatttacttaagttttgcttccaaaattaattaaaaaggaaagtgactttactacttcaaaataaaccaaattcaagattttaccacaaacacgtacaatacataaaaccatgaacaaatacataaaatggaaaccaacagagtacatcagtactgtttttgggagaaggatccattcctcctttctctcccccttcaatgtcatctccatttggctccttgcctttctcactgaaatctttgaccttctcttcttcgggtgattttttaacaccagagctctcaccctcatcaaataatgagcgaacacaattaagtattgcttcctcatcttcatcatcatctgaatcccacatgcatgggaaatcattaacacaacaaagttctctaacttgttgcccagtgaagcatagtcccgtctgtccatgtagacatgcagcagaaaaggcttctatgaaagaatcatatcaacatattttgattg

SEQ ID NO: 342983 - DNA, 871 bp, Cannabis indica
cgtccttaaaatcaagccgaagagtggaacagcgacgacatcgcccgttgtcgcccagaagaggaagagcgatgtggtggctactcttgccgcagattcttccaagaagctggctaagaccacgcaggacaaggggaagaaagtcctgatcgagccaactgtccgagctcgcgacttcctggctatgcaggagaagttcgtgggcgaggagttcatatccaaggcggagaagatcccttctgaggagcttgttccgcgttctgtggagttggcttcgcagtcgatgaccctgttcctgaaagctgttgccgctggttcgaaggaagctgactcgctgaagaggcacaatgcccagcttcaggagaacatgaagaggctgaagcaagaggcggctagaaaggataaagagcttgaagaaatttgcaaggctaaggagcagctgagctcgaggccaagaactctcgggcgaagatcgaggagatgactcgcgacttggaggtcgagaaagagaatgggaagaaacaatatgatcaggcagtttctgattatatttacaccactctttccaaagtcccagacttcgacttctcgatcctcggagcagaagccgctgagatggccgaggcttttcgcgctatgtcgcccactcaaactcaaggtggtggagggaaccttcctgaagaggtcgagggtgcggatgctgaggaagccgagaacgaggccgtcagcaaagtcgcggatgagactgctcctgttgctccagatgcttgacttttctatgttaaaactgttatgctttttaattttacttgtttagtttattatgcggtacaggggtactcgcgctttgtacttagacaaatttgctttt

SEQ ID NO: 342984 - DNA, 590 bp, Cannabis indica
tattacttatatattttgttattaagttgtgaagaagaaaaaagagaagtgcggattggaatattatgtgtgatccataggaatgtctaaattgtaatagaaaaaggaatacaataaataattaaagaaaactaatcgtagatgtaaaatagtaaaaacccaatcgtattaccaaacactcagtttgccaaactcgccgttaattagtgtttatctattgattattatatatgtggtttgagttttattctatgggattgttgttgttgatgataatgatatgatggattgcatatagggctttatatactattaatttttcttatacatatgtttatgatataattatttttcccgtataggcggtggtataagtgggtccaaataagcctgtccatataccaataaatgagggaaaataacacacaccacaccacagacttttttcttttttttacttttatactaactggtatatttacatttatactgtatgtttcatactttatacggttaggcttcagatgtatttcttgtcactttaaattacgtttttttttattttttttaaatttataaaagttgtatgg

SEQ ID NO: 342985 - DNA, 645 bp, Cannabis indica
aaaaataattgcgacataaacttaatagcgtaaataaataaatagagcgccctagaccgcccgcagttatatggccctcagcgagttcacacacacaagcgtccaaagttccactcgccaccggcattctagactttcagttaccttggtctgcacatggtaatttgataagggtgagctactaaactcagtaaggaaatgtgtgtcaggtagtcacataaataaaagtaaatcctaactaaaatgcacatgcacatatttagacagatagcaaaacataaacttaattatatcactagtcactaataactaggttctaagctaaatcacataataatgattacgcccgagtccgactttggcaaataaactcgagctattggactaaatggcggagggctgggttcagtaaaatcgtacccactactaaatggccccctatctaccatatagacccaacagtcaagtatttaaccattatcttctcggtcaaaccatgtcacataaactataatctacctaatttaaataatggcaaactactatacattatttaaataacataacaatcataactaaataatgtgaatcttataaacacactatttacatacatacttaaataacatgaatcttataaacata

SEQ ID NO: 342986 - DNA, 561 bp, Cannabis indica
aatagtctccgttgattatttgttatgtgaaactaaattctaaaattatctaattgggtcaaaaagataatatatctgataaaattgtctaattgggtcaaaaaggggtattttcgtcgattttcaagtgactaataaagattttgcgtcggtttaaataaccgacgtataaaccgtagacgcaaattctaatttatttgcgtcggttataaaatgacacaaaaaactattttcgtcattttacaaacgacgcaaaacatataaaaaaaattaaagcattttgcgtcagtttttaagtgacacaacatgttatgcgtcaatcttcaaccgacgcaataagtgttttttccgtcggttataaaatgacagttaggtgtacacagaatatttttcacagtaaaattcttaccacatattaaaaaaaaatcacaactaaactaatattattttgtccctatataaaagataaattaagatcatatatccatatatatattattaactgaaagttcactataaaaaataataataaaaagttaaaattaataagataaattcaaa

SEQ ID NO: 342987 - DNA, 601 bp, Cannabis indica
gggtgtaaatttccctttttttcatttataattttttacttacacataataataatacataaacatgacaaataatgattaagtacttacaaaaattttaaaattcaaacaaacatatatttttactgttaaattttttaaaaatttcatatttacctacaattgaaagttaaatatttacatcaaaaattacttatgtgtatgaattactgtaacagtgtttgcgatgcagatggtgcatattataatatttttttcaaactaaattatatatgtaatttttttaatttctcaaaccgcaaccgcacaacgagatcttaaaaccacaaaaactattccacagaaatatgatgtgttacagtttgagcgatttacattatcatcattatcaaatattataataaaaatttgaaaatcaatctataaagttttaaacaatacaaaaaaaatcttattaaaagttttaacatcataacatatatactaatcatctaatcattatatggaattatctctacaaaaataatgtagtgtatacatatattacacatatttatttttacataaaaaaacaaaaatcatattataaaaattgataact

SEQ ID NO: 342988 - DNA, 660 bp, Cannabis indica
atcaaaacatggaacacatcatgtacaactgccagcgctgggggcatagccaacctgtacgctacttgccctatcctttcaaggatttcaaaaggtccaatgaaccgcgggctaagctttcctttcttaccaaagcgtttaatgcctttcatcgacgatattcggagaaataccatatccacaatctaaaaatcactgtctcgtcactttggatcaacataactcttctgtattctctgagctaggagcattcgcgctctaattttatcaaatgcctcgcttgttctctaaacagcctcgggacctaagaacttcctttcacccacttcatcccagtgagtaggtgatctgcactttcttccatagaaagttcataaggagtcatctcgattgtttcctgatagttgttgttgtacgagaactcgatcaggggaaggtactttacccatgatccttcaaagtcaagcacacatgcccgaagcatgtcttctaaaatctgcatagttcgctcggattgtccatccgtgtgaggatgaaatgatgtgctaaactttaactaagtatccatagctcgatatagactctcttagaatcttgatgtaaacttcatatctctatccgaaacaatggactttgggacaccataaagacgaacaattt

SEQ ID NO: 342989 - DNA, 594 bp, Cannabis indica
ttttttttttttcagtaatgtaagcattatgactatttctttttctcagagatattgcaaaatgggatgtcccggttgagtttaatcagttgaaaaattgcactacagaaaccacaactagtgctactagtacatctactgtcttgccccaatttcattgtgtacaacaacagttgtgtaagattgatgagtatatgcttccattacaggtaataagaataatgtaaaattataattttatatataattgaaaattattgaatagtgtacacattgtcaacttatactttgtaattattaatgaaatattgaagggaggcataataagggaatcaaaccaagtgacattaccatcagctgaatcagatcaaaataacaagcacttctacagctttttaccagccaaagatcagatggctaaaatggaaaagctggttacgttgaacaaaactgaaaaggataatgataaagctgttgaagatgatattgatcttaatctaaagctctctacctactcgtaattagctttgacaagttatgaaaaaagatttcaaccaattatctctctgctatggaattcactaggtgatatgt

SEQ ID NO: 342990 - DNA, 1033 bp, Cannabis indica
gtattgtattatattgaattgcattttatgcaaatatttttaatgtaaaaactatatgtggtattaaatttaatggacacctaaatatataatattttggtatgaattaaagtttaacatagtattatataaaaatatgatatataatcccatttaatataatacaatacaatacaatacgacctaatacgacgttccaaacgagccctaaaatattagtattatgctaacaaaattatatactactattatacatagcaacataaaaaataaatagcatctaagaatgataacataccatcaacaaaatagaaaaatatattatacaacaaaatctatatactaacaactcatatattaaaaaaaaaaatcgacataactttaaaataaaaaatattttaataaaattaatatagatataccatattctttaagtaatttgcttctaattcttaaaaataattattgatttttttatgtggcaaaaaataatataaataacaagttttgaaataaaaataattaattacatacgaatcatttgatataacttctcaaatttcttgacgttaaagcactatgaattatcatgatttttttctttgttaagcccatcacaacaaccctgccaaaatttaatgtattttcttgttttcgtaattttactttttgtttgtgggtgttgattcttttcttttaacactaaaatacaaaaaaaaattatcagcaatgagtaatgaatgtacaaaacatttttattttaaaaggagaaatttacaactccttaagtttaaatatttaaacacttaaaactcttttatctttgattctatttgtaaatttgatgcattttttagatttacctattaagtgttaattagaatgttaatgtgtatatatatactaggttgatgttacgtgcactcacgtataattagttttctttttaattaggtttaattaaatggtgttaagtgcaatacatgtatgtttaattttttttaattagataatgtattttatttttaatttt

SEQ ID NO: 342991 - DNA, 706 bp, Cannabis indica
caatggactttgggacaccataaagacgaacaatttctataacatataactcagcatactgatcaatgtagaagttcgtctaaacaggtaagaagtgcactgattttgtaaagctgtccactatgacccacacagagtcgtactgtcctgtggttctaggcaagccaaccacgaagtccatagcaatgtcttcccatttccactacaggatattcaatggctacaacaaccctgcaggcttctgatgttcagccttcacttgctgacaagtaagacacttaacaacatattcaggaatgtcatttgtcatgcttggccaacagaacatggccttgaggtcttgatatatctttgttgaccctggatgaactgagtaagaattctagaaattcataatctctcttttaatactatatcattcataggcacataaacacgattcataaatcgtagaattcccgtatcatccactgcaaagtcactagtcttcctagctgaaactgtaaagaccacttagtttaatttggaaattagcagttaattatgatttaattatgaaaattatttatagatatttaaataattatttatgttgttatatttgaattctgaaatacattttatgttatatagtgaaatttcataattttgcatttctggtgcccggcaacatggaactcggtgtttggctcagtagaataacaac

SEQ ID NO: 342992 - DNA, 647 bp, Cannabis indica
taaattcacatgccaatattccttaccaacccaaagaatgacagtttgtgactttttctcaaaccaagagtttgcaatagccaatggaatatactgcagtggccaatattcaaacattcatcattagtactttattcatggtatgaaattatctaaaaaaatttacaattttgatacaaagatgtcataataataatgtatatgtcactttattcagaatgatatgaatgagcaacattttctaagtaccagttgtgcatgtccgcgcacatgagctgatctcacattcaattggaagtaaggattgttcgagagaatttgctggcagcctcagaggctatgctaagtcctgaaatgaaggcctcttagtataagtgccttgatttccagtattttcttcagatactggttttgtaaacttctttctttacaattattgctagtagaaaaaggttgaattatatttgcattcaataatagtggctaggagtattattataattctcacctagattgttattatgatcaagacagtatattactacaaaatagggttcttgtttacctggaattggtacaataggggaatttgctactccattttcatgaaaaataaccacttcgaataatattattccaatgctctt

SEQ ID NO: 342993 - DNA, 956 bp, Cannabis indica
attaataataaaatattaattaataattaataaaaaaacaataattaataaaacaataaaaaatattacaataattaatgcataataaaaaaaatacaataattaattattaataataaaataattattaattaaacaatatttaataaatcaatacaaataaaataatacataaaataattactaaatcattaatatttaaaaaaaacgaaaaaaaaaaaaaaaaaaagaactcgggtccgattggcccgatagggtacccattggacccatcggtccaatcggacccttcggagatcacacaattggaccctataaatcggactatcggacccgagccaagggaccccatcggacaatcggacggacccatcggacccatgcacgaccatcgaaccgagctggaccatcggaccgagtttcttccccagattcgaatgcccaatctcacaaacagtcccatggaatcccattttcacggatccgaatcccattttcacaacaaaattcttaaatctaaccaataatgtttcacaaacaatcccaaacaaaataaatctttacaccctttctaaaaaaaaataaaaaaaaaaacccaacataccttcgacattttcggagttggtcggagttgagcgttcctcggggttgagcttcgacgacggagctgggttcaccgtgggttgcgacggagcgttcctcggggttgagcttcgacaacggctgagataggggttttttcttggttcggctgagggagaggaagagagaggtgatgttgatagtttgaaatgtgaggagtagtttagaaaaattagtaaagtggtcatatatgaccaattttaataactttgcatttaggaaaaaaattataggataatgtaagtatattaattcaaatttatatagttagtatttttttcttttttaaaatatctaattcctaaattttcttt

SEQ ID NO: 342994 - DNA, 587 bp, Cannabis indica
agctacttactaggattcaagggctgaaacaggttgctatttcgccggtgtctgagcatgaagaagaagaagaaggaggaggaggggacggcaccggtggcagtggtgatggcggggttaggtgtgacaatgtcgagcttttcttgttccttggggctcggcagagcttgatctgcaatggggctatggttttttgtttgagatttctaggaaagagcagggaggcggaagagaaaggttgaagagatgggaattagggttaggattaataaaattagggtttattcttgagaaataaaatttaaaaaaaaaaaagaaattagggtttatttaggttttttttaatttttatttttttaaaattgttttttaatttttaaagaaaaagaaaaatttttatttttaaaataattaatttttttatttttttttaaatatttatttacgtggaccattaaaaattgtaccacatgtacactatgtacacgtagacattccaccatggcagttaacagccaaaaatggatggaaggggctaagtgctaacagaacttgggtttaggaggttttaccactaaaattttaga

SEQ ID NO: 342995 - DNA, 554 bp, Cannabis indica
aagtgtaaaaataaaaaagctccaaaaaaatatttacttaggaacttttttttaattttcttatactagtaggaaactacaacaaaattgatcatttaagtaccttcctcaccaatttatttacataaatagttaatcgtaacaaatgaaactagacaattaattttgtcataattatctttcaaattaatatgctttaatatttatataaatttatgtattaatatttttatttaaaaatattttattgtaaatcacatcttcttattaaaaatatattatttttttaaataacaaaccacaacaacaacaatcaaaccccatataatagccagcccccaattcacggggacccagtaaaataaatgtaatttttttttatttaaactaaaaaaatcacttcgcccaaaaaaaaaaatagaaaataatcacatgtacataaatatactactataacatgtaccattcactcatttcattttcattggcctaaaaaacttccccatgtgatgaggtagaaacacataggcgtacagtagataaaccctatatat

SEQ ID NO: 342996 - DNA, 916 bp, Cannabis indica
aagcccttagtggtgagacatttaatttttaatattaatttaaaaatatgaaaaaatttataaaaatattattgttataagtataatgtagctataaatttgaaataactcaaacaacaacatattactaagtaaaaaaaaaactaaaacaaaacatcataaaaataaatatacaaaataacaaaatattacaaattcaacaaaaaaaaaatgtactaaaaatataattaaaatatgtattttttagtatacataaataaataaatatactagaagacgaaataattttgttacaaagcttaaggatcaatctggtgcttgggtggattggaatagtggcctagatctgcttatggttaattatttcaatgacattttttcttgttctcaaactgattggggagaggttactagcagtgtgcaaaatcgtgtttcttctgagcaaaatgctgagctactgctgcccgtttcagaggaggaagttcgcaaagcgttgtttcaaatgcatctggacaaagctccagaccccaatggaatgaccccgggtttttttttagaagagttggccgattgttaaaggggacatcattgaaatggtaaggtattttttcaccatggcttatttcctccatatctgaataaaactattttggttttaatcctaaaaagaagcatcctatggatatgggggacttgagacccattgctttatgcaatgtgttatataagattgtgtccaaagtggtggctaatagacttaagaacgttatgccaactattatatctgacactcaaagtgcattgctacaaggtcgttttattttggataatattatgattgcttatgagattatgcatcatttgaagagaaagtgaagagggagggggatggctatatggctctcaaacttgatgt

SEQ ID NO: 342997 - DNA, 545 bp, Cannabis indica
atatgtatcaattgatcagagtagaatcaaaaaaaagaaaaaattacaaaagtttaaaaattattgattgttattggttattgatcttgaatatatattattgaaaggtttaaagttactaactgttgtcggttattgatcttgaatacgtgttattgaaaaagtttgaaagttaataattgttattggttattgatcttgaatatgtattattgaaaatttaaaagttattaattgttattggttatagatcttgaacatgtgttcttgataaacttagcaactgatgttattgattattattaattattaattttgactatgcatcgtcaacaaagttagaacaccatttacaggttattgatctcgaatatgtgttactaataaaaatatacatatatgaagttgttagtttgttttcaagttctatctagaacatgtaacttgaagatatagagatgaaatgggagtttagatatgatgtataaattatgaattctcatattctagtatttcacactgttctcagactttgtgattaatta

SEQ ID NO: 342998 - DNA, 1299 bp, Cannabis indica
aactctctctctctcttttttgttccacccaagagcagctagggttactttgctcttcaaatattcaagaaattcagcagggttttaagtgattttaatcaaggtaaaggttcttaactcttctcttcatgttttcttgaattgtaagaaaagaaattttgcatgaaatgatgttttggctgctatgcttgctgttagggtttgatatagttttcaaaggttgatatatgttagattatgttgtttgaaacatgaattggtagttgtttgaaggtttagccaagttttgagttttagaactcaaacttggagctttaatggtgaaaattgatactgaactttgattgttgttctataacttggaatatgtttattggggtataatatgcaggtttggaaagtttgattgagtttggaaacattttgggttggggtttgaattttgttggttttttggataaaacaggttacccagattttgtagcagggaaaacccgatttttagcttgtagtttcgtgtcagtttcaggttcctaattggttgagtccctgctagtttagagtattaccatgttaagttgcagtagatagggttttggttttaaaacttagtcccgattgtgatttagcgagtcacttatgtgttttgttatcgatgtgatttaggagcctataattcaccgagcagttgttccactcaggttgaccgacacaactgaattctgaattgaggtaagattagtataatatcatgcatatgttattacatgttcaacgtacatgttgttatgcctattagattacattgatagcagtaatagtatacatagagttgtgttgatactgataaatatatgttcgctaaaatactgatcgatgctgtcacatcaatatggctagagtataactagcatattgagtataggatgacattatgatcgatagtattgtcttgtgaacgttctagactcattaccgtgtgggacatggggattagggttatgatcaggtgtatgggcgccaggttataacccaggtatttgaatgttttatggtatgcttttcttactgagtctgtcgactcacagtgctatctttatgtgttggtaagggcaacggtaaagttgaggagcggtgagtacgagcaggtgaagattgtacatgttggggcagttaggcctggagcgtacgatctttggggacattgaggcttttgctgtatagtcgctgggcaacaaacttttgtatatgtgtatagcaaacttttaaaaagtattttgtaaacgggatcccagagtt

SEQ ID NO: 342999 - DNA, 460 bp, Cannabis indica
taagaaattaaattaagaaaataatcatattaggccataatcaatagaaacaattgaaatcgaagccctagtttttattaaatgtcaattttcttaaataattgcttcttactagttttcttatttttagttctttcttaatttttatttaaccaaatagaagtaaaagtttaatttcaacgtacttaactacaatccctgtgggatcgacctcactcctggtgagtttactacttgtaacggtacgtacccttgcgtgtgcaaaatatcacaacaagttataagttagtgaactgagagatccaagcctagccatctcatacatgtgctattgtggttgtgatggcgggttaaaatgtaggtggagatttgtcttcacggatttgctccatcgcttcatgagaagagtattaggtattcttcttatgtttaatcttttcattgtagcccataaatgtct

SEQ ID NO: 343000 - DNA, 908 bp, Cannabis indica
atcaccttctccaaatggcaagttatttccacgaagctcagaatcatggagctattatggatcagacaacacaagtgagtctaatcttgaatagtttgactctagcttttctgccttacactttaaattatgtcatgaataagaaggaacaagactttcacgagttggttaacgacctttagacattttaaaatttgattggaggactagaaaagaaaggatctaaagcccataattcttggaatgctaatggggcggctaaggctgaggcaaactttgcctctacttacaaacccaagagcaagaagtagtggaagaatagcaaaaagcctattcaagctgtgaaaacagttaaaaagaaaaaggctgctactcctggtgatacaccaaaaggaaaatgcttctattgcaatgaaaagggccactggaaatcccaatgccctaaatttctagcaaagaaacaaggtatttattttcatataaactgatgagttttagagaattattatccacttggattattaattctggacctactaaccatgtttatttgtttttcttcttatttcagctccagctgcttgaactcggatgctatcttagcgagttgaatcggatggttggacaaatgggtggagctagtccaagatgaagatgaagctcgaaatcttcttttattatttttgaattaattgttttagtttcaaaacgatttggatttcaattattagtttgggattttattccctatttttcatattttgcagacaattccttttattttggaaaattttataataaagttttctattttgaaaaatgaattgcatttatgaattgagcttcacttactttatcttgtgtatgccagtacaaattatattcatatgtttaatgattgtatgtgt

SEQ ID NO: 343001 - DNA, 753 bp, Cannabis indica
agatcaatctttgaaaagacaatcttcccctgaagttgatcaaaaagatcgtcgatcctaagtaaagaatacttatgcttgattgttagcttattcaattcccggtagtcaatgcacatccacaaagatccatctttcttacttaacaaacaatactcgagctccccagggtgacacattgggtcgagtaaaccctatgtcaagcaacccctggagttgaatttttaattctttaagttctgctggaattctatagggagccttagaaaccggttctgctccaggtgccaagtcaataacaaaatcaatttctctctgaggtggtaaacctggaagttcgtcgggaaaaacatctagaaattcctgaaccaccttgatgtcttctggccgaacagggtcaggccgagtggtatccaataccacggccagaaaccctagacatccctctcatagcaattgcctagctgttagcactgaaattactgggatccgagatccctgaaccgaaccgacaaaaaacaaatggttcttcaccttcaggttggaagattaccatcttcctcttacagtcaatactggctgagtacttggacaagaaatccattcccagtataatatcaaaatccactaaattcatctctatcaaatcagcactcaactctctatcctctattctgatcggcatagacctaatccaccttttggagataactaactctccgccaggcagtagggtgttggaaatattttacc

SEQ ID NO: 343002 - DNA, 824 bp, Cannabis indica
aataacatttaatgttgcatggttcacatgatttatttcgatcactgtttttggtcttggccaatccctgacggattctatctttcccggatccactttgatcccatatttactaacaatgtgtccaagaaaagacacctgagacagccaaaatttgcacttcttgaatttggcatataacttatgttctcgaagtcgctgcagaaccatccgaagatgctgttcatgctcctcttctgaatgacagtatacaaggatgtcgtcgataaatacaataacacaaatatcgaggaaatccttgaataccctattcatcgaatccataaaagttgcgggagcattggtcagtccaaaagacataaccagaaattcataatgcccatacctagtgcggaaagctgtctttgggatatcctcctctcggattctcaactgatgatagcctgatcggagatcaatctttaaaaagatagtctttccctgaagttgatcaaaaagatcgccgatcctaggtaaaggatattgattcttgattgttagcttattcaattcctggtaattaatgcacatccacaaagatccatctttcttcttaacaaacaatactggagctccccagggtgacacagttggccgagaaaaccctatgacaagcaacccctagagttgaattttcaattgtttaagttctgctgaagctatctttaaggagccttggaaaccggttctgctccaggtgccaagtcaataacaaaatcaatttctcttagaggtggtaaacccagaagttcgtcaagaaaaacatctagaaattcccgaaccac

SEQ ID NO: 343003 - DNA, 551 bp, Cannabis indica
aaatgggagaaaagaaatacctaggtctgaaaccagtgcaacagactaatgaagctataaaaaagattaaggccagaatgcttgcctctcagagtaggcagaagagttatgtagatccaaagcgcagaaatgtagaatttcatgtaggagatcatgtatttctataggtgtctccaatgaaggggatcaaacatttcggaaaaagaggcaaattatgccctagatttataggacctttcaagattctcgagaaagttggactagtggcatatcgtctagctttgcctccaattctatcagcagttcacaatgtgtttcatgtttccatgttttgaaagtacatttcagatcctgctcatgttctgagttatgataatcttgagctgcaaccaggcctatcatacgaagtacaacaagttcaaatcttagacaaaaaaaaaatggttcttcagcacaagaccacagctttggtcaaggtgctcaagagaaacaactgatggaaatattttaccaggatctagatttactaccaagtatgtttcattaacatc

SEQ ID NO: 343004 - DNA, 1263 bp, Cannabis indica
cgcctctaaaggcttgttttgtaatagtggttaaaagatccagtatttctatttttctgatttgcaactgttatacccgaaatttggctggaggacacgtgtcaagataaagggaatgtgaatcggtgccatatctttttatggaataactcattaattacgtaagtattagagtatatctgcaacccactgactgaaaagtcttaagcgaggagtcaatgtacgaactggtacttagagtattaacgagaaaccatatgtcgttaagggataatagcgaggcaccagagaagagtaacacatacctcagcttgcaataagcaggctaagtataaaaatcaaaccagctcagaatatcagaatgcgagatgaccatctctctacgagtagtttcatccactaacggaagagagactcacaaccctggtatgtcagcagatttccttatatatgtgatcgacgcaagacacaccttgtcgatctcggaaagaagagtggttccagctcgccattgggatcactataatcaagtttctgtcgagacatctccataataaataattaaagacgtgtttaatacacgatattcctaacccagtaaaagtgggaaaaccacagctgtatgactttcaaaatcatgcactgcgtttacattttgtaatatgaatcagatcccacgatttaagggataataactgtaattacattttggtcacccttgtagttaactgccactatacaattataaatagtggcaggcaatctcaaaaaaggggacgaaaagactcttatacaagaggccctaaaattaaaagactcaaaaatctaaataagattgactcgtggaatatgcagaattttaactgtaaaatcacgtaaaaacctggtgttcatattttattttattgttttattatttatgtgttgaatctaaatcgtgagactcaaatttggttaacgaaaatctgcgttaatagcaaccaagttgattttcctccaaaaccaaatgagttcccacagacggtgccaaatgctgtcggaggaatttggacaacaccaaatagaaaataaacagttgatatttaacttgaaaacaacgagtactcaacctaaaaaagtgagtattcgaacgagactacccagacaatagaaaagtaataagaacaatgaacacaaagaagtatagtggtccagtccaatcacggtctacttagtccacgattgcaagggatttctgtcttgtcttattcatgttggatcact

SEQ ID NO: 343005 - DNA, 890 bp, Cannabis indica
acaactttacccagcatgacaacgaatctctttatgaagcctgggagagattcaagaacttattgaggaagtgcccaaaccatgggattgaaaagtggttacaagtgcataacttctatactggattactaaacaacacccgaacactgatagatgccgctgctggtggagctttcatgaggaaaagtgctaatgaggcgtttgaattacttgaagagatggccataactaatcaacattggtcaacagagagaggctcaactaaaaaggttgtgggaatgcatgaatttgatgcaataaccaagttgacagtccaggtagaggcattaataaagctggtgactgcacaagcaaaacaagctcaagttgtctataagctgtgtggaggatctcatgccactgacacctgccctatagatgtcgacagttttctaatggagcaagcccacgccattggaaactatcagaataattatggtcttcagcagaacttccagaagcagttttatcctcatcaaaatcaatctcaacaaagccaacaatatccacaacaacaacaagcctctagtggagggtgtaatcctcaattagacacgttactggaattcatgatagaaattaagtcttccattaaagtcttggaaactcaggtggggtagttggctactcaaaacactaatagggctcaaggtaattgcctagcactattgaagtcaatccaaaggagaactataatgcaattaccttgagaagtggtaagacctatgctgggccaaacaaagatgagccaaaggaggaagatgatgtagagacatcacctacactagaaaaggagaagactactgatggtcttccacaaaaagaaactccacctcccataagcattgacc

SEQ ID NO: 343006 - DNA, 482 bp, Cannabis indica
gcataaaacccaacaaggacaacactcgaaaaaccagaattgaatcgccaatggaaaatccaataacctatagtacccaccatcctcatcactacgaacaaccttcctaagactagagtcaatcttacctttcaaagattgaatagtcatatcaaaacagtgcttaccccaaccaaattcattgtaccgatcactatcaacaacatctatttcctctattgaaacagctttacccgggggaccacccaacaagtaacactgcacaaaatataacacagccaacttgactgcaagatcgtcattactcttgagattgtcagcaataaaggcagtttgaatgagttgcagaaggacttggaatgagttgtatccccatatgatgtcacgggagatctccatccatacctgtcaaactattgttatattatttataataatataatatgtagattaaatatgtaataaactaataaaatgtaaca

SEQ ID NO: 343007 - DNA, 1697 bp, Cannabis indica
aaaaaaagtatgggaaatttgatttttgggttttagataaagtggtcatatattatcaatggtgacatgtatcagtttaggaataaaatattaagtatacataaatatgaaaaatcaaatttcccttttaaagagtgttatacattgaagtgtttgtagaagtaagagtgtcaaaaatgatgtgaaagagagataaaataaaatattatattttttttttgaaaataattttattaaggaatagcttcagccattacaatgttctttagaaagataggagcattccgctcgttaaagaaacaacctgacaaagaacaagacgcccgcgcaagagaatgggcagccttgttagcagatcgatacacaaaggaaataaaaacattctttaaagaggacaaaatcaagcgacaatcctccaccaataagccaaagttagaaggcatatggacagagctgtttattgcttgaacaaccattagcgaatccgtctcaatgaacacatcctcccatcctttcctcttaatccagcttagtgcttctttcataccaacaacttctgcaatttcgggcagcaccactccaattcttgaatccgagattgcttctaaaagctgacccgtatgatcacgcgctacacaaccaaaaccaaacattcgttgagattcaaagatagcaccgtcaacatttaccttgatcttcccacccaatggtttgcgccaaatgttgctgttagaaagtacaccagtagcaaatgtagctgctgtgttcttgtttgcaacgcgccattgatcaagagccttccttgccgactgaaccactcccaacgctgtacagtttttgttctgccagaagacttcatttcgagtcttccatatactccaagaaatcattgctgcatcgactataacctccggttgcttgctgtccaaaatactgaaaaaccaggtgctgaaatcgtccacaccagtagcagcagtagttgccgagaggttccaacaagcttcggcaaaccgacaaccaacaagcacatggaaaatcgtctcataaaagacattacaaagagggcaaataagatcgacattcacatgcttagtgctaagttgaactttcgttggtagagaacccgaacaagccttccacaagaaatgaagaaccttcgaaggagcatcaattttccaaagccttttccagtaactatcatcatcaaaatgtagccaattgccgctagaagatcgaagataattataggcacttttgacagtataaaaccccgattgttccatcatccaatgccacgagtccactgttgttgaatcactcagctgtatactcagaatcagctgagcatctcgagcttcaaacatatcttcaatgatctcagcatcccaccctttctcttccatcaacatcaggttggaaaccaaagtgcctttgagaccttggttgaccgtgagaacataaggccaactatcatgaggcagccatagatcatgtaatacactcacagaggagccatctccaatagaccttctagcaccctgccgtacaagggattgagcctcccaaatactgcgccaaataaaactaggattttgtcctagttcagcattgaggtaagaccctctcgggtagtatctagccttataaatccttccaacaagtgagtcttcctttgtgagtaatctccacccttgttt

SEQ ID NO: 343008 - DNA, 1149 bp, Cannabis indica
tttttcttttcttttcttttcaaatttgtggcatacttaagtttaattattactaatagaggatacttatgattacttaaaagttttatgtttgtaagtggcataaatcaaatatttatttttagtagtataagtattcaatgtttataaaactataattttctttcaatttcattagtacaaaatccgttttgaatttattagaagaacatttgaaagtaactaatactatatatttgtctagatccaatgatctagaatttgagctttatatatgctttgtttaagacaataacagggtatgcgttaacgaaattagaaaaaaattataattttacaaatatttggtacttatgccgctaaaaataaacattagatttatgcgacttttttctattttttgaaaatagatttatgcaacttaaaaacttgaaatttaaagtacttatatcgctatttacctatttttaaagtaatagtacctaaattatatttgtagaactgttaggttatttttagtattaaatttaggttaattttagcacatttttcggtttaatttaaatcatgtttggagcatttttacgcttttatcttttaattttgcagatttaaaatagatgaagagttggaaaatatcagtagaaaaatgataaaatatcgtataaaaatatcttgggaaaatgtcaaattcggatttagaaaaaagataaaatatcacataaaaatatcccagtggaaaatatcagaatcaaatttggaaaaagataaaaacatgtggaagttgggtacagagagccacacgggctgcgacatggtattagcatgccacggcccgccaacttggaaaaagtcaaaggaagcaaccacatggccacacgggccgcggcatgggtttagcatgccgcggcccgcctctttgttaacagagagaaaaaaaatatctgaaatatctggcgggaggtttctagaaaattcaaatccgaatggaatttaaacatgtgcggttttccacctttttaggacctgaatacctatataaagagcagcagagagttgatttaagcaagcaatttcagagagaagaaatagagagttcagatacagagtagagggatcaactgcaatactggagacatactgctcagg

SEQ ID NO: 343009 - DNA, 806 bp, Cannabis indica
atggtggactctttgaagaggcatggatctttcttcacttggtcaaataatcaagggagtaaggatagaatctattcgaggatagatcatattctacagggtctcaatcaacactttttcgaaggaaatacaaccctttttggagcaaatacaccatcagtaccatggcagttcctaacaatgccaaagacttctccgacatcacctttctcggtctcttcacaagaagactcacttctttgacttaaatgaatgcttgacaaatataaacaacaacaaaaaaccagaaagggaaagagaaaataaagcctagataattctcctccacgagcatcctccctatcgaaaaaagagccaaagcaattcatggcccaacgaattgtgaataatcctatttctaccgtgatccatcaaacatatgaagaatttgacaatcagtcttcttcctctgaccaagaagagacttctaaaacttagtctcaagattcagatactagtgatgagtctcaagattcagatactagtgaagatgacgttcccccacattttatggctcaatctgtagaagaagcatactctcaaactgagcctattgtcaaaccagaatccaatcatcatcaaaagagtaaatattctaagtttcaaacttttactcttgatgacattcccccatctaaatggcgagaaagattacaagaattccaagcttggcttagcctggaaacacaaaaaccacagacacagacgaggacgatcctcttgaattttgtctcaagattcactggaactttgcaagattggtggac

SEQ ID NO: 343010 - DNA, 497 bp, Cannabis indica
aatagatattacagtaaatttaacaaatctaatcaaagttcaatattggtcccatcaaatgtatactccatacattcgatactggtaaactttgccaatgccctggaaaggatagaacacttattaaaggtgtaaggatacccatcgctgattaccatgccagtctaaatccaatgaattgacaaatcagggaattaaacttttgaacatataaatatgactatattccactgcgctgacaacactataatcatgtacaaacaaatatcttctggactcaatagaatttatacattaaacaataataatgaaataaatcatgtgaaccatgcaacattaaaatgttacttctaatatttattaactagtaaatctgattatattgaaatgacttttatttacggcacaaaacccaacaaactcccactagcagtaatataaaacaaaagtgcatttcaaataatctcaataccccgatatacaaatcaaatgtagta

SEQ ID NO: 343011 - DNA, 628 bp, Cannabis indica
tgttgggtactctgtgtatcctgagatagaccttctatgtattgggaattattttaccaggatctagatttactaacatgtatgtttaattaacaccctaaatatgaattctctaatgagatgaaattaaacacataagagtttagaaaaccttacattgatggcagtggaataatatgactcatttcgctcaaatctctaacccttattccttttggtcgcagagtaataataagatctgagcctagatccccttctctccttcagttttggttgaccaccatcttctgcactaggattgagtacttgacttgctatgtgtgggcatggtactctctcactgtggctcgaattaatgaagaacaatgataaggtgtgaaatcactatagaagcagcctctcatctactagttgtttgacagagttagataactagatttggtaggttgaaaagtattggatgagaatgagagcaacatattccttttatagtatttcaactagggtttaggatttaattacattgattaaaagaagagaaaataatgggcaaaaatcacataagtggccgaccatagtagtgggcctcactagttacaaattttccactttatttcaactatttatc

SEQ ID NO: 343012 - DNA, 777 bp, Cannabis indica
tttttttttcctttttggggatatgggccagaaaacggccacccagtctgaattttctgacgtaatttcgattttcccaacaaatgaagaaagaaaaaattgctgaaacttttagggttagagcagtacaatattacacaggttaaagacttgaaagttacccacccaataacaattctctacgaaaattgaacaatttcttctactatcagataaagtactattttaagtttcgatttgcagataagagataaaaaaaaaggtaatagttgaaaaaacagcttgactcttcagcttaattgctaaaactctcttgatttttgaagaagtttgttcttttgggctaaactcggcccaagtttgttctgaatgggcctgttcttttgggctaaactcagcccaagtttgttctgattgtgccttcttaaggcccataaaagataggacaaagtttgttacttaggagacgtttggttgggaggaatgaaaatataagaatgagaataggaataggaatggaataaaatttaaaatgcataaaaaaattgataaaaaattcattaaattttttttcttgttatattggaaagatttctttttaaaatggtttttttcttatcacattgggatgatcattcctttctttttaaaatagaatagtcattccaccaaaataatagaaagagcattctattgaaatgctattccaatactttaaaatacaaccaaacaaagaaatgaaataaaaattgtttcatttccattctattccatttc

SEQ ID NO: 343013 - DNA, 550 bp, Cannabis indica
aacaacaacaacaattatgggttcaaccaaggtggtaaccgaaggaacagtgggttctatcagcaaagaaatcagaaccagacacagaaccaacagtacactcagcaacaaagctctagtggaaattctagtttgcagaccgatttattgctacaattcatgactgagtttgctaactcaatgtgcaatctcaagaactcatccaagttttgttctagagatttagatggactcatcttaaatccaaagattctctccttcaagtaaatcttgttgatctatgatttcttttgaaattgctcttccaacttattccaaattttggctggtgtatcttccttgtcaaccaatctgattaaagcatccgataagttgaaaatgattaattcggttgctgtttccagcaactcttcttgctgatctttggttgtatcagttgaccattccacaggatcttttagaaccttcaacagtttgtgttgagccaatagagccctaatcttcttcctccaaatacgataatcacttgaaccatcaaacttatccatat

SEQ ID NO: 343014 - DNA, 730 bp, Cannabis indica
gccaaattttgggtataacaaccccttaaaaagttctttttttattaataagagctttttaataattatagagggcattttcgccaaaatcctttcttggaaaggatgcctccttttattctagcggttgtatggtttcaaagatcattatgaatcacctattcatattctgcacgattcccagccgttagatttctcaatcattggctttcttgtcattgtactttgtgtgtaaaaggacggctcaagcttgtcatttttcacaaaccttctagctctttagtgaaatccattttcagaatggattacttccttcctgtcaaaatgtctcttctaacttcaaaattttattctcccacactcgtaatacccagatgcaccaaccaattttcattcgttcctacacacctcaagcctcaatttgggctagaaacgatggattccaaggctgaggagcttccgactaatccaacccatgggaacctcgtgacctggcatggttgatcctcacatgtgttcccagagggtattaatctagtgagcgatctcaaagatcctcctacggctgatgaagaatcccagaggaagattggtatggtttcaggtaaatctggggaggaagttggcgtggtttgtatcagagaaaccaaccaactcaagaccctatcctgcgccagaagatctttgcgtcagcctctctccagtgttgagaaatttcctgaggctggga

SEQ ID NO: 343015 - DNA, 512 bp, Cannabis indica
ttaattataaattaatttgtaaaagcatacacgtggcgtccctgtgggacagggcgttacataaccccttgcttaatgaaaattcacaagcaaaacacaatcttatttataattttaattgattaattaaaactaattaattgagtcaacaagacaatattatctcagataatatggggaccatgaacctatgtaaccaaactcctaataagtagatctagaatttaccaagaaaatttcctaacttattaattcctccaggctctactatagatttggaattgcactcttaattacatagaacactttattcaccaagaacgaatacgtgatgaattatcaattgttttaatccaaataatcaaagatcctctatagatgatttacatcgagtagggataaatttactgttctacccctcaatgtattttatcattaaaacacttagcttcgtataaatgatatttctataaactaatataattactaaaagaagagctcttccatttatg

SEQ ID NO: 343016 - DNA, 622 bp, Cannabis indica
aaaatataatatatcatgtaaaaacccaataattataaatataaggtggaccctagtgtaataatgtcaaattgtttattgtaaaatattcttagtttgagagtttttttttcagctaattttgtacactggacaaatagaataattgtagaaaaatagaaagagttgtacaatttaaaaacattattaattaggcaggtatataaatgaagtaatgcattaataaactaatagtacattatatctaaactttatttacttattaattaagaagaagatatgattgccttgcagtgcaacataaatagctaggtagaaataatcatgtagtacagctttgattgtttaatatgtgacgtataggttaaccaattatatatattatatataaatatccttataatgtaaaatttgttagtatcaatcattgactttttcatcctcatccaaaatatatatatttatttttttatatataaaatattgttatgtaatagaatttttagtttgacgatatttttttaaatttctactttaattttaacagaatattttttttattaattttataatattattatgtatatttaaaaataaaaattatatgaatattttatataaa

SEQ ID NO: 343017 - DNA, 717 bp, Cannabis indica
atccccctctagaaaaactcgcgttgtacctagtccatgcgtctcgcaagctaaggccatacttcagggctgcccccataaaattgttaactggtcagcccttgagacaagttttatcaaaactagatgcttctggaagattgataaaatggtcgattgaactggggcagttcgacataacataccatcctcaaacatccatcaagggccaagctttggctgacttcttgatagaaggtataactccagaagaaattccacctgatcagcgaggcaaggaaacctggacattatacgtggatggcgcatccaacaagcaaggttcgggtgtaggggtaatattaatatcgccggaaggctttaagtttcactatactttgaggttccaatttgacgcatccaataacgaggctgagtatgaagccttgatcaccggcttaaagatagcaaaggcactgaaagtcaaaaatctcatttgtcatagtgattcacagctgatcgtgagccagatcctcggggaataccaggccaaaggcttaaaaatggaaaagtatttagagaaagttcagaagaacttggaaagattcgattactttaaaatcgaacaacttccgagagaacaaaatccaacgttgacgccttagcaaaactggcctcgcagaacgacctggatgaactgaatcttgttccggtagagatgctgagcgagccaagtat

SEQ ID NO: 343018 - DNA, 572 bp, Cannabis indica
ttacttggtaaattctagatatgcttattggaagctcggttacataggcccatggtccccatactagttgagtcaaactgcttgtaagactcagttaattgattttaattaatcaattctaattctaaaattagactatgtctagtttatgaatttttcactaagatatggcttgattgtgaagaaatggtattttagggttaatttattaattaagcgactttgtggagtctaattaataaatattataagtgacaattttatttgataattattttaattattaaataaatagttttggcatttatagggttaaagttgaaaaaagtggtatttgtaaaaaatagataaaatagttgagaaaaatgacaaaaaccaaactagtgtggggcccactctgtggccggccactaactatcatttttactctatttttatcaattttttattccaaataattcaaccctaaccctagtggaaattagtataaaaggaaggctatggtctcattatctgactaatgcctcaaaagctaaaaacctagttttctctctaggtttatgagacatctt

SEQ ID NO: 343019 - DNA, 884 bp, Cannabis indica
aggctgttcagactagatggacgccaggcaaaataccaggagtcagggcaattcggtcaggtcaaatgaaggtcagggagcttagtttcccccaaatgctcggggtcgaggtagaggtcccaggggcaaggctcgtggccagggtgatgctaacccgccacaggctgccagacttcccaagctacataggaagcccagaattgggaaaataggtttgcagaaatgcaagccagaattgaggaacaagacagtgaaatccagcgactaagacaacagggtgttcctgcaatgtctgttccagaaattctagtggcacctgcccctgttgtccaggccaaacctgcagttgcaaggaatcggatggaacctctgtatgaaaggttctgtaagcacgcacctccagttttttctgtgaggtccggatttcatgaaagccgagcagtggctaatagtgattatgagaattttgaatttaatgggcgtcaacgggaatgatagagtggtttgtgccagttttcagtttcaggaagatgcattggtctggtgggacatggtgtccacgatacacgatgtcacagcgatgaattgggaaaagttctcggaacttttcaatgtgaagtattataatgaggccgtcagaagtgccaagagaaaagagttccaggccgtcagaagtattatatgagcgttactgagtacacaacgcagtttgatcagttggcgaggttggcctcgggaattgtgccaaccaatttcagtaaaaagaaaaagtatctggatggattgaatgtgaagattaaacatgacttgatgattactaccgacgacaaaaccacctatgctgaaatggtggaaaaagcactgcgagctgagggcgcacttgg

SEQ ID NO: 343020 - DNA, 863 bp, Cannabis indica
ctcttggtgcagcaaggaaccttggattttctttgtgatttcaattctctttggtgttcaattcaagctaggttagattctaagcttctcttcctttgttttcttgaaaaatgatgaaaaaatgagtaaatgcatggatgattttgatgatgttgctgctgctgctagttgctgttgttgtttctatgtttcaaatgttgaactaaatatgtttagttaggttaaaatgcatgctagttgttcttgctttagttggataattttcttgttaaaaagtttggttttcaaagtgaaaattgaggatttggtggctgttgttattgcatgaattatgctttattttctgcagtgtttttatgcttgattatgtagttctaatctaattttgaggcttgtaagtgagctttagccaagtttgagtttgaactcaaagcttggagctcacatggtgatttttcattctgtgctttctgggctgtgttgatgctttagaattggtctataggatgtttagaacaggtctggaaggtcttgtgtgatttgggttggatttgattgagttgtgaaattttgaaaagtttttgcgaagaaccagaattccgattgtgcatccacaattccggatggggttctgaaaattcccagaaccggaattccggttgggcaaccgggctaccggttgggtgattttctgaaaccctagttctccttgtttttatgttatttgtggtattgccatgttttttatcgatagggttgtgatttttatggtttaggagcctgtaatccgccgcgcagatagttccagtcaggttgaccggcacacctgaattcggaatccaggtaagattagtataacagta

SEQ ID NO: 343021 - DNA, 679 bp, Cannabis indica
acccctcaatgtattttatcattaaaacacttagcttcgtataaatgatatttctataaactaatataattactaaaagaagagctcttccatttatgtctgttaagccaagttctaagaaaattatcatttcacttctatatagttatagaagctatagattctatatttatgattagcgctctcactcaattgcactatcatgtttccaagatgtaagtattgggccgatcaaattggtcagctttaacgaacaagtcaaagaacacaaataatacagttaagccaaaacctaaccatttcaacattaagatcttttaatttaagatcaactaagtgatattgacctagaaagatataacaataagtttatgatattttttccattgtcaatatcggtctagtccgatgtataccccaaatatctgatactagtatacgttgctaataccctagaaaggatattcgacttatgtaagtgtaagtaaaatttattgttaataatcacgtcagtttaaattcagtgcattaattaatcacgggactaaagactttaaagcatataatcacaattactttctattgtgatgacattactataatggtgaataactatatgttctagatttaatagaaattgtatattaaaactataaaatgaaaactacatgtaaacata

SEQ ID NO: 343022 - DNA, 782 bp, Cannabis indica
tcaatacaacatctaatccgcacaagtgcggattttagattttcaatccaatccaatcagcgctaagtgcgaatatccgcattttagcaaattggattagattggatcgtgcggattagattggatcggatacttagtgaacaccctattatatccactttataatgctaggaaagaaaaacatgattgaaagggatgtggtattctattgtacctgccaaaatgaggttcgacgtgctttccagttttctttttaatcattctgatgtgatccaatattatttagagaaatactaaaaggggcttaggatgttgtgtcattcaatattaagttatatataatttaatataataatttaatttaatatgtgaagtgtggatttttacagttatgcggattgaatttaattaaaaaatttaaaatttctatttgtattgattgacatgtaaaaatagccactttagttcaatttacaaatatttatgtatattttttaaaaaattatatatacaattgatgtaaaaaaaataatgtttgaaatatttaatatacacgatataaatatattttaaaatttaataattattaaatgtttattctattattatttataagaaaaatataattttaaaaaaattgaacaatttttgacacatatttttttttcttaaatttgttatttatgttatatttattttaatttgttattagagacataagaaaataatcattattttattttgttgattgttatgtgaattttttttttaataaatattaa

SEQ ID NO: 343023 - DNA, 746 bp, Cannabis indica
taagaagttggttgagatattttttggtgaattaaagaaggctacaatatacagggcatgaatatggctggaataatcaatgctatgataagtatgaaattatgtgataccttagatggctagtatattagaagaagcaatcattgaacataactatcagaatctatcggcattacagattcaaagttcaccactatagcaagataataccaaagtagataaaagttagtatagaaaactagctaatctcataatcaagtcaacttgattgaagggggtaatggaggaccaagcaccataggagagattagcaaagaaaatacaatatagtgatacaagaaagagactacaaaaggaaccgacagtggttacctaggaaaatgggaaggcgtgacaagtgcaatgaatacatggataaaggatatcaagaggtgaatgttagacaaaaaggtggtcgaaatggatcattaaatatttatatatagaagaccttttaaagagcttaaatgtttatttccaagtgtcatggaacaagtgtctatcgatgagtgggtaacacctatgaaattgaaagaatgacattgtagccttatagtagaaaatcaagtagagaagtaagatttttataggtaataacattcaactaaagaatgggaatgattaaagacaagtttgcataaggtcttctaccctactctttgtgtttgttattttgtattgtataatgtgttctcaagtgacatgta

SEQ ID NO: 343024 - DNA, 630 bp, Cannabis indica
tagtttcaaaaatatcaaggttattttatttttctgtctttacaaaataaaaaaaaaaatttgtgaccgattctgtcaattgagctttcttaaaaatttttgttacttttcttgttatgtttcactattttcttaggcactattttttgctcttaagtgttgattggtgctttatgtgtctatgtgctctcttgttcgttatttgcaaattattttgggagggcattttttgaaaaaattagaaaaaaaggggggcatatattttcgtttctttggtaattttttttcttttattttttcatttatggaaacatgttttaattgctttctatctagtgtgtttcctttatttttggagatttggtcttattcttgtggtgctttaggaaacttgttcttaattttttaattattttttggtttccttcttggtggcattttcggttttggtagggtgtttaattcttagattttgtggggatatgttgtttgctttttccatttaacgtaaccttgaccaatttttgaaaaatctttttggtttccttttttctctccccacgtggtgtctaaggtaaggaagttactttcttttttattttttctgattattgggtaattaaatttgaa

SEQ ID NO: 343025 - DNA, 519 bp, Cannabis indica
tgcaacatctagctgttcatcaatagatgacaccttagacaagtatttacaatatgaaacaatgaagaagtttataaaaataagaatcactttgactctcgccaatcggaacatcgttggattcttattttaaatttgaaatcatcctttaatttttcctcttagcttattcatttcgaattagcttaaataatatatcattggatgaatggtttataaatcatttgcttatgatgtcattctgttttcttataagaaattgaatggcgcattatatttctgacattccatcccgaaatgatataaatcctcaatcttgagtttcctattgtagatatgtttactataggcaatttaatcttagagttagattagtagtggtggtccaagagagaataattactcatgtatatttggttaaatttaagtctttgactttaaattttagattccaaatagaaattttatatttctatttcctagaacacattacacattacagtatgactttcacaagtt

SEQ ID NO: 343026 - DNA, 1000 bp, Cannabis indica
gttaaggctagctaataggctacctagcctatttaattcaatgaacatgtatataatatttctctcgtaccacacttattaaggtacctaaccagtggtacattaaattattacttttaaataaacagctcatcaaggaagagattattctaagataatctaagctttatcaaatatactcatagtatgtttctaatattccattgatcttcttaggttaccgacctttctagaataaacattatactactttcgctttaacctacatggttctcaataatctttttctaatccttaacatcatagccaaagatatcaaccttggaatttcacacaattagactattccttcgtataaattccatatccttatttgttgtataaattgtctatactgacagattttattttaactcagtatttccaatcgttactactcggtcaaaatcataagatcccacaatatataattcataattatgtctttccattccttatatgggacctcctaagtcgacctactgacttaacttaataacaagttaagtattcatttttaataggtattcaattagagcatttcttatttccacccagtaacataaactcatcttgataccttgtaaactttactttttaacacattctttcctcttagaaatctttggaacaactattgattctgcatcctaatatgaatctttctagcgtactttgtcctcactcatacgcttttcgggatgactccccgaaagatttcccattttgagattacccaagttaagtacgcttaaccctaaggtaagctcatggtgggttatcagaaagtagatgcttctttgtcgttcctaattgtatttcttacttccattatttcataaaaaaaataagtaccatcactaccttcattcacctcttacaattcctctttggttcagttcacttaaacttgaggaattcccatctattgtcaacttgaatcttgttcatttctacttat

SEQ ID NO: 343027 - DNA, 695 bp, Cannabis indica
catacctagtgcagaaagctgtctttgatgtcctcctctcggattctcaactgatgatagcccgatcggagatcaatctttaaaaagaccgtcttccgttgaagttgatcaaaaagatcgtcgatcctaggtaaaggatatttattcttgattgttagcttattcaattcccagtagtcaatgcacatccgcaaagacccatctttcttcttaacaaataataccggagctccccagggtgacacactaggccgtgaaaaccctatgtcaagcaacccctggagttgaattttcacctccttaagttctgctggagccattctgtaaggggccttagaaaccggttctgctccaggtgccaaatcaatgacaaaatcaatttctctctccagtggtaagcccgaaagttaatcaggaaaaacatctagaaattcctgaatcaccttgatgtcttctagccaaacagagtcaggtcgagtggtatccaataccacggccagaaaccctagacatccatctcgtaacaattccctgactgttagtactgaaattaccgagatctgagatccccgaaccgatccgaaaaaaacaaacggttctttgccttctggttggaagattaccatcttcctcttacaatcattactggctgagtacttggacaaaaagaaatccattcccagtataatatcaaa

SEQ ID NO: 343028 - DNA, 881 bp, Cannabis indica
cacctacaagcatcaaaacctgagtaaaactacatattcatgcatataaaaactgacagaaactgaactcaagcacaaccaaactttacagcaactattttcacattttctctttgaaaaccatagcttttgaatagaaattccataactttaaataacaccaccaacatgcaagacaagtagctctaatctacacaaatactcatgaataaacttcagaaatcaaccacaacatacagcagcaagaacactctaaaatcaagtatgcaattcactaacttttcttaaaacacaacaaaacacaaagaaaggctacaaggaaattacctaaagtttaagcacctcaaaatcaagatgattcttgctggaaatgcagaagaaaaactccaattccagctgctcaagaagtggccaaaagagagaggaagagagaaaagcaattttccaaattttctaattttcttactttttgaaactttgagccaaatgagaataaattcaaaataaactttttatttcagccataataaataaaataacatttaatttttcactcaaagtccactaaaggacaagaataaaaatggggcaaaatgaccattttgtccctccacactaacatcacataaaggatactaaaagggtattttggaaattttaaattcctggccaatcccgacattcccaatgtctaaataaccgtcccgcaatactaacatactaagttgtgatcttattgagccaaacaccgagttccatgttgccagacaccgaaaatgcaaaattatgaaattaactgtatgacataaaatgcattgcagaattcgataataacagcataaataattatttaaatatttataaataattttcataattaa

SEQ ID NO: 343029 - DNA, 625 bp, Cannabis indica
attacaattgattaattaaaatcaattaactaagtttgcaagcattattatcacaactagtgaggggaccaagggcctatataactgagctttcagtaagtagatctaaaattcactaagtaaattgtcaacttattaattcctccttgcgccactatagatttggaatttaatagcactctcagttatatagaacgctctatatgtacaacgatgtagatacgttacgattatccattgttacaatcctaatactcacgaaacctctatagatgatctacactgaatagggacaaatttaccgtcctaccattcaatgtattttgtcattaaaacacttagcaacctataattacagaaatgggatctcaatcatttatctctattcagccaagctcaaagaaaatcattgtttcacttttaaatacttatagaagctatagatttcatatctatgatcagcgctcccacccaattgaactaccatgtttccaagatgtaagtattggcgagaaccaaaacttagcttccactaacaactctaagaacataaataatacaactaagttgaacctaaccatatcagaattaagatccatagacctaagatcaaccattgatattg

SEQ ID NO: 343030 - DNA, 705 bp, Cannabis indica
ttaaaaaaaaaaaagagagagaaatactgaaagacactagtgctgtttaacaacctctacgtgtcaatatcgctattagtccataaaagtatcgggtctcatatagtttaatgtaataacttttaagcagtattgctagccaattgtaaaatgacacatctaaaaagtgttaagtaccactagtgtccaataacaatgctacaaaaaaagttataccaacttatttagctattacacattaaattttttaaggaaaataataaaataaataaataaataaatacgttggtctaggcacatattaaaatttaattttagtttctatttctttttttttttaaaaaaaaataataattaattaattaaaactaaaataacgtaaccacctcaatcaccatttgtcacagcttcaccgctaccaccatcaccattaatgccaccacccatcaccaacaccgccgatcacctcaatcaccatttgggataagatgaatgaggttccatctcaaaactaattggcaatagaaggtgttgctcattcatcttatatatgacaatttatttctatgtgagactaactctaatgcaccctcctcacgtttgggcttggaaagtatgggtataacgaacgacctatcatagggccgaacgtgacatttaaaagaatctcacaaagccaaatattgagaaatttgtgagtgtaca

SEQ ID NO: 343031 - DNA, 507 bp, Cannabis indica
aagtactattatacaaatcatatatttacaaaatgtgtgttgatcaagctctaaaataaaattactgaacgtttgttttgttgatggttttctataatgctatcctatttagaggtttcttctttgtttcttgtagctttattggtcagttcatgtaatgaggcgagtctgtatttttttctcgcctgagatgtacacataatgtgattatcggaaattcaaataaattttatacatggttctctactcttggacatgattttgtatttatagattaaagataaatattgagatacaaagttctctcactatatattggtatttttaattagaataaatagtatgccttcctctgagctttgacataataagttgttgaataggattacttaacaataacaaattttgatgaagtgttaaagaatggtttaaacagttttgaaaagtaaaataagatatttgaattgcaattttgttggtcctgataagaattttccttctatgctt

SEQ ID NO: 343032 - DNA, 823 bp, Cannabis indica
aagaatcttttcaagtattcttgtaggctcttattggagaacttacaaaaaaatctattttcaccgactaaatttttaatcattaaaactcgttaattagtcactaaaattttttgcgactaattatttttagtcgccatttaatcgctgaaagtcagttgtagaaaatattcaacaactaaacatttttagtcacaaaatagtgttattttccatcacaaattcggtcgtcaaataccatgcccaagattgacccagtaatcttaatatttttcaatgagagtttggtgcaaaacttttctaattatataaaagcaaagtactattaatgtcctaaattagatataatgaacatcaatgtatgtagcacaatgtatgatattcttcaaaaataattccagtgtagtaagttgaagaaatttggctttgatgtaatataatagtaattgtatggataattataatacgaatagtaatttaatgcaatacaaatgagaataatattattatatttgagttagctctctaatgaacctagaaataaaatagaataagtttaatgtaatacgaatgagaataatattattatatttgggttagcactctaatgaatctagaaataaaatagaataagtttgacagcttattctcgtcaacaaaattaaggttgtaaaagtcaaactgaaggtgtaaaatttataagaagatcaataagagttagaaagtttgaagaataaatgtttagagcaaccatgaagagaaaataagtattgtattgcttaacgtgttggaaattattttaccaggatcttatatctactca

SEQ ID NO: 343033 - DNA, 588 bp, Cannabis indica
tttttaaagtctatcaattttacttatttttctaaacattgtattaattttactcctgttacttcaagatactctccatgttacttttttatgtcaagatattttgggtacactacatataaaaaaaggcatgttttaattaaatataaaattaaaagtaaatttaattaattgattaataaaagtggtatttttgaacttacccttagtttagagttggctatcctttttttaattttaaaaaaaaaaaattatcaatcatacctatttagggtgcttgtcaatattccaatgaaataaaaaatctaaaagttaagagccttaaaattaactgaaacaacacccaatccaatccaagtagattcagcgttatctaaatttctccgacaacagattgaaccctccgattccaaaactcacctagaagcaacatcctttcaccattcagacctttctttcttccctcattaaatattacaaagaacataaaagagattacaggttcataagcatatttattttgtaattcatgcaagaaatcaaaaaaaaaaaaaatcacacaactatttcatttagatgaagagatag

SEQ ID NO: 343034 - DNA, 650 bp, Cannabis indica
ttttttttttttcttttcctttcatgatataccaatgaacataaagataatatttcgtagtgaaatacaactatacatcaaacttaaactaatattccattattatttttttattttaattttcgtcattcgttcattatataccataggacattaaaataatataccacaatcataaactaatatactacctttcaatttttttcatataccaaacactttaaaatattataccacaaattgaaaatactatacaactcttaaaagtttttatttcttaatatatcatagtacataataaagatatatcacaatgcaaaattaaatataccagaaaattaaactaatattccattcgtagtttttacgttcttcctttcattcaagtattctatatcacataaaaataatataccatagaaaatataaatatacgaaaaaaaaactaaactaatgtactttatttttttcctttccttcatgatatactgtgtcgagagagaaaaaagaaatcatatggtctagacacgatagtagaaagctagggtcaattatccaagattataattgtaatttcatcatcaaaattttaactaaagggacattttgttcatttttttataaaaagagacatttattaacttaattgt

SEQ ID NO: 343035 - DNA, 741 bp, Cannabis indica
cattgttcttagtgttgagaaatctgggacatttttattcgaaatgttccttctgttcacaatttgaacattgaatgatatgtctgcttaattgtttttgagttatttttattgctagttcaatctgttgtgaaagataatatgaggaagtggaagcactttctctattctttttcaacagagcctgaagtagtaggattgtcaaaggaattattctcaatatcttcagctttctttttgcctttatctgcagtactggagagggacctcctggcaagtgacaatgtcctttcataagcactcataagcacgcaattcagcatacaacttgtctatgttggacgagtttcaattgctaatcataaaagatacaacaaaatgattaaactcaggtgataagctgttgacaataaattgaactctttgatgtcttgataagaaaattcccagcgtagtcgctttctggaatttcaagtccatcatgaaaaagtgtgaagtgatactctgaccaagagtcaactttgtacttttgagttcatttgtaaaggcatatactaatcgaggattggggtgtgggttgaacattttgacactacaaatatcaataaacataaataaatttttggttcaattaaattcatacacaagttcaaaaaataacaagtaaggaattatgtttgcaaaaataccaaaataaaacatattaattattttccaaggtttccaacataatgaaataca

SEQ ID NO: 343036 - DNA, 466 bp, Cannabis indica
tgataactaatcagatcgtaaagagttttatttaaggcataaaacccaacacagtggagttgggccaaaatgaaattgtctgtgagccccgaacagcgataaagggtcacgccttaggagatttttttgttgaatgtacgggtaaagaagagagcattttagaaaacaacctagagcctgtacaagtacctctgccgagcaatagtaaagacaagccaacttggaagctacatgtggacgggtcagctgtctggcccaagaattgcccttgtcacaccagaggggaaacacctgcacactgcggtcaaatttagatttaagaaaaccaataatgaagctgaatatgaagctcttatcgctggcctaagacttgctcgagagatgaaagccgaacacattgtgatctgcagtgactcacagttggtggtaaatcatgtatctggggagtacgaggctcgggggaaaa

SEQ ID NO: 343037 - DNA, 590 bp, Cannabis indica
ttttctccccgagcttcgtattctttggatacatgaattaccaccagctgtgaatcactgcagatttcaatgtgttcggccttcctctcctgtgctagtcttagcccagcaattagagcttcgtactcggcttcgttgttagatgctttgaatccgaacttgaccgcagtgtgcaggtgtggccccccaggcgtgacaagggcaattcctgtaccagatagctgatctgtagctgacccatctacatgtagtttccaggtctgcttatcttcattgttacttggctgaggtgtttgtactggctcggggttgcttcctggtatgctttctttcttgcctgtgaattctaccacaaagtttgctaaggcttggcctttgattgttgttcggggttggaaagtgatttcatactggcccaactctaccgccaacttgagtagccgtccagaagcgtctggtttttgcagtattttgtgcagtggttggtcagtgtatactcgaacaggatgagctttgaaataggccttaacttctgttgctagataaggcataagcgagtttttcatcaacgggtatcgaccctcagcctc

SEQ ID NO: 343038 - DNA, 926 bp, Cannabis indica
ggagtacgaggctcgggggaaaagatgatagcatatctaagaaaaatactcgatttgctcgaacaattcaaaagttatgctctcaagcaaattccaagagaacaaaaaaacaactgttgatgcactagctcgactcgcgagcgtcaacataaatgataaagcaaatctaatccccatccaatttctggaaaaacacagtatcactgacgcggaagaggttgaaatgattgatacgtccccaaactggataacaccaatagcagcctacctcaacactggggaactcctagaaaacagaaatgaagctcaaaaaatgaggagaaaggttgcacggtacatcattgtagagggagttatgtatagaagaggattctccatgccggtaatcaggtgtgttacacaagaagaagctgcacgacttttgtcagaagtacatgatggcttttgcggcaaccacgcaacgaggcagagtttatctaagaaaattctaaggcaaggttatttctggccaaccatgattaaatactcaaaggcctctgttaagaaatgggataactaccagagattttcaaagataccccgtgcaccgcccaacgaactaacttagatgcaaagtccttggccttttgccatttggggaattgacctgatcgggtagttaccgaaaggcaaaggcagagtgcagtacgcaatggttgcagttgattattttaccaagtggacggaagtcgagccactggcaaccatcacgtctaaaaaagtgcaagacttcattgtgaagaacataatttgtcggtttagattaccatacaagatagtctcggacaatggcaaataatttgacagtcaatgttggaaatattttatcaggatcttagatttactaacaagattgttgtttaatatcctaaatatgaacttctaaa

SEQ ID NO: 343039 - DNA, 719 bp, Cannabis indica
gctatcccagtaggatagtatcccccataggccactatttgggcctcttccaggttgatatatttctggactctcttctggaagtcttgaaggttggaagctccttcttgctgtaactcgttccagaatggagtccctgtacggatgcctgcttggagaaaagcaagctattgtccgtcatctactttcttggtttttgaggcttcttccctgaacctctttatgaaattcttcaatgtctctgtaggcagctgcttgatgttagtcaaggagctgacctctaggttgaccttccttgcggtgacaaattgtctccggaagctggtttgcaacttattccagcaatccatggatcctggttccagtttcttgaaccactcttccgtggatccgcttagagtaagcgggaagcacaaacatttggcgtcattgctgaccctcatgactgtcatgactaggttgaaccgggataggtgatcgcttggatctgagttcccggtgtaagctgccatttcgggcatcttaaaatttttggggagctctgcttccaagatgtgcttggcacacggctcccgatcctcacagtcggagtcggagttgtcgcctttctgtctctgggagactcgagcgatgtcttttcgaagtatggcaatatctgccatgatcctttcgtttaacgttcccgtggagaccgcgggtccgtacttcttttggtccag

SEQ ID NO: 343040 - DNA, 714 bp, Cannabis indica
aaaatatatccaacagtgattacgtcccacgtaaaataaatgcgattatttgaaaatcacacagttgtgattggtccgcttttaccgggtcaatgtgtacgtgtattaaatatgttgcaaagcgtatcattctgggacatctcactgggaatatagcaacactaaccctagtagcgagctagaacttttcccttatatttctgaggtttataatgtaaatcttgttgtttttgcgctccatctgaaaattacagttctttgtgacaagatgaactttagcattcaacatcatttgaatgtcagcttctatctgagagaactgactcaacggagcaattaatcttattgaaagatgtctgaagctgattagtgaaggtaccaacaatatgctttcttatagcgagatggatgcctcgctattcgttgttcaagttcattcaactgttatgcttagtttgtataacatacattagatgctaagtgtcataacaatcattaattagaccataaaaagtctcttaattaacaaattgaccctaaaacctcttttcttcacaattaagtcgttgcttcgtgaaaattcttaaataagacatagtctaattttagaattataattgattaattaaaatcaattaactgagttagcaagcagtattttctcaactagtgaggggactatgggcttatataaccgagctttcaataagtaga

SEQ ID NO: 343041 - DNA, 640 bp, Cannabis indica
tgcccagaccacgaacagaacttttccagacaagtgcaaaagaatttagcttcatttaggttagcccgaccaaccaagatgaggtcatcagcaaagaaaatatgggatagcaccggacccccctacttagctttatcccttgaataattctgttcccaagcgcttcttctaatagtctagaaaacacttccgctgcgcagatgaagaggtagggggataatgggtcaccctggcgaagaccgcaagaaggcatgatcttgccaactggaccaccattaagacaaatattgagtgaggtggtagaaatgtactgagagacccaactgcaaattttttgagggaatccgaaacaaccaagaacatgatctataaaagtccaactcagcctatcataagctttaacaaggtctatcttgatcgcaaaaaagccctcttttcctttcttcctattgaaggagtggataatcccttgcaccaaaacattattatcttgaatattccttcctggaacgaaagcagcttgagtagggcagataagagaggggaggataggcttaattctatttgcaataattttagaaatgaccttatacatcacattgcaaagagagatgggtctaaattgatttggtctcttcgg

SEQ ID NO: 343042 - DNA, 522 bp, Cannabis indica
gcaggttcagagtaattgactccccagtctgcagcttctgcaatattgcagatgaaacaaccgagcacctgttcttcaggtgtgatttttcccaacaatgtctagtgcaagtgaagagatggcttcagtggaagggttgagctgataatctgcaggttgtgctcaaaacaataaggaaagctaagcaaactaaattcaagaagaatgtcaaagcttcaagtagcacttgtatacttgatttggaaggcaagaaatgatctcatttggcaaaagaaggtgctaaaggcagaggaattggtccagcggcttcaaaagattgtcaaaactagaactttgcttgtaatgccacaaaaagtgaaaatcaaagatagagaatggtttgattgtttgtaaataattgtatagatttattgaggccaaagttggtgctttcaggatgtaaataaaagttttgtgcaatgaatacttctgattcataaaaaaaaaaacaatgaagatttgaaattaaactacaatttaata

SEQ ID NO: 343043 - DNA, 1189 bp, Cannabis indica
ctaaattgatttggtctcttcgggttttgcacttttagaatcagcacaacattcgtagaattcacacccttgtgcattcttcctttgacaaagaaattagtgacagcatcacagaaatcatccccaactgactcccagtagtatttgaagaataaaacgaacattccatcaggtcctggggctttatgattactcatggcaaacagaatacttcttatttcttcgcgggaggggcacccaacaacctcgacatggtcctcaagagaaaccctttccctaaacaaatggccacaatccaacggcctgtcatgattagatccaaagaaaatacccttgaaaaaatccaagaattcctgaccaattaattccccctcatttatccagacattatgtttattcaaaatgcactcaatggcatttctccttcctctaatagcagcagagagaaagaagaatttggagcatttatcaccatccttaagccactcaattctcgccctttgtttcctgtaaacagctttcctggttcttgcttcattcaggttacgtctgatgtcacactccaacttccaatctctagtaccagtaggcaacagctgaattctatcaagttctagctccaaatctttaataacctcatcaagtttcccaaattgcgttctcttccactgaagaagagccaccctagtagctcctatctttttaaaaacgcgggcgagagcccaaggatggcccaccaaatcccaagcgttggcaacaacaaggttgcttctaacatccctcgtccaactttcctcaaatttgaagcacctcttaaatttagacactgtccctaccgtatcaagacacaacggtctatggtcagaagtactagtctggacagaacagagaatagctttggggaacaggtgaagccaggcaccattcacaatgcctttatcaagggtcgacttcacatggttctctcccgccggtggttgtcccaagtcatcatatccccttggatgtgcatattgataaaggccacgggactccaccaggtgagaaataaaaagggataaaaggggtctctacccgacgacccgtttcttctctattttttaattagctaacacacatcacacgtaattggaatatcaaaaattgctagttcacttaattttttaaaaaaacaaatcataatgagata

SEQ ID NO: 343044 - DNA, 811 bp, Cannabis indica
catccatctagtacgagactttccgttcaggtcgccagcacacttgaatctggaaagaaggtaagaatttgtatataatgtgtgatgtcaatatctgaatgttatgtatatgttatgtgtatatgcatgcttatatgttgtgatttatacactaccaacactagtgtggttgcggtatagagtgcagttggtaaagtgtatgatgtctgaaagtacatcgtggtgttaccagcacttgtaaggaagggaaaaggtgtctgtggtacaacacttaacagtactcaaggtgcggtccatgccctacctacactagtacgaaggtatattgagtgcatgtggtacatggtacatggtcgtatccttagtagaacgttcttactcatctgttaagccttgtaaataggtgtatgggcgcccagatacaagtcgaaaattatgtgaaatgttatatgcttttcttactgagtttgtcgactcacagttctgcttccatgtgtaggtaaaggaaaggcgaaagctgaacaggagtgagcttaagctgggatgaggttgtacatgtcaaagcagttcgacctggagtgttcaatctcgagacatctggggatattattttgtagtcgctgtgcgaccagttatgcattttggtatattgtgtataaaagcttttaaacgggatcccgatacttgtaaatagttttgtaaattataaagtttattaattaatataaaagttttaatttgacacgtttttcaaggaaatcctttgattagcaaagacagtactgtaattgaaaaatcactgtagcgtgcc

SEQ ID NO: 343045 - DNA, 659 bp, Cannabis indica
tcatatttagtcacaaaaaaaattatgttgtgattaaaaattatcactaaaagtaattttttttgtagtgatatatattatttagtgtatatatatttaatatattatttaatatttaatatattatttaaatatattattaatttacattatataatgtaaaatttgtacagtaaatagaaaagaaaaaaatagaattttgaaaaagtattttaatgagtgttgattaaattatattaattaacataggtatccaacattgagtcaaattgtgcaaatgactaatcactgctataatgtttcgtacgaaatcatgttcatcatattaatttccttatatttttccttttaaatcttcatgcttttttagccgtacttataatttaatttgtcacttaataaaactatataacaataacaattgaaaaatgaaaaaaaacctttggttacggtttggttagttgctggagcactatatgtgagttagattgattgaggcaaacattgtagcaaaattggaaaagaatataaaaaaaattaataaaattcctcacacaactttctctctgattagggttttttaatctcaataatgaaacctagctttgtcaatcgacgtttatcattgtatccaaattcatattttttttcatgtcata

SEQ ID NO: 343046 - DNA, 1958 bp, Cannabis indica
aaagtttcaaggatcgtcaagtgaaaagaaagttgaaacttgcaagaaaaaatttgacgaggatgaagacaagcacaactacagtggaggaggatgaatcttgtaaaggttttggagcagatgtaatatatgctagaagtggtttcgaggaggatgaaaacgataattttttggggggcaatccactatagcgacggttttaaaccgtggcctatagtatcaactatagtcgacaattttaaactgtcaggaatatttttataaggatatttttctactgtcgtctattctacttagtatttgggacgctcatataggcgacagttttatagactgtcgcgaattctttactcgacggtgtaaaaatgtcgagaattttgagttttttagtagtgtatgaaaattgttaaaaagtattgttggtgtctaggactctttcggtgtcattaggcagatcacttctgatccaaaacattcagatacttgttagatctcggatcagatccaccccgccccgcctaatactttttcagatcgaatctaatccgatccagttttaatatattaaaaaaaaatacttaatgtaagactcagaccccgtacccaaacttggagcccctaggacccaggtgttgggctttgtgccctaaataaaactctatttcaatgtaatcttttctattcaatcatcaataaagaaacatgtttattttaagtatttatttagtatgttatttggttcatgtgatcatttatttgtttatttgatttataaattcatccaaattcttatcacattgatattcttatttattgtgttgttaacacagtagaaaataatcaagattgtgtgattaaatgtattcttatgatttatcagtacacagggtttaactgatcatataggataatctacaatgtagtttacttgcactttggataagtgctatgttctttctagggcattggttaaagtaagcttgggttggatgcatggagtatgcatcggaagggaccgatatggaacttgaactagatatgataaacttaccgtaatatctattcaattcaatatcacctagttgatcctagatcaagtgatcccaatcctgagatggttaggttctagtttagttgtattatttgtgttcttaaatctgttcgttaaagtcgaccaaatggttcttctcgcgacatataggttaaggacatggtaattcaattgagtgggagcgctaatcatagatatagaatctatagctttctatccggataaagaagtcaaataatgatttacttcgagcttggcttaatagagataaatagttgagtactcatttcaatgattatatacgttcactggaacatcatttataggtagctaagtcactactacaaacttaccttttagtgacactttagtgactcgcatttttttgtgggacactaaagaattagagaagagctttagtgacactcacaaaaagactctaaaaatgcagtgttagtgtcttagaatcagagtcactaaaaatatgaagtgtcactaaagagtattttatttttattttttataaaaaaacactgacctttagtgacactcttggcgtgaatgggtaaacgtgtccctactcgcatggcgcgtcactatatcataaatttaattatttttattttttattttgtttaaatatagttggctccattattttattaattcgttacttttttatttttttttattttttactagggattgatttcaaaattttaaaagtctgatttattaaaaaggcaataaaatcaatttaaaaaaataataaagtcaaaaagagaatagggttccaaaatcaaaacccttttcctcacactttctctctgaccaaaccaatcccctcttttgttcagcaaaaaaaaagttacagtaaaaaaaaaacaaaactaaccaccttcttctt

SEQ ID NO: 343047 - DNA, 585 bp, Cannabis indica
ttaaatttaaggacttttgtctaattttagtaaaaatattctgaaatggatgaaagttcaagggacataatttagtacatatcaaagtttgaggcgcataatttggtagatatcaaaatctaaggaacatagtttagtacataaacaatcactgaaacagtaaaattaaataaaattagacaaaaatctttagtcaactttaccaaaaaattgtactttaaataaataaattattattataaaaatataataaaataaataaaaaaaatttatttattagccgatcctataaatttagaacaaccggttactaacttaatataatattaataatagacaatgatttttttttttacaatgttaaaaaaaaaaaaagaataatgcttaacacatcagcttaacacacgaggacgagcaacagtcctcccacacgaatttgattagggaaatttcaatttttggccttaataatacaagccatatcaaaatttatacccttccttaatttgtacaaatttagtccattaattacatgaacttcccattttacctttttttaaaaaaaaaaataagctaaaatctgaa

SEQ ID NO: 343048 - DNA, 537 bp, Cannabis indica
aggccccgttacccgaatcccgagccaagatctggatcactatcacgggtctcgatcttgttcaggttcaagtcccatgtcccatttctaagtttgggtttgggatcgagactggggtgcggttctagctcctgaccctggctctgtgtatctagtcttgtttcttgtttttgtctcagttcaggttctggttcgggtcccgagtttaagttttggtcgggatccaggtccggctccaaattcgagtctaggtctgatttctagtctgggtcctggaccagttaccgtttgtgatgtaggtccaatttcagttatgattccaagtctaagtcctagttcgtgtcttggtcaacttccagtttttgttccaatttttggttagaggataagggttcgagtccacttttgggtttgggactaggttcaggtctgggtgcgagttcaggactttgtcagggtttggatcccgggctgggtcccaaatctagacaccgactacgggttttctcctagccctgggtccagatccggatccca

SEQ ID NO: 343049 - DNA, 890 bp, Cannabis indica
ataatgttggtatttctagttttaaaaaaaaagggaaaggagaaaaatatatttttgcaagatagtgggcagttttttttttgttcatgggctggcagttatttttcaaaaactcaaaattggtttccttttttcttcattctttcatgtttatttaaaccaattttttgtcatttattctcaccacctacccgatcctatttctttgtcttcttgcttgttttttcttcattctctcattcagatcaccatggttagaacaaagaacctagggcgtcccaaaaaggtggtaaaaaccgatgcaaccccctcgaatgctcctcctgctgcttcaaccttgcctcctgctgctgcaaaaacaggagattcatcgcttcctcagcgtgaatctcagcctgtgcagcccaaacaaattcctaaacaagtggttcgaaaatctgtgcgaccatacaaaacttggacctcatcgtcttcatcttcaaagggatctcctccacctgcaacagtttctcctcctgctacaacagtaaaggaaagtgctgcctctaccccaactggtccttccactcgcactcgtgcccaacaagcttctgttgagaaggatcttcgatcttcccaaagtcaggacaagccagttcctccagccaagaaactaaagataaatcccccttcgatttctttgagttgtgaagaagaagaactcgtggaggatcccactgttgattcctcggacaaatccgtgtctctccattctaagaaggagattccagaagacattggagtttcctcagacagtgaagaaactgaactcgaaccagagccacctctgaccaaatctgctctaacacctgctcgctcatcttcagcagccaaggcttctgctgctacca

SEQ ID NO: 343050 - DNA, 624 bp, Cannabis indica
tttggggagtttggggagctcgtaataacttgatttggagtaataagactttgttgttagagagggtagtgaatgttgcatgcaattacttaccttgattctcagaagaatgctcagttgaaaaatagagttgtttcgccagtttatggtccgaatacaactggttgtgagcaataggctaaaccttgttttggtgaaataaaggttaattgtgatgttgctatctttgaggatggcaatagtctcgatttggggtgcattgctcgggatcataatggtttattcattgatgctttggcagttaaaatttatggtcaacccgacccgtttttggctgaagctatggcgttgaaggaggcactcagttgggtgaaggggaggtgggtagagggggtgagcctgatggtgtggttatggagtcagactcgctgctgctggtgcaagccatgtaacagaagaagcggttcatgcaacaaaagaagcggttgttgtcttcggtgggacttttaatcacggattgtgttgctcttatgcaatcctctcttttgttttctatttcaattaattttgttaaacggtccgaaaccagacggctaactttttagcttgttcttctggttctat

SEQ ID NO: 343051 - DNA, 519 bp, Cannabis indica
ttattgtgcaattgcttacttttgcttgattagctaattttaattttgaaaaaaattgggttagtggaattgcttgaatgatgcatgaatatcaacttggaaaagtgtgatttgtaaattgcatagaaatatgttatttaccttgtatgacttgaataaattgtgcttaaattgatatttttaaaattaattgggcataggaatatgttaattaattagagaatcaaaccataaatactttgaaaaaatgattatgatattttgaattcctagttgacatcatcaatctacaaccaccgggcgtggctgaaccatctacgatggggggagcgaatgcacatgtcattttcaccattatatcaactttgtatttttaggccaatttaataattctagcttgttttcttcaaagtttgtgtttgttaatttttacatattcttaacacttaattttatttttgtttaaactaatttgtgagtagttaattttataaattaatttccaattttcaatccctg

SEQ ID NO: 343052 - DNA, 889 bp, Cannabis indica
actattttttttctaagaaaatgactaagtctgaaaacaaagtagcaaagtagaggaggtagtttttatcttgattccaaatttttctatcatcttattcgacataagatgatcccaatgcctttattgtattgacacaaccgatgaggacaatatcacttagattcttagacagaaagtcacagtaccttgtcgtaatgggagggtttcaaggaactcaccttgttatgacttggaagacacttgtgataaaaattcatttttagtttaaacaagtaatggatagtcagaataagcaactaagaagcaaagccaagagaactatggttgaaaccattcatatggagtaactaaaagttttctattacaaggacaagaaaggaattcttgaaaaatatgtctattatatggacttaaccaaacttcctgatcctagtattataggtatgagattatctaaacctatgtcttgtggtatacccggtgatttaattactctagtgcaagcgacttactttagtaagatgctggaacattttttttaatggcaatctataggaagcttttcgacttccagagttagatttaatttatcttaggaagagtttcaattattctagaaaagataaaggccaaggaaagaatttcttaggatcaacagtgagaggtcttagatatgctttgccatgcattagaccagacaccaactattgagtgggagtaatgagtaggtctcagattaatccaggaaaggaacattggaagaaaatcaagtcaatcttaagatcaagaagaggaactatatgttagtcgataaaggtggtattttaatactcttagactacaccaaatcaggtttctagacttgcgttagtgctagaaagtctac

SEQ ID NO: 343053 - DNA, 564 bp, Cannabis indica
ctgtctgattggtccacgtatattcggcaagattaggggcaacaatatcgttttagaagttcatatgtaggattttaaataacatacttgttagtaaatctaagatcctggtaaaataattcctacacaaatatccaagctgattttttctccaattcatgatggagactagagcttccattaaaactttggaaacttaaatgggacagttaactgctcaaatgggaacccgtactcaagggaattcacctagaactagtgaggtaaagggcaaagagcagtgtcaagcaatttccttgaggagtggaaagagttatgaggggccaagagtgagcatacaattgaagctacggatcaagatcaacaggcacaggctgaagttaataagaggcaagttgaagagaagaagactactgagggttttacagcaaaagaagcttcaccacgtataaatattgagcaccatataaaaattccttaccctcaaagacttgcaagaacaaacctcgacaagcaattttcaaaatttcttgaaatattcaggatgctgcacattaacattcc

SEQ ID NO: 343054 - DNA, 680 bp, Cannabis indica
tttattgtgaaataaaaaatattttcaagttcggcgaccttagagacccgattggaggccaaaagggtcacaacagttttggttagaaatattgatgagattattgggataagttgattttagaaatattcagatattttaggatactcaaagttgaccaaataccttagaagtagagatttcttaatggctaaaaaatgataagatacatattaataatacagtagaacctctattcaagaatagacttgggaccaagcaaattatattctaattgagaggttataactaaatagagttatactagaaaaaaaaaattaaaatactaaaaaatatcaatgtaacaataataacaataaatacttattaatactatattataatagatttattttagagtaaatataatggtaatacatatgttacaatttggaataaaattattaattttatgtaaataaatttacaaaacatatgtatatattttattaagatgtaattattcttatatagaagtatactttgttaatacgggacttagaaaatgtataactaattacaatttagaggttattcttatttataactggcccaaattgggacttgatttttttataacaaattagagattattcttgaatagagtattcttaaatagaggttctactgtaaaacttttt

SEQ ID NO: 343055 - DNA, 697 bp, Cannabis indica
tgtagatcatctatagaggattattgattatttagattataacaaaggataattcatagcatatctatatcgtggaatatatagagtgttttacataattaagagtacaattccaaatctatagtggcgcagggaggaattaataagttaaagaatttacttggtaaatattggagctacttattaaaagcttgattatataggctcatggtcctcacactagttgagataatactgattgtatacttagttaattggttttaattaatcaattataattctaaaattagactatgtcttatttatgaattttcacttagcaatggcttaattgtgaagaaaagtggttttagggtttatttgttaattaagagactttgtaaagtctaattaataaataaattaaatagaaattttttatttgataattaatttttaacaacatccaaggcgaaatgacacaatgaagagcatacatggatcgatttggacctccaccaaactagctctcttgcatttttttttgcatattatctcatgtttaatttttttttatttgtgtgcaaaggcttagtgccttttgactttatgtgttggattttatttttttgtgttgttggatattatttttttttgttatatttttgttgaatgctatgagtttgactcttttagtttctaatgcacggtatgtgtt

SEQ ID NO: 343056 - DNA, 520 bp, Cannabis indica
aaaaaaaaaaaataaaaataaataaaaaaaatgttatgtttacttaaataaatttagatttttttttttctaaaaaaataggctcaaaattttacccgtatgcttaccgagatttttgaaaatcgattataaaatgattaagcttaacaaagaaatgaattaaaaaagaataaacaaagatttcgtggttggagcgtaaatgaaccttagtccacgagttaatatattgagctagaaaagtttcaaagtataaggaaactaatattcgatctgttaggaaaacttggatttgactattatataacatgttcccagccactcatgttattgagctcctaaaatagaaattgtaaaaatcatcttctctgagaaactttaactagtaaatcaaagaacacaatgaacacaaataagagttcacgtatactcagaattcaggctgatctaataatggtcatcgttaagatatgaataactctttcatagtaaacgacacattaatgaaagatgtttattacat

SEQ ID NO: 343057 - DNA, 1062 bp, Cannabis indica
actattgtcatcctcaagacagcagcatcacaattaaccttatctcaccaaaacaaggtttagcccattgctcacacccgaaagtaatcggaccagaaattggcgacacaactctattttccagctgagcattcttccaagaatcaaggtaagtaattgcagcattcaccaccctctctactgacaaagccttattattccaaaccaagtcattacgagccctccaaactccccaaagaagcatagcaagcctctcaatacgatccataggctgcaccttacaaacgttatcaaaccagctgccaaacacaacagcttcaccccttcctaccgaccctcccagcaccttgtccagacaactcttagtaaaagtgcagctaaccatgatatgaaaaactgtctcatcctcccgattgcacagcaaacacaaactgctcacgtggacccttttagaccgcagcgccacaagagtaggaagacaagtaagcccccgccaaagaaaattcttcaccttatgaggcaatttcaagttccaaaacatcctccaaaaacctgaattgtcttgagtattccacctaccattgcttacttgtaaggcgcgataagtacttttgacagaataatccccatgtgtctccaacacccaaaaccaagcatcctcaaccgaagacagagacaacggaatacaacgaatcaaatcaatatccctctaaataaataaatcatgaagaacttcctcatcccacttaagagagtccacttttaataaattattgaccttacagtcatgaagagccacatgagaagaggtaacatacggatattccttacaaggaagccaaggttgattgagaaccgatatagaaaaaccggctccaacacaccatctcgcacccatcttaaccacagatttgcccctagaacactccgccacacgtagcttggattagcacctagcttagcatcaagaaacgaggactgggagtaatacctggctttaaaaacccgcgccactaaggaactattatttgtcaaaagcctccaaccttgctttcctaacat

SEQ ID NO: 343058 - DNA, 1480 bp, Cannabis indica
agactttgataagtctaattaataaatatattaaatgaaaatattatttgataattaatttttagttattaaataattagaattggcatttaagcggttaatttggaaaatttacatttttgagaaaataagatggaaaattgacaaaatggcaaaattgcaaagtggagcccaatccaattcatggtcggccacttcataaggtattgccacttcttttttttcattattttaatgctaattaatctaacataaccctaggttgtttcctataaataggaagtgatgggttaagggaaaagatgatgcatctcattcctttagtaaaagtttcaaagcctccttcactaccctagccgaaaccatctctctctctttctctcttcaaaaccgaagccacatagtgaaaagagtcagtggccacacacatcaagtagtactcagccatagtgtgtaaggctgtgaagaatccagtttcaagagaaggagattcagactcagatcttggtgatactctgctacagaaaggatacaagggttagagatctgagtggaaggagagattatattccgctgcaaccactgtaaggtttcttatactttatatgtgtttatttcataacgttttagaagttcatatttaggatgttaataacatacttgttagtaaatctagatcctggtaaaataattccaacaaagtatgccttaagcgtctcgctaggctgttactttatgttggtgagtgaggatgctttgggtcgcctatcccttgcggcctagaactgctttttgaagtccttagacagctgatcccaagaaatgatggaatgatgagtaaatttattgaaccagctgcttgctgctccaactagtgaggtgggaaatataacgtagattgtttgtagcattgctagcttgcattatagtattaaaattgttcaaatgcgagactagattagtggtaccattatatgacgagacgtggggttttttaaatccctcgggaaaagaggtattcatgatatatggatggtatggtttgagttcttcatctgagtcatatccagattgttttccttgctccctgactttatacctcctgaacttatcctccaactcatctattcgaaattggattgggacccctttgtaacaccctaactagcataggcgtgttagcgtgattataaacgtactgtgcagctcgttgctaatcaacgaggttaacgaaaaacatgattaatgaaaatttacttatataattagaaacttaaagtattacatttataaaattttgggatcctgtttacaaaatactttttaaaagtttgttatacacataaacaaaagtttgtcgcccaatgactatacagcaaaagcctcgatgtcccaaagatcgtacgctccacgcctatctgccccaacatgtacaatcttcacctgctcgttttcacggctccttagctttagccttgcc

SEQ ID NO: 343059 - DNA, 734 bp, Cannabis indica
ttcgatactagcatactttgccatggccctggaaaggatataacacttatccaagttgtaagtaaaactttatcgttgattatcatgtccgtgtaaatctattatactgacaaatacgtgggacaaaaacttcgaaatatataatcatgattatattctactctattcacaacactataatcatgatttatacattaaacatatgattatgaaaaaaaatcatgtgaaccatgcaacataaaataatttttgatcctttattaattaataaatttgataatattgaaagtaaatcattaccattcactttcttgagtaacatatgaacttccagcctatttggaattacttgtacataaggtgtatggaccagacacttgtaaagatgaaatcttttcgtgggacattgggagaatcatttagtcctcacatataatcgatatatgtgcgacttaagataattttttaatcctacttttaatttattatgttgcgcatagtagcgactagaccttatctcagtcacactttcttacaagtttcgatcatgggagggtagctctacgaaagctgttattgacacgacatcatttcccactagaaattggtcacatgtcaaatatacacgagacaactcgtatttctaagtaaaaaatttgaactataatacattctcctagttttgtgatgatagttgtctatcacacgacgaaactatctcgagggatagtcga

SEQ ID NO: 343060 - DNA, 554 bp, Cannabis indica
tatggctctatcaagacgttctcggattagacctcccgagaaacggttattttgccaagtgaacttgttgccaatgaagtgaagatccacaccgcctgtttcttccaaaaaactattcaaccactttgtgtcatgagaagatactttacgtccaccagccttctcctcataattgcatatacaattcaaatctcctattagaacccacggcaattggcaattagagaattcaatctccatactcctccaaaaagcttcttttgctccaacataaggggtaccatatacagcatagaatttccaattcaattgagtatggacatcccacactgttgcttcgaaaaaaccttcatcaaagtagttcaccactaaattaatgttgttattccacatcaaacaggagcctcccgccaaacctttcgcaccactacatttaatgttgttgaaacccaatttccgagccaatacttccatagcatacttagtaacttttgtttccatcaaaaagacacaatccaccttgtgcctatagacccaagccgagatggcctggg

SEQ ID NO: 343061 - DNA, 1180 bp, Cannabis indica
ccaaactgcgatcacgatctcaaagtccttgaggaaagaatcctagaggtagaagcctgagaagatgcagcccccggaggcagcaagtccaaagcttgccaagtccccttccaagaaggaaacatctccaaagagaaaaggaggatcgcgctttctcaattacactgaactagcagtccctcgtgatcatatttacgcgattgaggaggaaaaatggagtcttcaaaaagcctcccccaattagaggaaatcgcgacaaaagagatccgaagaagttctcaagtaccataaggacatcggccataccactctagaatgctggttcatacaggacgaaatcgaagaattgatcagatgaggaaagttcggtaagtacaagaagaacggagaaactcatccccaagcgagtggttcacgaactcctcaacttccaatgggagtttagttaatgtccaccgaattctagttgacaatgggagtttagttaaccttctcaacttccaagctttaaagcaaacggggttgcaggagaaggatttttaacctgtaaccttgagtatctatgggttcactggagatacaatcccactgaaggaaatgatcaagctgtcaatcgcactaggaactgccctcgttattgccaagtcaatggccaattttgcagtaatcgaccagtattccacatacaatgcagtgataggtcgccccattttgaaagagatgaagatagtaacctcaatctatcatcttatgatgaaattccctaccctcgcgggtgtgggatccgtgcgaggagtccaatcagattaaagagagtgctataacacaacactaaagctcacagaaaagaagaagtcggtaaacgtgatatatttactggaatcacctcctcctcgacaagaaatttttagaattgaggagatacagcatgttgaaaagcccgatttggatccgaggatccttgattacaccaatatgcacaagctgcagaagaaacaattgatgtaccaatcgatccttctgatcatagtaaagttttaaaaattggttctaaactaacctttcaacaacgagaaaagcttgtcactattctcaagaaaaatctaaaaaatttcacgtggaaacattcagacatggtcggaatatcaccgcaggtaatgtgtcatcgattgaacattga

SEQ ID NO: 343062 - DNA, 569 bp, Cannabis indica
aaaatttcaccttaggtgaattactagtttttgagtcttacctagaaggtaaaattactaagtgttctttctctgcaaacgtagagtgtgccaaagaacctatagtgttagtacattcaaatgtctacggaccgctaaatgtcaaagctagaggtggttatgagtactttggaactttcattgacgattactctagacatgttcatatttaccttatgcataagaaattagaaacatttgagaagtttcgagagtttctagcattggctcaaaactaattgggtaaaacttcaaagatcttgtgaactgatagaggtggagaatgtatggatgtgcagttcaaagatcattcaattgaacaagaattgaatcccaactgactgcccctagcactccatagcaaaatggagttgcagagagaagaaatggcacacttttgggaatggttaggtccatgcttagctattcaactctacctactgttgggtcttacgccctaaataaaactcatttcaatataatcagatttactcattaatatagatcaaaaataacatttaatgttgcat

SEQ ID NO: 343063 - DNA, 518 bp, Cannabis indica
aaaaaagggaatttccatgtatgcattttccattttttttatatatatattttttatttttataaaagttgtttacattttgaggttatgttgttttcgtcttgaggttatactgtttttattttataaaaattatttttattttgaggttatgttttccatttcgagataggattttttttcataaatatcgaaaaatgtagtagagtttacttttatatatcataaataaataatgccaaaaaaaaaaatgattaaaaaataatcaaagtttaatatatgggaaaaaaaacaataaataaatttgatataacttgtaataataaggttcgctggaaaagttgtcggtgtcggaaagttagtgtcgacggaaaagttgccgaaaaaatcatcgtccccggaaaaatcactgtcgttggaaaaagtcaccagaagtaaatgtctcaaatataaataaaaaatagaactggttctataacataatgaataaaaacaaataatgcaaactgattataatt

SEQ ID NO: 343064 - DNA, 1577 bp, Cannabis indica
cacatccaaatattgaaaaaaaaatatgcaagactccaatcataaatttccttaggaggaattgagaattgtttatgaaagatattattcctttgattccataaagcccacaaaaaacaatataaaataccaagagtctctttatccaagcctgaaacaagacccataaaaaactcattcatatccaagtgtttattagtatcataataagaaacaaacctggaagatcgccaagcctttctggatctggagcaatctagcatagcatgcttagcatgttcaggaacaagtttacataaaggacaaaggggagaatcaatcacttttctagtaaaaagagagaatgcaacagggagggcattagacaacattctccaaacaaacaacttgaccttaggagggataacaggagaccaaattcgggaccaaaactttttggaagaagagaaagaagaagtagaaggaagatcttgagaagacaaagccaaatgataagcagatttaacaaaaaaaaatacccgaaactttccctctcccaaatcagagtatccctaccataacaccccgaaacaggtacttgaagaatatcagcaatcatagaatcatcaaaataagaacccaatttagcaacatcccaagtacccgagtcagtaatgaaataagacaaaaaatgtgaaggaggatcaacattactaataaattatttatatttatgattaggaagccaatgatcagttatagtttgaatttcgttcccacttccaactttccaaatgagacccgaagccaacaagtctctaccccataaaatgcttctccaagggaaagaagggttatgaccagggacagcagtaaggatagaggtctgggaaaaatagcgagctttaaggatcatactgagaagagagttagggttttccagaatacgccaagcttgtttggctaacatagcttggttgaaatgaacaagagaacgaaaacccaaaccaccacagaattttaatttacatagaaacttccaagatttccaatgaattttcctagactctccagtagaaccccacgagaatctggccatcgcagcttcaattccccttacaaagcttaaccggaagcctaaaacaagccatcgcataagctttcaaaagaacctccttactagctctagagaaacatttggaggaccaggttctaagaacagaagcaactttatccctaagaaaagaaaaggaatgatatgaagacctaaatacttagaaacaaaaggtctatcttccaaatgaaaagtgtcaaaaaaacatattacgaatctcctgaacagtatttggagaaaaagggattgaagatttagagaaattaatagcttgacccgaagccctagaatagatatgaaacacttcttgaagagctaaacaagaatttctatcaatagagcaaaaaaggagactatcatctgcaaaaaacaaatgagaaattgatggggcatgcctagaaacagagattcctttaaggagttgagcatgttgccgaactcgaagaaggaagacaagcccttggcacagagaataaaaagataa

SEQ ID NO: 343065 - DNA, 533 bp, Cannabis indica
accttcttcatattttaccgcctaagaaactggcctataccaactccccatgaaaaaaactttgtttgtgacttgaaaagaagtccaacccacatagaagaaggtttttaccacttccaccaatctagcccattcatagagaatattaccaaaggcaattgtggcctttaccaccaagagtactactatactctcattcttccgttaagagatataaccttccaaaaatctagccctttcaaaagacttgctcctttcattgacatgaagaggagagttgatgccatgttatttgagattgatgcatgggagagagatgggcaatctctatttggtactaaaaatctcaagaaagttaggttgattatgtcctatcaacgggtgcatgtgttggaattttatgccctaaacaaaattcttttcaatataatcttatttggtatcaatagaagattagaagccatttaagtttacatattattttcatgtttatgatttaatatacaatattttgataaatccagaacatatag

SEQ ID NO: 343066 - DNA, 1424 bp, Cannabis indica
tacattttggtggtacccggatgtattgaataaggtgtagtatgggcctcgtcaagtatctctttcttgagctcatcacggttcggtacacaaacccaagccttctagagtaacattccattatttgagatgaagaagtccttaggccgacccgccaatacaatttccagaccataaactcaattcaacccttaactaaggccaactgaggtgctatcattgtgatactaaatacttaccaagaactttcctgctcaaagcgtctgccactacattggctttcttgagatgatataaaatctcgcagtcataatctttgagtaattccaactaccgtctctgcctcacattcaaatccttttgagtgaagaaaataattgaggctcttctggtctgtatagatctcacattttccccatatagataatgttgccatatttttagagcaaacacaacggcagtaagctctaaatcatgtgttgggtaacgttgttcatactccttcagttgacgagaggcataggctataccctgtcaccttgcattagtaaacaacaaacttttcttgatctaattacaaagctaacaccggtgatgtgatcaattgttgcttctactcctgtaaacttgttcacacttgtcggaccatacaaatcgcaaatttttcttagttgattttcttagtggcattgaaatcttagaaaaacttttaaaaaaaacttcaataataccctaccaacacgataaaactttgtaccacagtaattgttcttggccttggccaacttttagctgactcaaactttcttggatcgaccataatgttgggctttgtgccctaaataaaactctattttaatgtaatattttctattcaattatcaacaaagaaacaaatttattctcattacttattaagtaagattattggttcatgtgatgatttataaattcatccaaatccttatcacattgatattcttgtttattgtgttgtcagcacagtagaaagtaatcaagattatgtgattaaatgtattcctagatttatcagaaaacagggtttaagtgatatgataatctacaatgtagtttacttgcaccttggataagtgttatgtcctttccagggcattggttaagtaagcttgggttggatgcatggagtatgcatcggaagagaccgatattgaacttggattagatatgataaacttatcgtaatatctattaattcaatatacacctagtttattctagatcaaatgatctcaatcctgagatggttaggttctagttaagttgcattatttatgttctttaatctattagttaaatttgaccaaatggttcttcccgtgacgtataggttaagaacatggtagttcaattgagtgggagcgctaatcatagatatgtaatct

SEQ ID NO: 343067 - DNA, 911 bp, Cannabis indica
ggatttcaaaaggtccaatgaaccttgggctaagcttccctttcttcccaaagcgtttaatgcctttcattggtgatattcggagaaacaccttgtccacgatttgaaaattaatatcatgatgctttggatcagcatagctttagacccaagaactttctttcaccaacttcatcccagtgaataggcgatctacactttcttccatataaaagttcatatggggccatcgcgattgtggcctggtagctattgttataagagaactcgatcagggtaaggtactttacccatgatccctcaaagtcaagcacacatgcccgtagcatgtcttctagaatctgtatcgtcctctcggattgcccatctgtttgaggatgaaaatgtgatgaactttaactaaatacccatagctcgatgcagactctcccagaatctcgatgtaaactttggatctctatccgaatcaatggactttggaagaccatgaagacgtaaaatttcttcccatttccactctatccaacccaccacgaagtccatagcaatgtcttcccatttccactctggtatatttatagccatgtcttcctatttccactctggtatgttcagtggctgcagcaaccctgcaggcctttgatgctcaacctttacttgctgacagataagacacttaacaacatattcagcaatgtcattcttcatgcctgaccaccaaaacatggctttcaggtcttgatacatcttcgttgaccctggataaactgaataaggagtcgtatgagactcattcattatctctcttttgataccatcatccgtaggcacacaaacacgatttccaaaccgcgaaattcccgtttcatccactgaaaaatcactagtctttccagccgaaaccctatctc

SEQ ID NO: 343068 - DNA, 888 bp, Cannabis indica
cccggatgcctatcatgtccacctggaagtctttaagaaaattagtcttccttcagaaaggagttccagatggctagttgtttcttcctggaagggagtccttgatagtcgactctagttgttgcctttcctatctgaaagtccttttaacgtaccctttggtccgtcttctaggaagtgtaccgtcttatctagaagcacttcttcttatggtgatgtggatatattattatgaggagtttgttaagtttgttaagtcgtaactaacttaacaacgtagcatttgcagccactgactttgagatccatatccctaatctataaattgttagaatatattttactaggatctagatttactaacaagtatgtttattaacatcctaaatatgaatttataaaacaatagaatttgaacacatataaacttcagcagaatatatgtctcctcccactcagatctctaatccttgttcctttttgtcgcagagtattataaagatctgagcatgattctccttcaggttgttggattcttcacagtcttacaaactgtgattgagtattagacttgctatgcgtgggcatgcactcattcactatagacttgacattgttgaagaacaatcaaggagattttgaaatagaacaaggaagaaggtctaaaaaaactctagttgtctgacagaatgtaaactaggttataaaagtttgatgagaatgagaccatcctattccttttatactatttcacctagggttaggatttaaattatatggaataaaaaatgataaaataatagtaaaattagcattaagtggtcggccatatagatgggccccagtagttataattttactatttttttaactatttatcttttattt

SEQ ID NO: 343069 - DNA, 646 bp, Cannabis indica
aaggttatgtatataataactttaaattataagaagttttgttgtaattatttcaattatttaagttaaaaaaaataattgctaaaagatctttacttattaacaaattgcataaaattaattaataattatttgtaatttaattttaaatataattaattttaattaagtttttatatagaaataaagtatcaagttataagttatttattgtttatttattttttaatttctaaattaatcacaatcattcaacaacgatggttaaaaataaatgtaaccatcatagttacatatttaatgtaacattgaaatttctcccatatatatatatatttattttcaacacttatttattaatatacttccgaacaaattattacttgtaattccaaatcaaaattactaaagacatcctaattaattactattaacctgtatcatcaacaacttgattttttttccttctttctacaaccggcataatgacattatagtattatagattatcttcccatcaattgggcaagattaaataaataatatcctcattataaaaataaataaataaatgatatcaatcacaaacatacctgcttttttatttttacactttaaagtaattttttttttttttacggaattt

SEQ ID NO: 343070 - DNA, 1009 bp, Cannabis indica
acacgggtcgggtccaagcatcaagtcccgaatcgtcaggtcccgaggaggctcctaggtcacgttttggattggggtcgggtcccagatcctaatcaaagttctgaggcccaagttctggtcctagttcaggggcccaattcctaggtctgggtcccccatctatgtttgggtcctaggtcccgatttgggttcgagtctgagttcgggtcccagtccaagtctgtgtccgagttttaggtcccaggttcgagtcttgttcttgggtcctgggtttggccctagttttgggtttgattctgggtccgagtctggatctgggtcaaggtcccggtgttggtttaggtcccaggtcacaggtcccggtttgggtccaagtcccggtatgggttctggtctgagttagggtttagttttgggtcctgttacagtcccatgtctgtgttctagtcttagtcctagtccaattcctgttctggatctcggatcgagtcggacctgaacctgggacccaatcccagacctagactcaaaccaagacatggatcgggataagaacctggactcgaacccagacccgaacccacacccagaccgtgatcgaaacttaggacctggatccggaccgagacctagacccaaacctggacctgtacccaagacttgcactcggacctggacaaaaacccataccgaaccctagactcggaccaggactcagaccccgacccagacttggacaagaacccgaacccaggcacggaatcgaaatcagaactgggactaggacccgaacccaaacatggactcggactgggacctaggacccgaacttggatgggggacctagacccgggcctcggaacccagacccggatcgaaactcgagactcagacctagacctggatctggactcaaacccaggactcgaacccagatcttgacaatgaccgtgataaaaacccgaacccgaactcggactaggacttgaaccccgaccaggtccta

SEQ ID NO: 343071 - DNA, 1281 bp, Cannabis indica
ttttgggtttgggactgggttcaggtctgggtgtgggttcaagtctagggctgggtcccaaatccagacacagactacgggttttgtacaagcccttggtacagatccggatcccaatctcgggtcccagtgtggttccatttctggtgccgggtcacgagctgggtcctaggttcaagttcgggttctggtcgggtactaggcctcggtcctaggttctggttcgagtcctagtctcgattcgggtttaggtctctatctaggttttgatctgggttcaggtttgggtataggtccttgtcgtggtcctagtccttgttcagttctagttccatttgcgattcagagttcgggtcggagttcgagtcctgttctgagttagggttcgggtgtggatttcaatctaggtccagatcaggttccgggtgtgggttcgcatcctggggcttggtctaggttgggtacgagtcccaagttccaaacctgatctgagtctggattcagttctttgtctatgttcttggttctgatcctggtctgggttcgagtttgtctccgggttttagtctagcattgggtctgattctaagtgttggtgtttgagttcgggttcgagtctgtgtccgggtttgtgtccaagtatggaccacgatctgggtctaggttcgggtcaaggtccaagttcaaggcccgagtgcaggtccaagtttgggtattggtcaggatctcggtccagatctaggtctagcatttcgatcccagtctcggtcttggtccgagtccaggttcgtatccggatctgtatctagctccaagtctgtgtttgggatcgagtcccaaatttaggtccaggaccgcgtctcatttctggtctaggtacacgaccgtgtgcgggcccgagttccagtcacagtttgggtctgaggctaggtctgtgttcggttcttggtctgggtccgggtcctggtcatgttcctagtcttgttttagggtcctagttcgacgattattgttcagggtcttattttgtgtcctaggtctaggtctgggttcgggttttgttatttgtctgggttctggtcctagtcagagtcccagatctagacaccgactactggtcttttccaagccccgttacccgaatcccgagtcaagatctggatcactctcacgggtctcggtctgcttctcgttaaggtccacttttttgtttgggactgagttcaggtccgggtgtgggttcaggtcattgtcagggttcgggtccaaggctgggtccca

SEQ ID NO: 343072 - DNA, 977 bp, Cannabis indica
aaagaaaagaaaaagaaaaatattctattattgctagagaaaaaaatggcacctaaaagaactaggcatgtggaggagggttcatcatcaaacccaccaactacgggttttgatagaacccggttcggtaatgaggaggcccagaatcgtttcatgaggctgaaaaatagggcttacattgaagaccggggtattgaattccctgcaaatcccttgagacgtcaaccacggtttgagacaattcgagcccaaattgagagaatgaagtgggggagctttgtggatgctcggggccgggctaatgtgactatggcctgtgaatttcttgtcaattggcccgaccgccgaaatggggaagtaaaggtgcgtggaaagaaggttcccgctactgctgatgcttttaatgtgatgttctctgtccaagattactctagggaagagcaacgcctccgaattattgaggaggaagagcagtttgatatggtggatgtggctgagacggtgggatttccagggttgaggttccacgacaacgatggcacagaggggtcgccaaacatcctataccggtgtgaattaaacccagtggccaaaacatggctgtacttcgtaagtgctcggttggtgccaaataagcacttctccgatgtccaaatggatcgcctgaaatatgtgtacgccattatgaaggggtacaacataaatattggacaagtcatccggcatagcattgatcagattgtacaaggagccacgggaggtggttttggtttggcgggagttataacagaactctgcggggcatatgaagttccccaattggagtatgacaacacggtgttgccacttcgcaagatggacatcgcatttgtcaacaggctgaaagagccacatccttatggccagcctccacctgatgcaccgcaaggacgtaggcgacaacgagagcctagtgttgaagaagaagaggagcagcc

SEQ ID NO: 343073 - DNA, 971 bp, Cannabis indica
tatacccatattttgagcaataatatgatattgacacgtgtaaagaaactggaaaataacaaggtcgtgttataaaacattaatacattaaataaactcgccttggtaaatacatatggtagaaatattcaaactcacccttttaaaggtaagaacaagctatgaataataactattacctgatgagaccatcgaggtgcataactaacaaagaaggtccatcttaggatacaaaaaatagacaatagaatgacaatgcttggaaatggtagataattaattcttaaagagcttcgtgagtatgttgaaagattaaacactctcaacatgattcctctcggaatcgtcacactacggtagtgtcttgcgtttgcttctctcaacattttatataggagcacgagaagtattaccagaatatacttagtcactgacaaccctttccagaataaagcgtcttgaggagattgcttgtattacgagaagaataaggcatagttagcataaccacttacaaattaagctaaagattggttataagcagttatttattattatcacatgtgatataaatgttaaacgtgtgattgtctacgttatatgaacggttacaaggataagatctcgagggaataactatcaccatacaactcctataaatagggacaaaacttagggaacaagggacgaccaatttagggaaaatagggaattatatcaatatattcttgtattctgtatacaatttataaaatcccaaaataagatggacttatggactatgaagaattaatttcaaaactacgttaaaaaccctcttatcatatattattattatttatttaattctgagttcatttattacaaaaaaaggcttatttattggttaataaaaatctatgttaacataaccataagtcaacctcaacactcacgaatagagtgggttattgttgaaattattttaccag

SEQ ID NO: 343074 - DNA, 688 bp, Cannabis indica
tatggtaatatactgatgttcttgtaacgataatgactagctcatcaatttccatttcttcagttatagcttgttgtatacattcttcatttatctcctctgtatctgaatcactatccattctgctatagaataaatatgtaaatatataattcaaatatttttgaaataaaacaaataatattattcaagaaatcaaataaaccaagttgtttaagaaataaaataaaataaactaaacaaaccacaatattcaaacaagtaaaaagaaataacatctaatttagaagttcaaatcctgttctttcagccattcaatttgatatttaggctccttcaaagcaacaaaaatttccctatttgctttcttcatgaataaattagtaccaactttgaatagagggctcattggttcacaacctggaagtgtagctaatttatccatcacttcttgaacactacatccaggaggatcggtacgtatgtatgagctcctattttttattgcctcacaaatttcatcaagttgtttggacaactttgctgttgtagaattatttctttttcccttcttaaattgcttcttatttgggtcaagtaaattcttctcttttcttatttgttgacacactctctcatggtcactttcctctgaattctcatcgatctctatatcattatgatcctc

SEQ ID NO: 343075 - DNA, 868 bp, Cannabis indica
aggcagtcgacggaggaaggcagcaaagatgattccatagtcatctccttcaaatcaaacgacatcaaatctcaccaaagcaatcgataagtcggtttcaacgacagcctccggcaccggtcatcattttgtggctttccattaaacaagagtaatccaacagacaagtgaacacaaaaccattcattcccgcctccatcaccaatttaggaaagagtttaatccaacaacaaattttatttataattcaggagagagtgagagagtgaaagagagagaggattgagttgcagagaagagcatggttaaagggcatatgggaggccttgaaggaaatccttttgcagagggtcttaacatatagagctcgttcttctccacttattattccaaaccacttgcttaatctcaatgttattgtcactggagctaccagcggtatcagcctccaaacagccagattctctctcttttcaaaacttaattgcttcagattattagtttcatgtgaccaaaaatttagagcattaccaaatcagttattctcaccgattttgacatttgacctatagatctttgtttgggtcgttgatcctccctctgtgtcgctgtcgtcgagtacgcgaaggggacgattgactttgttatgtagggggttatgtcgataggaagaagaagaagaagagtggcagaagaagaagaagaagggttaggggagggggttctgtcgagaagaaagagaaagaaaaagaaaaaggaaaaagaaaaaggaaaaaaaaaatataatttttttttaatctgatttttaatttttttttaaatatttataattatttttttaaaaactaatattacgtggaccactaaa

SEQ ID NO: 343076 - DNA, 594 bp, Cannabis indica
ctagagtaggactagcatattgattacaggctaacattatggtcgatagtattgtcgtatgaacgttctagactcagtactgtgtgggacacggggattagggttatgattaggtgtatgggcgccaggttataacccgagttatttgtatgatatgtgttatgcttttcttactgagtctgtcgactcacagttctatttccatgtgtaggtaagggaaaagctaaagttgaggaatcgtgaggacgagaagatgaaggttgtacatgtcggggcggttagacttggagcgtacgataatcgggacatcagtgcttttgttgtttagtcactaggcgacaaatattttgttaatgaatagaaaatttttgtaactgtattttgtaaacgagatcccagaatcttataagtataatatgttatgttttaactaaaaagcaaaattttaattattcatgtttttccaataacctcgttgattagcaacgagttacacagtacgttcaaattcgcgctaacacgcctatgctagttggggtgttacatttttgtatcagagccgccaggttgtcttccgaagatcgtcacgacatg

SEQ ID NO: 343077 - DNA, 594 bp, Cannabis indica
aaatgtacatacacggattgaagagcaacacttctctttaccaagttttaatctttctttaacaatgttagacaaattttcacatacgcaaactaaagaacgaacaacatgcaaaagaagaagaaaatttgtacattcgaagacacttacttgtacaaacccaccgcggttggagacggagtcggagacacaaaaaacgaagtacactaagtccgaaagtactgtagtttcctcccccaaattgtaaaataattttattccctaaaagaaaatgtgaagaagaagaagaaaatgtgaagaagaagaataaaatgtggagaagaagaagaaaactctgctctaaaagaaaggaacccatgaacccacgaagaagaagaaaagacaaatgtaagtgtattttgaaaaatgataactgtcagtacatcaatcactgtcagtttttttaaaataattattttaaaataaaataccaactggttaccattttttgcaccctaactactcctactttaaccccagcccttagatcatgtcccaatttaatccaacagctacaatacaatccctcatttggcataacgggacaaaatcacc

SEQ ID NO: 343078 - DNA, 1317 bp, Cannabis indica
tcgtcgacctagtacgtcgcacacttaaacacttagttaattttcacgttaccttgtgatatgatctaacacgctcttccttattgtttgcagatagaccggctcgacccgcattggactcgactagcaaggaagtcgctgaggttctcggctgcctccctgttcaacatcgcgactggcgattgctgtgcacgaccttgaagctgagggaacacaagttaattccagagaacgccagccttcatcgggagccagtatacaaggagccgtctgagaagcaaaaggagaagatagacaaacgtctttctaaacagacctctcgaccaacatcaggtaacacatcgcatatatgcggtatatatatatgagtcattgtttatattttaacttatcttttcttgtcttcgtagaatgactttcttgaagcaagctcttgttctcaatcgcaagccgaagaccggaacagcgacgacttctcctgtcgttcctgagaaaaggaaaagtgacatcgtgattactctagctgctgatacgtccaagaagctggcgaggccctcacaagacaaggggaagaaagtcgtgatcgatccagctgttcgagctcacgattttctagttcttcaggagaagtttgtgggcaaggagttcatgtcaaagattgagaggaatccctctaaggaacttatgcctcgctccgcagagttggcttcgcagtttatgactatgttttcgaaggccttcgttgctggttccaaagaagtcgagcttttaaagaagcagaatgtccagcttcaggagaacgtcaagaagctaaagcaggaagtgactaacaaggacaaagagctcgaggaatttcgtaaacaagtcgaacttgaagccaagaactctaaggcaaagattgaggagatgtctcgcgacttggaggccgagaaggagaatggaaagaagcagtatgaccaagcggtctctaactacatatatacaactctttccaagattttagacttcgacttctcgatcctcggggcagaggcggctgagatggctgaggcttttcgagctatgtcacctacacagacccaaggaggtgggggaaatctttttcccgaggacgctgatgctgcgaatactgaagaggttgctgatgaggctgccagcaaagttgcagatgaatccactactccaactgcccctatctctcccaatgcttagtttgcttactttatgaatattttgccaaactttttaagcggtacgtgggtactcgcgatttatacttagacaaatttctctttatggtttttaatatttcgaaca

SEQ ID NO: 343079 - DNA, 590 bp, Cannabis indica
aagaaaacaaaagccaattttattatttgaaaaggaacctagcagctaattccataatcacaattatgtaacctttaaagaagaggcaaccatctattaagtaaacttttaaggcgtcacatgtaaattgcaatacatgatagtaattatgtaacttttaaagaagaggccattgtcgatcaagtaaatttttaaggcaacaataaccaacttaattgtttcaaatgggaagcaacgacatattccaaaagagtaagtatgaggcaacaatctatctagtaaatttctaaggtaacaaaaaccaacttaattatttaaaatagaaaccgacaacaaattctgaaagagtaactatggcttctttaaagaggaggcaattatctttcaagtaaattttaaagtcatgaaaagttaattttaatacttcaaaaagcaaccgtcggtggatccaaaaacgtttggacaaacaatacaaactctcacacagtggctaaaggcaacattcaaatatctttaaaattttgaaacatctaaggaaacattaacaaaagttaattttaacttttgaaaaagcaaccagcaacaaattt

SEQ ID NO: 343080 - DNA, 618 bp, Cannabis indica
cgaacgaaacctaattcatagccatcacaacaatccattaaaaattaagtaaataaaatactataattcaaacgtacacaatcctagatcagcttcgtaatcaaaccaaatcaataataaattaaagaccaaagtagcaaccccagaaaataaaatttgggggaaattaattaaaaagctaaattgattaaaatagattcgttcctcaatgcaaaaaacaacactgctctctctatctctctcgtgatagtgagcaggtaggaatttgaattgataaattgaaaagtgaagggaatcaaaagagaagagtaatgtaccttaaacgatcttgtccaatgtaagcttatatatcgatcttctgtgatggattcaaaaattaatctcagaacaaaattcttcccttaagaactctgaaagattaatttttcctctaagttcgatcaggcaaattgcgaacatacacaaacccatttgagaggactccttttcccgcatggttagccattggtctccaccttcataccaagtcccaacactgtaaaacgatagacttattcattcccaaaatacataatttaaaagaacaaaaaaaaacatcgaacgatgatacacttattc

SEQ ID NO: 343081 - DNA, 529 bp, Cannabis indica
aatataaaaagaccgtattttctgtaaataaaataaaaaaaaatcgtaaaaatatttaaaattccgtgaaaccgtatttttgtaatttttttgttgtttttatgtttttgtgaaataatcccttataataattacagtgtctattaattacattatgttttaaaatataatgtggtatgtgttgttaatgatatataaattcttaatattttatttgtcaaaataattaataattatataagaaaacaatattttttaatgttaatatttaaaataaaaaaattataataattacactcaattttcatagggtcataagattcgtagagtgtaattgaaactcctcaataactcttaattacacaattacaatgtaattatatacatggtcatggtcgacaaatatgtaaattgtgcaattatctccaactacactcaaaccctgttatctttggtaagcttagaaatactaactaatttttagtgatacttatttagtattggagatggtctaataaaaagataacaa

SEQ ID NO: 343082 - DNA, 524 bp, Cannabis indica
tgattaaaatagattcgttcctcaatgcaaaaaacaacactgctctctctctctatatctctctcgtgatagtgagcaggtaggaatttgaattgataaattgaaaagtgaagggaatcaaaagagaagagtaatgtaccttaaacgaagcgctggaaaggattgagtggcgttgttggatcggaatttcttcgtagttgggtagcaatggcgattatctgatgggaaggaaggaaagtggtgaaccctaattttaattgaatttcatattctctttctctctctatttttgaccaattataaaaaaaaagagtgagaaactcagaaagggaaatgggccctcttggcccacaacttcataataaacactaatgcaaaaaaaaagaggaaattacacttagtatgggattttaaaaattcttatgataaatatggcacatttaagtttggccaaattaatatggtatttttttgtttttaggtttttgtatggtatttgatatgccatatatatgtaattaggt

SEQ ID NO: 343083 - DNA, 797 bp, Cannabis indica
ttcgtgaaaaagaaggatggaactttgcgaatgtgcatcgattaccattagttaaacaagttgatagtgaagaacaagtatcctttgccaaggatagatgacttatttgatcagcttcagggaaagaccgtcttctccaagattgatcttcgatctggttatcaccagttgaggattcgagaagaggatattcccaagacagctttcggaactcggtatggacactatgaatttctagtaatgtccttcggattaacaaatgccccgacagcatttatggacttgatgaaccgagtgttcaaagacttcctggatgattttgttattgtctttattgatgatattctaatttattcagactcagaagagactcacgaaagacatcttcgaatggtgttacaacgtctcagggagcataagttgtatgccaagttcaagaaatgtgaattttggttgcctcaggtgagtttcttggggcatgtggtaagtaaagatggtattctagtggatccaataaagattgaagcggttcgagactggcctcgacctaaatcagcaattgaagttagaagtttcatgggattggcggggtattatagaagattcgttgagggctttgtgaagatttctacgcccttaacaaaattgactcgaaagaattgcaaatttgtttggactgataagtgtgaaagtagcttccaggaactaaaataaaggttaattaccgctcctgtaccggtgagtgatgaaaagtttgtgatttactgtgatgcgtccaaataggggttaggctgtgt

SEQ ID NO: 343084 - DNA, 842 bp, Cannabis indica
aattgatagggccatggccaatcagagttggatggacatgtttcctaatgctgatgtgaattttatgaacgaagagttgatggatcacacaccagctgttatgtctttctatgatatggctcccagtggcaagaaaccatttcgatacttcaaaatgtggaacactcatccagactttaatacagcagtagcagcctcctggaatcaacaaactacggggcacaaattgttccaagtggtcactaaactcaaaagattgaaaggggtactaagggagttgaacaggcaagctttctcggatatacaaagggctaatgagaaggctaaagacctgctgttgcccttaattttgtccaaaatacgtggaccaacgcgactgcgacacgtggatttgaggagtaaggttttgagataattcggctaagtctttttaatcaagaggatcagcaagaaacatacctcccggagaaggtatgagagatccacgtactcttggagggcaaagctattgcaaggcacctccgggaggtatcaaaccccatctgaacagtcatctcgcatttaatgccgcatgggagaaggcgtattggaactgccataagtattgaagtctgacggcgtaaccccccttctgcagctattacgctatgactaataagcctagtgacggctactttatgaggaatcacatcagtcaagaggggataatggattacatccacctaacccctaaaatacctagggaatagaccatgcatttcctatgttacactggttgggaatgtgtgcccctactgaaaaatacagaaagacatgtagctcggttctagggatcaccccac

SEQ ID NO: 343085 - DNA, 640 bp, Cannabis indica
tactccatgcatccaacccaagatttacttctactaatgctctgtaaagaacatagcacttatccaatgtccaagtaaactatgttgtagattgtcatatcagttaaaccctgtgtactgataaatctaggaatatatatttaatcacataatcttgattactttcctctgtgctgacgacacaataaacaagaacataaatgtgataagggcttggatgaatttataaatcaaatagacaagtaattgataacatgaaccaaatgacacacaaatgagtgaaaaatacttctgcttctttattgatattgaataatagagtttacgaaatggagtttcatttagggcataaaacccaacagatggtatgcatgcgaaagatcatctcgacaccacaaaatacagttatcagaattaaagcaatattaatatcgagaagtcatatgacgaccagttcaccatcaaagttaacttagctccattcctaacgagacatcctcatgagataaggcttatcatatatctttaatatgcgttcatctcgacccaataaaagcgggatactcacagctgtgtgaattctaaataaacaccgcatttacttagtataatttgtaatcaaatcccatgatttgaggga

SEQ ID NO: 343086 - DNA, 1087 bp, Cannabis indica
ataattaattattttaattttatttttttttctttaatctcatgtgttaaatatatattagatcaattaatatatttttaaaataaaatatattaatatataaagttataattgtattttaaaattatataaatataattggacggccattagatgatcattggattggttcggttcggttatctattagatcagaatttccattcaacaattgatccgattcgattagatttttaaaatttacatccgatccgatccaattatatgattaaatattcgattctattagatcggtcagttgtaattgaattggatgactttctgcacaccctattatgtaactttatgagtgttcatgtctctaatatttaagtaaagttttttaatttattttttttatttacagtgttaaaaataaaattaaaatattttattatatgtgtttgtttttttatacgtatgtggagtatataacgttttgatctttacttttaatattgtaatttattcaaaattaaagatttacagcgtaatttttaataaccataacatacacgaacaactaaaaaaaaaaactaaaatattttctaaataccaaaacaaataaaaatttaccaaatattatactataaagttacctatattaatgtatgagtatcacaaataaaaactagtataaagatatttatagcgttgaggctttaattgattatcgatgaagcatttatagatgtagcaaagcttgtacgtcaatgagcaaaaataaagtatagtatgtatgagtgaagtttagtagtgattttgggtatatatgcaataatgatgtacaagttttggtacatgtacataaatgtttttagggttaatttcacaaatgcacaaaaataaaaaaaaaaataacaaaaatacggttttacggaattttaaatatttttacgatttttttaatttatttacataaatacggtcttttatgttgaaattttattcatttattgttaatttttgttatatgtatgttatttttgttgttattttgattgttacttttatgttgttttcttgtttgatttttatattgttttcg

SEQ ID NO: 343087 - DNA, 523 bp, Cannabis indica
cccaaagcttctctctctctttcaaaccctcctagaaccagctagagttctgtttttcttcagtaaatcatgtgttttccagcaagatcatagtgtatccaagccaaggtaagatccttgcaactctctcttagttctcgtgagtttcatgttttggttttttgcatgatttgggtttttggagttttgtagtggctattgttgtttgatgctgttttcagaagttaaattaagttcaaatatgttgaattagattagttgtatgggctgttattaggtttgagtaagctttgagttttaaaactcaagcttggctctttaatggcaagttttgtttctgtgcatgttattgtgttttgtcaccttgaatttgtttattgggatgtttagaacaggtttcgaaggtttcaagtgatttggggttgatttgtgtcaggctatttttagcctacgttttgggtcactttttctagttgtttttcttctttgttattcttttcggaatagaattatgcttgttttc

SEQ ID NO: 343088 - DNA, 1083 bp, Cannabis indica
tgaggactatcaccgacggtgaagggccatattttgacttggaagaactagtgttgggcgatgatgggcaaccaactcaagatgctttgcgcagccaagcccagaagcttgcctcaacattagaagagcatgcagatgaagcccgaatatttagagagactacaccaccagtaccatctcctagattagatgatccttctgttggcctgtcagcatcttttcccaacatttcatagcctcaggaaaccaatatcttctaccatactggcaagattggagcgtgttgagaaggtacaacttgctttgaagcaaggccaaacggatattctgagagggtgacagagataatgggttttgaagaccctattggcactcatgggagatctgaaaaggcccagtgcaaaggcagagccacagccagacctcgtctctccaagagatgagttcattcttcccaataattacagacctgatgatgtggaagatgtactccatacacatcaaaacatgtcgatcacgtccattagagatacgcaagattcagaggtacaagttttagagaccattccaacaccggtggagaagagatcgaagaaaaggccaaggtagtttgacgagtagaccgaaatgaagaagaagatgaagccatcgatagccaatgtgaatgttgacccactttggcctgttgatgagaagctactacatagtttttgaaattgattagtgggaaccatcagaaataagtatccgagggacgtcttcactggtgtacatggcgtggcttggttctagaagctacttacgaacaaagaatgactttctgatgatgtaagtttattaactaagtattatgatttgttatttactgttatttaccgttgttatttgttttattttttttaatgttctaatgtggttgtgttgacttatttgaatgtgttgtgcaacatttggatgcggctttccatatgatgaggaggcggcaacacttcttcccagagttgtacccatgtaagtgtactgtcataccatcttggtttgcttcatcgttgacgggtcagtgggacgcttggaagaccaata

SEQ ID NO: 343089 - DNA, 862 bp, Cannabis indica
aacaataatttatttctctctctcttttataattttgcttctttttctttcctgttcatcatataatttccctaccataaattaaccttaattaattccataatacatcaatatatttatataaaaaacagaaaaagtattacaacaaatagctaaataatgtagcgacagattttttttttttttgataaaatttaatcacacactcattattagaatgctttctataaattaatagagcaaataatattttcagtcacacaattcacgcaggttaatttaatgaaatactacacaaaaaatttatttttactcataataaattttatgactaaaaataaaaaaaattgtgactaattataaattattattttatagtgtgattaaaagatttgtgactaaagatattagtcacttaaattataatttattgtaactaaatgtgtttttaatcacaatatattaaaagcaaattagtgacaacttgtatttaaaactaaattttagtcacaagtaacttttattgtaaaaaaaaattatattgtgattaaaaatgtatctctaaaaataattattttttttatagtgaaattatatgtatatatctataaccttaataaaaatggtaatattttggatccttaataaattaaattaccaaaagttccttctattctcacctaggggtgtgcaaaaagtcatccaatccaattccaaccgaccgatccaaatcctaaccgatccaatagaattggatatccaatcataattggatcggatcgggatgcaaattttaaaaattacaattggatcggatcggatgttggatgagacatccgatccaatggataactgatccaat

SEQ ID NO: 343090 - DNA, 739 bp, Cannabis indica
aagggggtatactgctacctagtcatgccatttggactgaaaaatgctgacgtaacttatcaaagaatggtgaaccggatgttcaagggcctcttgggcgaaatatggaggtatacgtggacgacatgctagtcaagtcaaaagcgtgtaccagccacgcggacgacttagaagaatgttttgaagtggtctggagatacgaaatgaagctcaacccgaagaagtgtactttcggggttaagtcagggaagtttctaggcttcatcctcagtcagaggagtattgaggcaaatccagaaaaaattcaagctctcctgggcatgccatccccaaagaaacataaagatgtgtagagcctaaccggaaaggtcgctgccctgagccgttttatatcccggtccacagaaaagtgcatttccttcttcaacatcttgaagaagtgttagaaatttgagtggtccgacgagtgcgaggaggcattcaaaaaactaaaagagcacatggccaagcctccaatcctgtcaaagcccgttctcggagaggatttgtttgtgtacttagccatctccgaacacgcggtcagcgcagccttagtctgggaagaggaaaaaactcagcatcccgtgtactatgtcagcaagcgcatgataggggcggagacacgatacccagtcattgaaaaactaggtttttgccttttaatggcctcgagaaagttgagaccctacttccaagctca

SEQ ID NO: 343091 - DNA, 953 bp, Cannabis indica
ccctattgagatggctataatctatgggaaataaatttgtgtttgtgtgtgtatttgggtgagttttggtgtgtttgggcttgaaaatcgtttgctgtaaagtggattttcggggttaggaacccaagtgtcgcgaccctctcattgagcgccgcggcctgcccttcaaaatcttgggtttttcaacccaggtgcggcggctggcttggggtgtgtcacggccggcctagtgttttctgggcagttttgaatgctatgttcgattgttcataactttttgatccagactccgtttcaggtgttccatatatcattggaaagctcgttctgagctctgtatgtttattttgttttgaatgtcaattatatgattatgtgaaagttgatttagggattaaccctatttgtgaatcccgagagttgtgactaggattatcggcacttggtcaggagcactcagggatttggaatctccatgtacttgggacattaggtaagacagcagttagcacgtagagttaaacgcggtggaactcatgtttgatattataattgtcattaattgagaaccgggattagggttattaccctaaagtgagcggttatatggcctagggttattaccctggtgattatatgattttaaatgttgtgccatgatataaatgtttaaataaagaattatgcgctcaaggcataatttggttggactcggtaattagaattgagatgaactgttctaaggccttattgtaattcaacgtgtgagcgtaacacatgggtctatgacacatagacataaataggcgtctgagcgtaacacgtaggtctatgtcaaatagacaataagtgtaatggtgttaatttatatgtgatatgttttactgcatatatggatgtttatactatcttgctaggcttggctcacgggtgttcttgttggaaattatttt

SEQ ID NO: 343092 - DNA, 574 bp, Cannabis indica
catcataatatatattatctccacatgatatatattatatatattacatacataaatattctcatcataaatatatattatcatatgttcaacatatatataatatatataacttatatacatgttatatattatgtatatatatggcatatatacatattaatatgtaacatattcaaatatcatattatatataactataataatatgacatatacactatacatatatatctcaatccatatctcaacataaaaaaatatgcatatatatatattatactatataaaaaatagtaaataacaaaatatcacaattcttaccattgtattatcacatgttgatttcttaccttccattgaagcaaggtaggaaagaataagtttttgactgttagaaaattattttgctccaatagaaatatcaaaccaacaagattacaactcaatgaaaaataatacaaaggaaaaaaatcacagattaaatcagggacggagggactttagcccatatgtgggctaaagccctcactcaaatgtatacatcaaattttttatatgtagatatatacata

SEQ ID NO: 343093 - DNA, 599 bp, Cannabis indica
ttaaatgaaagggctcaggtgtttattcaagagccaaatccagtaacgtctcaacaagtactgtctcgacccaatctggtaacccttcaaagaggaaagaggactctaagggatcagctaaagacaagaaaaagaaaaagaagcacgacaagtacttgcccatctaaaccgcttatactgagcctaatgaaactcaggaaaacatctatctcgtgcatgagcacaaggtcgcatttagtaaacctgggcctatgaggcacatgaggcatcacagaaatcgaaccagatactgcaagtatcacaaagacattgggcatatgatagacgtgtgtcgtcacttgaaggatgagatagagagtctaatcgcacgaggccacttcaagcaatatgtgaaaagacaggggcaatggacataaccagcctaatctgcccaacaacctaggcaaccaaggattacaacctcctcctattgaaggagaggatatcatggttatctcaggagcaccacatattgcaggagagagcaataattcccaaaagaggtacgtgaaggaagtgaagaacaagcagtcttcctttgctccagaatcttccaagaa

SEQ ID NO: 343094 - DNA, 1657 bp, Cannabis indica
aaaaacaaaagaggtgcaaagcctaactggtcgaatcgccgcactcagcagattcgtgtcaaaatcaactgataaatgtgttccattcttcaacatcctacgaggaagcaaaaagtttgagtggacagaagaatgtgaaagagcttttcaagatttaaaggcacaactcgcaaaacctcctgtccttcctaagcctctggacggcgaggagctgaggatatacctagctgtcacggagcatgccgtgagtgacgtgctgatgagagaagagaacagcgtacatcacccagtctattacatcagtaaaagactcattgaggccgaaggccaatattcgttgatagaaaagctggcttactacctcattctagcaacaaggaagttgaggccttactttcaagctcatcccgttcgggtgtataccgaccaaccactatgacaaatactacaaaagccagatgcatcaggacgcttactcaagtgggcaatggaattgggtcagtacgaaatcaacttccaaccccgaacaactatcaaaggccaagcattggccgactttgtggtagaatgcacatgcaaaaaagaaagcataccagaaagtgatcccgagccagtaccacatccaagtaatattgaagacaaatcgacgtggaaactacatgtggatgggtcggcaacagatcaattatctggtgcaggaattgcccttgtcacacctgggggcaacacttgcacgctgcagtcaagttcggattcaaggtctctaacaacgaagccgaatacgaggcccaattgctggacttaagctagccaagaaatgaaggccgaacacattgaaatctgtagtgattcatagctggtggtaaatcacgtgtccagctaatacgaggctcgagatgaaaaaatgatagcatatctgagcgaaatacatgatctgctcgcacaattcaaaagctacggtctcagacaaattccaagagaagagaatacaactgcagacgcgttggctcgattgacaagcagcaatgtaagtgacaaggcaaaattggtccctatccagttccttgaagagcctagcatcactggcacggaagaaatcaaaatgatcgacacatccccaaactggatgacgccaatagcggcctacctcaactctggggaactcccagataaccgaaatgaagctcgaaaattgagaagaaaggcggcacaatacatcttagtggaaagggtcatgtacaaaagaggattctcgattccattactcagatgtgtcacacaagatgaagctgcacggctctatatgaagttcacgatggattctgtggaaatcacgcagccggacagagcttatcaaagaaaattctaaggcaaggctacttctggccaacgatgattgaagattcgagaccctatgttaagaagtgcgacaagtgccagagcttttcaaagataccaagagccctgcccaacgagctaacacaaatgcaaagtccgtggccctttgccatttacggaattgatctaatcgggcaattacctaaaggtaaaggtggagtgcagtacgcagtggtggcagtcgactattttactaagtggactgaagccgaaccacttgcaaccatcacatcaaagaaggttcaagactttatagtga

SEQ ID NO: 343095 - DNA, 522 bp, Cannabis indica
aaaaaaatgagagaaagataaaataattataatatttttagctcgtcgccactagagttacctgactagttatgagctattttagctcaccatttatcccacttgttggaggtacaattttattaaattctttaaaattttagctaagaaactattttagatcatctattgagaatgctctaagtttcaattggtatacatttaatctcatgatctttatttttgatggcaaacttttttaatttatgtttgtcaatttaagagcattcttaacgtttctttactctatatttaaaatacatcatcaaaacttaatatttttctaatttacatcacacttttatattacaccatacattagtttttttaaaatacatcaccaaaaagttatttattattggctaattagtaatttttcccctgaactttgacatataccaaatcgtgccccctgaacttttttagccgttaaaaattctcctcgaactattgagattattaaatttaaggacttttgtctaa

SEQ ID NO: 343096 - DNA, 615 bp, Cannabis indica
acgagctcacttgattaggtgatgcaattttctggcgacgtactaggtgtaagtataggcgtcagtgatatatgatgagtaccgagtgttggtacgggctcacttgattaggtgatgcggttttcctggggacgtattgggcgtaagtacaggcgtcagtgatatatgatgagtaccgagtgtaggtacgggctcacctgattaggtgatgtaattttcctggcgacatactgggcgtaagtacgggcatcagtgacatatgataagtaccaggtgtaggtacgagctcttctaactagacgatgcgatatattggtgctagattgtagcacgggctcacctgattagttgatgcacttatatgatatgtgttgtaggtttttggcacagactcacttgattaggtgatgcagttatgtgacatatgggtgccaagctatggcatgtgcttccctgattaggcgatacaatacaagattatcagattaaagcatcgacttgcctgattaggcaacatgatgttatgaagatggttgctttatgaggtaacatatatactatttatatgattaaatgaatatgaattccattcttagtataatggttttgtattac

SEQ ID NO: 343097 - DNA, 525 bp, Cannabis indica
ttcttagacaagctaaaacaataattttgatttgatcatcaaatgagagttcccacaattccctgtaatgaagaacccttcattgaaagcatacaaaatgttactgtaaaggcatatgatataatcccaatactgcatagatattttttttcttagtgaccaaacagtaaaaatttccaaagaatgacacaaatgaatacaattgcacttgcctttatttcttcaatggtgggttatatagaagcattatccattgtcaacaaagtctaaatcaaccaaaaccacataaatatatagatggttggcgcacgataaatggtggagagtagatgttttggagtaaaagtgtagatcgtcgtctggtaagagatgatggacgttgtcttaggcaaggagtgttggacaaccagggaatgaacataatcttcaaacacagtttcaaaccatctaccattaagtccctctcttctttctcactgtaatctatattatttttcactttttatatatttcaataaaaaaatt

SEQ ID NO: 343098 - DNA, 703 bp, Cannabis indica
tgaccttggtcggtcttaacatacttttgtaggtgcagattgtttttcattattaggaatccaatttcccccttcaagttgtagcattcattagtgtcgtggtcgtagtctccgtggaaccgacaaaactttgtcatgtcctttttgtttgcatctttcttcatgggcctacgctttttatacggggccagccactgagttgccatgtatacactttctatatcgtcagtcagaatagtgaacgcagtgtatttggaatgattctcccggggagcttgttcggatttgccagtaaactttcctttcttcgcattcccttccttgtggttattactggagcgcttaccacctgagcttgaattgtttgggtattggggaagttgggcggatgttctagtggaaggagcctttgacttgccaggcttttgttcaccttccgcttgttgaatagcttcttcgagcttgatgaagcctttgcctcggtcaaggaaatcactcattgagtctactggcccgttcttccttatatccttctagagattaatgaggacttcgatgccccccagtattgcggataactttccatcctcagttacccgtgaaactttggccgcctccgtcatgaatctgctgatgtatgcccggagtggctcgcctggtcgttgcttgacttcgacaaagtctcccaaatgcaatgggagtt

SEQ ID NO: 343099 - DNA, 389 bp, Cannabis indica
tacttcgagcttgacttaatagagataaattaaagagctcttatttcagtgattatattagtttactgaaatatcatttataggaagttaagtgttttaaggataaaatacattgaagggtgaaacgataaattttttcctactcggtgtaaatcatctatagaggatctttgattattgggattagaacgattgttagattttcatagcgtatctatattgtggaacatataaagcattctatataattgagagtgcaattccaaatctatagaggtggaaggagaaattaataagttagggaatttacttggtaaattctagatctgcttatttgaagctcggttacataggcccatggtccctaactagttgagacaatactgctt

SEQ ID NO: 343100 - DNA, 584 bp, Cannabis indica
gaatcgaattcatctaatattttacgcgcgtctagtatgcattgggttggatccatccagtccaaaaaagaaaaatgtaaaatattaatattaatttttatatatacatatatattttaagtataacaatgtaaaatttaattactcatccaaaatactaattagtgcaattagatattggatgtataggatttttagacatctcatccaacattcgatctgatctaattggatattcaaaaataacatccaatccaattcgattacaattaaatatttaatatttcccattcagttataattagatcgatcgattattattagattctattgatttatccacacctctaaatttattattattatgaatagtaaataataatgtttttgagaggttgctgttgttttattggaattttatatttcccaaactgtgatgctcagattactcaactgcatatacgtgacagtatcatggtttagcaaaatatgctttggagttggatgaagatgtctgttggacgggtgttgtttacagtcctattttctctgttattgtaaacgattataatcaataatatcag

SEQ ID NO: 343101 - DNA, 635 bp, Cannabis indica
tcccagatggcttcttccaccttgatttctccagagtactttgaccaaagctatggtcttatttcgaagaactttatcctttctgtcaaggttctgaacaggttattcctcataggacatatctggttgcagctcaagattctcataactaagtacaggagctgggtgtgaaacgtatttctcaacatcgagacatgaaatacgttgtgaactgctgaaagagctagaggcaaagctaaacgatatgccacttgtccaaccttctcgagaatctcgaaaggtccggtaaacctagggcataacttgcctcttttcctgaaacgcttgatccccttcataggagacacccgtaggaacacatgatcccctacttgaaattttacatctctacgtttcggatctgcctaacttttctgcctgctttgagaagcaagcattctggctttaatcttctcaattgcttcattggtccgttgcactgaattcgaacataagtatttcctctcccctgtctcatcccaatggatgggagatctacactttcggccatacaacaattgatagggatccatccctatcgtactctggtaactgttattgtaatgaaaattctatcgaacggtaggtatttactc

SEQ ID NO: 343102 - DNA, 1038 bp, Cannabis indica
gcacatttcctattctaaatctctacactatattttactctctttgttcattactcacaacacaagtcattcatcattcatttattggtcaaatatgttatgcatattctctcctagttcagttttacaatgtttcttaagtttgactctgattttcggatatgatttgcattcatcatgtacttatcttttctaatgtggtacttttttttaaactataactacacaattcattattgcgctgctttgttcgctgttgatagacagatttagcatatttacatttgtaatggttttgttgtaacatatggcccagaccggcttcggtaccaattttacttctaggataggatgtgaagtgggatattataacttgtatgagagaatattttctgaacattcctgtgaaatgttatgtacttttcttgataatcacgtttttgaatggatacctactattatttgcatgaatttttgggtttgaaattcccgaacataaatacattagtatctggtttgaccgagtttattatgaacagatatgcatgatcatagctttttaatataatatatataatcttatttatcttcatagaccaacataatcaatcaggcatgttagagcttaattaattaattagtattgaaaatctctccaatcactcttttgctcaactttttgtcatttgtgttcaaacatcaattattggctccatttgatttactctgttttatattttttttataggctttggcattttgcaagtgtttgaaaagaatttgagtcaagtggaaatttcaatctcgattcatcggaggtatatattatttttttataattgctttattatattacatataattttatagaagagtttgaatatcttatatattcatccatagtgaagtaggttctgcgaaatttgtgtgctgcggtgatataaggatgataaattgtgtgttatctgattatttatagttaaaattgacagatggttaggttaataaaataggaaaaatgctgcccgatttttcgta

SEQ ID NO: 343103 - DNA, 698 bp, Cannabis indica
tgttgaaaaaggaagaattaaatggataggaaaaagaaaaagaaagcaaggaagaagtggaacacaagctgaaattagggcagattgctgaagcaatgctgaagtgaattcagcattctggcagtgacgtggaaacacgagtttcacttatccacatcaacaaattcgtcccaatcactcaaaatacaccagttggctgttgtggaaggaaggggactaaacctagtgggccaaagtgcaaaaagaattgggcttctcatttttggggagtgattttgtaccctaagaaccaaacaactaaaaggaaaaagaaagaaagtacatatcttcatcttccattacgtaatgaaggagagctgctgcattttttttggaagagaagtaactgcagaatagtacagcaaaggaggaagaaggcgtgaccaagctttagtgtttgctttttcttttaccatctcttaatagtttcttctcctttctcttttcttgttgttgtacttagttattaaaaactttgtgagattgtaaaactgggcagcagccatggatgatagttttttagcttggattttactttttgaattgaatatgacctagacttttgaggcttgaatggctatgaacttctatgttgggcatgattaatttttaagcttactttagtatatttgcctttgttcattcaagtgagtttcatt

SEQ ID NO: 343104 - DNA, 740 bp, Cannabis indica
aaagatggggttcccgttgtgaataactgtccataaaatcctgtaataatcttggtcatatcttcaactttcgagcaccattcattatccctatttaaaaggcctaccaagaatacaactattaaaaacttaaggaaacaaaattaatgttacatagttttaaaaatttcttaattcacaaaacttaaacttaattaatgtctgcatataatttaaaattttcctctttaattttatattataaataataaccgatggatacaaaacttaaactttaaaatattatttaactaattaattctaaagtccataatttagttaacatgtttttcctattgaaagagttatgctagttttcaacaaacttgttacaccaattatacctattaatagaaaacaattttggtattaattccaaactatacttatccacatacttaataatattataagcttcatcctcttatttattcaaaaccatccctttaatttcaaaattatcaagacattctaacacaaaaaaactcgtattttcaaaattgtaattctataaattaacctattaccaactttagaaaagagacataactatttttgaaacctataatatgtcatagaagattattttaaaccacatttatttaagaatttcattttatattatagataaattgagttaacacctccacagtatagttgtctatacactttgatttcttttctacaattactttagatgt

SEQ ID NO: 343105 - DNA, 551 bp, Cannabis indica
ttcttccatttcaaaatggaatattcattctaccaatatgatggaaatgtcattctattggaatggtattccaatggttttaaatgcaaccaaacaaaggaatggaataaaaattatttcctttccattccattccattcataacctccaaccaaacgccaccgtctagaaaataactttgagaattatcaagccttaaggttttttaataaagtattttttgatagaaaactcttcattcaaatgagcacattagacttttttatatagtgttttaggtgatcatactgaggattcacacactatctcatttatctcatataaatgagtattaatatagtttgtaacaaatatatttcatgacatttgaatcctatcatcaattttgggtaacatctcttttattacacaaaaatgtgatcaagcaaaagaagttacaaaaataattaatcttgtaacttctctcaatgttacaaagcgtaggttacaattttaggttaaataaatcatatgtttcacaatttatttaccaaacacttaatatatattat

SEQ ID NO: 343106 - DNA, 466 bp, Cannabis indica
ggtaaaatatttccaacacatacgatccccatattcggtggcactacctgaggccagtataggtgcaggacgagcatgttgctctctcaggtctcgaatctgctccccctactgcctaatcatatcttgcatcgcagcaacaattgttcccagttctgagggggtggaggatgctcttccccaccacctaccccgagttccagctcgcggtttaaacggccagatcgccgctgcatgatccaatatcctgtaacccaaaaccttcaaccatttagaattcaaacaatatcaacatcaatatgcatatgctattcacacactacttcttcccatcatacactataattgtctaaacaggtaaggcaatagcaaataacataaacacttactataccatgagtcgacctgtcgtcgcagaaaatgtacatattcaacccttcttcaggacctttaaaaccatggctgc

SEQ ID NO: 343107 - DNA, 977 bp, Cannabis indica
ttttcttttgctttaggtactgaagtactaggccttaaaattggaatctccgtcaatggttgaacatctgtttgtggggcttctctaaacataaacttgggttggaatgaaaactcctttaatgtttcactttctttctcagattctttaggtagcaactgaactacttccagctacacaaaaaaataataaaaatattcagcatgctctaaagtaacttggttacttaacaaacatgataaagtaacctggttacttttgacaaaaataataagtaatcttgttactttaaaccagaaatatttattaacatgagtattataaatttataaaaccaattctaacaaaagttaagctacatttcaataaccacaattaaatctacaataaataaaccaataaatttaccttttttcgggtaaaaattttcttatttaatgcggaataactcggtttgcgtgtacatttccagcataaaatcctttgagcatcatcacaaaccttctcacaaaaagttggagaaagagcaggaatagtctcaaatatccatatcaaaaatgcatatggaaaaccaaatagcttgtaggaatatggttgaacttttcctgtttcctcatcaaacatcttctcaaaaatctcttcttttttcatgagacttaatctcattgaatgacgagatttttcccataaaagtttaccatatgggaattgttgaaaagtggcatcatctgaatcaacaatattccaaaagaaattgctcactttggtttcaggaacagtaccaaataaaaaattagcaagaaaatggaccaaaccaagtttgaccatattaacatccccttttgctctcttccgaatgaaagcattcctaacttctttttttgttatcaaacccttgctttccttaaaaagtactttccttaaactctcatccttctcaacaaagatagaatcatcatcgttaccatgacatttca

SEQ ID NO: 343108 - DNA, 798 bp, Cannabis indica
atgaatagtagagatgttatatttcaagaaaatatttttccttatttacctaatgaaaagtctagtgcaggaatggaagatactaaccctgcaggtacaagcctagaagttaaaacaagttcaaatcaggtagaacaaaatggagacacaccgggaatggttcaggtggaaccaaactaacactagcagcccgataacaatgttcaaggggagggaactgatgctcaacaaaagatcagggatgaagagaccgaagaggaccttacaaactatcagttgacaagggataggactaagaggactctgaagcctaattagaagtacaactacaacatatggagtgaagaactggcctatgcacttctaacagatttggaaatggatgacatggaacctgttaacgcatattttaattaactaaaataaaatagcctttacgtaataaattctctacagaaatatataagtaataaatgatcagacaacaccaaatattttacatagttttgtagttaaaatctacatactccacgagtccttattcttagggatatttattgagtacacaatacaatctcagaattcgaataataataactatctctcccattttctgttccttatcccatagaatctgcccctatttataggaatataggttagtagttactttttttttatttaaaaggaaaaaagtgtgcttatgcttttttatttgacatataaataaaatatatttgagatattttgttaagaaattagtaatttttcccccgaactttgacatgtactaaaatc

SEQ ID NO: 343109 - DNA, 905 bp, Cannabis indica
gtaaagataaaagttgtataatattgttcgaaaaaatttattttaaattggcaaaacagtaattatttatttttgtaataaataaataatttttttaaattaattaaataaagaaatatataaaagttattaagacaaaatttgttaggactatatttgttgagacaaaagttattaggacaaatgacaccatccttgtcttaattgagataaggtagacacctaccttatagtagggtatctctattagttttttctttttgagttgattaattaatcaattcgattggatatgtattttaattttaaaaggctaaagatatttcaaagtagttgagatattctctcaagtagttgaaagattctctcatctaaaatattagcaaccgaaagcggttatagatatttatttaaataattaaatatgatttaattaactgaggatttaactactaaagtggaagcgagattctagaaatcaaaagaagcttttcaaactactattttcaacataccagggagaaaaggaattttttttctctctcaaatagttcttgctcatgtgttgagaattaatcaagaataaattatacactttatcctaataacccacactattctttgtgtgtggttggaagactacagtgtgagtttctgatcaaccaaaagtatacaacttacaagaagtttcgagaatactctgatagttatcaagaggtatatattcttttcttgtaatttatattttgatttaatgtatacacatttggagatccattgggactgtggtatgataatctgatatataaattctttcgttggtacctaatttagtaccataaaactaataattagtatcagagcagtttcatgaatatatatacattaaatgttgtgtgagtttt

SEQ ID NO: 343110 - DNA, 1241 bp, Cannabis indica
agaggatactgattcccaaggctatgaagtgatgggaatagatgcagatgggacaacactagactcatttggtagtgaagatggtgcaggtggtgtagattctctaaagagtcgggttgcatccgctcgttcttccaatgtcgaggcaagcttttgcgcctggcttcataaagcatcctgttttggttgcccatcgtcacctaacaccagttcctccaagtcaataaataaaggcgcctcaccgccagtgatgtaactcacaaactcagtctaattcgctcagggacataacatagagtacactgtcaactgaaaaattaaaacaaatatattaatagatagaaattaacattaaataaatgtaaagcgtaagaaacttacatttctagcaaacaatcgtatcattctgtccttgtcgagtgtcgtttttggcttactctcccagctgactattctcgaaaagcaatgcgacatcttcactgcatccttgttgcccagctccaggatggcctcgtatgctcaataatgcaacattgcagtataaccataagatgagtatttagcctccttctgactaactcccttttcaatcttcttatgcatcctattcttcacgtctatgaaatacttattacaagttttcatcaacttgttgtacgaaatctttccccacaggtactcgtagaagaatagatggttgtcaaccattcttatgacaaaatgaggaacgacagttatctcctccttcccagtgaggacgcccataacaaacaaggtcattcccaacttgtagacatcatcaacttctgtgcagctctcaaaaactctgtgcagttggccaaagctgatggaaaaattaccgttgaaatactctataatcaactagttcaaacttcctttctcttcaatttcttgtttagtatgtccgggcaacaagtttaacccggtcaccaaaccaaactctaccctaccgaatttacatctcttctttgcgaagtaaaagtgtgcatcgtctggcttgttagatttgttcttgtgcaacattaattgatggagcaatgcccccaaaaaattatcatagttctctctcgaaaaactgtatgaaaggggattcatttacctcccataatctgaattcctcaaatttggccttaatctttggatagtaataactttcgtcgcgccaagtgacacggcctgtgtaatgctttgagattggaattattagctgtggaggtctc

SEQ ID NO: 343111 - DNA, 2727 bp, Cannabis indica
tctacgtctgcgtttgtctagcggtttcaatccctgtctaggtttgggtcggtatttgggtctgggtatgggttcgtgtccatgtctaggtccgaattccactttaggtcaggggcctcgtcttggtctgggatcgagtcccgagttcgtgttcaggttctggttcgagtcttagtcctagtctaggtctaggactgggtctgagcccgagttccggttctaggttcggtctagttctgggtccaggtcgaggtccaggtcacactcacgatcatgttccagggtcctgatcacgttcttgttcaagtttaggttttgggtcccacgtttgggcctgggtctaggtccttgtccaacttcgggtccttctccgagtccctgatcaagacatcgactatgggtcttgtccaagccccggttctctgatcacgggacaagatttgcatcccaatcacgggtcccagtcttgtttcaattcatgtcccaggtcagggtctaggtttaggtctaggtccaggatcaagactggggtccagttctgggtctcgatcccagttctgggtcccgagtcatgttcaatgttctggtctgaattcaggtctgggttcgggtcctgagtcccggttcgggttttgatttagattttggaccgaatcccacggtgggtctttgaccgagtctgggtcttggtccggttacagttttgggtctaggttaatgtcctggtcatgtcttgttcttgggtcctgatccgcttctagtttcgattccagttttaagtcacgagatacaggtttgggtcgagtttggatccgagtctgggttcgggtcatgatttgggtctgaggcaaggttcaggtccgggtttcagtctcaggtagggttcgaggctgggtctgggtccaggtcccggtcccattcaaagatcttggtcccgttctaattcatgtttcggttttggttcacgagtgtgggtcttggtcttggtatgtgtcacggtcttagtttgagttcgagtttgggtttaggttctagtgtatgtcctcgatccaaacaccgagtactggtcgggtccaagcatcgagtcccggatcccaggtctcgatgtgggtcctatgtccaggtttgggtcttgggtcgggtcctcgatcctcatccaagttctgagaccaagttctggtcctagttcaggggcccaattcccaggtctgggtcccccatctaagttcaggtcctaggtcctggtccgggtccaagttcgtgttcaggttcgggttcgggatcaggtcgaacttgaacttcggaaccgatcccaaacccagactcggacacatacctagaccgggatcaaaacttgggaccttgatctggactgagacctagagaaaaatcttgacccgtacccaagacttggactcgaaccttgacccaaacccagacccaagccgggatccagactttgacccaagccaaccctagactcagaccaggactcaaacccctacccagacctagacccgaacccgaatttggacatagaatcgaaatttgaactgggactaggacccgaatacgaacatggacccgaacatagtgggggacctggactcaggcctcggaacccagacccagctcagaactcatgactcagaccccaacttggatctagactcgaacctgggactcgaacctagatctggacctagagagggatcaaaaaccgaacctaaactcgaactaggacttgaaccccaaatgggccctagacacggactgagacctaggactgggacttggatggggaacttggacctgagacctgggctttggaactgacactgagacccaagacctgaccttggacccagacactgaactaggaccaagaccaggacctaggatagtgtaactagactaggacccgagaccgagatcctgatctggaccgggggcttggacctaactcatagtccatgtttggatctaggacccatacctggactcaaacccagacccggaccatgacctggacgccgtgaaccaaaactagaagcggaaccggaagtagaccgggactcgggaacacgaccaagggactaggaccaggtctcggtctcgtaactaaaatctgactaggacccagacccagacctggagcgggacacggactcaattcaaaactcgaatcgggactctagacacgaacccgaacccagacacggacttggatctagatcttgatgcaggacttggaccgggattggagacttagacctggacccaggtccccgacttggattggggacttaaactcaaaattataaccagaatcgggacccaggactgggactaggaccccagacccgaccccggtctcggtcctagattcgactcagacacgaacacggaccgggacccaggattcaaatcagaacaagattgggaccaaagattgggatccagatcttgacccacgacccgaggcttagacccaactcgtagttggtgtttagtctttgaatctactaagacccaaacttggaaccatttccaaacaaggacccaaaccgagactttgactcgggacccgaaatcgaaacaacaagcagaatcaggaccttgaaacaggaattggacctcgacaaagaacgggatctagacgcatagccgaacacagactcaaacatagactaggatcgatacccggacccagacttactccagaac

SEQ ID NO: 343112 - DNA, 861 bp, Cannabis indica
atattttttttaaatataaataaataaataaatttttagtgacacttcaaatttttcgtgacacatattatgaaacacaaatgtaaaacttttactgactaagaatgtgtgtcactaaaaattgcttaaaacatttactgacatgcactttttatacatgtcactaaagagtgtcactaaatgtataaattgtagtagtgaataaaccaaggaggaattagcttttcctcctcatttttttggagttcagccaagattcaagggttcttgaagcaaaggtaaaaccctagaacctttatttatgtgtttttgacgctttgggttagtttaagtatgtgattttgggttttggtggctgttagggttagggatgcttagggttcgaattctaagtttgatttgagttaattttagcctctagtagctggtttggttgtgttatgatcaatttatgcaagtttgagctttgagctcaaagctttgatctttaatggcatattgtgatacagtgagtttttctgtgaattactggttggaaaatattgtgtataccctaattaggtactctggaaagtttggtggcatttggaggagttttcagcaagaaatggggattttgggtgaactggtgtaaaccggctaatcggttttggtagggttcccgaatgctccattttctcaattctcgtgcattctagtgccatagttaggtgtttccccatttcttgagttggtgtgatccctagagaatatagcagaacctagtgtggtgggtttgggtttcccggattagggttttcgatcatgtgatttacccggttttaatatgtgattagggcatccatctagcacgtgactttc

SEQ ID NO: 343113 - DNA, 753 bp, Cannabis indica
tcaagacttgaaatacttatctgtcaaaatctcaaaaagtcgtttgtagaagccacgaataccaaatatgaaacatttctcttacccattgaccatactacaaatctaccctaaacaattagagacaagccataaagatgacacgaaagccatagaaggcatccaaaccataaaaaaaaatggtgcaaaaataatactaataaagtactaataaaagtataaacaaaataaatatttgaagtaaatataaataatcttaaaaatttgaattgtaaaaacaatactaataatctctaaatataactatcatttaaaaacaataaattagaaaataaggatattacacaaactaacctaaataatttgacttttatcacataaaagactaaataaatacataataatattaatagtcttgtaattaaaaccgcacaactaattgtatatatgctataaataagaaaaatatctaatattatatatactataattacaattaaatattatataaatatactaaataatagaacaagccttaaaagctcaaaataactaatatcatgaaaaaatctaatgctagtaaaatattaaatcaaaataaagatattattaaaagttataatctgtcattaaaaaaataaaaagaaaattaatattaaaaaaagaatctaaatatttcaaaattatgaataataaatataaataaaagtaaatataaaactacaaatagtaaaaatagtgagtattataatt

SEQ ID NO: 343114 - DNA, 591 bp, Cannabis indica
atttgttagaaagaatcagaatggtgcagttggaagatcatgagctagtcgaaattcgagatgaagtattggttagtcggcctaaggacttttcaatctcgaataacagaatgttactatataaagctcgagtttgtgttcctcataatggtgaacttaagaaggaaatccttgatgaagcccacactacaccttattcgctgcatccgggaaccaccaaaatgtatcaggctctaaaaccctatttttggtggtatgagatgaaaagagatgcagtagagtatgtatttaagtgtttaaccagccaacaaatcaaagttgaacattagaagccggcagggttgttgcaaccattagccgttcctgagtggaagtggaaggatattacaatggacttcgtggttagtttgcctagaaccataggaatgtatgattcagtatgggtcataatggaccgttttacgaagttagctcattttctgccagtaaagattacctatacagtgaattagtatgctgaattgtatgtgaagaagatagttcgtctccatggagctcctaaatccattatttcagacagagatccaaagt

SEQ ID NO: 343115 - DNA, 1022 bp, Cannabis indica
tcttagggcatgttgttaacaaaaatggcatcctgatggatctggtgaagattgaggcagttcaggattggcctcgacccaagtctacaactgaagttagaagtttcctaggattagcaggatactaaagaaggttcgtttaagggtttgccaagatttctacacccttaacagaattaactcgaaagaactataagtttttttggactgacaagtgtaaaagtaggttccaagagtttaaacagaggttagttaccacaccagtactaaccttgccaatcaatgatgagaaattcgtgatttactcgacgctttaaaataatggttaggttgcattttgatgcagtctggtaaagttattgcctatgcatccaggcaactgaagcagtctgaacaatggtatcccacacacgatatttaattggtagtggtagtttttgctttgaaagtttggcgtcattatttgtatggtgaaaagtgcaaaatctacacagatcactaatgcctcatatactttttcactcagaaagatttgaatatgaggtagtggcgatggttggaatagattaaggactacaactgcgagatcctctaccatcttagaaaagcaaatgtggtagcggatgctcaaagtcgaaaagctccggagcaagtttaatgaaataaagaagatcgcaccgaaattggctgaggatatgactaaagtaaggattgagtttgtagttgggaaattggccaatattacgttacagtctaattagttggagggaatctagacaaaccaacaaagtgatctagtattacaagagtataaaaattttttgaagttgagtcaacaaaggatttctcaatctcatcaaattggttattgcggtataaaggaaggatttgtgtaccagttgacgatagtatcagacaggagattctaaacaagtctcacaccatgccatactaattacatctggggaacactaagatgtaccaagatatgaaagccctatatgttgggatttatgccctaa

SEQ ID NO: 343116 - DNA, 761 bp, Cannabis indica
ttattgttatttgtagtatccaacatgacaatgaccaaccccatggtgtcactcttgactgataataagctgaatggatctatctttaccaaatagagagagaacattaatattgctctcattggtgaacatgccctgtttgtgttaactgaagcggctcctgagcagccgggtgagaatgcaactaaggcagtgaaagaaaagtttgagcgttggcagaatgccaacaacaaaactcgatactttatgctgtctagtatggttgacaccttgaaaataaggtttgctaacactctcacggctgcagaaatcatgaaccagttgactgaactattcgggatggcaccaattcaaactcgctttgaggcgacaaagaatttcatcaatgcacggatgagacctcattagagcatgcgtgatcaccttctctagatgacaaggtacttccgagaagctgagaatcatggagctattatggatcagacaactcaagtgagtctgatctggaacagtttgactccagcctttctacacttcaaattctgtcatgaacaagttagaacttgactttcacgagttggtcaacaaccttcagacatttgaatatttgattggaggaccacagaaaggaggatccaaagctcctaattctaggaatgctaatgaggcggctaaggctgaggcaaacattgcctctgcttccaaacccaacaacaagaagaagtggaagaatagcaagaagcctgttcaagctgtgaaaa

SEQ ID NO: 343117 - DNA, 632 bp, Cannabis indica
atcgctcttcctcttctgggcaacaaccggcgaagtcgtcgctgttccaccctttggtttgatcttcaggacaggggcagacttcagaaaagtcatatctgcgaacataaatgaaagataagtataagtcaaaatcctacctgttagtttataacaagagacgaattacctgaaatttgtcgaggagtttgcttagaaagacgcttgtctattcgttcttgctgcttctcggatggttctttgtatactggctccctttgaagacttgcgttctcaggaatcagctgatgttctcgcaactttgcagttgtacacaataatcgccagtcgcgatcttgtaccggaaggctcccgagaatttcagctgtctccttgctagtcgcgtcaagggtcggtcgagctggtctatctgcgatgacaacaaagagcgagtaagcaaaagatttcaaaagtaatgcaaaaaaaaaaatgtgtctaagtcaagaaatacgcgacatactgggtctgcgattaaagtcagtcctaatcccaggaaccttaaagacgtaaaaccacttcgatttccaatcacccatgttcgacaccattccctcaactccgttgatttcagaagtcgcccatttgctaaagca

SEQ ID NO: 343118 - DNA, 851 bp, Cannabis indica
agatctgagcggaaggagtcaatatattccattgcaactaatgtaagattttcttaaactcttatgtgtttaatttttattatttttagagatattcatatttaggatgttaaacaacatacttgttagtaaatctagaccatggtaaaatattcctaacacttattccttttatactattttacttaggattagatttaaattatatagcattaaaaaattgataaaaaaaattaggcataaaataccttaagtggttggccacatagtgggccccactaaattaaaaatttgctattttactcaactatttattattttctttcacaaatgccatattttccaattcaatcacttaaatgtcaaaattatttatttaataattaaaattaactatcaaataaaattgtcatttaatttatttattgattaaacttaataaagtctcttaattaacaaataaaccctaaaatctcttttcttcacaattaagcctcaccttagtgaaaattcataaataagatatagtctaattttagaattataattgattaattaaaaccaattaaccgagtcttacaagcagtattgtctcaactagtatggggatcatgggcatatataaccgagcttccaattagtagatctagaatttaccaagaaaattcccaaactaataaatccctccttgcaccactatagatttggaattgcactctcaattatatagaactctctatatgttccacaatatagatacgctatgaaatttaaccatcgttctaattccaataatcaaagatcctctatatatgatttacaccgagcagggataaatttaccgtttcacc

SEQ ID NO: 343119 - DNA, 699 bp, Cannabis indica
ttgatttgaaaaaaaaatacatatatatagtacatacatatagcaagagagtgggaactagattgagtgaacattgtgggttgagaatgaaattttgggtgagcgcttgagaaacaaaaagtccttgataaattgaggtaattaggtcatgagcctaagaaatgtcatcctttaccgaacccgaacttaaacctcacatttcaagcctattaaagtccttttgatctaagttgtaaagctaagctacattagtggagaggattgcactaattctacttatggaagcaaattttttaaacttgaggatcgagggtagttgttatagaaattcaaggtgttggtgggaagtatttgcacactttattgattgaattactcttgataagtattaaggacatagatagcatgtaaaactcgattgaaacacacaaattcaatgcatattcactaacactaattacacatccattccatctaattctgagagcatttttcgtcgctaaaccaagtgtgaaagagcagtattttctctgctgcaagcatgttagtgtcgctgttattttctatttttattgtttcgttctcttttgtttttcattactctaagttttgggtgtgataactctatggtatagagttattttttatgcttttaaactaaaagtatagtgagaagagtagtgaaaatgtgtttgtttg

SEQ ID NO: 343120 - DNA, 577 bp, Cannabis indica
gttcatcgcaagaaccaattttattcaactcccatttttaaccaagctgagctcggtaatttaacactgggtttatcatcagaccaagcatatgtgccttctccgccacgggcttcggggactcgtaacgataataatccggatcaagactttataattggagaccttaatgaagatgttaatgaataatttatttatgttttttaataatttagtttaattttgagacaatattgtattaggattaatatgttaaagttaattaccttggagacatttttaaattattaataaattttattgaattattataattatattaattggaattttatttattaaatatttatataaataactatttatttatatataaatatttattaaatattttttttttattttatagacagtagcggcggagcattagcggcgggaccccgtcgctaatgcctttgtcagtctcgaaacacaaaactgaaaagagcattagcggcggggtcctgccgctaatgttctgctgctattaatagtattagcggcggacctactttttggccgctaatactattaatag

SEQ ID NO: 343121 - DNA, 425 bp, Cannabis indica
aaaataaaaataaaaaaatgataaaaaaaatctcacttgagattatttatttcaccttctgaatggataaataatcttaaacagatgatattagctggattagttatctaggcttctaagttctagcatgcccaaacactgaattagataaattagtctgtttaatccaatttagtctagcctttaaggaaaataaagtttcataagagacaagtggcattaaataattgagttgttgtggatattacccatttaaattattattttaattgctttgtcaaaagaaatatatataaggataggattttgtcccgtagttatttgatctgagagctgagattgatttaggcgtaattagggttaaaaaatagtaatgtaccctgagaccgatctaatgaatcacgaaatacattccgtgaaagtac

SEQ ID NO: 343122 - DNA, 2136 bp, Cannabis indica
gatatagcagtgtcactgcaagtaaacaaataactagtttgagatctggctttatgtggatcagataaatatcctgcatctgtgtagccgataagttgtgacccacaattattagaatagaaaaatcctttatcaatagtaccttggagatagcaaaatatgttcttaatccctttccaatgtctatatgttggagcagaactaaatcttgctaacaaattgacagagaaagctataccatgtcttgtatagttagcaagatacatcaatgcttctattgcactaagatatggtacttttggaccaaggagttcttcatgttcttctctagatcgaaaaattatcttttcccacatcaagtgttataactaccattaggctattcaatgtgtgtgatttatccatataaaactgtctcaaaatcttttcagtataagttgactgatgaatgaaaattctacattttaaatgctcaatttgtaaaccaatacaaaatttattttcctaaatctttcatttcaaactctttctttagatattccacaacttttaattttttttaagagttccaataatattcaaatcgtcaacataaatagcaatgataacaaactcagaacttgaactttttataaaaacacatgggcaaatatgatcatttttatgtccttcctttaataaatattcactaagttgattgtaccacatgtgtcctgattgttttaatccatacagtgatctttgtaattttaattgagcacatttttcgattaatgcttgaactatatgcatcaggcatcttaaattcttcaggaattttcatgtaaatatcactatctagtgatctatataaataagctgtgactaaatccattaatcacatatcgagtttttcactcatagccaggctaaccaaatatcgtaatgttattgcatccaccacatgagaatatgtctcttcataatcaatacctagcctttgagaaaaatcttgtgctacaagtcttactttatatctcacaactttatttttcccatttcttttacatatacatatccatttgtatccaacgactttataggtccaaatactttgcgtttagcaagtgaatttaattttacttgaattgcttctttctattttgcccaatcttttctattttgacattctatgatagatttaggttcaagattctcctttttatttataatttctagcgctacattataagcaaagatattatcgataattacttcgagtctgtcccattattttcttgtattgacataatttattgagatctcattatttctactatttttaagtacctgaatctcctcaagagatttgtttatgtcaacatcttcctcgaaattttcagcatcttcattaaggtcatcttgatcatttgctccttttcttttcgagaatttttatctttggaatcgactagtctatcacgtttcaagcgtgctttaaaatcattagctaattgtccttttggtacttcaattcgaactggatcattttcagctagaataatccatatatatatatctaaacatatgtaaaaaaaaatctataaataataataaaaaaaaatcaagacatggtggaaaatcacaaaagtcactttcttttcaaaagaaaaaacaatggtgaaattcacaaaagagaaataacaatggtgggctcacatttgtagcaactcacaagttgttggaaagccccaaagccactcatccattttgaatttatccaaattggattttgaaaatagtatagaagaagatcataaatggaatataccaatcaaggacgtacagtatttgcatttgacaaaagtcacaaaactcctagaagcgtttggtggaccaataaaagaagttgaaaacttaaatgtaattgaattggagtttagttgtggcagccattgattgcacatataacaaaatgacaaatagttaaataagcatgtaagtaagttataggggtattgttgagaataatctgaacaaggaatatatggatgaatagaaataaagttataataaaatttaatacacataaaaaaacagtttttttttttttattatatatatatttttacagaattttacataaaaatttctatt

SEQ ID NO: 343123 - DNA, 899 bp, Cannabis indica
ctcataatttacacttttttcttttagggaaaaataagttgttaaaagagttgtagtgggaaaaagtgacaaagaagatgaaatggtggttttttttttttattactaaatgatcacatggagattttttcctcgctcttttagtaattttgataatctcggagattacctgtcacctataaggaattttttgttttccatattaataattttggagttggaaaatactcatattgatttgttaaaattatgcaaaatagtggggtgtacttttttttttaggataaacacttattcatttacaataatagaatatataggtggaggaatagactctaactaatacaagcttcgtccaaccctaaagcatatctagccaagtcatgagcaactatattatttcacgaaaggtgaaatatataattataattttgggatgctatataattttgtggagtgtaaatattaggtgtgtacatcaaaccgctcaaaccgcccgcaccgtaaaaacaatgcggtttgaaattctttgcgttgcggtttgaatttttcccaaaccgcgcggtgcggtgcagtttgtggttttgaattattaaaccgcgattcaaaccgtaccgcaccacatgttttaaaattttaatttttatatttatttaattaagtccatacatatgagcccaacccaagcctataaatcttagggcaaaatccataactcttcacaaaccctttcttcttagcaacaaacctaagcccatacatgtgcattgaaatttggagttagaagtttgttttatttttaatctattgctgacagtatgttagttgtacatttatattgctgttggaatttaattagtttcaagttcattattttgatttaggtgtgtggttgaaac

SEQ ID NO: 343124 - DNA, 1168 bp, Cannabis indica
gctttggtctgggggtccttcgctccagcgggaccccgatacgaagggccctcccgacagtcgcctgggccttggcataagccagctcctgatccctcatgaagaggtacttttggtacttatcgtatgccgaggcgatgatgtcatcccggaataccttctcggcagccggagccctcacattcgggcagatgactttggaaagattgtagtcatccaccgactggtgtcccaggatcagcttggcctttcgacagttcttcgtcgtgaccaactccccggcatcaagggccttcttgtcgtacgtggtgaaggtcttggcccgttgaaagaaaatttgggtaggttcggtccgcatgtaaagggggatcctaacccactccgtgagaagctccggatggtccacagcctggaaaccgaaggagaagaagaagcggtgacggtattccttcacgtgcttctgataattaaaagggaccgggccctcattcaaaggatgggcccggagaccgtaaaagccacccttaagtttatctccctttttagggatggaaacgagttcataaaaatataaaatctccaccggactgggcgagccccagctccgggcagagtaaaaaataaacaggcctgaaagcaagtggtaagcttgaggaataagttggtatggcgcaaggccgacaaatacaaggaagttaataaaataatcttgaagaggaagcatggccccggccatcaggtgtgtcttactcaaagctctgaaacccccgtagttatgattgggcgtctcctcgtcccggggtggccggtggtaggtcccggaggttgtcggcttgatgcatgccaccaccacgatctgctcaacctggtgtgggccggttagggtggagcgaagctcagccgcttcccacctgttggctcaggacttgtgcccctcttgggccacagggcccttcatgacctcctccagggtggccaaacgcctctctcccttcttcgacaatttagaaccggatgcagacattttggttctgaaaaagattgaaaaaatccagcagtcaggccccaaaccaaaccctaatcgaaaaagggaatgggggtcccctaaccgctggaaagaggccccctccggacacttgccaaaaaagaaagcctcaaaaggttttcc

SEQ ID NO: 343125 - DNA, 545 bp, Cannabis indica
aatttagtaaattgttatttaattctaaactattattaaaaattacaattataatctattacaattcaaatattagctattactaaggctcttttcatttttgcatttttaaactttttttgcaaaaatacgtttatattgagaactaaccataattagattttattttgcaaaaatacctatttaggctttcatctctaccttcaaccttcaacgtatatcttatactcaaccagaaaaagtaaacgaaacagaagccggagaaaacctccattaatgccgatttcggagttgcgccggtcgatccacccgcccccaaatcatcgcctatcctgaagaaaaaagaagaaaacgaaacagagctccgttgcaatcatgtcgaagttgtcggtgcttagctctccgatccgtccccaaatcattgtaatgtgagtttcaatcactcaaatctctcccgtcaaatccaaaataaggtaagaatttcaattacatctgacttttgtttctttgatttccctatgtttatctgcaatctccataggctt

SEQ ID NO: 343126 - DNA, 874 bp, Cannabis indica
tacaccttattttataatcataactaaataactatacacatggaaacatttatcatataggtccatactaattattcacaagatacacatatagagagaacataactctaatatcatactcataacgtaatcatattaatactataaaataataatgtcattaccataatattggcatatcatataacctgaccctacaatatcctgggcctaatctgcccatataataacatgggcctatgcagccctaccattgttataggatagggtatctctatattcaacagtaacatcactgtatcatacccaccataacaatctcatacacgactcagtaaaatgcagggtagggtatctctacattcaacggccttatcccgtatcataccccaccatggtcccccactttacctgagacgttagcatacaacatacaacatatacaagtcatgacaaccataatctatatatcaattcacaaaatcatattgtgtccataccacacattctcagtaccgtatacagacttataataacaaatcataactcatattccaatacataaagaatccaaatttatgcagataaacacatacaaaactacttaatttccttacctcaaattttgatgattaagaccttgatatcccatcactactcccgatattaacacataagtaaagccctaacattaaaattctaactctttcaatagaacagaaagaacattatctttgaccaataactaaatgaattcaatgaaagttgcccttcataataattatagaaaattcaattacctttccaatgatatgccgattattgaaaatagattaaaagtaagagagttatcatagttttactgaaataattt

SEQ ID NO: 343127 - DNA, 769 bp, Cannabis indica
gaacccatttggtcacgcgttttatcgtgaaagtagcgagtggtgaaaacgttgaaggctgagaatgggggtggccccgtcattaaatccacgtcggatgacaggtggcgccacgttatggtccatcagtttgacttttctttcgcattaccactaacgtcttccccaagtttactacttgacttaatttaacatggtcttgctcttgcttaaaaaaaaataaagtttcttgaaaaataataatagtgtttaggttgattaatacagttatgctaagagagtaaatatacataggtataattttatgagaaatatatatatgggtgtgtttagtcttcaaataaatgacataggctatgcatgaagaatattaaaaataaatgcaccgtttttttttttgacaatgtcatccgatatcgtccatcagtttaccttagtaaaaaatgagcattcgaactgattaaagctaagactgcccattactaaagctaagcgatatatatttaggaaatagtgttagagaaaaataacattatttactatatctgtgagcttatccctcataatttgtttattttaggggtgttcatccgatctaatccgcacttttttggtcaaacaacattcaatccgcactaagtgcggatttcatattttggatccaatccgatctgcataagagtttaaatccaatccaatccgcaataatgcggattggatcggttattttagatctgttatttttttcataataaattatttaatattt

SEQ ID NO: 343128 - DNA, 539 bp, Cannabis indica
ttacgaagctcgtatgttcctggtttgggatgtgcattttaatttggttgaatccaaaatatgcattcatgaaagtcatcaatttgtgcttcgctgttgcatctaccaattggtcaatccttcgtagtggaaagcaatctttagtacatgccttattcaaatatgagaaatctatacaagttctccatgtgccatttggttttggtataaggaccgaattagagatctatgagaagtagaaggcttctcgtatgaagttattggttaacaatttgtcaacctcttttttgagcgtgttttgtctctcgggattcaagggtcgttgcttctgacgttttgttggataattagggttgatattgaggtattggcaaatcacatttgggtttatcccgaccatgtgtgagtggctccaagcgaactgatcttggtttgccttcagaaaagtgattaattgctattttagttcttttcccaaacttttcccaatataaacacactttatgggattgttgttgagttttgtgctctaaataaaa

SEQ ID NO: 343129 - DNA, 694 bp, Cannabis indica
gattgagttgagagatagagagaaaagattgagaggtagatagagaaatgtagtgagaaaagagagagattgaggttggggtttgtatgaagaatcttctatagatgaagaagattcttgggtaagggtgtgagagttgaaacactttgtaacgccctaaataattaggcacgctacccaacatacttttaaaaccctaatccctaattgggattactagtaaaattagcgcataaattaaactttaattacaaacagagtgaaaataaacttgtaatactttttcactttataaaataaaatatacaagtgtcgggatcctgagagtacttaacaaaatattattacaagttcgtttcctttagccgacctatgcggcaaaacagagtacaaaatacatcactggtagaccccaacccgcttggtctagtatggcccgaacatgtacattcctcgtccagctcctgcactcatggctgatcagcaatagacttaccctttcctgcacagtagagcacccgtgagccaagcccagcaagacagtataaatcatatcaataatatgctcatcatactatttaaacagtaatgccatctatatatgtctgtgtgtcacagacctgcatgtcacactcacatgcctatttatgtctacgtggcgtagacctatgtgctgcgctcacacatctattta

SEQ ID NO: 343130 - DNA, 1039 bp, Cannabis indica
aaaatttaatgacttgaaccaataaggaattcctacgtggcaatttacttaacaattaacagtcaggtacctacaaaagtttcagaattataacttaggtattattaccgccaaaaattaaactttggtatttatttgtaactagaagttaaaattaagtatttataccgcaaattactcttaattaaataataaaattaagtgcaaaaattttaatttttttaattatcaattgttaaattaaaattttatttttaaaaattaacattaatatttaattacagttatttttaaaaattatcttaagaccttaaaaatattatatatataaccattttttaaatcaacatatatgtaaccttattaccattattgaaagtatataaatataaggaaaatttacatggtatactaacttttatcatttttttacaaaaatactgccaggcggtattttttacttttttactgtatttttttataagtttcatactgcagtatactgtgttaagtttcactggtattctactggtgttttactagtgttctactgttgtttcgagttatactgctttgtgttttactggtgttttataaaaacacagtatttttgaaaaaatttccgtgtgacagtatttttgtaaaaattaaccaaaattccagtatttttgtaagtttccctaaatataataagagtaaatagtgacataagtacccttagttttaggttttataagcggtataaacttaataatttttttttggaacataagtatccaatgtttataaaactgtaattttttcatcagtacagattttattattgtcttaaacagaagacatataagacttaaattttagattgtttggtctcgacaaaaaatatgtagtatcagttacttccaaatcttttttttaataaatttaaaccggagcctgtactcacgaaaatagagaaaaattacagttttacaaacattaggtacttatgccactaaaaaaaattattgggtttataccgcttacaaactcaaaattt

SEQ ID NO: 343131 - DNA, 1054 bp, Cannabis indica
tttccgcacaacgacctgttggttgtggaggtgcagatagctaacaagatggcggccaaaaacatgattgataatggagcctcttccaacatcttattcaaaactgcctataaaaagatggggctccagcttaaagatctaaccccctatctcctgcccgtatatggtttcttcggccaaggagtcgcacctctaggacaattcgtctacccctcactgtttgacaagctccgacgagcatgactattatggcacaatttctggtattagatgttccttcagcctttaacgtaatgctaggttgtccaggtttgtatgacttaaaggctgtcacaacgatattctactcgtgcctgaagtttccaacgaagaatggggtagggtgtctgagaggaaaccaacagactgctcgagaatgttataaccttacagtggccaaggctaagaaggaagtatcctccagccagagcacagacaagggaaaaaacatttccaagtagggagcttccaaggcggggatgaagatgtggatttggggacccaagcagcaatgttggacctgttgaagaattagaaagatcgagatcgatccagatatcccggccagaaagctaaagatcgaaaaagatttgttgctcgaagtaaaatcaacattgataaaatttctgagagcaaacctagaagttttttcctggtcgcatgaggatatggtcagaattgatccttctatcattttgcacgtgctaaatattgatcccaacttctgaccagttcaacaaaagcgaaggttattggacaaagagcgagcactagccctaaaagaagaagtagaaaagctacacaacaataatttcataattgaagctttctaccaagcttgggttgcaaatcccgtactggtacccaagccgaacaagaaatggctagtgtgtattgatttcacagacctcaacaaagcatgccctaaagactgttttccacttccaagaatcgatcagctcgtggatgcaacagcagggcatgaaatattaagcttcatggatgcttattcggg

SEQ ID NO: 343132 - DNA, 538 bp, Cannabis indica
tcattgtgtcatcaaatatgggggtcaatagagagaaaatataaattatgatgactacacaatgactgaaattctaattccaaccaattcatcactagcaaacttgatggagctaataaaaatagagataaactgtagcagaagcagcatcgacatatcctaccagatatcactgggaacaacaccgatgaagctactaactgacaattccctcaagttctacaatgagctaagaaaatcacaggctggagtaactgattctgcactgtgcatcacaactacagaagaaataactatacaatcagtggaaaatcaatcttctgaacaaccaatacaagagcaaatcaagacaggggaggaactggttctacaaatacacaacgaaccattcgaccagtaatctgatattgaaggacaagattcaaatcatgattatttgtcagataacaattgccccaaacatgtttgcaatgattgaacaagttgcagattttataatagagcaatcaaatgaagcaacaaaaaagagaagggatga

SEQ ID NO: 343133 - DNA, 527 bp, Cannabis indica
tagatattgtgtagtttttgttgctttcgaccaaaacaatatcgattgatgaacaaataattatagcaaacacacaaaacaactactaatgttgttattgcatcagtatgcataaattttctacatatttgcaatatcttcttgtcacattcagttatatttgtgttattattgtattgcctgtacatttaacttttaattttgggaagatgaaaaaacaacgtaaataaaacttaaaaacaacgtaaacgcaacatatttttatattgaaattttaacacacactcactgttctttttatatttcccagaaattaaatgcagtagcagttttcttccagattttcgaaaatcataaaaaatagtaaaaatatatgtaaatcaaccaaacaacaacaaataattatcataataattaagaaaacacactaaacaacatcaattttttattcaaaaaaaatcagattttttttttttttaaagtaaaacccaaaatgtgtgggtatatgaaaatccaaggagatctcc

SEQ ID NO: 343134 - DNA, 488 bp, Cannabis indica
tagtttttctctataatgtatttatatttatttgtaacctgaccgacggtttaaaactgacacctatattgaatagcattgggtttcttctttttttgttgagtgtttattttctaataaataaaaaattaattgatatgtcaaatttaaattaatttaacacgatataagatagatttaatgcttcagtggagagaggtattaaaaataactttatatagagtcattttatttaaataggtgtcattgtttcattttatgtccatatttaattttatttcctaatttattttttataattatttatcaaaaatactcatattctcccagttttttttttttttttttactattcttctttgactttgccattagagaatttttgagtctcaacttctatttttctttaaaaaaaaaaatcaaagttcttatttttgattatagtttaggttgtttgataagtaacttttaagaactttttagagaaa

SEQ ID NO: 343135 - DNA, 891 bp, Cannabis indica
atttcagggaatctaaaggagggaaggtcatcttaggcaacaaccaaacatgccatattgaaggctcaggtaatgtgagctttaaaatgtatgatggtattgtaagaactcttacaggtgtaagatttgtgcctaacttagctagaaatttaatttctataagtatgctagatgaccttggtgttgtgagtaagattgagacaggtacaatgaaactaagcaaaggttcaatgaccataatgaaaggctacaaggaaggaggattatactacctaaagggagaaccaatttcacattgtcacaacacaacagaaactcttgaagattctaaggcaatcttatggcatagaagacttgggcacatgagtgagaaaggtttgcaaattatgagtgaacaaaatcttttatgcaaggataaagtaagtaaagttgatttttgtgagcattgcacattgggtaagcatcataggcttaaatttaaaattgggacacataattctaaagaaattttagaatatatacatgctgatttatggggtccagaaaatacagctactcatgggggagtagttattttctatccattgtggatgactactctaggaaagtatgggtttttcttttgaaacataaaaatgatgcctttgcaaaatttcaagaatggaaaatttcaatagaaaatttaactaacaaaagagttaagactcttaggaccgataacggtctagagttctgcagcgatttgtttaacatgtattgcaggaacaatggcattcaaaggcataagactgtaagattaaacccgccacaaaacggagtagctgagaggatgaacaagactattttaaataaagccaagtgcatgctattccaagcagggttagctactgg

SEQ ID NO: 343136 - DNA, 611 bp, Cannabis indica
gccttcttaagtttaggatgccccccactcgggtggggggatcatgccaaggccttttacttttcccattcaggtcatttcttaggtcggtcccggatgggtttcggacctcatgcacccatccatctggatcactcagcttacttgtcttctagctggtttctccccttggacagctttctttgggatgatgaagctagcattgtagttcaagactttgctagggctgagttagatagtcggggtaggactagctttattgttttgttttcaggcgcatgctttcttatagccattctaacactttgtttatttctttttaaagcagctaggccaatggaagatcttttgacgactctggcccagacctacagcctggatccttctcttcctccaacgtctgcccagatggtgaccctagggaggtcatcttccagtgccccctaggcacaatcgtcttaatcgacgaggaaggggaggtcgaggaggaggaggagggcgagattgtggctcccctcgaccgaaagcacaagggtaaaatggttgaggctgagtcttccaagaagcccaggagaaaggacaccccggccgtcagctcagattcagggatt

SEQ ID NO: 343137 - DNA, 589 bp, Cannabis indica
tgcaacataaaatgtgatttctgatctttattaatcagtaaatctgattatattgaaatgagttttatttagggcacaaaacccaacataaataatgagcctgttagtctgcattagaatgcacctcagatcctctctagatgcatcacaatatactataaatttctcttgatttgatggaaaatataacactggagccaaaattagtcgttgtttttgttcttgaaaactcgtttcacacttgtgtgaccacatgaaccgttgattcttcttggttaattttttcaatggcatggaaatcttggaaaacccttcctcaaaatatcgataatacccaactaatccaagaaaacttctaactttgaaaactattgtggtctcaacctgttcttagctgattcaacttttcctggatcaacttgattccatatcctgaccgaaaatatggcctaagaaaggcacttgcaataacaaaaactcacacttcttaaatatatagcatacagtttgtgatcattaagtcattgtaaaaccattaaagatgttactcatgttctacttctatctgagagtatacaagaatgtcatc

SEQ ID NO: 343138 - DNA, 900 bp, Cannabis indica
actataagattaatctcatctcttttcagcttaaaaaattaaacaataactagggattaattaaaaattcttacgaaaaatcaataatgaaaaaatctagggtaaaatgacctttttacccgtacttgaacaagaagtaatcaacacactaatgggtaaaatggtccaacactataaccccggataccctcgatattccaaatatctaactatattgccctattatttctaaggtatcaaaccatatctaagtgactatacaagccatacgtcgcattccactatgactagacataaaaaatgaaaattgtaaaatttcacatacatcataattaatacacctagaattcaaataaatctccataattgtgtaaataataaatagaagtctatttctgaaactaagccctaataatctattaatttttataataaagctaagctgtcattacaattatcccccaacaaatatttcaaccggtctgatagtgtgaagacataagcactccaagataggttctcaaactattagaacccagaagacttgtacaagcttggcctgtgcttatttattgaggtagtgctactgggtgcgaggctaacactttgattacgactgacatacttggatatatcgaagatctcgagttcttcttctagattccttggaggaagcactcattcaccaaacttatgcactcgcttcaaaaggacatgttaaaatagaaggccaactatgagaagaactcgagtttggaagttcagcatgttgggttttgtgccctaaataaaatccatttcaatataatcagatttactagttaataaaagatcataaattgattttatgttacatggttcacatgatttatttcatgattatatttaatgtataaattc

SEQ ID NO: 343139 - DNA, 1106 bp, Cannabis indica
gctttcaggcttgtttattttttactctgcccggggctggggctctaccagtccgtcagatatattgtatttttacgaagttgtttctgtccccaagaagggggacaaacttaaggacgacttttatggcttccgggcccaccctttgaatgagggcccggtccccttcaaccagcaaaaacacgtcaaggagtatcgtcaccgcttcttattctcctccgggttccaggctgtggaacacccggagcttctcacggagtgggttaggatccctccttatgagcggactgcacctactcagctcttcctccaacgggccaagaccttcgccacatatgacaagaaggaccttgacgtcggggggttggtcacaacggagaattgccggaaggccaagctgatcctggggcatcaatcggtggaggactccaacctttccaaggtcatctgcccgaacgtaagggctccaggcgcggagaaggtattccgggaggaaatcatcgccacggcggaagagaagtaccaaaagtacctcttccaaaaggcccaggagcaggcttacactaaggcccaggctgccgccgggaggccccttcgtattgggagcccggttgagaggagtgcccccaaaccaaggcctcctgtcaaggtgccgaacacgggggctcccgatgccagcacttctggttctggtaagtcccctctaacgatacattaagtccctcctgctcgtgaatatgctagccttaggccgatagggttcgatgaacgtctccttaggtttaggatgccctctactcagtggggggatcatgcaaaggagtattacttctccaacttaggtgattatttaggccggtctcggatgggctcgggacctccggtgcccgttcccttggattcttcagcctatctgtcttccagctggtaccgtccctcggacagctatctcggggattatgctgccagtgttaagattcgggactttgctagggctgaattagagaaccagggtaggactagcttgattgatttttaagtgttcactgctttcacagatattctaacacttgactcttttctcttgttgcagcagctgatcccat

SEQ ID NO: 343140 - DNA, 522 bp, Cannabis indica
acaaaacaccaaaaatccagaaatcccaattcccctaccctacattcatccccaaacacaaaaactagaaatttgaaattttaataaactacatatctcagttatatcaaagattcacaatttaaaggataaattgcaaaaagaaattaaaggaggcccatacctagttcgtcgacggtgccagggacgatgatgaacggagagtggatctcgtgagtgtcgtgggtcgactgggatggagtggctctcgtgggtcgactgggatggagtgggtctagtggggttcgggtctcgtgggtcgtcactgtgagagaggggtcgaatgggttcttgtgggtcgacgtcgactgggttcgtgggtcgactgcgtgtgagaatgagggttaggttcgtggttcgtgggtcgactgtggtgagaatgagggttcgtcgttcgtggttcgtggttcgtcgttcgtggtgagtttgaaaccgagaaaggaagagagagaggagagagatggaagttagagagattggggg

SEQ ID NO: 343141 - DNA, 764 bp, Cannabis indica
aaattttaataactaattattttataaaatttttaaataataataattcatttaaaaactaattattttatatttattttaatttagaaaataaatttatttttatataaatgataaataactcaaaaatttaaaaattagtaatttaatgaatttttatagtgtaatatgtaaaatgattttttttataatataattagtttaaattttgataactaattttaagtttcaaaaaataataattcatttaaaatttaattattttatatttatttaaatttagaaaataaatttattttcttataaataataaataacacaaaaattttaaaattaataataaagaacaataataattcagttaatatttcatatttataattatatttaaaaatatatcatagcttttgtatagttgcaaataaagtctagaacaaaattgttcttctctttttttgcaatatacaggagcgatggttatacatggcataatttgtactcataaaatttcataacactttacaaatcattcaaatatttaatacttcatttgtcgcctaaattgtagatggcgacaatcgataagtcttggaccaaaatcagaaatcgtggttgccatgaattttggaatggtctacaagcctttttagcaatggcatcagaacataaggattgtgatggaagaattcgatgtccttgtgtgagatgtataaatagtaggtttgaaaaaatagatagggttagagcacacgtatttgatcgag

SEQ ID NO: 343142 - DNA, 505 bp, Cannabis indica
tcactcacgtgtttcttaaaaaaaaaaaagtgttcttttctatatttataattttcttttaattggctctctattcttcaagtctcttgtgtaaatcctaaaggttgtttgtcatttaaattctaattatttgattttcctatcttgtgatcaatattcgttcaaattgtttgtcctaaaaagtttatcttctctcatttgagcgttaattgttacaattccaactccaagagtgtcacctctcccattaagaaaatactttcaatgcctgtgaggaaattggagttgagacttttaagcttttgaagtttatcaatactatttgtgttatggctcgttgtaagaaatgggtatagtttggtgcacacacaaaactctggggttacaactgagtagtttgcatagcaatttctgatttcttgatgatattttaaaatgcatggctggttttgattggtttgacttgattattcagcttgataattttcttctccgcttgaattgc

SEQ ID NO: 343143 - DNA, 595 bp, Cannabis indica
atagatagggttagagcacacgtatttgatcgaggttttatgcaaggatatgagaagtggatttatcacggggagcctgaggatgccgtcgttgatgtagcagttgccgatgttgaatcagaggatgaaatgattcctattttagaagacttctttccctcgacaactgaggaaccacaaggagaagatgaacaaccaaccacaaacccacaatttgatgacttatttgaggaaattgaagctgaattgtatcccggttgtgattggatttcatctcttaactttttagcaaagctattgcatttaaaagttaggggaaaaattcctaataacatctttgaagaattattgaagcttttaaagtttgcgtttccgaaggaaaataatattccatcaacttactacgaggcaaaaaagagattgaagaaattaggcttgggttatgataatatcgatgtctgtttgtataattgttgcttattttataaggagaatgcatccaaggaggcttgtccagtttgcggaactagtcgttgggttacttccgagaacgggaaaggaaaaaaagttccttgcaaagtcatgcgatactttc

SEQ ID NO: 343144 - DNA, 560 bp, Cannabis indica
tagagcccctctgggatgtaaaatatatcttttatctccacccccatagtggatgagacaaatgtatgcatttcgattagggttgtattctatcgttacaattttaccatatatgtttttgacattccgacgaaaatctattttacggcatagacgcttatgacatgcccctttatgccctgtggtaatgattcctctgggcggggttcagggaaagaataggaaaggtaattttactatatttttgaccaagaataggacctatcataagaataatttttttcagtagagcgatagctctgaaaagatagatttcccatcttttcattaatctcggaggaaatacggtcgagagaggctaattcaaacccctcaaagaaataagaacaacacccacattcaagactcttttttaccattagcaagaacttatttcagttgcaaatccaagaaaagaataggaaaggtgatttcactatattttttaccaggaacgggacctatcacaagaatatttttttagtggggcgatagctttgaaaagatagatttcccatctt

SEQ ID NO: 343145 - DNA, 532 bp, Cannabis indica
tcatggcatcatttcacttttgacagttacaactttttatggccagatgaaagttgattgaatcatcttctatcattataatgtcatcctcgtgttcttgaagatgattgtgtattcatctggattaatagtatttcttatttctctagtggatcatcgcaaaggcacatgttcttgaggttgtggagtttgtacctctggggtttgattgactatgttcggttgttgttgatctaaagcttgatcaatattaggaatggaatcctgaacattgtcaaaagtaactattggaatagaaatcatcttcaaaaagagtagttgatttgaaatcctcctcaaaaacaaagtctttaacaatatttctcctccaaaacccaatatcctcaaagaactttatagttcccatttcaaatatgttccttactttggaatcataaaacttaaaacccctagatcgctcagaatatccgataaagtagctgctcacagttttgggttccaacttctttttatttggcctataaggcctagc

SEQ ID NO: 343146 - DNA, 1836 bp, Cannabis indica
tgtgagttatatgatgattgattgatgtttgtgagattttgtgaaatagatgctcgatgattacaggcccctaaatcacattatttgtaaaactagtgagtgatacgctaaatcactttccaggaacttaaacttgaaactaaaagtttccctatcaatgaataacaccctaaatatcgcaaaaataagaaaaactagggttcccaaaagtgccccaaccggaagactggttccccaaccggaattccagttctatggggtatcttggagaccaaccggtcgactggttcctacaagtccccctgaaccgatatttcagttcagtgcaggaaaacttcaaaatttcactacaccctcaaatcaatcccaaactgcacaaaaacttccagacctacttaatataccccaaagaacataaccctagcaacaaaacaaccaaacattctcagaatcaagaattgccattaaagagcaaagcttgagttcttaaactcaaagcttgctcaaacatcacaacagccttcaaattaagctcaattcaacaaaaataactttaattcaactaaagaaaacacaatccacaactcagaaacctaatagttaattcatgcaaaattccttatattaaaacttaagaaactaaaaggaaaaggtgctaaagagggttaccttcaatggattcacaaagaactaactacaatccaccaaaaaccagctgaagaaatccaaatgctgctggttctccaaagaattcaagagagagagggagtgaagagagagaaaagcgttttcttccaattttctaattaaactctaattatctgctaatttttaaaataaagctaagcggtctttacatagagtgttctatataattaagagggcagttctgaatctatagtggtacaaggaggaattaataagtttgagaatttacttggtaaattctagttctacttattagaagcttgattatataggtcatggtccccacacaagttgagataatattgcatgcagactcaattaattggttttaataatcagttataattctaatattagactatgtcttatttgtgaaatttcactatataagggcttaattgtgaagaaagaggttatgggatttatttgttaattaagagactttgttaggtgtaattaataaataagttaaatgacaattttatttgataattaattataattattaaataaatagttttgacatttatgagattgaaattagaaaatatggcattattgaaagaaggataaatagttgaaataaagtagcaaaattgtaactagtgaggcccacatcaagtggtcggccactaaaggaattttacccattattttattcttttttaatccatataattaaatcctaaaccctagttgaagtactataaaaggaacatgacgccctcattctcatccaaccttctaccaacaaaatctagttttctaactctatgagacaactagtaaatgagagactcttttcttagtgatttcgaatccttattcattgttcttcatcaattcaagccatagtgatagagtaccatgcccacacatagcaagtcaagcactcaatcgtagtgcgaaagacggtggttaaccaaaatcgatggagagaaggagatctaggctcagatcttgttattactctgcgataaaaaggaataagggttagagatctgagcagaaggagtcatattattccgttgccatcattgtaaggtttttctaaactcttatgtgtttaattttattgttttagagaattcatatttagggtgtcaatcaatatacatgttagtaaat

SEQ ID NO: 343147 - DNA, 773 bp, Cannabis indica
atgacaaagtgagcagaggtgtaagaacaacagtgctagatcgagaacaaaagatggtgatccatcaattaaggtaacaatagaagtgagactatgagactgaaaagtagaaacgagactgaaattacctgtcacatgatctgtatcaccagaatcaatgacccattttgaagatttggaaagaaagcatgtattagagttacctgaatcaacaattgcagttacagaaggagatgaagacataagtgtttcctgatacctcgagaacttgacaaactcatcagtaataataatgactgatttgtcagatgcatcactagtgtttgcaatattagcagtattgttgtcgattttagaactgtaatttttgacactcaaacttggtgtgacctggtttcttacaatagttgcctatgatgctccaaaatctggtgttcgattatcaggtccttgttaatttcttcctttgaatccacttggagtagagttttttcccggtacagaattgttacgagtcaccaaggagctattaagaggagctaaagaggtagtttctgtacgaagaacacaagtaaacacatctcataaagaggagacatcagaaccagagagaacttgtgactttgcagagtcaaagaatcctccaagaaaactcataatagccatctggtctcgttggcgctattaaactttcacatcagaactaaatgacaataacacattaagtttttcatatgtttctttaaatgccataaagtaactcataagagact

SEQ ID NO: 343148 - DNA, 594 bp, Cannabis indica
acaaccccaaattcaaccaaaaactccagaatacgtgtatacactataatgaatcaaatccaagcagtagaatttagcaaacaagacgaaaacttaagcaacctagaataaacatcagaatcctaacccaaacatcaattggtaccacagtacccaaaatcaaatatttatacacccatttctatcttaagcttcaagaaattaaaaggaaagaagttagaaagtactaccttgaatcaaagctctccaatacagcaagaaatcactgaaatgagctaacaaaatccaaccctaggctggtttcttgatgcttcgaaaaagagagagagagagagaatggtgaggaaatgtgtatctaggttattcttcaaaattcaaaccctttattcttattttaattaatattaacataacctatagcaactaatatccccacataatgacaaaatccccaaggtaaaagactaatatacccttaacataaaacaaaagcaaccatgctcatcaagggcaaagtagtcaaaccaaacttccaaaaaatctccaaaacttaacaatgacgccccgctattaataaaattctataccatacaa

SEQ ID NO: 343149 - DNA, 644 bp, Cannabis indica
aatattatatataataattatttcaaaatatatatattattaatcaatttctgtatttaaatttaagaaatcaaacattaataataattatttatagtattaatttatccataacaatacacactactattgtcttaaataaaattataacattgtcttaaaaaaaaactttaaaacatcaaatttttcttaattaaaaacctaattatcattgttcagatcactaaattccataaaattatctgcattagagccaagtcttgaatcgtcacgataatcataagattgaggcgtcggcggggtagggtaataaggttgtgcgattgttgcgtaagtaagatctcgacaaattgttgagtttgcggacgaaccaaagtactctgctgttgttgctaactctgcggattggaaatctaaccatacataggttgttgtggagatcctcctatttgaccatacataagttgttgctgcaacaatgacccaaattgaccatacacaggttgttgttgtgatgacccaaattgaccatacatggggtattgttgttgttgcgataagcctccaaaatggccaaccataagttgttgtgtctgagatcctcctgtggcatctgaaaaatatataggaggagactgtgaggg

SEQ ID NO: 343150 - DNA, 526 bp, Cannabis indica
gcacagcagacgaactgaaaattatgtttcacagcatggctggacaaagaaacaatgatcttcagctggaccgagcacgcaaaactcctttctcgcctgagatcaatctcttgtcgttgccccacaggtttaaaatgccaacgtggaagatgtacaccaggagagaagatcccctttcacatctcaagtacttcgaaatgcaaatggaattgcaaggggtacgaggagatgtatgctgcagaatcttccctactattctgtcggaagccgctcagcaatggtatttcaagttggctcctggaaagtttagttcatggacaaccttctcttcagaattccattcacaattctcctcctcatgccaacttctattgcatttgggagacttggtcgaagttaagcaatgaccaggcgagcctctccgggcatacattagtagattcacgacaaaggccaccaaagtttcacgggtgactgaagatggaaggttatccgcgatattggggggcatcgaagtcctcggtga

SEQ ID NO: 343151 - DNA, 875 bp, Cannabis indica
acttaatttttttcatatttattttcaagccttatggtatttttgataagtgttgctcaactttattgtatttgtgatagtttaattatttggtgatagtccaaactgcaaaaactgcaccgcaccgcactattttttgcggtgcggtttctgtggtttttttgttttgcggtgcgggtgctgtttaggaaattagaaaaactgcatatgcgggttagtttaaaaaatggttaaaactataccacccgcattgcgaacacccctatcaacgcacataaagatgagaatgagagaggggtttcagtgtcttggttttgatcttgtatttttttttttttttaaaaaaaaagtatctttgagtatttgtttacaactcacaccaaactaggggtgggcatcatccaatccaatccaattgaaccgaaccgatccaatccaatccaattacaaaaagttggatatccaattacaattggattggattggatgctaaaagttggattctaattggattggatcggttattggatgtcaatctcaaaatccaattaaaaaccgatccaatccaattacatttatatatattaaaaaattatttatataataaaaaatattgaaaaatataataaatatttattatatttttattaaatttttttgtatgttgaatttgtaacacttgattgtttagtgtatttattttcatgatgttttgttctattttattacttagaaatgttgttgttttaattatttaaaacttttagctacaatacacttgtaagaatagtatgtttatgaagtattaaacttaaataaaaagtacttaccaaaaagaaaacttaaataaaaagtgatacttagtttttttacgt

SEQ ID NO: 343152 - DNA, 566 bp, Cannabis indica
catacaacaaatcaaactcaaattcaatccaagatagcaccaattcacctaacatgcaacccattatcaaattcatcaagaacatgaaattcacaaacccaaacatgcctttttccacaatatttcagcaattaaaacaagattaggatcatagaaactaccttgattctcaacaaaacaagagcaaagattttcctccaaactcaagctttaatcaaacacaacatccaagcttttcctcaacaattcaaggtttgaaaacaagagggtaagagagggacagggttcgggtgagagataaacacaagcagaattttcctttgatttttcttcaaaaatcacttatggtcaaatgaccatattgcccttagggctataaaacatgcataagcattttcaagggcataaatgccatttcacactcaattatatccaaataaatttcagattatcacatgtcaaataaaatgccaaataatcaactcaatttgcatttcgggccaaacccggttcggcccgaaattcccagttgtgactataccgcgctaacctgtcagaacacacct

SEQ ID NO: 343153 - DNA, 1607 bp, Cannabis indica
atcatcccacaactcgcccccgacagttaatggatcagtagagatccccacctgaagggctgaaagttgcgtgctgtcatccaagtttctaaccctagggacaaccgtgctaaaacgatttaagtatgccttaagtgtttcatcaggctgctgctttatattggatagcgaggccgcttcgggtcgcctattcgtaacagcttaaaattgtttcttgaaatctttggacagctgctcctaggaaattattgaatgacagagtaaacttgttaaaccagttactcgctgctccaacaagcgaggtggggaacaaaattcagcgtaaattgttcgtcatgttactcgctcgcattatcgtgttaaagttattcaaatgcgagagtggatctgtggttccattataggacgaagcatgcaggtttttgaatcccaaaggaaaaggggtattcataatatctgggtgatacggcttaagctccttgtcacagtcgtatccagatgatttccctaattcccccacttgatatctcctgaacttgtcctccagcttgtttatccgcaatcggattggatcctcttgctttggcccaagctgttggcgaaggtcaggtttcttccaattcaagtgctctcgcagatctggttaggagtaattgctggcagatctcgtcttactcatagaatgcgtcctactcataggctttgtttttaagtggctcgcaaatttacttgttcccatactttctcgatcattagctcgttgattactttctcctctttgagtcctttctggctgttcatcctgattctcaaaggggtgtctcattttccccgagttgttcttcctgggccttttcctgtctcctggttcgtgagccataaggtttgcctcgtggtcttctcactctaggttcaagttgattttgagtgttcgtcccctgcgctaccctggccgaggctacttctcgttctaactaagtgttttgacattgtgcctcttccagacggcgtctcaggcagcggctttccgtttcacaagttctttctcctacagattgggcacctccacgattgagctcttcatccctcgtcctgggattctgaccattcccacgctgagttctcctcgagcgcgttgtccgcgtactaggaccaatgtcgggttgagttctccgaggacgtgtggtccgagcactggggtcatcctcaggttgagcccttcggaacgggtggtccttctggactgcggattggtagatcttctagagcctatgggcttttttccagaacgatggttagttttttcatgtggggtgttgatattctctagattttcagccataaaggagaggtttttttttttaaaaaaaaaaagaagggaaggttttttctgagctttttcacagaggctctcaatgaatgcaccgaactgttaacgcagattttcgttaaccaaatttgagcctcacgatgataattcaacacagaaaaaataaaaagctatagaaaaataatatatgaacaccgagtttttacgtggttttgcagttaaaattctgcatagtccacgagtcaatcttatttagatttctgagtattttttaagg

SEQ ID NO: 343154 - DNA, 540 bp, Cannabis indica
aaagaaaaaaaaaaatagtatatgagctaattttttttttttttaagaattacccgttgtaccatttattttggttgcaatttaggttgtctcattagttagtgtgtgggttttatgtagatttttgtaaaaataacaaaaaaaaaaaaaaaacttttaaaaaatgtaaaaataaaactcatttttcttttttgttttttctatttatacatttcaaatttttttttctatttttacgaaatatacagtgtaacttagtgagcaaccaacaaaaaaacctaaatcgcaactcatgtagcaagcaacccaaatcgcaactaatagatcaacttaaatacgtaaaaaattaaaaaaaaaataaaataaaaaaaacaaacccaaaaaaattagtaaaaatagaagaagaaaaaagttaaaaataatatatgggatgatttttctttttttttttctattatttgtatttttagtaaaaaaaaaaaaactttaaaaaatgtaaaaataaaactttttttttttttggttttttcatttatacat

SEQ ID NO: 343155 - DNA, 644 bp, Cannabis indica
ctgagtttgggaagaagaaaaatcaaaaaggaatggtgtgtggttgtttggttttgctcgagagaaaagggtgaagaggtgagggttacttcttttcattttatgtttatcaactcataaaatttataaatatatataatctgattcttttttaaaaaatataataataataataataataataataaaaatttattagtaataattatcttattaattttagccattaagaaatttatacttatagggtgctaagttaaattctacatactcttaattaccccaaaacatacactatcaagtaatcataatattcccatcaaaactaataattaaacccgttatgacatttttggcccccgattgagtcttcaaggtcggcaaacctgaaaatatttttattccacatttagcttatattacattcagacatactatataaatctccgtaatttataaattacgcttatttactcacttatagcgaatttaaaatttatgttgaactagattagttggatcataatcccacttattacctgattaatccataatataattataaatcctaattacttaccattagggttattgggatattacaaccatcccctccatataaaaattttgtccttgaaatttac

SEQ ID NO: 343156 - DNA, 1391 bp, Cannabis indica
tccaaataattcaatcctaaccgtaagagaagtagtattaaaagaaaagaaagtctcattatccaactaatgcttaaaaggcaataaacctagttttctttctctctaggtttatcatacttcttcttcttcttttcttctctaatttttgaaatccttagttttcttcacaaatcaaattcaagcctttaatgattgagtgtgtgcccacgcatagcaagttagtcctcaatcatagtgtgtaaaactgtgaagaatccaaacaactgaaggagtttcgggctcaaatcttggtgatactctgtgaaaaaaaggatacaagggttagagatctgagcggaaggagtcatataattctgctgcaaccaatgtaaggtttctcataccctttatgtgtttattttcatcgttttagaaaatcatatttaagatgttaaaaatatacttgttagtaaatctagatcctggtaaaagatattccaacaactggtattagagtcatggtaattgatttactttcaagaaatatggatttaaaacgatgtatgtgtgatttggatgtgattcatgttgatctatgtgtttattgatgattgattgatgtttgcaaaattttaacgtaaaatacattctagaattatttttattggatagtatggaaaaaattaagcaattcactattttacataacttaattttgattttatttgaattagttatgaatttttgaaaattggaaaaatcttagaggggtgacacccacgtgcgcgggcggaaccgagtgtcactcggtcagcatgtgcattcggacaagatcctgctcgaaggaacgcggtcagggccgtgtctaaagccctgcccgagcacgtaacaggctgcacgcagcctcctttcaagaggcttttcggccaatcaccttttcatgcgcgcgcggatggtatgcagtgcattccatccgcaccaaatactatttttttttgtttttttttctttattttttcatgctttttcatggaattaatttcgaattttttgtgtaattttgtattttgattttaatttttcaaattttaaatctaattatctaaataaaattaattaattttaaatattagtaaattttgaactgaaaaaggataaaatctgatattttgcttaaatggttacctttattttttaaaatttgattattttatctgatttttaaatttaattttagatattttatattttagattatttaattaactttataaaatgaccttattcaaaatttaaaataagattattttaatctagaaattttataattgtaaccagatatcttgttaaccttcaattttttattattttatttaattaaattataaaattagataaatgatatttat

SEQ ID NO: 343157 - DNA, 583 bp, Cannabis indica
tgagaactcgctaatttacgtgagtatgtttatttttttgttgttcaaatgacctttgaatacttcataatttagtgtttcgaattccttcgacaataatatatttcttttttcttgtataatattcttagatgatatttaattttatattgttatgtatactaggagaatatatttttgttagcataatatatatatttcaatgtaagtatatggcatgctacatatgttaactatcttataagaaaaaaacagttacaaccgcaacaaaatatttaaacattattttcagcattaaaaactactcgaaattttttgaaaatttacatatgatcttaaataactataacgtacacaatcatgataataataataaaattatttaaataatcaaaatataaaatatccaaccttaaatttacaaataagataaaataatcacattttaaagaaaaaaataaaataaccaactaagcaaaaaatgtaaaaattattctttttcaggttcaaaatctactaatatctaaaattaattaataaaataataattaattttaaaataattagatttgagatttgaaaa

SEQ ID NO: 343158 - DNA, 552 bp, Cannabis indica
acaaaaacaataaaaaaaattacaaaaatacagttgtacgatattttaacgatttctaagatttatttacataaaatatactcttctgatgcatttgtatgttgtattcttgttattttttttttattaatttttgttatttgtatattattttttatgttgttttattgttactgttttcttattatttttatgtaattttttgtatttttatagaaaactgtcaatatattcaaaaaaaaaaaaatttgaacctaaaattgtaaaaaatttataaaaataattagtcgttcattaatttttttagtcaaatttaattagcataaaagttactgttatattattttatataatataatatttagattaaataattaagttgtaaataattaagtgtgacaaagtattaattttgtcaaattgtaacatacattatggagttacaaaatgtatgtagaatgatcacaaaataggagttgcaaatcctttaaattgatgatcacttgaatatgtaactctcatctctttttcactcttaaattagtaaaagat

SEQ ID NO: 343159 - DNA, 878 bp, Cannabis indica
ggtttatatccagaatatgcgtccataaatgacataagctcatgctcagcagttgcatccactaactggtcgatcttgggaagtggaaaacacccttttgggcacgcctaattcagattggaggagtcaatacaagttctccaagttctgttgagcttcgggatgcgaacaagattggctatccatgagggataaaacacctcgcgtataaagtcattggcgaacaacttgtcaacctcctgttttagtgcctcttgcctctcggaatccaagggcctccttttttgtctctttgatgggtagtttggatcaacatttaagtaatggcagataatattagggtcgatcactatcatatctccgtggctccaggaaaacttatcctggttcaccttcagaaagcttgttagctgctatttgagctgctcgcctaggttcttcccaatgtacagacatttcgcaagatttcctgggttgagaatgacctcttccaattgctcgattggtttcaacaggtttctctcatcttgaactcgggggtcaagatcttcatctttctgctcaatttcttttgccaagatcgccatcaactgatgatcggctttttaatgttgtagctctatgcgatagtaatcgcgagccagcatctggtcaccacgcaccactcccacgacatctggtgtttggaatttcaaggataggtgcttgatcgaattgactgcccctagttcgatcagtgctgggcgacccaacaatatgttgaaagttgagggcaggtcgacaactaagaagtattacataacagtagcaattaaaggtgcctcgcctaaggttaatgctgttgggttttgtgccctaaataaaaccctttacaatct

SEQ ID NO: 343160 - DNA, 516 bp, Cannabis indica
acctggcggctctgataccaaaattgtaaagccctaatgctaaggcacgctacagtaatttttcaattacggtgcaatctttgctaatcaaagaatttcctcgaaaaacgtgtcaaattaaaacttttatattaattattaaactttataatatattaaaatatttacaagtaccgggatcccattttgaaactttttaaagttaatattcaaaaatacatatattactggtcgcacagcgacttccaaagtagaatccccagatgtccggagaccgaacactccagatcgagctgctttgacatgtacaatcccatccgagctcaagttcactcatgttcagctttagcctttcatttacctacacatggaagcagaactatgacttaacagactcagtaagaaatgcatacaacatatcatataatttctgacctgtaattaggcgcccatacacctatttacaaggcttaacagatgagcatgaacattcaatactagggtatagccactata

SEQ ID NO: 343161 - DNA, 531 bp, Cannabis indica
ctacgcgcgtgttggcctgccagcagcctcttctcgactgcatgggtgtttacacctaaaaaactgaatttttggtgattttttcactaattttgtattttccaatttcaaaccataaaaatcaatttaaaatattatttttagtatttaaacaaaaatatcaatattttaatatattattattaatttcagatattttgagatttaaattctaaaattgattattttattttaatttatggttagattttaaaagtttattaatttctttaatacttatatattatttaattataagattaaatattttaatattggacatattttaaattaactgattgtcttatcttttaatttgaaatattatattaaaattatcttatatgataaattatataattgtaaatttaaaattaacctaaatattttatagatattctaactgttaacgctgattttcgttagccaaaatttgagcttgaatgctaaatttccacagaaaaataaagacggtaaagaaaaggaaaatat

SEQ ID NO: 343162 - DNA, 662 bp, Cannabis indica
aaaatactacttagaacccgggatgactttttaccatgaatcaggctgacgctgatgctagtccatcagtggtgacaagtcagttgtctataaatggttgttcctatactatattgtttcattcaggagctacacattcttatgtgtcgagtagagtaattgaaagtttccataaaccatgtgatatatatgcttcagggtttggtaccctactaccttcgggagaccttatagtatccgctaagtgaatttgatccttgtctttctggattgacggttgtgaattaactgccaatctaatagaattacaactgtctggttttgatataatcttgggaatggattttctatccaagtatggggcaacgatcgactgcaaacagaagatggtagtgattgaacccaatcgggctaacccaacagtgtttgtgggtaaagttcaagggacatgaataccaagaataacacttttgaaagctaaggacctgatgagcaaaggttgtctgggattcatagtaactgtagtggataccagccaacctgtgacatctagaactgagaatacaagattggtgtgcgagttctttcatgtctttccagaaaatttaccgagattgccacctacctaggagattgaatttgtaattgagttggttccggga

SEQ ID NO: 343163 - DNA, 533 bp, Cannabis indica
tcatgccccattcgatattgtccaaacagtctccctcgtcgcccaaggactctcatacctccatggaccaatactcaaggccccatgcctccacgcatgttggcaggccctcgagacaagccaccaaactagtaacataagctagacctttgtctctttccaacatggtgcatccgtcccatgcgcgtatgcaaactagcccacgaatgactaccaatgtcatcttctgttgagactcgtggccaaggcacaccacaccgtctcttggaagtttaggccacctcccgtgcaagcagcatatcggtaagccaatggaaatgcacctgttaacctctggcagctacttaaatgcactactaggttggcccaataatgtccatgagtactccaactcatgtagacatatgagtcccctcgtggtcctcatatgcccgccctactagccccgctggctagtattagctcacttagcaccaaggagccagggtggtggagagctgacaccatggtacccccttaaagagcattctgag

SEQ ID NO: 343164 - DNA, 582 bp, Cannabis indica
gaaatggggtagggtgtctaagaggaaaccagtagactggtcgggactgttataaccttgccgtggccaacgctaagaaggaagtatcttccagccaaagcatagacaagggaaaaaacatttccaagtagggaacttcccaaggcggggatgaagatgtggatcctcgacttggggacccaagcagcaatgttggacctctggaagagttagaagagatcgagatcgatccagatatcctggctagaaaactaaagatcagaaaggctttgttgttcaaagtaaattcagaattgatgaaatatctgagagcaaacctagacgtttttgcctggtcacatgcggatatggtcggaatttatccttctatcatttcgcacgttctgaatattgatccctatttttggttagttcaacaaaagtgaacactattagccctaaaggaagaagtagaaaagctacgcaacaacaatttcataattgaagctttctacccagcttgggttgtaaatcccgtattggtgcccaagtcgaacaagaaatggcgagtgtgtattgatttcacagacctcaacaaagcat

SEQ ID NO: 343165 - DNA, 565 bp, Cannabis indica
gcattcaaaacttaaaaaaattcgccaattatatcctagaacgccaaattccatgataattcatcatattcatctcatttaacacttttcttctcatttttaattcgcattatgaattttactatttaaatttgaaacaagtagaaaacaagcataattctgcacaaataaatataatcagtttcatcacacttctaaaatactttataaaatgtacctaaaattagtctatcattccaccattgtacgtctccactatccacaaaaaccctgatagtataaaatttcttatttttatgcttactctcatatgaaatttggattctttatcttttggcatttgtgtttgtgttatcataaagtataaacactagctccctcagaggcagctaggtatttggcctttatggtagagtttaagattctggatttgcttacgcttctccaaatcacacctccactctaaagtaatcataatttctagtcctctaaaagtatttaagaatatatatatatatatatatttttgacaaagtgattaaaattactcatgaatttacgacgc

SEQ ID NO: 343166 - DNA, 520 bp, Cannabis indica
ttagtgaactgatatctagaggctgggacagttaggatagacagttacaatgaaagtgatggaagggttcgtaggatagtaatgaagagagacataacgaatggcatttacatccgcaaggtgttgtagtatttttgcacacacaagtgtacatatcgtaagaagtagtagactaacgaggttgatcccacgaggattgtagttaagtacgttaaaattaaactttcacttttatttaattgaataaaaatttgagagaaagttaaaattagaaaaatagcaaaagtaggaagcaaataaataaaagaatctaacactgaataaatgttagggcttcgacttcaattgtatttattgattatggcctaatatgattatcttcttattaccaatttctatgcaataaaaagtttactaaggtaatttatagtctttttagatatataaatcccaattacatgcaaacattctactctcgtgataaattaaagatgtaacagacattaaacacagaaaccct

SEQ ID NO: 343167 - DNA, 916 bp, Cannabis indica
atttgtcacaaccctttgtaatctactatgctaatctgatctctgaaacacaccaagtagtgaactcccttaagatattgatgtgtgcttacttcctcccgaagtaagacttaaacaaatcttctctcgaagatatatgatcacttcctccaaaaatgagacttggaaaagtcttctcccgaagacccacacctattcaaagcttctcttcaaactattctataaatagtatgagatcaaaacaaatactaaaacctagttgaacactctaggtttcacaaaagaaactctctcctcacaaagatgaaaatatgaaaaatgaagctagaagaggtgagaatcgtttgactgctctctaggtcctatttatagaacatagaaaccctagagatagctacaaaaatgattttccagcaatacaaaactctcttaaaaaattactaatttgtagcatcaaaatcggactctgctgcagcagatcgggaccagaaaggaaactctttaaattttcaaattggaccaagattatagatttgaaattcaaacctgccaaatacagtttatttgatctgctctaatcaaggcaaactgaaatcatcaattagagaaaaggaaagtcaagtttctcaaaaataggcgactttctataaagagaacttcgtctcttgaaagaaaagattcccaaacaaatacaaccagatgagaaaaaaaattttccataaaagaaatgagcaattagaggcacgaatttaacacaataaaatcaatttaattcctcaataaaaatgtgtaggcatgttaaaaagatccatttagttggagcgggttggagctccgatttgacgaatcacctctgattcgaaacattcagatactattggatcttgaatcaaatccgctccgccccgcctaattt

SEQ ID NO: 343168 - DNA, 522 bp, Cannabis indica
aatagtgacggttctattgaaagacacaaagcccgtcttgtcgctcaaggatatactcaacaagaaggcttggatttttttgacactttttcaccagttgcaaaaatggtcaccttcaaacttctcttagctatttctaccatcaagaaatggcataccttgcaacttgatgtcaataacgcgtttctaaacggcgatcttcatgaagaagtatatatgcaacttccccaaggactggttcttcccccagaatttgccaaggattccaatatagtgtgtaaactaaataaatcaatctatggcctaaagcaatcttcccgacaatggtacaaaaaattatccgaggctctaattcaagaaggttttactcaatcccaagctgactatactttattcacaaagggttcccaagacgatttcattgccatcttagtttatgtggatgatatcatcctcacgggtccaaatttgtctcttctccatcaattacaaactactttaaatgacaaattttccctcaaa

SEQ ID NO: 343169 - DNA, 527 bp, Cannabis indica
tcagatagtaaatgggttagtccggtgcaagtagttccaaagaaaggggggatgatagtaattaagaatgaaaagaatgaattgattcctacaagaacagttactggttggaggatttgtattgattataggaaactcaacaaagcaaccaggaaagatcattttcctttgcccttcattgatcagatgctacatagattggcaggcaagaatactactgttttcttgatagctactcaggatatcatcaaatagccatagcacctgaagatcaggaaaagactactttcacatgtccctatggtacttttgcttttagaagaatgcctttcagattatgcaacactcctactacatttcaaaggtgtatgatggctatcttttcggacttaattgaatcttgcattgagatctttatggatgacttctcggtctttggttcttcatttgatcattgcttagagaatttggagaaggtgctaatcagatgtgaaaagtcaaactttgttctaaactgggagaagtgt

SEQ ID NO: 343170 - DNA, 666 bp, Cannabis indica
ctttcttctctctctttctttcttctctctctctctctctctctctctctctctcgtctgtgtgtgtgtatttttttgtgcaagtttgatgaggatggcgatggggttcgtggctcgaaggggatggagacaagttcgtggttcaacggggatggtctagcttcgtgggtttattgttcgatgacagggagggtattcttggttcgatggggatggatgggttcgtgggtttgtggttttatgggttcgtgtggagatctcgtaagtggatagtcggggttgggctttgcaatgaaagtagagatcttagatctggttcgaagttgaagatttgaaatttttgtgtagataagtgtgtgtttgtttgatctaattttgtttaaatttagtttaaattttgtttaatttttttttctatgtgtgattcggatataaacagtagggtgaagtggtagtgtttgttgcgctgatggttgatgagggtgggttgtggaggagggtggtgggtggtgattgttaatcttttcatataataatattggtgatggtatatgtgaaagtgaagaacttaaaaaaaaaaagaatgaagaagaaaaaaagggaaaaaagttacttattttttgaaaaatatatgttttatttttaatttatttttttatttttaaa

SEQ ID NO: 343171 - DNA, 721 bp, Cannabis indica
gtaatttatagtcttttcagatatataaatctcaattacatgcaaattttctaatctcgtgataaattaaacatgtaaaagacattaaacacaaaaactctataagctatccaaattatataggtactcttgtcctatatattaacttggttctatttcactatagcatatttgacactcccttctcagatttgtatcaaaatcataaacaataattaaaagtaattaagtacaaatgaaatagaatacatagaaattgaggggaaattaaataacattataaccaaaaattaatgtcaaacaatatcaatctaaaccctaatgaactgtttagctattcatgttcatcgtagcaatttaacacgtaattcagaatagaagaagaaaatagaaaagaaaagaatgctgaaaatcttgttgagaaagccttcactattaactttgctctctaaaattcgtactccttaattgcttcccgaatactattgaagtccacttcttttatagccataaaaagataaaaaaagatacaaaaaaaaatactgaaaaatcctattatgtttggaattagatggggcgggccgcaacataggaagttccgtgtttgcaagtatacacgtcttcaggatgcattgacacgagcctaggcatgggatttccatgcctaggcatgactcccttttttatgggcagcagtgagcatttatttgacttttttttt

SEQ ID NO: 343172 - DNA, 881 bp, Cannabis indica
aaaataatttccaacatttttgatttcatagctctctggagtcctaaaatgagtataatacttacaactttacccttttttgttattgctctcttaatgtgactttgaggaatttgaatgacgataaaatgtttttgtttattttgttttctataaggtgtcctctatttttgtaggtgctatcatatatgggttggttatgaaaatcttttgtttccactttatttgtagttatcatgtgataattgttagctaaattagtgaagtggagtgtaaaaatttttggggaataaatatttttgttagaaaaacatctctttctctcatatatatatatacatgtaaatacattttattagtgttgtgtggccatatttttatttctgcatataaactatagcttgagcaattttgttaagaatttttttctcaaaagatgtggccataattttagaacagtttattattacaaaacattctttggtcacagttctattcattggttgtctgatcaaaatacatactttatattcaattcaatgtcagttaattcaattaccatacacaatatattttgagaatgagtcagttgttttaatagtaacttgtccacttcttctgttaagaccctcatttatttttctctttatcattttcttttgacaggtgatattggaagcagaagtgttgttgatgcatttttcttggaaaaagctctaacagaagccttaaatgagagcattgaatcaattgttgggaggttttgagtacaattggacgacaacaatctgagcaacaaaagtaagtatatgagttccaagtaaagcatccatcagaatatgcaattttttgatagcttcattagttaatttttttttttt

SEQ ID NO: 343173 - DNA, 633 bp, Cannabis indica
tcacatttttttttacaatggtcacaataataaccaccatctttgtaatcaacctttctcaaacatgagttgcaagacacataataccatccaaatatggtatctattccaataatctttgcctttatagtaactttgtattcctacattcaaatattttcaaatatttttattaatttacataatacaacaataattaagagaagagaaaatgaaatagaaattaaaattaccttcaatttatcatcccattcagcctctagcagttctttaatgctcatccgattgatgcacatctcttcctcaagtgatatcttattcacatttgagcttccaatatcttgcaccccattaacgacagttgaaaatcgctcaattaaagatgctacataatctatttctagatttatgtataattgggtagcacttgttgaagaaaaacttttttcacctatttatagaaattgtgaaatcatgtaaattatatttgaaagacatagtaaaaaaaaattacatgtaatattgagatgaacatatagtaatcaccttgaaattgtttaattgtcgtagaagttactatcacaatgaaagggcccgtcatctttttttgtactacattcgtatcaaacatct

SEQ ID NO: 343174 - DNA, 600 bp, Cannabis indica
attagagataccttaaagctttttataaggactagggatttcgcttaagtcattcaaatagacattgcaaaaaaattctatcttatcctcataattctgatacgttattactatccatataaatggttagatttactttcttagttttaaattaaagttcctatcttgaacataacatagtaggctatcactagtatcatccaaataataatggaatagaattttaaaattctcctactaaagataaggtattgtgattttatgtccaaggacttttactggcatctattactatagtgagaaatactggaatatatatacatgatcaagaataagttctactagtttgctagttattttattatattctatccttgtctaatcaaaatatgcgtgacatagagatactttggtgtattgagtatagtctacagttcaaagagtcgaactacatatatcaataacttcttccacccctaagtgttatagagattctgtagagtttcgaatataatctagagttcaatagatataaaagatctttgaactgcatatattattcttgacttcttctaccccctatcagtatcaaaagatctt

SEQ ID NO: 343175 - DNA, 1254 bp, Cannabis indica
aagtgggacaagattacaatggactttgttactgggttgccattgacacctttgaagcatgacgctgtttgggtgattgttgatcgtttgacttctttgctcattttattccaatcaggaaggattacaagcttaccaagctagctcgactttatgtagacagtatagttcgactacatggagtgccttcaagcattgattctgatagagatccttgatttacatcaaggttttggaaggccttgcaacaagccttagggactgaacttcacttgagtactgcctatcatccacagacagatggacagtctgagaagaccatacagacttcggaagacatgcttcgctcttgtgttttggatttcggaggtagttggggagaacacttgtcactcgtggaattcacatacaacaataactaccaagctagtataggtatggctcctaatgaggccttatatgggagaccatgcagatcaccattgtgctgggcagaacctgatgaacatgtcactattggaccccagattatcactagtaccactgaacagattaagggaatccaagaaagacttaaggttgttcagagtcgtcagaaaagaatgccgatctccatcgacgggaagttgagtttggtgttggtgataatgtcttcttgaaagttactccaatgcgtggtgtaatgagatttggagtgaagggtaagctagccccgaggtatattggaccttttgaggttatcgagaggattggggaggtcgcttaccgattaaacttaccaggacagttgggacatgttcataatgtgttccatgtgtctatgttgaggaagtatactccagatccgtcacatgttattgagtatgaggctatccctcttcaggaagatgtgacttatgaagaacaacctgtcaaaatcttggcgagagagctaaaagtgttaaggaacagagagattccagtagtcaaggtcttatggaagaaccacagagaagacgaggctacttgggagttagagtccgagatgtatatgaagtatcctcacttgtttaattttcaacttgaggttgtactttaaaatttcgggacgaaatttctctaagggggaagaatgtgaagactcggtttgactcagtcaaaccgagtatatatatataataaataaataaatataatatatatatgtaaaaaaataaaaataaatatatacataaagcagtacccccttcgcccccctctctctctctctaccta

SEQ ID NO: 343176 - DNA, 562 bp, Cannabis indica
tatatatatagattataggaaatatatttaataatgtaagtcaatcaaagagaataaattgtataactatacattagtgaagtgttgttgatgtataaggggtgatcgggttttactcaaagggatgtgcttctcttgtcccaacacctttaccgtttagaaccacatcgggagactgagagtggacttttctcgtcggaagttccgacggcggtgctcctctacttttgttgggcttgttttggtctttcgtgtcgcttcctttgcgttagaagggtgacttattgaagcagcttttctttatgtttatgttttcgctttgtttgtttattttagctttgttagttttttcggtgtgtactttttgtctttagtggcgttggcattatgtattttgtaagatattatttatctttttgctcttacataagcctggagctttttgatcctttcaaatcggtgtgattaaccgacagttatcattttgttgtgagattacggtttttttactggactgtaagtgcatgtttgacatcataattaaaaaactgttttttgtttt

SEQ ID NO: 343177 - DNA, 787 bp, Cannabis indica
actggacaaggacccggactccaaatcagacctagacacgaatttggagccagacccggatcccaaccaaaacctggactcgggactcgaacatgaacctgaactccgacccaaacataaatcacttcatgaaatccctaaatttcattgcaaggaagccgagacaaagtattacgataaggtggacaatcgggaattttatatggagcgaggattagtggcagatataaaggacattgacgagttacctgaatgggttagtgaaatggttcataagaggaattggggactttttgtcaagcagagaggacaggcggtcatggaattttttaaagaactctacgccaatttttttcccaagaatggcctactgaagtggttgtgcgtgaagtaccggtgtcattctccgctgaagaaatcaacaacttgtttgggttacaatcaatcgaacgccattactcctccctcaaagggcaagtgagcgacgagacattgaatgacatgatgcttgaaattgccaagccagagtctgaatgaaatctcgataattatgccctatgccccacctcacatgactccactgtcagcagagatcgcgcatggatgttgtactgcattaagatgggttgggatgttgatgtaggggttgtcctagccctagaaattgccgattgtgcgcaacgggggaaagggaaactatttctgccagctactatcactgctctctgtcgcaaggcgggtgtaccgatgtgaaacgaagaaggagcattgaatcctcgggggccta

SEQ ID NO: 343178 - DNA, 729 bp, Cannabis indica
aaacattctcccccacacttattttctcacctccattcaactttttcttattttgacacaaatccttaaaaatgttagcacaatgaagttcttctttgattatctcaagacatgaaatttttacttcaattttcggaagggtttcagggatctccttgatgggctcattttcttggattttttcaatctacttgaaaaagatgtaggagtgacatggtacagctggtttgtacggttttttcagtgatggtggaccaactaaagtaggagactcaacctttggtggagatgactcttcaagggatgaattgttgactcttttagttggaatcaaatcattaacttcttggattggtggtaattcaagttgtgtactactttggatagtgatgccactaacattctctatttggctactctctacttgtgaaggcatagtatttgaacattgaatttcatactcactcatagatgtttccattgactctgcaagattctctaacgtttgcggagatttttaaaggctctgcatagtttcatgacaactttgttgaaattgcaaggtattagcagctaacatttcaatcaactcagcagtagttggcttttcactatatgttacaacatgagtagattattgaaactatgcattattatgttccatctgagtagtagaagcaaccaaagtgttgagcagatcagtaaaagaatgatcttgatcttgtggtg

SEQ ID NO: 343179 - DNA, 563 bp, Cannabis indica
gtcaaccgaacctattagaaaattgtggtgggtataactccgaataacgatttttgttgagaaaatattgaatatcaatgtccattaacgtataaatatgatttcttttcatttttgtaatgtacgttgctttatttttatttttataaaattttttggaattttttatattattaacattgttgttgtgtatgtgcatggtagtcagaatttttacggaattggtcaccggattgcggttaaatttaaacttaatatatagtatatatatttatatgtaattttgtgttttattaaatatgtgtgtatatatattgtgtattttagttatgtaaatatattattgtaattgtattgtattgtatatattctaagtaatatatatgtattgctaatgagaatgagatatgagagatttaataagtttagaaataaaaattttaaaaatttgttagtatgagatatatttattatacatgtatgtatatgaaaatttttcaaaaatgtatataattttctaacttgtaactagttacttttttttataactagtaagtaattaa

SEQ ID NO: 343180 - DNA, 733 bp, Cannabis indica
taaaaaaaataagactaatatactaaacacttagagtaatgtagatatgtatttattcaactttttcaattttaattttatttatggttattatatataattgtacttagtttaattatattaataataaaataatatacatatataaattatgcgaaaatacaaaattgtaaaactgaaaaaagtcataagaagaccctatggcgtcggttaattcataataaccgactccatatgtgtcatatggcgtcggttatatgaaacaacagatgccattatttcataataaccgacgccataggggtcctataacgtcggtttttttacccttacagcgtcaccggaacagcgtaggtagtgaatttcaccaaaaccgacgctcaaagcccttaaaaactgtctctaaaacccaattttatagtagtgttctaaaagttgagagaacaatgaagaaaaaactctattaaattaaaattaatctcaccagctaatcactgaataatgatatattttttaaactaagtaaccactgaaaagttattaaaatacaaagtatataaataaaaaagtactttttcattttttgataagtaataatcttcattgcagagttcaaaaacagtacaaccagcaaaacaatcttaaccaagaccaacccaagcattatatataggtgattattcaatagttacattcaaaatgtaacttgttggaatttattttaccaggatct

SEQ ID NO: 343181 - DNA, 600 bp, Cannabis indica
actattttattttataccttgaaataaactgtttgaacactgctttctatattgtaaattattctgaatttctcaaaatttggtaggatgtattaaataattacgtacacgaatattaaaaaaattggactgaaaaattcttctgtatgacaaaacaggtagaggatgtatcagtacaacctttttaagggggtgaattatagaagcaccctatcattaattatactagtttattttaatttgtttcttttgattcgtattcttaaaaaaatctataaaaattatagggtgattctacaatacaccctcttaaaaagggatgtactgatgcactttctacttgtttcagcatccaagagaattttttaatttgattttttttttatatatattcatgtacgttatagttatttaagatatcctacaaaattttgagaaatttagaataatttacaatatagagaataatgttcaaacagtctatttaacacgcgtataaaataaaatagtcatgcgtgcaatacactatttgaatgcaagttttggcgtgttaaacttttttgaatttcttaaaattttgcagaatgtcttaaataacta

SEQ ID NO: 343182 - DNA, 1549 bp, Cannabis indica
cagttgtttcagggaatagattgagaggtctaatattacctctccctactccgccattaaagacatccacaggtggcatcctagctccagataatggcacgttcatcactccgatgttgatggactcgttgttagcacctccatttgtttggtttccagccatgatgattttcttacttgaactgaatgaaactttaattctcgtttcccacagacagagccaaatgttgtcgagcaaaattcgcaacaccaaatgtacgtaataatattaatgacaagaagaaaattgcttgaagaacagttgcgagtattcaacctagaacggcgagtactcgagttgggaatatgaatgcttaacagaaaactggaaacaacaagaagacagaggattatagtggttcagtcagatcacggtctgcttagtccactgtagcaagagtttcgtaggtctcatttcacggtggatcacccctttatatacaaagcaggtgtccaattagttatacaaagattgcattcattgtcaatccgtttacacattgaattacaataactaaactaaataacgtaaacattaataaatgaatagcagttactaaattcagcaacgtatgcgccctctaacatgcgagttgactgttcatattctaatgttaagttcgcgggcctaacacttaattgcgtttaggatgtctgcgttcttatgtagtcgcctttgtggacatcgtataacgagctgatagaacctagacatgcgagtctatatcggtttatcaaggttgttgggtcatcgggaccaacttcattatagagagtcgatgcttatgcgggaacatggaaaggatactcgcacatatcctgatacatgcgagttgactttatcctctcatcccgcataatacgagttacaatcatgcgatcagactttggtcatactcgctgtatctcgctgaccctatcttgagcgaggtttaaacttcgaggagtctctcacggacgtctcagttttcattggaaatctgagtacacgtgtcctctaaataggagtctggtctcgagtttctaggtgagagaaatctcactataacaatatatataacatatcacaattttaatcttaaacattatattatataataaataatataacattcccccactagattaaaatttgtgatacctcattgtaacactttatttaatcaatcaaatatctcatatatcccccactttgattgaataaatcaacactctctatagagtccttgcttaagtgcataaagttaagtgtttttcaacttgaacttaaccatagtgtaatcatcacaaattttattgaaaatttggttgacaaagcattgaaccaacttttctttataataaaacggtaatgacacacacacctttgctaggttcacccaagacctcatgtctcgctttgcactgttaatggccttgtgcacattccattcattgaccttgttgagaaaatatactccctatttctcatttagggcggcaccacccttaggtcaatataggtagaatt

SEQ ID NO: 343183 - DNA, 817 bp, Cannabis indica
cttttcataaatgggtattttcaaaaatgcacagtggcagtgacgcgactgaatacaaatcggtaggtacgaaggaggagattattatctgtatataggtattgccagttatgttacttaaatataaagttatcaatttatttcctctttcctcgcattttctttacctcttcttcatcaaccatatgaagtcaaagatacggtatgatctacgtatcaactctatttattggagatgtacaatatgttctacaggattttatatttacaaaattttaacttactaaaaattactacatccattatttgttttacaattgttgccatctatgcagttgaagtattatttttatcacgattggatgtttgaaatatccgtacttttttctattctgcgctaaaaatgggtttaaggttctatgtatcatggggttataataggatggttggccatagctattagctaggtcctatacaactttgttttaccacaatattttctgggcatggggaatttggagcaaagaagcattgtaaggcaattgtttcctaatatggttttatgatttaaagagtcacttaaaatttagagtagtttccggcataaatacctaagttttatgcagagtagctgataaatacctaagtcgtatttttggcggtaaaaataccttccgtcactagtgtggaacttccgtaggtacctcgtcgttaactgacaggtcgacatctacgtgtcactcgttaataggtccatgtcattaattttttatttattatttaaataattatttaaatgtttaaaaattaataaaaa

SEQ ID NO: 343184 - DNA, 1009 bp, Cannabis indica
cggagtggctcgcctggtcattgttttaattcaaccaaatctctcaggtgcaatgggagctgacgtgaggaagagaattgtgcatggaattccatgaactaaactttccaggagccaacttgaaataccattgttgtgcggcctccgacagagtggcggggaagattctgcagcatacgtcccctcgtactccttgtaaatccatttgcatctcaaaatacttgaggttggaaagaggatcttttctcccagtatacatcttccacattggcattttgaacttgtgaggcagtggcaggagattgatctctggtgagaaaggagttccgcgagcacggtctagcttaagatcatttttactctgtccggccatgccatgaaatatattcttcaactcgtcaagctgggcctgtacggcttggttgacttgctcggcattttggtcgatttggattacgtcagtgtctttctgagcggggatttgagtatgggctccgggttgcacgatcgttgtagtattctgcacatctattccctttcttctatttagatcgttccttaggtcatgggttgttcccaacctatcgaacacagaagagcctggctgccttggcgattgattcgcttggttgacaggtggaataacaccattattctagttggatccatcaggtatggctacacctgatgaattcccagacaaggtctgccctccaacctcttggcccatgagtggcactcgtaactcgggattggacggctgaccattggttgtttgggaggtattcatcatcgggtcatcctccgtttctcccacgggaatgacgttcggcgtttgctgacctacagtctagtaggcctttcgtatcagcacggtagcttgccgactacgatctacgatctctgcatggtgagcccttaatgcatccatctctttgtctctccattcagcgaacatacacctctgttcgtcaaacgcgagaattcactgcagcacgcagttcatcct

SEQ ID NO: 343185 - DNA, 640 bp, Cannabis indica
catcttcagcatccttcctggccaagtccacctctgccctcatggtgttggacaaagccgtgttcttggaagaagcaaacttagcccaggagtaagtgtaggccaagttcagaccggcctacacagagaaaaaacttgagtatttgggccaagtaaagaggcttaaagaagagtgtcaaggaagacttacacttgtgaactccttcaagactcctcccaccagcagctccaaataagagtcattttcggcaccagccagatgctcactaacctcaggaaccaatcgattcatgtagtgagcgagcatcgccttaccctttttggcctccggaagcactggcaaaggtggagtagaggtctgcaccagttcagacccacctctcggttggtcagacctatccgaactccctcctcgagactccgtctcctgggcatcttttggagtggaggggtttgcaaacgtcagctcctcagaaagatcgatgacctccctagcaggcgtcttttccttggaaaaagttccctcaccatctttagacttcttggccggggagatgcgtgggagcttccaccaatcctcttccttagagcatcgagcatcttctaagacatgtctgcacggaacaaaaagcaacatggt

SEQ ID NO: 343186 - DNA, 502 bp, Cannabis indica
gatcgcaattctcctgctccgccattaccttttcaccattacagaccactgacctcgtcacgtctaagcttcagaggctggtcgtcgagttccagtcatttccggaacccatcgacagggtcaagcggttgttgcaatatgcgtcttttcttccgaagtttgatgactcgtcccaggttgactcgaaccgagtcatgggctgcaccgcttaggtatggctggcagcgagtttggataaggaagggagactgagattcacggctgacagtgattcagagatcacgagagggttctgatactgcttggttttgattctcgatggggcggcaccgaagaaggtgttgacgatgatgaagaccgacgatttggaggctttgaacgtggggttgcttgatgggctgcggtctagagcgaatacttggcataatgttttgataagcattttgagttttacaaatacaacttggatgggccacttcttctgtaaaaaaaaaaaaaagaa

SEQ ID NO: 343187 - DNA, 694 bp, Cannabis indica
aaggaccgaatccacctagttgacactataagatctcccgagggtaacagggttccaaaccccgaaacataaatatcacatggcttatgaaaactttctattactctactcgatacataagaatgtgtagctcccgaatcaaacaacacagtataagaacaaccattaataggcaactgacctgtcacaattgacggactagcatcagcgtcagcttgagtcatggtgaaaagtcgccccggattctgcgtagtattcttcttaggctcctctttcttagcctaggggcaatctccgataaagtggcccaccacgccacattggaaacatgccttggctcgacactcaccaggatggtgtttcttgcatttaggacactcaagatatgatcggaatgaggacccgcgaccctgacggccacctctgtttccccgaaactttctatttcccccctgatgcttcggaagcctcggccttccgtttgtgctcagggttgtcactgtcggtccccttactgatattaccactggcaggaagatttgatgtcttgacgacatcttttgcagcatgctctttcattacttgctgctctgcctcctcagcaattaaggccaagtctaccactctcttatacagagtatcatgtgatgtggtaattttcaagtcccgctgattgtagcattcagtcctcgaa

SEQ ID NO: 343188 - DNA, 902 bp, Cannabis indica
atggatgtttagtttttatttgtttaggggtaaaattggatgagaaaaatggtgtaagtatattttgcaaaatatactagcatatttttagtggataaattaattttaagcatatgatatcaaatttccctaacaggttattaaatatatatatatttttatcttaattggtgatattaatttaaacgaacttttgttgctaaagcgaaatgaggattcattccttttgttgattttttttcctcatgaatcacaaaacaaaagtatattatatagtttgctacaaagcccttccacccaacaaatgaaaaataataatttttttcattacatttcaaagattcttttttggcaatttaatttacaaaatatttttacaacactcttgtgttagctagaaatttgtcctttataaggttgttgtgttttaattccctagagatgttagaaagtgagagcaatagatagaatttctttgtactaaggtggcgtcaaggtcggccctgagctaagacgaaggaggcggccgctttaggccctaccgctcagggccctatttcgaaaaaaaaaaaatatagttagtagtaaaataaataataatacttttaatgttaaatatgtgttgtagcatagtggtaatttgattagtttaatagctaagagattgggaattcaaattccaatagcctcactttttcactgggccccaattaacatagggtcggccttgggtagcgtttgcttgagatgaatgaaaatataagaatagaaatgaaaagcgtttgtttgagaggaatgaaaatataagatagaaatgaaaatgagaataagaatagaggaaattacactctataccctttttatattgtcctattttatttttaccctcttttttaaagtct

SEQ ID NO: 343189 - DNA, 612 bp, Cannabis indica
aatcaaggactagagatcttcaacggaaagagtcattatattccgctgcaatcaacgtaaggttttcttaaaccattatgtgtttatttcattattttagagaattcatatttagtatgttaatgaaacatacttattagtaaatctagatcttgttaaaatattcacaacaactagcctcagagccatgataatgatttactttcatgtaatatgggatgttaatgaaacatacttgttactttcattagatttgatttgaatcaaaaaagtggtgatgatgctaattttttaaaagaatataaatcaaagataatcacaaacatgagaaagaagtaaaattacactgctctataatctattttaagcctatacacctcccaaatacaaccaatcataatacaaagaaaatgccctcataaatgagagcaaaagtggtgctctcacctaagaaaaatcctaaatatatatatggaatacttctcccaaaaatggttactaaacaaatttaactataaatattaattttaaaaatatcaaaccatcgaattttgatctaataacgaataatgaaactacaaatttgaatttctatgcttaatttaactactt

SEQ ID NO: 343190 - DNA, 976 bp, Cannabis indica
tttggtatcagagtcgctaggtttgtctactgatgctcgccaaggcatgtacaatcttcatcaaagaaagcttggctcacggttcagtaagcccgtacttgtttagtattttatgtgattattaaagcatgttaggaggcatattagttatagttgttcattttaaatgcgttgcattaaaatccataagagcagtgttaagtttttatgatcgttgtttgacctacttggcttatggattcgcaggctaagtcttattaaatggacacccactgaaatacaagaagtcagggtaatagggttgagaccagaggcggtcagggaaatcaaattccccaaaatcacagtggtcgcggctgaggtcgtggcagagtacagggtggtcatcctgtgaatcaaccacaagctcctccagattaggagcagaggtttgcggaaattgaatatcgtatccgtcgacaagatgaagaaattcttagattaaggcagcaaggccctcctgcagtgcctccaccacaagctcaggccgttgtagttcatgtggtgctagcagaacaacatattgctggaaaccgtatggagtcgttatactagaggtttcataagcaagcacctccagtgtttctgggaggtcctggtgtgatgaaggctgagcaatggctcacagagatagagagaattttgaatttcatgggggtagttggaaatgattgggtgacctacgccacatttcagttctaggaagacgctctcgtgtggtgggaattggcatccctcacccgagacatcactgttatgacctgggaagagtttcgagatctattcaacgccaagtattacaatgaggcagtccgtaatgctaagcgaaaagaattcactaagttggtgttgactagatctttcaattgagaagatctgttgacctgagacgaagagaaatgtctatctattttatttagttattcagttaaaccaa

SEQ ID NO: 343191 - DNA, 840 bp, Cannabis indica
aattctgaagtccattgaagatatttgcagagcttttttatggaaagggtaggctgttttccatggggcaagggctgtcgcttgggataatgtttgtcaacctaaatcttcagggggattagggatcaaaaagctggagctttggaacaaagcagcaatctccaagtacatttgggctattgcaaataatcaagaaaacttatggcttagatgggtgaatagtgtatacataagagcttaaaactggtggggttacaacgcttctattcactctagttggtactggaagaagttggttaacctaagaaaccatatcagttctgttgctaatattgctgagtttaagagaaacaaatatagcataactgctgggtacaaaatgttcaacaatccacaagcaaggaaaacatggagtaaagaggtatgggctcgattgaatacaccaaaacatagtgttattttctggcttactatgcttaacagattaaaaacaaaagataggctagtgcaaatgggcattaaggttcaagaaacctgctgcctatgtgatgagtacaaggagaatgttcagcacttgttctttgagtgcaagacaactagccattggttagatgaggttaaaaactggctggggtggaaagcaaaagcaacaaacatccagcagttggttcgatggattgagaaggcaaaggtgtcaaaattcaagaagtaggttttttctgcagtagttgctgcacttgtttatagcagctggaaggcacgaaatcagctcatctggcaggaaggacagatcaatcaaaggcaggttgtttgtgatattaagtggagtctaaggactcg

SEQ ID NO: 343192 - DNA, 892 bp, Cannabis indica
ccactgctgcaacaacgtgtgcctcaatttttcattccaagcccgtggagcttgcttcaaaccataaagagctttatgcaacttacagacatgagtcgggttggttggatcttcaaaacctcttggttgtctcatatacactgtttcttggagatcgccatttaaaaaggcattactaacatccaattgcttaacaatccatgctgaagtgacagcaagagtgagaacagttcgaactgtaactggtttaactacagggctgaaagtgtcttcataatcaatcccaggtgtttgtaaatatcctttggcgactaacctggatttgtatgtattgagggagccatcagcattaagttttatccgatacacccacttgttgtcaataacatgcatatgcggctcataaggaacaagagtccaagtgtgtgatcgaatcaaggcagtgttctccttttgcatagattgaaaccatttgggatctttaagagcttgttggactgttcttggttcagtaggaacaagagattcgggcaaaggatgtctagtagataagtatgctttgggtttgtatattccactttgagaccttgttttcatgtggtgaacgcgagataacatgcttgagtcatgtgttggagacaaaacaccagaagaatgttgctgagatgagttatggggctgctggtggattgatttagactgctggtttgaagattcaggctgctgtagtggttgaacaggctgttgggttgaggtttcaggctgctgagatgagtgtataggctggtgggttgttgtttcaggctgttgaagtgagtgtataggtggctgggttgttgtttcaggctgttgggtttgagatgggggttgggaatgtgtatgtctggttgtt

SEQ ID NO: 343193 - DNA, 631 bp, Cannabis indica
gatgttaatgaaacatacttggtagtaaatctagatcttggtaaataatttcctacaggaccatatcaagtggtccaagttctcgactccggagcatacaagttaggtaagtgtgacgaaaaaatgcaacttattctagtaaaacggtactggaatggagaacatttaagaaaatactaccaataaagtatcaggtcggatgaccactttaagtactaaatgaacatttgcttttaagtgaatggccttctgggcggactacgctcaaaggtttcgataaaagaaacaaagtactcaggtcgggtgaccactttaaggtacagtttcttatgtctgcaatttgttttatttcatgttaagctaaaagatcagattagatcaaatagctctgatgtaagttactacggtaacaaatgcacttttcaatcaataaatgaatgaagttagttacttcaaaattcaattgagtcgaaattatcaacatgtttctaatttaccatacaatgtgtacaaaaggtttggtcaaacccaaaacaccgaacagataaacaatatatttgtaaaagacaagtgaccaagagtcatacgtctggtcggtcacttgggggacacctatacctgtacaaagcat

SEQ ID NO: 343194 - DNA, 856 bp, Cannabis indica
acttatttttagtgaatattttggttgagcgtgtctcgcttgttattgcttttactttatgtttttgagttctaaaatataacaaacacttaaaataattgacagaggtattacgtggaaaccctttcgggagaaaaccacgggcgaagcacgcaaaaatccactacgtaaaatgagagtgtacaaggggggcattgttttgccatacatgtgatttaaaatggtatttcttaaggtgtacgacgttccagttatttcctatgtttcttccatctttgctcggagtttgtatgctctttggccaactatttttgtaatctggtaaggcccctcccaattgggtcctaatttgcctactcctttgtgatgatcgcttagcttaaatttggaaattagcagatcattagggtttgattatggaatttatttattaattctaaattattaatttatgatgatttatttgaattcagaatgcattttatatgtcatatatagaaatttcataattttgcatattcggtgcccgacaacattgaaacacgttgtttggctattagaattacatcctagtattttaagtatagcggagcagtttagttagacattgggaatgtcgagaatagtcgggattttagaatttcccaaaataccctatgtgactttttatgattatatggtgttaaggggcaaaaagggtctttttagcaagatgtgttttgccttttgtgggttatattaatttgattttaaagtttaattaaaatgattttagttgaataaagcttatggagtgatctcatttttcaaagtttatcaaaaaaatcatttttgtctctcaactctctctcatttt

SEQ ID NO: 343195 - DNA, 837 bp, Cannabis indica
catacacatactaaagtcaaaagtcaaatttatattcaaggaagttgcatagtcatacctaatctatttctttgccatttcatttttattgtgtccacgtgttgacttgaacctacaaaatcaatcttaacccagcttaattgaagtattatgctataacatacaaaatataaagttggtagacataatgataccaattactaattttccctgaatctcactttggcaaagatcaaagctccctagattagtagaaattatgatgaaagcaaacattccctaaaaaatatttcaaacgaagttgttattatcaattgatgaggggaatcaactattaacacttgagctataaacataacgactcacccatattgattgaacgattctccaagcttaacaatcataaaaagccatcaacaaattaataactaaacttatgaaatcatttcaaaaattacaagcatgcaacttatacttcctgaaactgttgcaccacatttttcaaccttaaatattctgaatcaaatagaactgacaaataatagtttttaattcaaccccaataaaaaactttaattaagaaaaggtcatactgctgaaatgtagaaggcatcaactaaaataatagaaaaatgataatagtaaacaaggaaattacatcaacaaacaatcagagacaatcacaataaagtgaagggattcttcaaaattatattaagaaacaatcagagataatgaccataaaactaaatcatgtcgtaaaacaataaatcctccaagtcaaaatcaaaatgacaagaagagaaaaagagtaatcgttaagaataaacttgaata

SEQ ID NO: 343196 - DNA, 1528 bp, Cannabis indica
attatgagtgcaagacaatggtcaatgttttattatattcatatttcaaaaatgtccttttttatcattgtcagctcttcaattggacgtttctatccactatcaaatcttttttatttcgatatatatatatattttttatagaaagaaagaaacagtagtagagaaagaaagagagatagaaacagtagcagagaaagaaactcaacgtagcagagaaacagtagcagcggcaaatgaaactcaacgttttgaggatgttgatattcccttgttttaaaggtaatgtagcccacagtaaaatgaaaacctcatccaaaaaaattaaaattacataccaattaaacactggttagacttagtattcaggaaagctgtgtaccaaacagcccctaaaaaggaaggtttcccaaacttgatacacaagaaacttttccttattttccctaaaaaaaaagaagaaacttttccttatatatttccctcttttttgtttacttaatagtgtttgaatcatttgttttacagagaaataattgttcaacaatggcttcttctgattcttatagtcatgttgcccagattgagacacagtttcctgctcaccatattttcagtattattattgaacaaactcctcccaacaccaagttggtaagcatacattgttactactctctctctgcatcaacttcaattcattatttttcgattatttattttattatctatgcacaccagatattacagcttgatagccttgattttgtggttagattcgtccaaatttattatgtattcatatatttatagatagccctgattttgtgattttgtaattttaccctaagtttgtctaatttgtttactttggaaatattgtcaatgtgccaaaattagaggatggcatgttaaagtaagttcttgtgatatgttcaattttcgattcctttgtatatccctaatcgtaatctctgcaacttgaaaaaggtgcttctttgatttgtatgatgattagaatatatgtatacaatacatgtatttatataggttacagtaatgtaatgtgtaattatatgttttctggtagcttaactttagtggtgttgtcttgtccagcaaatttcaaaggcattttggatgaaatattgtgagtccttatcaaatcaagtatttcctaagctttcatgtggatcaacagaggaggccaaaactagtgatggaaaggtatgaattaatacaaaaagggttggaataaatttgcacaacacaattaattaatgctattattctttaagtaaactctgagttcaatgttatggtatttgattatccttttactcctaataatcattttcaggatcataatgttgatattgatgattctaaagaagattcagactctcggcccaacaagataaggaaaactagtccttatgataattctgaaggtatatattcatcatcatcatcataattgaatgcaaatatggctacagagttaacttaattatgcaattgttgtttt

SEQ ID NO: 343197 - DNA, 869 bp, Cannabis indica
tatttgagagagctgactcgacgaagcagtgaaactcattgaaagatgtttgaagctaattagtgaaggtaccttgagtgtgccttcctatagcgagatagatacctcgctattcgttgtttggattcattcgactgttatacttagtttgtataatgtatattatacgctaagtgtcttaatagtcattatgtctcgtctatgtctcttcatgcatagcgaggttgatgcctcgccttgcactattgatggcgtatggcttctcgtgaacgcacgaggcaacaattcgtatatctttatttcgtttaagaccttatagtcagcaagttgtaaatatactctgtcagtttcgcatttaatgagttattcaatcttcaaatataattatcattatatttattgattcgtattctcccagtttgacacgtgtcctcctctgaagtgctagccgaattttgattataacaattgccccttaaaaagtaatttttttttttaaaaaaagtactttttaatgattacagagggtatatttgtcataatcccttttgaaaaaatgtatatcctctaattttggcagttttgtgatttcgaggtacatcaacatttaataaccatcttttccaatcctcttttgaattctacccgtaggattaatcatatttttgatctaacggagattaacccaagagtatataaagaaaaagggaaacatctttgcattatttttgccattttaaaaacttctggaaatttttcgagtttttctgctaaaaaatcgtacctagattatttcgaaaccttgcatgccatctttgtcattggctcttttcctacgagtttcatccgtatttaattttcgacttcaa

SEQ ID NO: 343198 - DNA, 645 bp, Cannabis indica
atgatcctctatagatgatctacattgagtagggacaaatttaccgttacacccttcaatgtattaaatccttaaaacacttagctacctataaatgatattttagtgagctaatataatcactgaaatgagtactcaaccatttatctctattaagccaagctcaaaggaaattatcgtttcacttctatgtccggtagaagaaatagattttgtatctatgattagcgctcccactcaattgaactaccatgtccttaatctatatgtcacaggaagaactactggtcgactttaacgaacagattgaagaacacaaataatgcaactgaactagaaccttaccatctcaagattgagatcatttgatctaagatcaagtaggtgatattaaattgaaaagatattacgttaaatttattatatcttatctaagttcaataacagtctcttctgatgcatacaccatacatccaacccaagcttactttaaccaatgccctggaaaggacatagtacttatccaaggtgcaagaatactacattgtagattatcctatcagttaaaccctgtgtagtaataaatcataggcatacatttaatcacacaatctgttgggttttatgccctaaataaaacttatt

SEQ ID NO: 343199 - DNA, 566 bp, Cannabis indica
gcggatcggattgaatccaaaatatgaaatccgcacttagtgcagattggatgttgtttgaccaaaaaagtgcggattggatcggatgaacacccctaggcagaagggagtattcctagcagtccacaaacggttgatctaaatgtctgttacagtaggatgtccggacagggtaattgagggacttccaaccaaagtataaactcatatgcaccgagcaagatatatgagttggcaattcaaaagacaagtcttatcgcttccaggaacgaagataatccctatatttgtggcacttcaagatatatgagtttctcattctttacattgtaattatagaattaatgtagtttcctattttatttattataggttaagggaaactattcttcatgtaataagctcctaaaaatagtagcacaatctcactattgagggggacgagaattaatccaaacaaatacccaagagagaaaagtgatcaaagagagaaaataactcagagatcgattgtaagagctttagagagagaaaaacaacttcattctttctctcaagtcaataca

SEQ ID NO: 343200 - DNA, 1486 bp, Cannabis indica
gtactttcattgagagaaggatcacgaatcgctctttattcgacatccaatcacaaatatgatggtgcaaactcgtagaggcctgactgatccaacaaattcacagacggtggatcctgcattggagaacccaggaaacacaagggttccgccagctgttaatcctggacaaccggcgaacgtggggaatggtgtaacagttcctatagatgaaatcgcgcctagtgtgcaaaagactgggaataacagtttcgcacccaaccagggcattcataacacaactgtttcgcctggaaccaacgcctagacgaccatcggagatgccactgaattacaaaatctctgtgacgctctcggactcatgcagggtcataacaataccctacatcatgatcaggacgaactacgaatcacagtaaatctcgcgttcgacgaaaaaggtgtatgttggccgaatggagcgatagagagatggaggcattaattgctcaccatgcagagattgaaagtcgtagtcggcaggctgtcgtgctgatacgaaaagcctaccaaactgtaggttaggaatcgccaacatcattcccctgggtgagacagacgaagatcctgcaatgaatgcttctcaaaccgcaaatggtcagccgcccaatccccgatcacgagttccactcgtgggccaagcggtaggcgggcagaccttgtcaagtaattcattaggagaagtcatacctgatggttccaaccagataaatggtgccattccacccgtcaaccaagcgaatcaatcgctgaggcagccaagcacttctgtattcaaaaggttgggggaaacccatgacctaggaatgatctgaacaaaaggaggggagtagacgatcaaaatgttacgacaaccttgcaacccggaacccgtactcaaattctcgcacagaatgattctgatgtaattcaaattgaccagaatgccgagcaggttagcccaaccgtacaggctcagctagacaaactgaaaaatatgtttcatggcatggctagacaaagaaacaatgatcttgagctagatcgagcacgcggaactcctttctcacctaagatcaatctcttgccgctgccccacaaattcaaaatgccgacgtggaagatgtacactggaagagaagatcccctttcctatctcaagtacttcgaaatacaaatggatttgtaaggggtacgaggagatgtatgttgcagaatcttccctgccactctgttggaagccactcagcaatggtatttcaagttggctcctgaaaagtttagttcatggaaaaccttctcttcggaattccatgcaaaactctcctcctcacgccaactctcatttcatttgggagacttggtcgaagttaagcaacgaccaggcgagcctctccgggcatacatcagtagattcatgacaaaggcgaccaaagtttcacagttaactgaggatggaaagttatcc

SEQ ID NO: 343201 - DNA, 638 bp, Cannabis indica
ttttttcacgttactttcctataatagcaatgtgaaaacaatatattttgaaaataaagaaaaaaaaacttcgtatttttgttaaaaaaaaaactacatagattcgtaagaaaagattctgacatgtgattttaggcgttgaggttgactaaagaggttgcaataggagatcgtaattaacacccctctttatgaaataatcctaaaatataatcaagtttatatatcaaatcaaattatactaaatgagtatatatttatttatttttgagttaatgtacaagtgatttagagttgtttttaaatttaatgtattttttaagattctttttgtgtgtgtgagtttgttttttattttatttttttaagttaacacaaatatttgttgatgcccaattatatattatatggccggggttgttgtctcattgttttctcattgttatttagttgtttaaataagaaaaaaaacgagtatatttttagttattaaagctaacacaatgtgttaaggttcaattaatttttatgtattaaaatgagattgttatcgttatcgtgttgtttattcgttgttatttgtttaaccaagagaaaaataagtatatgtttagtttttttatgtgtacatatatttt

SEQ ID NO: 343202 - DNA, 670 bp, Cannabis indica
ccatagggataagtgttgttccattaaaccccctgagttgggaacaacttggtgataggtctcggtccgttaggcctatcgcagtgaaaacctatttgaataacagattcaaggaactcccattgtcgattaggactctggccacgatcttattggcaatgtgggtctctatgaccaacgggtcatggtgaggaaaacgcactgttttagcttcttcttccgtgaaggtaatgggctgatctattagccggggcctttgagctgggagttgagtaacttccaaaacttcatcgtgtttcacggcccctgtgtaccgtttgagccctttgcgggtagttcctccgatgtggggtcctcccgagatcatagccactctcccgttgggtgtagatggcaggccgagaacatgctgggcatctccggggggaacaactagagacaatactcctgctgcacaccctagtgctccttgttgcaaatctccagccgcctgacctaggttgagatcgggcaactggtttttgatcaactcgtagaggtgtcctaatcgaatcaggttttcaatctcgtccttgagatttttgcattcgttggtgctgtgcccaatgtcattgtggtactcgcatccagggccggccctgaaacaaagtgggccatagggagaaaaaaa

SEQ ID NO: 343203 - DNA, 673 bp, Cannabis indica
ggtatgatgtctcctcttaacaagatgcctttagctgtgatctttgcacgaaaactactccatattttacttttaacaatactttggttagtcataataatcgtgcactatagaaaaactctactccaagtggttacaaaggaggcaattcacaagaatctaataatcaaacaccaaaatctagaagcattatgtgcaactattgtaacaaaccagaccacaccaagtcttagtgtaaaaaggtacagtttaaaaatcagtaaaaaacaatatgctagcattgcaagcactagtgatgcatctaaaccccacgacctaagcacctaaacttcctagaattgagcgtacactcaaccctagcctgacacaccaagccgagcactcaatataagccacctcaagttgtacccttaaacactacctcattatcgttcaagacttcatggaagctactggtgcattaagtttaatagcctccataaaattcaaccaaaactcaaagctaagcatcaaagaacatcctagcattatttctaacataacataacaacacttcattatacagactatgattcaagttgagggggtgtactttttttttgtaagagaggggacatacttcgttttctaagtaaaaaaaataaaaaagtaaagcttcaatggttaaggacta

SEQ ID NO: 343204 - DNA, 720 bp, Cannabis indica
taacttggccttcttattggtgagatgtactgccatgtggtgctgattttgtccatgtaaccatgccacgtcaggaggacaaaaatggagataatatttgcccccaagtccttgtgtggacgtttgtacggatagggactttaccagctatgttggtgcagtcaggactgttgcagccatcgctgaataaaatttgatgcatttttagccttttgaaacactttgtcttgactgtctcatctcattgctgtagaaaaataactgctttcctttttgatgcgtaggtgaattaagtgaagaaagggctccacatgcattacataactgctttttagagggaaaaccttttttcatttctcactttttacttttcactttctctcactagtaacttgcattcaaaaaatctcctcattctctctagagggctgaacccacaagcatcatcttcccgagatttttctgatgttttgacgatccgagcttcacgtcttcttcttcaacgacatcttgtagtgggtaagctttctattcatgctatttcacttgatttggttgattttgccatggatccatgaacattattccttgctttgaacatgctttgattcttatttcagattgttatccttttggtattttgatctgcgtgatagccttaggatacataatgtgtgatttctagacgaaaaagatctgaatctaacctttgttgtgatt

SEQ ID NO: 343205 - DNA, 524 bp, Cannabis indica
tactagaaggtgtaaaaccaattagttgtaaatggatattaaaactaagaggaatgaatatggtcatgtggtgagattgaaggcacgtcttgtagcaaaaagctatactcagaaacaaggcattgattatacaaaggctttctctccagtttcattgaaagactcttttcggattataatggtacttgttgctcactttgatcttgagttacaccagatggatgttaaaacaacatttctcaatggcaacattgatgagacaatttatatggaacaaccagaagatattgtgtctagtgacccaaataatatggtttgcaaattaaaaaaaaatccatctatgtgctcaagcaagcttctcatcaatggtatcacaactttcatcaagtaattgcctcatttggttttaagatgaatatcattgatgattgtgtatatcacaagttcagcgggactaagtacatatttctagttctatatgtcgatgacatatttcttgccactaatgatataaacttattgca

SEQ ID NO: 343206 - DNA, 794 bp, Cannabis indica
aaaaaattataaagaatatatacatacatagatccaatatctacatcactgcaagcatataaaagtaacaaatataatgggtaattttactgtaagacccgtagtttgtacctcatagtatggggtagttttttggtcaataactgttatatatttgttatttaacaaatatataatgaagataaaatgtggcatattatatattaatatgagattgatatatattatgtgttggaggttatattatatcattatagtataataatacacataaattgtaacaaatgaggagttacaaatctgaaatagattgtaacctaaggatcaaaaattgataaatatgtaattatgtgagttgttacatatgggagttatggaattaatgggaaaagtttctagctgttagaaactgttacaatactcaattatatcatttaaatgggtattgagacgttgagaaatgatttaactcggagaggagttacattttgagttctcaggaaacagttgtttaatagttgtttgtatgttattttatggttgttttcgaacatctggaaccagatttttgaaaacgttcataaacgcatacaaattaattgagcatgtttccagctctcttgtccaacgttttcatcccatcaaacacaaattaatgtgttggtaacagccatgtgatgaaggaatttgattttcaaatgtgatcctcaaaacactataaatagagggctttggttcacttgtagacaacacaattttctatcttctaaacactaagctagaaaatattgaga

SEQ ID NO: 343207 - DNA, 607 bp, Cannabis indica
tccattgttccgccttgggtggatcagcaccaccctctaacaccggtggattctgcttcctgaaccgtcgtacaatggttccagatgatttcccacatcctgtggcactacaagaggtttcggaggattaaaattaggatttggaacatgttgagctcgctgctttctcagttctcgaattcgatcaccttgttgtcggatggtctctttcatcgcgacatataactcttctcaatttggtggtggtggaggcttttcacactcactgccaacctcgagcccagcaagctcgcggttacccctaccgaattgcctcggatgcatgatctatacacccacaaataactttccatcatttagtatatttcaattcataatcaatgttaataagcaattctaaacatacgcatacgcattgctcactactatgcttttctaataattagcatatatcaaataagcaagtaatcaagtaattaataagtaatttaacaactaacacttattgaaccatgagtcgaacgagtctttgttgggttttatgccctaaataaaactctatttcaatgtaatccgttttattcaacatcaataaagaaacagaagt

SEQ ID NO: 343208 - DNA, 730 bp, Cannabis indica
agagaatctgcattaaggttacgataaatatgtcataaaaaataaatgccactaaatataatattttctaaacaatgaaactaaaaaatattagattttttttttttaaaaaaatattaaaaacattaaaaaaataacctgaatttaagattcataaaaaataaaaatttaatacagtgatcaccggagttgtcactcgtgccgaaaaagtcactggacttgttgtcggcaccgaaaaagtcatcgaagtagctgttggtgtcggaaaagtagtcgaagttaccgccggtaccgaaaaagtcttcagaattagtattgtcgccgaaaaaatcaccaagaaactggtttcttgatcaagaaaccggtttctgattttttcggtaattttaccgacgacaataccaattcacgatgactattccggagtttgatgttggtgctggaaaagtcaccggagttactgccggcgtcgaaaaagtcgtcataattggcattatcgccagtaaaatcaccgaaaaaatcactaagaaagcagtttcttcatcaagaaatcggtttcttcactaaaaaagtagtttcttcattaaggaactagtttcatcacacaacaataataaatattatgaaaaaaaaaatgatatacaatgaaaataattgaaatcagtttcatcaatcaatcaaatggagaaaaaaacacagaaaaaaataactcataaatataaacaaaaca

SEQ ID NO: 343209 - DNA, 786 bp, Cannabis indica
tcacaaaaaaattatattgtgactaaaagtttgtcactaaaggtagctactttttattgtaaataccaactagcttattattgtattgactttgaagatttactttcatgtatacacatgtgtacacaatgatcattcaattggtatttaatggtgatatttaattgacgtctcaatttttttaaggaaaataaacttaagagagttttgtcactaaaaaaaagataaggcgggttataaaaattaaaacataaaagaattttgccgccagttattctttacaaaaatacgattttaaacttttaaaattataaaaattcaattttgtaagcaaaaattaagaaaacaaccaacaaataatgagaaattaacatcataatatataaataaattataaaataattaaaaataacgagaaaactctcatgacaactatatctaaacaaccgaaaaaaaatattaaacaaccattgaagtctgtattttttgtaaataaaattaaaagttcaaatagtaaaaatgaaaatttctacatattaacatgtttttataatttttttcaaatttttactctatgtaaaaattcaaaaagaaatgtataagatgaaattattttaacaaattaatgatttaattatggtttattcatcaacaaaatattactgaaaaatttatttttgatataaagatgaaacattggatatgataaattaataggttatatattgttggggtatcaatttaagtcccacattgaaagaatagacaagagttgttttggaatat

SEQ ID NO: 343210 - DNA, 686 bp, Cannabis indica
gatagtgggatgatgttattcaaaaccatggtttgtgttcctaataaagtagaacttagaaatgaaattctcgaagaagctcataccactccatattcctatatcccagcaccaccaagatgtatcaagatcttaaaccttacttctagtggagtggaatgaagaagaatgtggtagaattcgtatcgagatgcttaacctgagtggaagtgggaagacatcacgatggactttgtggtagggttacctagaaccacaggtttttttgattctatttgggttgtggtagatcgattcacgaactctgcacattttctactagttaaaacaactttttcagtggatatgtacgcagatttgtacgtcaaagaactagtaagactgcatggtgtaccaaagttcatagtttcgaatagagatccgaagtttacctctaagttttggcagagtttgcaacatgctattggtactaaactgaaattcagtacagctttccatccttagactgatggacagtctgaaaggacaattcagatactggaagatatgttgcgagcttgtgttatggatttcgagggcgcctggagtaagtacctaccgttgatagagttctcgtacaataacagttaccaaagtacgatagggatggctccctatgaatttttatatggccgaaagtgtagatc

SEQ ID NO: 343211 - DNA, 1086 bp, Cannabis indica
atcagtgacaaaaaatactgacaaatagtttcttacatatacacattcacattttacattttttagttgtaattaagttgcatgttagttggctcgtaacagatataactgttgcattacagtttcaacagacccatgatccatgcttcctgggattgaaactttagtctgatgcaaccttcggtcaaccacctaacaaatttcgtctgatgcaaccttcagtcaaccacccagcaacattcgtctgatgcaacctttggccaaccacccagcaaccttcgtctgattatgtaagtgatagtgtaagaggtattttagcaattaaaaacacataaaaggtataaatattgtccacaccttataaaggtatttttgtaaataaagtgtcaatttgtatttttcttgtaataattccaaaaaattatttaaaaataaaattatatataatttaaaaagaaaatttgaaaaactattaagattgaatttttaaaattatttaattttttataatattgagatcatgtacttataatttaagtatataggtttctaattatagtttattttaattaaaaaaaaaaaagcatatgagatccttaaataaaagaaatattcatccatatgtggatgcatgaatgtatggaaattctaatcgagagtgcccccacttgaaacgtttcacatgcaaaaatgctacattattgtgttttctcatttataaattattggatagtgagattaattagagtaatcagcctaattaatcttttacttactttaactacatccatcaaataccactaattgctaagctatctagttatactttcttcaaatatacaaattaataccattggtaattttctttttctaagttacactttcttcttgaatatcttgataatttctcatgaatggttagtattagaaatatttaaattttgtttaatttttttatctaattagaaaaatattttatttttacatggactcaatttgttctatcggctaagaaaatttaaaaaaaaaaaattcaacaaaaaaatgatatagaaaagttgagtgacttaaatattttgtatataa

SEQ ID NO: 343212 - DNA, 549 bp, Cannabis indica
ttctattagaatagaaaagtaattagtgataatatatattttaattaagaatatatttatataaatatatatatatatattttttaataatttgtatttttttcaacacactattgaactccatgttagaattgtaagatgcatgtggtaaacaattgacaatgggaggagttgtttatggatcttatatattctattattttttcaccatccctgaatcttaagtggctcttttggctctaatttttggatcagttttttcggattgttagtggctcactatccccaacgtacaagtggttctttttgacttttggctctactttttggatcggattttcttattttattttggatcggatagtcgttaggggtactatctcaaaaccaattggcaaaaaatccaactagtaatgagaagagtagcttatagatcttatatatattatactatcttttcacatattagcaatgtgagactttctaatgctgcactttttataaatataccgctagcttgaaatttgattggtgttgtatatgcaaaat

SEQ ID NO: 343213 - DNA, 463 bp, Cannabis indica
gcataaaacccaacatattctacctgaggtgagatcataatcatgttaaatactttcctgggacctctccttgtaaggtcatctgcctctacattagctttaccgagatgataaagaatctcacaatcataatatttaaccaattccaccacttcctctgtctcatgttcaaatattttgttagtaaagaaatattttaggctcttatgatcggtataaatctcacacttttcttcgtagagatagtgttgccagatcttgaatgcaaaaaaccactgcagcaagctctaagtcatgagctgggtatccctgttcatactccttcaaatgatgggaggcataagcaataactgttgggctttgtgcccgaaataaaactctatttcaatgtaatctttatcattaaattatcaataaagagacagaagtattttcatcacttatttagtgtgtcatttggttc

SEQ ID NO: 343214 - DNA, 713 bp, Cannabis indica
tatatattcgtcaccgtccttgaatgccaaattcatgtagtcggaaagtcctatcccacagcagtttaccaaatgcgatattccttagctcagacaaatcgccatcgacaaaccaaataactcattgtcgactctcttaccgttctcatacccatataaatagtgactcaacaaataaacaatcgccatcttcacagcgtcaacgtcatcatcaaattctcccaccaaaaaccttcctctaacttgttattgaatgactttaatagtcaaatcaggaaacatattcttcttgaacgacatcttttgtttaaaatcgttcaagtcaaatgagccttccggacttaaccccgttatcaagacaaactcctccaaactgaaacggacaactctgtcccggattaagaaccacttctctacatcctccctctcttaatggacctcactcactaaagcaaggtgaggcagggcaacgtgccacttaacattgcccatcttcaaaaattgtgaacaaggcgtcgtcataaataacgccttttgagaaggagtaagatttcctttgatctcctcaataacccacgggttattccaaatctggagcttacttgggaaccgatgctccggtttcatcttcaagtaaacatcctgtaaaaaaaactagttataaaataagatttagccagtaacaactgttggaagttattttaccaggaact

SEQ ID NO: 343215 - DNA, 647 bp, Cannabis indica
ggttgaattttagttttgaaccaatttttttgcccgattttgcataagtccaaaattaaatgtgtttggatttcttacgctctttttctcaggtgcagtcgccaaaatttatggtgattatccatctagcttggtttctttttagttggcctgctggtttggttgttggatgctgttgttgttgaagaaggtagttcgtgcgactgaatggttagagcacgaggtatttttgtagtttttttgttaggctgtataaatgtttataaagtactcggccaaatatatttgtataatatttttcctattttggtatatatataaaacagccaaataattattacttaccaataataataactttatattattagtataaacacattaaatcatattaatggcaattatggcatggtaaggtgaagagactctaatatgaccacaagtgagtttgcaagcaatagcatgccttgtttatccttacaataattaaaaaaaaggctaattatgattttttgccattgaacttttacatataccaaatcatgctccctgaacttttaagatcgttaaaaatgtccccttaactattgagattgttggatttaaggacttttgtctaattttattcaattttaatatttcagtga

SEQ ID NO: 343216 - DNA, 774 bp, Cannabis indica
aatttcattattcaaaatgtgtaataattatttatttagaaaaaaaattcaataactacaaaaaagataaggtactaagtataaatatttttgtattataaaattttaaaataaacaataaaaaatatatctttttattttttcatttaaaaaaaattacaattttatcgaaataaaacttattaatattgtcagactatttttgtcttaccgcgcaacgcgcggttttgttctctagttaattaataagcattttgaaaaatttaccgaaatatattttaaaataatagattttaattaattaatttcagaattgctttcaagaccatatatgtgaaagcataataataataataatataggcttttaataataattattatttataacctttaaatcaacaaactttaatgcatctccgtgaaaatagtcaatcaacaccactaattacgaatgctaaacattaattaagaatgtaatgatatgtacacataaattatacacaaatttaattaatatatttgacataaaatattttaattatttctctttatttaagatgagtcatatttattaaaaataaattatgatataaatatgttgggatatgattttgtctcgtaatgtactttcacggaatgtattccgtggtatattaaatgggtctcagggtacattaaataagtgtcatcatggtacgttttttacaatttaaccctaattatccctagattaatcttagccgtcagatcaaataactccctcatctgacgg

SEQ ID NO: 343217 - DNA, 914 bp, Cannabis indica
aataaaaattaatgacttggactaattaaaggattgctaggtaaaaatttatttacacttaacacccaggtatttaaagatttaatgacctgaaccaattaggaatcgtcacatgataatttattaacagctaacggtcagatacttaaagatttaatgacctagatcaatcaaggattgacacgtggtaatttacttaacacttaacaacaagtatctataaaagtttcaaaattataacttagttattattaccgcaaaaacttaaacttaagtatttgtttacaatcgaaagttaaatttaggtatgtagaaattacactagatatggaaaatttataagagtttacttttttatggcataaataaataatgctaaaggttatgggttttttttttgtttttttacatttatatgggttttttatgtcatatttttgtaaaaaaagataaaaatctcatatttgtaaacaataataagttctgccagaaaagtcgccggaaaagtcatcggcaccagaaaagtcatcgacgccggaaaaagtcaccgaaaaagtcacaggtgccagaaaagtcaatgtcgtcggaaaaagttactgaaaaagtcatcagaaatagatgtctgaaatataaacaaaaatagaaccagttctataacataatgaataaaaataaataacacaaaataactcaaagcggttataatttaaatataactggttttgtaacataaagaataaaaataaataaaacaaaataactaaaaccggttctataatacaatgaatgaaaataaataacacaaaataactcaaacatgttataattgtaatataaccggttctgtaacataaagaataaaaataaataaaacaaaataattcaaactaattataattaaattagaaccgatt

SEQ ID NO: 343218 - DNA, 1206 bp, Cannabis indica
  modified_base (1154)..(1154): a, c, t, g, unknown or other
ttccttattgaatccacacctgaacttggaattgcactctcagtcataggttggatcatgtcctgttccatgcttgtgggtcccaagtcccagttcgggtttggattcaagtttgggacccaatcataggttgggtctgtgtccgattccgggtccttgtctggttatagttttgtgcatgggttgagctcctagtactagtcctgtttctcggtcctgatctccttctactttcggttgtagtttcaactcacggggtacgagttcgagtcgagtttgggtctgtgtttgggtcctagtcttgatttgggttcggggtgaggtttaggtccgtgtttcggtctcggttagggtttgaggttgggtacagttttgggtgccgatcccggtggaagacccagtctctttctaagatcctagtcaagttcaagttcaagttttggttttggttcccgagtgtgggtctgggtctgggtatgtgtccaggtcttggtttgagttcgattttgggttcgggttctggtctgattcccaaatcaaaacagtgactatgggtcaggtccaagcatcgagtcccggatcccaagtcccgaggtgggtcctaggttatgatttaggtctcggccaggtcccggatcctgatccaagtttcgaggcccaagtttttgtcccagtttggggtcccaattttggggtttgggtcccccatctatgtccaggttctaggtgtcgatccgggtccaagtttgtgtttcgattcgtgttcgggtcttgagtcctagtttgagtccaggtcttggttggcgtttgggtcccactccctgtgtgggtctgagtttcaaatcccaggtccgagtctggttcttaggttctgggtccagccccagtttttgggtttgggtctgggtctggctctgggtcccagtctaggtccaggtcccggtctttgtttaggtcccaagtcacaggtcccgatccgggtccaattcttggtatgggttctagtctgagctttggtttaggtttgggtcctgctacttcccaggtctgcgttctagtccttgacctggtccgattcctattctgattctgagatcgggtttggatcccggtctgggtctaggtttgggtctaggtacggatccgggtccagntcctggattcaaacacttactcgggttaggtcgaagcctcaagtctagattc

SEQ ID NO: 343219 - DNA, 850 bp, Cannabis indica
atccctactagatgcaaatcatctatagaagatctttgattatttagattgaaataatagataattatagcatatctagttctaggtgaatagagtgtttatgtaatcaggaagtacgaattctgaatctatagtggagttaggaaaaaattaataagatagagaatttactcggtaaattctataactacttattgggagctttgattatataggcccatggttcccacactacttgagataatattatcttgtagactcaattaatcaattcgaattctgaataagactatgtcttatttatgagtttcactaagcaagggtttttttttagaagaaaaagagaatttagggtttgtttattttttaagagactttgaaaggtctatttaataaataaattaaatgacaattttatttgacaattaattataattattaaacagataaaattgacatttatagagttataattaaaagatgatatttgtgaaaagaaaaataagtttcagtgaaatggcaaaattaaaatctactagacccatattgggttcagccaagatggtttaaataaagtcatttttatcttttttattctattttaattcaaaacctaaccctaaaagctaccatataaatagaatatgttgactcttattttcataactttatttgactctctttgtcagacaaatagaaaatatacagagcacttatcatattcaaattcttcctcttcttcttcttgttaattcaaaccctaagtgaatgagtaattgcccacacatttcaaggcaataaacaagatagtgtgaaagattgtatagttcaaattgtcaattgaaggaga

SEQ ID NO: 343220 - DNA, 506 bp, Cannabis indica
tttttttgaaaataagcataatcgtaccattaataaacaaagttaaacctcgcggtcattacataataagttctccggaaccgaaaaaaccggaataatcccatacaacttgtgaataaaagcccaattagccacattatgggctgcaaaattacaagttctactaacatacacaaaattacagcaaataaaagagggagatgacttagcacaaaatgaaatataattttcagtcgcccaatgagacttcgtcccattgagagcattgataactactctcgagtcactctcaatcaaaacaaacttaaaaccttcctccatagccatcgaaaccgctgcacaacaagctgctgcttctccacacaatgcatccgagaagtccaaaacgatccgtgtgtatccgaaccaccgtacctagatggtttctagctaccaccgctaagcacatactttctgatcccacccttacatcacaattcaattttatccaatcttgaggtggcggc

SEQ ID NO: 343221 - DNA, 558 bp, Cannabis indica
ctaatccaaattactaaagcggtcattacacaaactatccaacaaatacctaaatcatattcctattaaacattgtcaaggatttcgcctcaaaagaataaaacatgcaagttctaagctatcctgtcaatcttaccacaagccacagtaaaacaattataacaattttcataggtaaaccaattgcattcatacacaggtttctaagcatccaaactaatccaaagagttaatagaattaagcacacagttattttgcaatttcagagtacattacactaagcaacaacatacaactatcttctagcttattgtcattcctaactaaaacataaaaaattaaagcacaaaagtaaaattttaaatctctccccctaaattaaatattacattgtccccaatgtatacaatgaagagcaaggacaagagacttacctgagaccctttcaaaaagggttgggtggcggcggctgatcatacgaataaaaccgaggaggtggcgccaagtaattcgggtcatcaatcccgatgttcattctgttgatgagagagttgagt

SEQ ID NO: 343222 - DNA, 863 bp, Cannabis indica
tttctttattgatatttgaatgataaagattacattgaaatgaagttttatttaggacataaaacccaatattaattcctccttgcaccactatagatttagaattgcactctcaattatagagagcgttctatatgctccatgatatagatacactaaccattgttataatcctaattgttgcctcagtttattcctaatatacgtggtcactgctatatatgacatgcggacaaagaagacacctcacccggtgataagttaaaagtcgtatggagaggcaacaagtatggttcatggcgttagctccagaacaagtgcaaaaggcacgccttctcctctgggagttaagatataggaaggtacctccaggatgacaaggagctacttgaacagtcacctcgcatttaatgcagcatggtaaaagcatctggaaacgcccataagagaacatgtcagacatcgtaagcctgatttagggcgattacactataatcaaaggagctagtgacggctccattatgaagaatcacatcaatcaaggaaggatgaaggctaatctcacctaacctctacgatgcctactatgtaggttatgcatgccttattttgtatcttttggaaacttgcgcttatccatagctggctctcaaagacaagttaccccttttcgactattcccactaatctctataaatacccttgagaaaatgaggaaggggatcagaaaaaagagagaaaaaacacacaaagaacattctctttaaggaagtactctcattaataacagagactcgtggactacaactcattaatgcttgaaccacgtaaaaattattagcattaattatcccaaagctctc

SEQ ID NO: 343223 - DNA, 928 bp, Cannabis indica
ggagagacttccactatcattgtttgaaactgaatacacctcgtcgacatcattactttgactactagaatcattgatcaaattcttatccttccaggtagtaggcttcctaactctggcatcaaacttatctttctgtgtagctctgcctctagaattagtctggttatcctgccctgaagcatggtttcctttcttaacctgttgagattggttggcagatttaggttttttctactgttcagcctgagaaggcttctttcacccactttccctttccttttattcttatgtggttcataggttccaaaatttttaggatcgacttttctagtggtgttattctctagaatcactggtttggttttatttccaaaagtcattataattagcacaacttccattctcgacactttctcgagcaattgtaaggaaaattcctcttgccgagttaatttgctttcaattagttgcaacttcttagccataatgaccacatgatctgactcgtctgaattctcctttcttttagcaccatcgtcaacaagcatgtattggtgatcatctttcggtgtatcctactgatcatcttcaagatcatcaaaattcatcatcttcgattttaggatcgtcaagattttggtctatatgatgatgatccttgtggtgactggtcaccttattcagatcttctgtatcccctcccttagcattagggttagtataatgaagaccaaacttatttcgggtgagtaccatgattaccgaatgtaatctagagatgtatcactgcttccttcagctctcaatgaaaattccaaaatattattgggttttgtgccctagataaaacctatttcaacataatcagatttactaattaataaagatcagaaattactttttgttgcgtggttcacatgattta

SEQ ID NO: 343224 - DNA, 778 bp, Cannabis indica
tgtatagggtgacagttattttccttgggatctgatcattcataactgctcatgaaacgtggacattccccacgtttcatttctatgcatatgggataatatttaataactacccaaccgctcttttgtctttattcttaaacggtcatgctgattatgaatgttgtttcttgctaagtacaagttgtccttttttaccgtccttgtagaaaaaaaagctaagtatatatatacttctcctcgcaatactcttttactttgatggtattagcgaggtggttacttctacgtataaatggcgagatggatgaatgtagttattatcttcatgtacacatatgtggatcaattagttacaagctcttattcccaagtatgtgggtcaatgagctacaagctctttactatcttgtcttgaacacttttgttatgcactttgtctatcccaagatggacttattatgtaacgccctaacaattaggcatgctacgctaacggattacgaaaacctaatcccctaatctgggattactaaaaggataagcgcagaaaatttaaactttatttgaaacagaatgaaaattaaacttgtaacaactttaaactttacaacccaaagatacatgttttgggatcccgtaaatatttttacaaaatattacaagttcatttcacgagccaacctaagcggcaaaatcagagttacaaaatacatcactggtagaccccaacccgcttggtctagtgtggcccaaacatgtacaagcatcgctaagc

SEQ ID NO: 343225 - DNA, 639 bp, Cannabis indica
gactacgtcaatgaggagcttaccgcgtcggttcctcataaaaggcagggtgccttgggcgccagatgggtaagtcctccgtccaagattacagaggcgcaccttcgaactcttgacaagggcgggtatttgggcgagctggacattcccgcccacaataatcgcgccacaattcctgacaaggggatgtgcacctggtcgggagcccacagtcagcaaggagcgttgatgcgcttgcataagtacttcaagggtgggggacttcttcgatctctgcctggcccaatttactcctaagggcattaagtatttgtctgccctcttcgtcctctacgcctcccaaggatggggtactccttctcctcatgaggttgcctggttcttcgatttgaagtgcaccccaaacaaggcaggtcgggatacttctatttctctcagccaggcttcaagtggttgaccggcacggatgagaaggccatcaacaaaatagtgcattttgctaatgagtacttcatggtgaaggatgcgagcattaccctgactcggtttcagcaaattctgacatatcaatgtcctcccctcactcttgctcttagggatagagctcaaaaacttgctcggttgccggggaagccgaaa

SEQ ID NO: 343226 - DNA, 615 bp, Cannabis indica
cttttccttggttaattatttggtctctagtggactttggaggggctggttatatcttttattaagatatatatgatttaatttaaattaggaaataagagaaaagttaaagtggaagggaaaaacctagaaatttccaagtctttttcctcctctttcgaacaccaagggcaccagctgagaacttggatttttcagcttaatttagtgtgattctagttgagttatgagcttcaacccaaggtatattgtcctagacttatcttcctttgatttctttgagtttttattagcctatgatgcaagatttgggttatatggtactttggtggtaaagtttgtttaattatgaattctaaagttagtctaggtttttaaatgttgttctaagctgtaatggtgggtattgatgtggtttgtgcaagttagacgttagagtgttcatctttagtctctaatggtgttttcaaatttggagttgtttatgatgttctattgcttgatttgagtttattaaggtataagcaggtattctggaagttttggaaagatttgggattgatttgagttaagggggatcggttttagggtttcctgctcagaatcggtcgaccg

SEQ ID NO: 343227 - DNA, 736 bp, Cannabis indica
ggtgttatgaatctagaggaacaaatttctaaactcagatgagacatcttgacgagagaataacgatccaatctcaaaatggatctcaccaaaaaacaagaagtgtgtggaatatggcaagcttaagccaccattttatacacgaagtccagtgacaagaaggctaaaggttgggaaatctaacggttgggagtggggcagaagatgagaagacaactcataatgaccctagaaaccgtacaactgccagaatcaaaggacgcgttttcccaaaaagggattatgacaaaaataccctctgtaattattaaaaagcactttttactaaaaaagaactttttaaggggcaattgttatacccaaaatttggctaccatctcagtggacgacacgtgtcaagataaagggaatatagatcgatgatgtcactttttgtggaataactcattaattgcgtaagtagcagagtatattcacaacccactgactgtaaagttttattcgaggaaaagatatacaaactgttacttagtatattaacgagaaaccatatgtattgaaggcatatagcgaggcattaagtcgttacatctggaaagacaaaagtgacacatattgactacggaaacacttaataaataacttacaaactaaatataacattttggttggcttgagacccgataagcgaggtgtctatcttgctatgagaaggttcattcctgtaacttccccc

SEQ ID NO: 343228 - DNA, 615 bp, Cannabis indica
aattctagatctgcttattgaaagctcggttatataggtccatggtccttataatagttgagacaaactacttgtaagactcaattaattgattttaattaatcaattataattttgaaattagactatgtctagtttatgaatcttcactaagaaatgaattgattgtgaagaaaaaggattttagggtttatttattaattaagagaggagtctaattaatacatattataaaagacaattttatttgataattaattttaattattaaataaatagttttggcatttataggattaaaattgcaaaaagtggtatttgtgaaaaatagataaatggttgagaaaaatggcaaaaatctaactagggatggacacacatggggctggccactaagtctacttttcggtattatttatcattttttattataaatatttcataattaaccctaagtgaattagtataaaaataaaagaatggtctcataatccaactaatgactcttgacctagttttcttcttgtcagacaactagagagtttgagacttcttctttttttctctcttctatttcaaaattctagtcttcttcaccattaaaattcaagcctt

SEQ ID NO: 343229 - DNA, 1318 bp, Cannabis indica
agccaacaaaaatggtggccccgaactatgatagataatggagcctctgcaaatatcttgttcaaaacaccatatgaaaaaatggggctccaactcaaagacttaaccccctgtcttcagcccgtatatggtttctccagccagagtgttgcacctctagggaaaattcgcctacccctcactgttgggcaagctccgaagagcataactgtaatggcacaatttttgatattggatgttccatcaacctttaatgtcatgttaggccgaccagccttatatgacctaaaggctgttacgtcgatatttcattcatgccttaagtttccaacgaagaatggggtcaggtgcctgagaggaaatcaacaagttgcacgggaatgttacaaccttgccttaaccaaggctaaaaaggaagtatcctctagtcagagttcggacaaaggaaaagacattgccaaatagggaactgcccaaggcggggatgaagatgtggatccctgacttggggaaccaaatacaaatgttgggccagtagaagaactagaagaaatcgaaatcgagccgaatgttctgaccaggaaactcaaaattggaaaaggtttgctgctcgaagtaaaatcagcattgataaaatttctgagagcaaacttggacatttttgcatgctcacatgaggacatggtcggaatcgatccttctataatttcacacgccttaaatattgatcctaatttccagcttgttcaacaaaaaaagaagattgttggacaaggaacgagccctagcactaaaagaagaggtagaaaagctgtgcaacaacaatttcataattgaagctttctacctagcctgggttgctaatcccatacaaatacccaagccgaacaaaaaatggtgagtatgtattgacttcaccgacctcaacaaggcgtgcccaaaagactgctttgcacttttaagaatagatcaacttgtggatgcaacagtaggaaacgaaatattaagcttcatggacacatattcggggtacaatcaaataaagatgcatccaccggaccaagaacatacaagtttccgaacagatatgggtctgtactgttataaagtcatgccatttggtctcaagaatgttggagctacataccaaaggttggcaaataaaatgttcaaagaccagattggacgaaatattgaagtgtacgtggatgacatgctcgtcaaatccaagaaggctaggggcatataaatgacctggacgaatgcttcaaagtcctcaggaaatacaacatgaaactcaatcccttaaagtgctcct

SEQ ID NO: 343230 - DNA, 650 bp, Cannabis indica
gcataaaacccaacacaaggttgatggacaaaacaggactcagcgtcctccacgaatacccgctactcgcacagaaaaccctcaagtaactaattttagacgtcgtaataaccgtactcgcaaggaacggagggccaaccaggagggactcgatttgaaccaaccaacgtcaagggaccaatctgtaagacacctcaatcaggaggcacaaacggaggaggaccctgaacgacgcaatcctcgcagcagaccccagtcgcgagacaacaacattgaatccgcctcctcatcctctcatggccgcacgcccagcaggtacaccagatcaggctcggtggaaacaccgcaaggagggcgatataaggtccataggggcgatctacgcgatcaccttaacactgtcttcagggtgtgctaccagacgcctcgggatgtcgaagagccccgtgatcctcgaatgggcgatcaaggcgtaaacaatcgtatcaacccggctaccgcaccagctgcgactactggggttaatatcccagccaaaatcgtcgcagtagcaataatgcctgcgccaacacaagtcaatactcccttagctgggaatatcgatcagtgtatgcttctacaggccttaaaaatgctcgagcagcagagaa

SEQ ID NO: 343231 - DNA, 925 bp, Cannabis indica
acttgtctcaagggctgatcggttaacaattttacgggctgcgcctggaagtatggccttagctgacaagacgtatggactaggcacaacgcgattttttctagtccgtgatatctggattctgcccctagtaaccttttactcacatagtaaagaggttgttggtgcttgccctcttctcgcatatagctgcactaatcgcgtcttccgagatgactaaatagaggaacatcgtgtctccagttattggtttcgccaaaagtagaggcattgctagattcctttttatgttctgaaaggcctcttcgtactcttttgtccacttgaactttttgttccctcacaatatgtggaagaccgacacacacttatcagttgacttcgaaatgaatttgttaagtgcggccattattcttgtcagggcttgtacttccttaggctctatcggtgttggtatgtctattaatgccttgattttttttcaggatttgcttcaatacccctcgtgttaactatgaatcccaaaaaatttcttaaggaaactccaaaggaacattttctcgtgtttagcttcatgttataattctttaacatcttcaagcatttcacgaggtctgaggtatgatccttactttttctttattttaccaacatatcgtcgatgtaaacctccatgttttgccctattttgtttgcgtacatttcgtttaccaattgttgatacgttggccaagcgttctttagtccgaacggcataactttataacaatagagtcccatgttggttacaaagcttgtatgttcctgatctgggacatacatttttatcttattatatccagaatatgcatccataaatgacataagctcgtgcccaacagttacatcaactaactggtcggtcttgggaagtgggaaataatct

SEQ ID NO: 343232 - DNA, 615 bp, Cannabis indica
ccatgtatcaatggagacatttgtgcttagtggcatgcccaaaataatatcaacatcttgattattgaacatatctcgtacaaggtcattgtcccaagagcggctatgcacatgaaaaagggatctaacatgttggttcattaaaccagggtgtattgttgaaacatatgggttatcctgtacaggtagccacgggtggtttaatatgcttactgtgtctcctgatccgattattcttctgacacccgaacggagtagatattgggtagtccaaatacctctccaaacaaagcttgggttacttcctagttctactgacaagaaatcagagtggggaaagtatctagctttatagacttttccaacaagagtatctagattgcaaagtagacgccaaccttgtttagcgagcatggcaatattgaaatcatgcaagtgccgaaaacccatgccaccatcgtatttatgagcagccatacgatcccaagacctccaaataatacctttccctttactagaagatgacttccaccaaaatcgggccataagtttttcaatttcattacatgtaccaagtggaaggagaaaaacactcatagcatatgcggggagcga

SEQ ID NO: 343233 - DNA, 691 bp, Cannabis indica
attaaaggaattagggattcaatatttctattttagttgatgaatctcgtgatgtttctattaaagagcaaatggttgttgtattatggtatgtagataaagacggacatgttattgaatgttttgtggggattgaacatgtggccaataccacagttgtgtcacttaaaggtgctattgataaattattttctagatatggattgagcatatctaaattgcggggacaaagctatgatggggcaagtaatatgtgttatacccgaaatttgaccatcgtttcaaaggaggacacatgtcaaattaagaaaaatatggatcaatgcatgaaacggtttttatatttgcaaatggagaaactcattaaatggagaagcgacagagtatatttataacttgctgactataacgtcttacgcgagatatagatatacaaaccgttgcctcgtgtattaatgagaaaccatacggcattggatgcgcaaggcgagacctcaatctcgttacgtatgagtagacgtaagcgatatataatgactgtgaaaacacttagcttataatatataatatacaaactaagtataacagtcgggtgaacccaagaaactaatagggaggagctgtgacagtcaatagtaccgtgatccgtaaggggaaataccgggtaagctgtgcaatcccacatcgcctg

SEQ ID NO: 343234 - DNA, 723 bp, Cannabis indica
ttttttttctttttctatttatagtctcttttcccacttttcagacaattttaatttttatctttaaggggagacaattttaaggcccgtccccaagcctttagagtttttttagggcctgttactgcgtccggacatctttacatatatgcttaaatacatattttgatttaattttgctaagcttttggcctgttttatatttgtccatgtggtatgccttactacccctctgagtggcatgaaaaagttgtttttaaggcactcaactttgcacataactttggaggttgcatatacttttttggtaaaaattttcttgacaaagcctaagtttacattttctaactattggtaatactgtcagaggtgatcagcgttccaggccctaggcaccatggttccgtccattctctttagcttgtaggtcccgaagccgatttcatcctcgacttcatatggtccttccaaattaggcccaagtacccccactctgggttcttgggtggctgggaagactcgtcttaggaccagatcaccaatagagaattttctacttttaacttttgagttaaagtacttagtcactttcttttggtaagctgccattcgtatttgagactcatcctggagttcgtcaatttgatccaacgcttcctgtaataaagccttgtttgttgttggatcataagttgttctcctatgggatgggaacaacgtttc

SEQ ID NO: 343235 - DNA, 505 bp, Cannabis indica
taaaatacatatttataatttgctaaaaaaatagtatataatcaattacttattagtaaaagtagatatttatttaaattttcattaaaaaagaattggtacaggatggatattttagttttattttatttaaaaaaaaatcattattgtggatgtttgagttttataaaaaataataaatttagtaataggtttgtgatattttaaagtatattattatttttatttattttatcattttataaaaagtttatttagctaactcatagtatatttgtaatattgttaccttgtattatgtattaattttatttattttttttagttatactccaataaggtaacaatattacaaagggatattggcagctaaaccacctgaactttacggtttgtaacacttaaccataaaaactgaatttttggcggctaaactacctaaaccctagtttcgttttgctctgcacacttccgtccaaaaatcacagttaagtgccacgatgga

SEQ ID NO: 343236 - DNA, 550 bp, Cannabis indica
ttttttgggagcctagtatggttttttggggtggtgatgaaggaaacacggtgacccttttgaactaagaacatggagacttggaaaaatgggagtaaatggccttgtgctagccatgggaatactgctatgtgaagttggttaacatcactatttagtttcttcttctccatatctcttaatttaattcgtagcaaaaagatgactctctcatatatatgcagggcggacggacgtataagtgaggtggggaagtcgccttcaaaataaaaaaaggaaaacaaatatatatacattttatttagttataatatatatttgtaataaaaaaatatttataaacataatattaattttgatataataattaaattaattggctaggttagataacaaggttctaattctactgtaacattttttctcttttaagtttagttttactccctctgacttatcaaaaagaaatatgatcccctcactttaaatcctaggccgccactatccactgacaataataatttgggcacattgcaattttcaagtgtca

SEQ ID NO: 343237 - DNA, 740 bp, Cannabis indica
atatgcataacatatataaaagcaatgctagaccgactttatacttaagcaaccctgggctcaaaaacagagctaaccaaatggttaagaacgttcttaagggaagtacgaccactgtaccaaatgtactaaagtaccaactctgtactcgtgttggtagagccattattgtacccccagaaatcactaagtgttgtaccacatgcacgacgtaccccctgatactcgtgttggtaacaccgtaaccacactgatatcctacactatactaacaccctaaaaatcacataaacaattagtgttagtagtgtaaatagttaaaacaagcatacattcatatatacgttattatgttatcttacctcgttccgtgctcaagtgtgctggtcagcttgaggggaaacacagctcgacgctttacagggccttaaaccataacgttcaaaactcaatgagagacacactaaaacacttatcgaggatttaaaattaaaactaaggataaccctatcgataaataggatgcaaaaaccctaaattacgcaataacgaggaaaactaaggtttgggaaaaagcccttactggcagaccggttcccaaccagaagcccgatactgggtaccaaccggtcgaccggttctaaatggtcccccacaacctgtcgaccggttctgtgctgggaacgcaaaaatcgagccccttaactcaatttgacccgaaaccttccaaaactttccag

SEQ ID NO: 343238 - DNA, 767 bp, Cannabis indica
ataaaataaatcataacattaataaaaaaagtttcatattctaaactttaataatcatttcacttgattatatatttagaatttcttttttataaaagatctaatcattaagtttagaattataaactttgttttttttttaaatattacagtaatattatattatatattattactagaaattattataatattataaatattataatttttttaaaaaatatataattaagtgcggattggattggattggttactttttgaggtcaaacaagatccaatccgcacaagtgcggatttaaaatttttcaattcaatccaatctacacaagtgcggatattcgtattttgcggattggattggattggatcgtactttatgaacaaccctagtctatatcacttttgagggtcaaagttgcatgtaccatattaattttttctttcaataataataaaaaaaaatgctgacaccaaaattaaataaattaatctgaagtatagcaactaaaattaactttatattttgaaaaaaaaaaactctaattgtcatcatcatcttcatcgaacataacatccaaaaaaaaaaaaaaaacccagttacactaaatttgaaagtgtttgaatgacttgtttgcactatacttgaaatttgaaagttgtccaaatgttcttccttcttactcttctcaaatcccactccatcgctggagaatcccaacaatggcggtgccctgttgtgatattttgcacacgcaagtgtacgt

SEQ ID NO: 343239 - DNA, 606 bp, Cannabis indica
tactttcgatggtgtctttttttctttgaatgggagcattttttttataaaaatatccaatttttttagtggaatgagggcattcatggatgagagcatccaattttttagtggaatgagggcattccatggatgagagcatccaaattttttttggtggaatgagggcattccatggatgagggcatccataaatttaatggaatgagggcattccataaatttaattttagtggaataagagtattccatggatgaaagcatccaaatttttagtggaatgagggcatcccatggatgagggcatccattttcatttatggaatgagggcattccataaatgaatagagaaacaacaaaaaaaatcagaacgagagaggagcaaaataaacatcaaaagaaaaaagaaataggaatgagatcattccctgaacacttacccaagctttttgattgttggtagaaaagtatcgtagttttttttttttgtgtttcttttctctccttctcagattttttttttttcaaagtatctatctgtaacgtaaaggatgagtaaaataggggagtggggagttcagatcctattttctctctatttgact

SEQ ID NO: 343240 - DNA, 671 bp, Cannabis indica
gttcaaagagcaaaaatcataattagcgtatttataaaaatactctagtcaatttaataaatatttatatatattttaaaatatatttaataaaatttatatacatttaataaaaatttaatatttttgttaattttattttatcattttattaaaaaaaaatgcgaaattttactattaatatattagaaaaaaaattataaaatttaagttaagtataatattaatttatttattaagtcaaatttaacttaaattatacaccttccatgatattaatatcagatgattattgaacaaattacaattttttttttatattactatattcaaaattaaaaaaataacacacaatctacaaacataaatttatttatttatttgacattttatttaaattttattgtaagcaattgtctctttctttaaactaaatacaaaaaaagtgtaaaaattatctccatttcaacagaaaagtgacaacattaatattgtttgatttaatttctctaactttcttttggcttttaaaattagattaaaaaaaatcttttataagtgttttgataaaaagtaagaatttttttttaaaaaaatatttttaaaatttaaataattcatgtgctctaatagtgtgtcaaaaaagtgatgtaaatttggcacataacaaa

SEQ ID NO: 343241 - DNA, 639 bp, Cannabis indica
ccgcttagtttaatttagaaattagcagttgattatgatttaattatgaaaattatatatagatatttaaataattttttatgctgttatttttgaattctgaaatgcattttatgtcatatagtgactttcataattttgcattttcggtgcccagtaacatggaactcggtgtttggctcagtagaatcacaacttaacatgttagtatgttggggcagtttattagacattgggaatgtcgggattggtcgtgaatttagaatttcccaaaataccctttagtgccccctttatgttattttagtgtgggggggcaaaatggtcattttgccccaattatgttttgtcctttagtggacttattattattttgtaatgtaatttatcttttattggttggctgaaataagaaaggatttagtcatttatttcaatttattcaaagttagaaaaattggaaaaaaattggtgaaattgcttttctctcttcctctctctttcaggcacttcttgagcagctgggatttgagtttttttttctgcatttccagcaagaatcttcttgatgttgaggtgcttaaactctaggtaattccttgtacctttttctttttgttttcttgagtttttaagaaa

SEQ ID NO: 343242 - DNA, 782 bp, Cannabis indica
aaaaaagttcggtttgggcggttgtcgattttaagataggttctggattggtcggtcggttttcagattgcaccaatccagaccgaaaactgatttttggatttttatataggaaaaaaccgaccaaactgaccgatgctcaaccctaatctgttagggggaaagtttgttttttttaatggaagagtgttcaaacagttcaaaggagaaagaggaaatgaaggatgtaccctatatatgctatggtcttaagatgtttaatgtatatgatggtgagcactagactggacatagctcacactataagcatcctaagctagttcatgtccaatcctaacattgaacagtggaaggccctcgaatagttattgatatacttaaagggcacttggaattttggtctgacctatgaaaaagcaaaaggagaattggtgttaaaagggtttgtgaatgctgactatgcctcaaatagagatattggtagattaaccatttcctacgttttcttgacaaaccaaaactgtatatgctggaaggcccaattaaaggaagcgctacgacatcaaggatttttaattgaattgaagcaattaaaaggtggagtgattgtgtactcagatagccagtcatctatcaatgaaaagagtaaacatatagacataagactcaactggattagggagaagattgaagaaggactggttgatgtagagaaggtcaaaacggaagataatctgatgatgttgggctaaaggtcttaacagtaaacacgttcaagcatt

SEQ ID NO: 343243 - DNA, 558 bp, Cannabis indica
ttttctacttgtttccctttcatgttcttcataacgagccaccaccaccatgacaaacaccaccactggcacaaccaccactttgaaaaatatccaaacaatattagttaccacatcatcactccacttgaaccacaaaatcaaaaaatcaaaattaaaacaccacagccaccaaattgtgtacataatcattatgatgtattagaaataaaagattaaaaattatatatatgggtatgcttttaatgggtattacccatgtatgggtattttattcttgaccattgaatcaaatatctaatggttgatatttataatcattaattaaatattaaaaaattaatattttctattttgccacttcttctttgattttgttattctctatattcctaaaatagataaaactattaatagaaataaaaaatttataaatgaaattgttatttaaaaaataaaacacactaaaaaaactaacaaactatttctttttaataaaaatcatgttaaagattaaaaagaaaaaaagtgtatatttatctttttataaaatttctt

SEQ ID NO: 343244 - DNA, 2441 bp, Cannabis indica
gtctcgagactgtggtcgagttttaggtctcggtcccaattccggggctcagtttctgctccaagtccctcatctatctctagatccttagtaccagtctgggtccaggttcaagtctggggccaaggtcccccatctaggttcggatccctggtctctgtctaggtccaaattcaaattcgggtttggatctcgagttttggtgcgagtctaggtcctagtacgagttcgggtttgagtctgggtccgggtgttggtcgaagtccaggtccctgttcaggtcctggtcggggtcgcgatccaggtcctagtcaaagtctaggtccaagaccaggttctggtctgggtttgggtccgggttcaggtcctgagtttgggtctaggttcgggtctcaattcgggtctgggtctggcttctaggttctgatcttggtatggatatgggtctaggcccgtgtccaggttagggtttagggatttgggtttagtgtttatggatttagggcttagggtttaggggtaagtgtaaagagtttaggatttaaggtttaaggtttagggtttagggtttaagggttcgcttccagttccgattcgaattttgggtcacagggtacgatttaaggttcaggtgtgggtctgggtttgagtcctggtctgggtctaggtccgtattcgggttcaggtctgagtattggtcccgaatccaaacaccaccacatgtcgagtctagtttgagttctagtacgggtacgagttttggtctgtgtctgggttcgggtcaaggtccaattcctaaatttaaacagcgactatggggtcgggactaagcctctggtcttgggtcttgggtcccaggtccaaatccagatcctggtcaagatctagctcaggtcttgggtcgtagtttgggtctcaaatcaaggtttaggtctaggtttatgtcttgggtcctgggtcatggatccgggtcccaaattcaggttaaggtcttaggtccttgtctgggtaagggtctcagtcccattgccggtcctggttcgtgtttcatactgctccttgtctcgggtcttggcctggtctcgacctttgtcacggttccattctcaggtcctaggtccgagtatcgggtccaatgttccactcccagtccttgttccagtatgggttctgttcttagtctaggttcaggtctcagttgtagtccgtgtctcggtcccagtcctaatctcggtccgagtcctagtctttggttcgagtttgagttttggtacgagtgtggttctaggtcctgggttccaggttttgggtcgtaggtcctagtgcaagtttgcgtctgggtttgggtttgggtccgggtatcgatcccagtctaggtctgggttcgtgttctgttccacgtctagatccagttcaacagtccttattccgattcttcttccgattttgggtctcgggtccgagtttgggtttggatgctttgtctagaaattgttctagatttgggtcttggtatgatttgaagatctagacgccgaatcaagttgggtccaagcctcgggtcatgggtcaagatccagatcccaatctttggtcccgataacattccacttcggatcttgggtctcggtccgtgtccgtgtctgggtcctggcctaagaccaagacttgtgtcgggtcttgggtcccaaccccagtctaaagtcccgattctagttttcattttgagtttgagtgcccaatctaggtctgggtcctgggtacaggtctgagactccaatcccggtccaggtcttggctctaggtctgtgtccaagtttgtatctgggtttgggttcgtaacctgagacccaatccaagttttgattcgggtctgcgtcacagttcatgtctgggtttgggtcttagtgagattccagttccaagactcaaaccaagactcggactcagacccaagtctgggttacgggtctgggtcttggttaggttctgggtctgagtccggctcaaggtcttggttggagagtccgggtatgggtcccagatcaaaacacgaactacgagttaggttcaagctccgggtccagatctagttcatggtcttgggtccaagtctagttccagttcgggtcccaggtcccggtccaaattcttggtcagggtccaggtccggggtcggaccctagttctcaatcctaattctaacggtcgtgtcctgggtccaggtcccatatccaacttccagtcctcggtcccggtctaagtccaggacccggggccaaggtctaggtgccccatccaggtccgagtaccgtgtttagatttgggtctgggttccgtggcccaggtccagataacccatccaggtccgagtcctaggttccggtttgggtcctagtcccagtttcgattttgattcagtgtctgggttcgagtttggg

SEQ ID NO: 343245 - DNA, 696 bp, Cannabis indica
tgtttgggggtggacttcaaatcaaagaaccaggaaacttcgtgaggagaaggagtaccccacccttgggaagcgtagaggacaaagagggaaaataaatgcccttagaagtaaactgggccgggcagagagtgaagaagtctgccacatccttcaagtacttatgcaagggcatcaacgctccttgctgaccatgggcttccgaccaggcgcatatccccttgtcagggtttgtggcacgattattgtgggcgggaatgtagcagtccaattcgcgcaggtatccgccctggtcaagagttcgaaggcgcgcctccgtaatctaggatggaggagttacccacctggcccccaaggcaccctgcggttttttggaggaaccaccgcgacaagctcttcactgacgttgtccacgccctcaaccacgacgtctccgtcagcatcgactggctcccagcctcattgtactccccgtaatttgggggttcaacctcttcctcttcctcagccttggagggacttccagggcgtacatcgtgtagctcctcgatctcctggacctgagagtccccttatcaatcctcctccatctggacggccggatcctattcggcactgggcaaagtggcgagccgagccacttgaggatcacagacgcgtggttttccttgtacgagccatcattctatggctggg

SEQ ID NO: 343246 - DNA, 699 bp, Cannabis indica
ctgttttccgaaatttgtccaatttatacattccaagtgtagaaacctgaaatcaaagaaaacaagcgtaattatattccaaaaataacaataaagaagaaaaataactataaaatgtgacccgaaacttaggctaaaaatagcctaacattaaacacaatagtaaaatcagagaattaaaggaaagaatgcaccagagattttatagaggttccccaaagaaatctgggtacgtcctcttgagctcgcctcttccactatagatcttcaatgatcaagagattacacagcaaggattccaactcacaacattttgagaggtaatccgaatatatatgtatatatacactgtttgatctttctctatttttctctctctgtttctctcaaaaaactcagaactaacagcagcgtgtttttcttctttgcaacatgaacaacatcatcctgagttgtggatctccaaacccaaactagggcttcaaggcaaacccgttgtaagcctcaaccacgaactaccctgttcattgttctatgttattctggagaagaatttgaatctgtgtatatttgctctctgttgtatctgatatgagttgttgattgttctgaatctatctttttctggtctgttgttgatgtttgccttttatatatgttgtagtagtggaaaaatagagaaaagagttggttacaaag

SEQ ID NO: 343247 - DNA, 543 bp, Cannabis indica
accacaaaagtaacaaaatacttgaatccaagttgaaacaaaataagagaaggacctcaaatatcagaatgagctaactcaaaaggaacactaacatgtttattgactcgagtactcaaactaacacgatgatgtttggcaaactgacgtgactcacaatctaatgaagacagcttactatattcgggacaaagtttcttcagcaaaggaagggatagatgacccaaatggcaatgagcctcaaaagcgaaagcaacactcggacaagcaatagaagttcgtggaagtgggtcaagaacatacaagccaccagattcatatcttttaccaataatattcttcgtcataagatcctgaaacaaacaatgatcgggaaagaataagatgcaacaatttagattacgagagagttgactaacaagaagcaaattaaagaataaattaggtaaacgtaagacagatgacacagtgagcagaggtgtaggaacaacactgccaaatccaagaacagaagatgataatccatcagctaaggtaacaata

SEQ ID NO: 343248 - DNA, 789 bp, Cannabis indica
ggaaacttatagatgtatttttttcttttaaaaaatagtcatataagagaaaaaaaattctctatatggaaaatttgcctaagtttggaaaaattgactttccttcttcctagttgttaattttaattttatagcaaatcatataatctttatatgacaagaattgaagtccaaatcgtgatcttgatcttatttagaaagtttcccatttcgacattgatttgccactgtagagtgcaattttatcgttgcaaatcagggcatttttaggaaagtttatacagctgtgtaaacgtatttgtggttatctctagggtttttatgttctataaatagagctcagccaaacatttttcacctctttttatttcatttttcattttgtttatctttgtgaggagagagtttcttttggaagaacttagagtgttcagtttggttttagtctttgtttattgttcttatgttgttcttagaataggttgaagaacttattgaacaagagaaaggtcttcgagagaagacttgtcaaagccatacttcgagaggaagtaagcactcacacatcaaaagacgaaaggagttctcagtttagtggtgttcagaaatcagattggcaaagtaaattacaaaggattgcagtaaaactttagagagagactaaactgttgaccaaaagtcaatcactcatttattttgatgataaacaaatatttgattattatttgttactaatcttttcttgatcattttgcaagcaagttcacaaagtatccatatttgctcggt

SEQ ID NO: 343249 - DNA, 632 bp, Cannabis indica
tcaaacctaaacctagtttgatttctataaatagatagtgatggcctcaaattaaaagatgatgaacacacttgccttcagtcaaaaatttgagccatcttatctatcttattcgaacccttcctctctcttttcactcttcaatatttcgaaacctatagtgatagagtaagttcccacacacatcaagtggtactcaatcatattgtgtaagactgtgaagaatccaattcaagagaaggagaatcgggctcaggtcttggtgatactctgctacataaaggataccagggttagagatctgaactgaaggagtcatttaattctgctgcacccaatgtaaggtttctcaaactttatctgtgtttcaattacattgtttaagaaattcatatttaggatgttaaaaaacatacatagtagtaaatctagatcttggtaaaatataatccaacaactggcctaagaggcatgataatgatttactttcatgaaatatggatttaaaacgatgttcgtgttgatttggatggtttcatgatggtttatgtgcctattagatgattgtatagaaatcgcaatgtatattgtaaattttttttttttgtttctgaaaatatttttactagaaa

SEQ ID NO: 343250 - DNA, 858 bp, Cannabis indica
tataaggtgtaaaactaattgattataaataaatatttataatcaagagggatgcaaattgcaatgtggagagatgcatattaggtcttgtatgtaaagaattacctgtaaagcatagatttattttaaatagactttcttttggtttaattgaaagactgtttcaagacaagcatgacaccaattgcttattatggtcttgagttatatcaaatggattattaaagtgtctttaatcaatagtaatattaatgacacaagttatgtggtgcaaccaaaaatttttgtatccaaagatctaaagaatatagtttataaattaggaaaatctatgtataaactcaagtaagcttctcgtcaatgattacacaattataacaaaagagatatatcaataaagtattctaaacttttgatgattatgtctcatttggttttaagatagaagcttttgatgattgtgtatatatcataggttcagtgggagtaagaatatgatcttggtattatattggtaaaaaattacttgccactgatgatatacccattttgtattaggaattcaagatatgttgagattgttcttgagatattcttgaattataacaaaagagatatatcaataaagtattctaaacttttggcatgaacgatactataccaggttaaaggcttgtagctaaagaaaataagttgtctaagtcattgccctgaaagcaaccttaaaatttaagaaatatagaagattcttcatttatatttagaatctaatatatgctgaagcatgtatgtatttttacttaacatacatattaagaatgttggatagatatttgtgtaactgtaacaccctaacta

SEQ ID NO: 343251 - DNA, 685 bp, Cannabis indica
gtggtccatttttttatcttttgctttttatctatgtttttgttgaactattatgactttgtctattttgtttgttatctttggttccttgatagacaaaatgggggagtagtatttattttttggattgttggttacaactccttgttttagggggagttatttttgtttgtggtttgtgaatttttctgtttaaaaagttatttattttatgtgttagtatgctttcatacatggggagtattttctatactctattgtttttatttctaacacttgatgtatgttttcttcttataaaatgttttgccaatcaaagtgccaaaggaaaagattgttaattctatttttggcatctttaatgtgacaaaaatattttataatttatcaattaattttatctgagttgtttatttggttttcatgttttgtgtatttgactttcacatttttgtattaattgttatatatatatggaaggaaagttgtctaagttttctatttatggaaaataaggtataaaaggtaagtttgatgactcatcctttctctaactatccagctgtattaatctaatcttatgtgatttcttaatatgtttgatcagatttcttgtggagaaaatcgaagcaagactttccttttttataaaaagaaagtcacacttactgctcacgattctata

SEQ ID NO: 343252 - DNA, 495 bp, Cannabis indica
acacaaaataaacattagacacaaataacaaatcaatcatgataattaacatgaaaaccagtttcacaccaaatcaaaacaaaaataaaaaaaaccaaaacaaaaaaacataacaacaatttctgcatcagtaaataactaaacaataaaactaatagtaacatacctcaacctcaaccttaaaaccacccacacaccaaaaatcacagaacacacaaataacacaaatcaatctccaaaaactggtttttgacatgtttcaaaattaggtatggtcaaaaaggttttcaaacaggtatgataaagttgaaaaaacagattctcaatatctgcattattttgcaacctgaacattaaaacccctcacacaccaaaaatccaaggatcccaaatatccactgcatcaattctaaccaatttataaaactgttaccaaaatctagaaactggttttccatatgagatttattttgcaacctcaaacctcaaatccac

SEQ ID NO: 343253 - DNA, 548 bp, Cannabis indica
atgcatcttcttgaaactgaaaactggcacataccactctatcattcccggtgacgcccatgaaattcaatatcttggtgatcacaattagccactgctcggctttcataacatccagacctttcatacagaggttccatccgattcactggtatcactggtttggcctagacaataggggcagatgccactggaatttgtggtacaggcctgcaggagcaccatgctgtcttaatcgttggatttcattatcttgttcctcaattctggcttgcattcctgcaaacttgttttcccaattctgggcttcctgagtagcttgggcagcctgtggcgggttagcatcaccccggccacaagcccagcccctgggacctctacctcggccccaagcatttgggggaaaactgagctccctgaccttcatttgatccgactgaattgccctgactcctggtatttcgcctggcgtccatctagtctgaacagcctgcgtaaccagagttggcatatcagatcatgatccacgagatctactaatgccgctt

SEQ ID NO: 343254 - DNA, 631 bp, Cannabis indica
ataggcatttaacatgtgcgttttctatcttttcagtccctgaaagcctatataaaaggtgaatttgagttgatttcagtgaaacaatttcagagagaaataaacaaagaatacatatgcgaatttgagagatcaactacaatattagaggcattcttcagagagttttcaatattcttctcttatcttctctattttcatctttttttttttaaagttaatatgtgtgattgtgctctcataaacataagtagctaaacatttaattaggattaagttggagattgtttaacattattttatggttttaatatgatttatttttctcctaaattctatgtattctatttcattcgtgcttaactacttttaactgtctgatcaccaattaattgtctatgattttgatgcgagatctgagaagtgagtgccgattatgccacaagcggacccagaattgaattttagggtgggcttagttatacatttaatataatctaaaacagtaaataactagttaaatttaagtaaaatgatagtttagcagcatctccctattctagtagtcataaatttgatcctagtttaaaccttatacttcatttattttttaataaataaaatataaata

SEQ ID NO: 343255 - DNA, 928 bp, Cannabis indica
gattttctttagggcacaaaacccaacatgatcttagaggtcgtcctctggtttacaaggaatcccagaagaaggttggcatggttttggatggaccgaggagagaagttggtgtggtttccatcagagaatccagccaacccaaggcctgcaccagaggacctttgcgctagcctctttctggtattgagaagtttgctgaggctgggaaagaggtctcggcttcaagaaatgggatctgatgataaggagaatgaggtctgtgtaaagatcaagggtctccacgtgcagacggtctttctcgagctacatgtagccggtctttctccaagctatgtgtagtcggtctttctcgagtttattaacttctcctctcatcctttgtttaggaagatgacttaatggtttgcccctagtggaatttttgtaaagacaagtttgtaacccaacttgggttttttctcatcttaaatgccttgtactattttcattcgaacttaatacaattgtgtttgcttgcgtttttattcacaatgtcaacaactataatttgatcaaatttacagtacttttgggtttttctattgctcgtaatcttcctgtttaagtagttagtaatctactaaacttgtttattttcgagcagttgtcaattctgcctcgctataggacttataatctgccttaagtaaacataaatatactttaatgattttatcactgtatatttttaatttgctcgtgtgaatagttatattatctatccattttctacgtttaagtacttttatcaaggcgtcgtgataccttgtttagtactttcctagctcgcgagcatcgttagtattcagttttatacgcgaggtataacttttttgattttcctttcccatcagataggtttgaaataaaaaattatagttgtttg

SEQ ID NO: 343256 - DNA, 714 bp, Cannabis indica
ataataaattaaataatattttgacaataaattgccacaaaaggactttacaggtcctacttattttactttaataaatagtatagaaaatcgctagtcaattataagacaacgcatcatagtagtgttaggcacattgatgccccataacaacgcttagatttaaatccttaataggaatatcaaaatgatcatcttaaaatgtaaatggcaatcgtgcaactcttaagactaaataattatcggtgtagctagaaaactttttaaactatcgaaaaagaaaaagaaagagagagagagagtgtgtgtgaagaaagagaaaggaaagaaagaaaaaagaaaagctaacaaagtgttttaactaaaactaaaattgagaaaaaaaaagtagacttacatagacaacaattgtgtatttgtactaaacgtaaaggttaactttgtattgatttattattataaaaattaagagcatttgtcatattattatttgctcaaaatcatgtttaaagattcataatttattttgcaagacaactaatctattttatcatttcgtggggcaaaattaagagtcaaattaatatattaagggtatgttataaattcaaaagttattacatacatatgtaaaatactgattgaaatttatttgaaaataaataaataaattttgtttatttcttttttatgattttgttggaagaggtgaat

SEQ ID NO: 343257 - DNA, 1482 bp, Cannabis indica
gcagtttagcagttgtacacaaccagtcgcgatcttgtacagaaggctcccaagaacttcagctgtttctctgcgagtcgcgtcgagtgtgggacgagacggtctatctgcgaaaaccaaaagaaaagagcgagtcagattaaaacctcaaagtaactaagaaaaatgtctaagtcaggaaacatgcgacgtactaggtcgacggttaaagtcagttctaatccctgggactttgaatatgtagaaccactttgatttccaatctcccatattagataccatcccttctaccccgttaatttcagaagtcgcccatttgctgaagcagtagaaaccattgtgaaggcctacgctttttatatcgtagaagtagctaaactcttctaccgagggagccctatgtacatactccatatacatcgcataaaaagccagggttgtgcgataactgttgggggttagctggaaaggtgatacgtcataacgtttgaggatagccgcgataaagggatggaaagggactgataccccacatcggagaatgggtattgagattaccacatcctctgtgggaataatcgctggattagtaaaaggaaggtgcgccctctgagtcggcttaggtcgcaaggaagcaagtcgcaacaggtttagcctcgtaaaggtggtgaggtccgatttggtaactctcgaaaccaaatcctcgcacgagaaaggctcgttcagctgggtgtcgtctaccgagtcagtaccgctcccttctgcctcttcctcctcctcgcctgattcgcgagctggggccgtccagtcgtcatccgtttcttcgacctcgacgtcaggagcatgcctcgagtgaataagatagtcgcgggctgacaccgtagactcactgtcccgaatatcaatggccccaggttcagcgagctcctgcaccattttctcgatgtccgaagaagacatcggacctagctctatacctacagtaggtgcgatctcctcttctgagatcgaagttgggataaagctatcttcctcctggtcctcgtcaccatcgaatgcgtggcctcccgagccgagcagctgactatccgacaggtcgctcatctgaaagatagaagatcttttcagcgtggtgaatgtgtgaaaacaaagtaagtgatctcacccgcataaactataaagtcgcacttgatagaatggtcagcgttcttgcgaatactgaccaccccatcaatatgcgagtagagagaatactaaaatgcgaatagaaaagcatcccaatgaatggtcaggagcgccctggtgacctcagtgacatgcgtctcctggcatgaccctgaggtaacgaggaggcaccaaccatttcaaggagtctaactaaagtcgcagcctgcgaataagtcacgcatcctgggccaagcgatatacctctagaaacggctgggagaaactcagtgactcaaggggcatgcgttctcaagc

SEQ ID NO: 343258 - DNA, 937 bp, Cannabis indica
tgtgatcaatgctgaatgcaaggatcgtggaattgaggctaaatacaccgatagtgggatcgtgtgtatgccacatccacgtcagttgatccctgagttatagggattgagcttgtgactcacgatgcctttagttgaattcgctaagtgttgctcattctgcacggctcattgagtattccattttggatatgccagcgagccatcctgctcggcatgttgatccgaacagatgctctaagtagagtccacgtgtcaccattctcgtgatgccacgtcagagtgccaaattcgagataacacatttatacggagctaagtgttttaacgataaaatacattgaagggtgtaacggtaatttagtccctatacaatgtagatcatctattagaggatcattgatcaaattaggattataaaaatggataattaataggttatctatatcgtggaacatatagaacattctatatgactgagagtgcaattctaagttctatgcgtgaatgcaacaaggaattaataagtcagtgagtttacttggtaaactcagttaattgattttgattaatcaattataattctgaaattagactatgtctagtttatgaaaatgagatgtagaaatgataatacaacaaaattgcattagtggggcccaatatccaaagccctggcccgccattactgtaggcttttatcatttattttttcattattttcatgccaaataattctaacctaaccctaggtagcatcctataaataggtagtgatgactttaggaaaaaatgatgcatctcattccttcagagaaaattctaagccgccacttcccttctcttttctttctaaattttcgaaccttgagttgaatgagtgagttacccacacacatcaagtgatatctcaatcatagtgtggaagattgtgaag

SEQ ID NO: 343259 - DNA, 1437 bp, Cannabis indica
cctcataaaatttttgtgtcttattattattattatttgctttattacgtattcttattacgacatatcgtttatcgcttattaaaagactcattgtcgttggctaaaagcgaagtgatcaacattttggtgctttcattgagagaagaatcacagatcgctctttcaacacgatggtgcaaactcgcagaggcctgtcagacctagcaaactcacagccgctggatccgatgttgcaggacccagcagttcgacggttccacccgctatcaatcctggacagacgggaagcgtggtgaatgatggaacaactcctgttactgaaactgcgcctggtgtgcaagagaccagaaataacggttctgcacacagccagaatgttcatagcatgactgttccaccaggcatcagcgcccagacaaccatcgcagatgcaaccgaattgcaaaatctccgtgctgcgcttggactcatgcagggccacaacaataccctgcatcacgatcaggaggagttacgtgccgcagtaaacctcgcgtttgacgaacagaggcgtatgttcgccgagtggagagataaagagatggaggcattaagggctcaccatgcagaaatcgaagatcgtagtcggcaagctactgtgctgatacggagagcctatcaaactgtaggccagcaggcgccgagcgtcattccccttggagaagccgaggatgacccaacggtgaatgcctcccagacaaacaacggtcagccgtccaatccccggtcacgagttccactcgtgggccaagaggtaggcggacagaccttgtccgggaattcatcaggaggagttatgctcgatggatccactcaaaacaatggagccattccacctgccaaccaagcgaaccaatcgctaaggcagccagggtcttctgtgttcgaaaggttgggaacaccccgcgacctaagggacgacctaaacagaagaaggggagcagacgagcagaatactacaacgaatgtgcagtccagagcccatactcaaatccccgctcagaaagacgctgacgtagcccaacccgaccagaatgccaacgaagtcagcccagccgtacaggcccagcttgacgaactgaagaatatgtttcatggcatggccgggcagcgtaacaatgatcttgagttggaccgcgcacgcggaactcctttctcgccagaaatcaacctcctgccactacctcacaagttcaagatgccaacgtggaagatgtacactgggagagaagatcctctctctcatctcaagtatttcgagatgcagatggatttacaaggagtgcgaggagacgtatgttgcagaatcttccccgcaactctgtcggaggccgcacagcaatggtatttcaagttggctccaggaaagtttagttcatggaaaactttctcttc

SEQ ID NO: 343260 - DNA, 624 bp, Cannabis indica
ggatactcaagaagtaagtatgacccttgtgtttactacaacaagacacctatctggttattactttatgtggatgacatcttgataattggaaaggacagaaaggctatagacatgctgaaagaacaactaagctctgaattcgaaatgaagaaccttggtgaagctaaaaggatactcgggatagatatcaagagacaaagacctggctctgttttcttgtctcaagaaggttacattcagaaaataattaacaagttttgcatgagtgaggccaagacagtcactactcctcttgcctcacacttcaaacttactcagaatcaagcaccagacaatgaagaagacagattatacatggactcagtaccttatgcttcctgtgttagaagcctaatgtattgtatggtctgtactagaccagacttggcatatgcattgagcatggtgagcaggtttatctcagatccagggaaggtgcattgggatgctgtgaagtggattctaagatacctcaaaggaacagccagagttggtttggtatacagagacaatgcaagctttgaaactgaaattgcagggtatgttgactcggattatgctgggagtatcgacaccagaagg

SEQ ID NO: 343261 - DNA, 597 bp, Cannabis indica
cacaagattagactattccttcaaatgaattctgtatcctcatttattgtataaattgtctacactaatagacaacatatttactcagtatgtccaaccgttactactcagtcaaaatcataagatcacatagtacataattcataattttgtctttctattccttctatgacatctcctaagctgatctactgacttaacttagtaacaagttaagtatttgtttctgatagatattcaattagagcatttcttattttccaccaactaacatgaactcatcttggtaccttgtaaatctttacttgttaacacattctttcttcttagaaatctatggaatgattattgattttgcatcctaatatgaatcttcctagcgtactttgtcctcactcatacacttttcgggatgactccctgaaagatttctcatcttgagattacccaaatttaagtgtgcttaactacaaagtaagctcatggtgggttatcaaaaagtagatgctttttttgtcgttcttaattgtatttcttgctttcattctttcgtaaaaaagaaaaatatcaattctcatcactcccttcattaacctc

SEQ ID NO: 343262 - DNA, 2627 bp, Cannabis indica
agataatcaaatagagctcggaacgagctttccaacaaaatatagaactctcgaatcagagtccggatcacaaagtatcaatattcgaagattgcattctaatctgccagaaaaacaagagggcgggccgcggcactccccccacatggggtcgcgacaactgggaccgaatcctaggctaccaactagaggcgggccccggcccctaggttccaaacccaggaaaaacacaaaccagcaacgaaaaacatggccatttcacatgcaattcactccaaaccttaaccaaaacttaaaaccaatcatcaatacataacctatctcaaattcatgtatcaatatccaacaatataaccctcaaaatttggattaaaccacataaaattcaaagctctaacttgagcataatttcatataatcctacctccaacacttacattatcaagccaagaactcatgcctcaaataattaatttcagagctcaataacagaataaaaacactagtaaaatccttttatgttcagtccaaacctaacccaacataaactcaaaagatccaagtacaaacatgctcatatcaacaagaaaacaacaacatgcatctcaagatcatctcaacctatttcatgcttctcaacaatagaaatctcagcaagaattcgaataaaattagcaagaagattaccacaaattaaagcaaaaagcaagcctcactccaacacaaatcttcaagcaattcaccaccaaaatcaaaagttgaaaaagagagttcgagagagagagaggggagtcggtttggggttaagggaaatgcagaaataaaaaccttattttccttcaaatttcctttcttttgttgtatataaaacaaaggtcaaaataaccaatttgtcgctagggccataaagcatacacataaaaattcaagggcattaagatcattccatacaaaaataaattcaaataattttcagattatccacacataaataaaatgccaataattcaatccaaaattgtatttcgggcccaaacccggttcggtccaaaatacccggttgtgactatatcgcgccaacttgtcagaacacacctaaaaaaaataacacaggcatactatataatcatatagtccataagcacgtaaataaattaaattcatagttttaccccttcttaggtcaaaattactaaaatacccctggctcactaatggagttttatgccatatctcatatttattcacatataataaattatataacaatataattccataataatacacaattaactagttaggattttgctaatccattctcttaatcctaaggtattacaattaccccctccttatagaaatttcgtcccgaaatttacctgaacaactccagatatatctgctgcatatccgtctcgagttcccgaattgcctcttccactttactgttcctccataatacttctaccagtgcaatcgtcttgttcctcaagactttctcccttctatcaagtatttacaccggttgttcctcatatgataaatctggttgtagttccagtgcttcataactcaggatatgggacgaatctgagacatacttccaaagcattgaaacatggaacacatgatgtacagctaccagcgctgggggtatagccaacctatatgctacttgccatatcctctcgaggattttaaaaagtccaatgaacctcgggctaagcttccctttcttaccgaagcatttaatgcctttcatcggctatacttggagaaataccatgtccccaatctgaaaatcaatatcctgatgctttggatcagcataactcttctgtctactctgagtcgcgagcattcgcgctctaattttatcaaatgcctcacttgttctctgaacagccttgggacacaagaactttcttgcacccactacatcccagtgaataggtgatctacattttcttccatataaaagctcataaggggccatcccgattgttgcctgatagttgttaatgtacgagaactcaattaagggaaggtactttacccatgatccttaaaagtcaagcacacatgcccgtagcatctcttctaagatctgaatagtcctcttggattgtccatccgtttgaggatgaaatgctgtgctaaactttaattgagtacccatagctcgatgtagactttcccagaatcttgatgtaaattttggatctctatctgaaataatggactttgggacaccatgaagacgaacaatttctccaacatataacttagtatactgatcaatggagaagttcgtccaaataggtaagaagtgtgctgactttgtaaacttgtccactatgaccaatagagagtcatactgtcccatggttcttactaatcctaccacgaagtccatagcaatgtcttcccatttccactctagaatattcaacggctgcaacaaccctgcaggcctctgatgttcagctttcacttgctgacaagtaacacatctagtaacatattcagcaatgtcattcttcatgcctggccaccagaacatggcctttaggtcttgatacatttttgttgaccctggaggaactgagtagggagtcgtatga

SEQ ID NO: 343263 - DNA, 964 bp, Cannabis indica
caacaatggaatcaagagtgaatggatcggaagtcgatggaggcggaaaacgtgagaacagaatcggtgttaaactcgaatctgtggtgatcggtccagggcggctcaacagaagaaacatgaatgtcgcaggaatttcgatctgagtttcgagcctcgaaaactgaattgccgctgttcgacatcggagatgaccccgatgaatgggcgtacacggctgaatggcacttcagtttgcagcagttgacaccagcagaaaaattagatgctgcagttcatagtctcggaggagaagcgctgagttggttctgctgggaaaatcgtagacatccttttcaaacgtggaatgaattgaaatgcctactgcttcgcagattccgttcccaattcacgtacgatggttcagtttaccatcgaaggttcaagggtgaagaaatggacatggcaataagagaacaccaacgagcgttcgctagacttgatagcttcagggaaactatcaccgctgcaccaccatttcatgaagaaacggagaaaaaacagcagctgaagatatcgcctgagaagaaggctgtgttgaagacggtgccggatcgggaagttgttccatggaattcgctcgcacctcggcaacgaacgacatccgagaagatctacaaggcagaggttcaagggggtgcgtcgacggagatcgcgtccctggtgccatcgccggagaagaaggctttgtgggaggtggtgccggacgaggaagagaagacgaagacgccgttagtgcgagcggcagaggaagacgaacggctgggggcggcgttggaatggatttcatcgccgatcccaaggccgttcacattgtgggcagtgacggagccgaatccaccacgggagccgtcgccggagtcggagaagacggaggcgtggacgctggaagcttcgccggagattcagcagctgaagacaccag

SEQ ID NO: 343264 - DNA, 909 bp, Cannabis indica
aattaccccatattactaatttttttaatttttttttccaaatttacggtttgaggtttctaaagtggttgcagtgctagttgcaataggggtttctatacgatcttttgttacaatttagggtgcagcgctagttgcaacaggagtttctatgtagaattctgtaaaaataagaaaaaaaattagttttgaagtgtaaaaataaaaaagacccctttattatttaataaatcagataatccatttaataatttgtacatattaacctttttatatatatatatatatatatgaaataatatcaacaattatttcagccattatactgttttgttgataaaaaaaaattgaggagtgctaaggacactctctatcacactctcttttgcactctctagttaatttaatgacaaatgtcatcttttcaacaaggcttaattttacttaataactagtcataatattatactgttatttcaaccatgccattcccattaatttactcaaataattcagaaacgactccagagctcttattgatgctaaagctcattgctttaatggtgtcttcacaccagaggtagtagagattatgggaatgaaagaggcactaagttggatcaaaagacaaggttggaaacatgttgaactggaatctgacagtttagtctctatccaagctattcgtagccgctccccactttgttccattttttggtaatctggttcaagactgtcattctcttatgctttctacgcctttaataaaagttgaaaaaccgtgtttttgcaaatgtcagttatatataagaaaatataaaacagtaagcgtctgcagaagcagaaagtaattctgctacagcagaaactcgttttgtagtgacaaaacagaacaggcagaatataaaa

SEQ ID NO: 343265 - DNA, 1518 bp, Cannabis indica
cacaacaccaagcccaacaggcgcaaaacaaaacagtcaagtcagacattaacattacccatgacccgtcattgagctcacaatgatccgacccgaatacgagaccgagtcttatcactcatctaacaatctttgaagtggtcaattaactgaccatgtaaataacgatctcccacataaagtgggggaggagcgcttctaaaggagggtgagcagtcatgagtaacgtccttccatggacgcctataagagtcactctaggccactgagaaagaatcgattttcagtcatctcaatactttttacttattgttcactctctcgttatctcaaaaattacatacttatttccgcagtcaagataggtggtaacatagttcagttatttactatcatcttttttattacattgttaacaatcttgctgacttgaccgtcggagtcccttcggctagcaccatcctggtgtcccaagttttctcgattactttcttctttgttctacaggttgtcggtgcccgcgtacgatcatcttcaatggattgtagattttaccatctacaacgattattctagatatggtcatatttacctaatgagcaagaagtccgaaactttttgaaagttcaaagactttaaggctatggctgaaaaacaattaggtaaatcaataaagacacttcgatcatatcgttgtggtgagtatttaaattctgaattcaaagactatttgttggaagaagggatcttgtcccaacttataacacctagaacacctcaacagaatagtgctgcagagagaagaaaccaaacctttttagacatgtcagattggtgatacgttactcatcactgccactgaatttctagggatatgcacttctagctgctacctatattttgaatgtagtaccctcaaagagtataagcaatactccaatagaattatggaatgtaaaaaaacctaatttgaaatatttttgtatttgaagttgtcctgcttatgttcttaaatctaagtttgaaaaacttgctcctgttagaacttattataccatgatttagattcattaacatgtatgttgatgaataccctaaatatgaattctctaaaacaatagaataaaacgcatataaagtttagattaccttacattgatggcggcagaataatatgtctccttctgcccagatctctaacctttgtgctttttattgcagagtaataacaagatctgagcttggatctccttctccttcagtttggttaaccaccgtctttcgcactatgattgagtacttgacttgctatgtgtgggcatgatactctatcactaaaggtttgaatattgatgaaaattatcaagaaggattcaaaatcactatgaaggagtctctcatctactagatgtctgatagagttagaaaactaagtttagaatggttgcagtaggttggatgagaaatagagcatcgtgttccttttatagtattccaactagggtttaggatttaatt

SEQ ID NO: 343266 - DNA, 692 bp, Cannabis indica
gcatcagggtgcttgaagttccaaaccaactcgttccgacgagtccaaactgaccaacagaccataccagcctcaagagcctcggccgagttccacgataccaacaccgcttcgaaccaactcgagaacaacattgcatcaggcgccacaacagtaactggaaccttgctccagcaacttctagcaaaagagcaccgcaccagcacatgcagaatcgtctcaggagcagcaaggcagaacggacacgttgcagcaattggaacatgttttgtggaaagattaaaccgagttgggagactgttggtagaagctctccacagaaaattaagaacctttggagggagctgcaactgccataatagccgccaaattccagagttatctggactatctctgctgggtttcattgattgaaccagagaatatgcactcctaacagtgaaaactcctgacgcatcatgtaaccagtaccaaaaatcagtactcaaatgactattgagcggaatcttccacaccaaagctcgatctctaccagtgagcagatcagctatgtaacaccataaataacataggcgtgttaacgtgattttaaacttactgtgcagctcgttgctaatcaacgaggttattggaaaacgtgattaattaaaattttgtttttaattaaacataacatattacattaataaaat

SEQ ID NO: 343267 - DNA, 639 bp, Cannabis indica
agaaggaaagttgcacggtatatcatagtagagggaattatgtataaaagaggattctcaatgccattgctcagatgtgttactcaagaagaagctgcatgactcttatctgaagtgcacgacggattttgtggaaatcatgccgccaggcaaagtttatctaagaaaattctaaggcaaggttacttctggccaacgatgattgaagattcaaaagcctatgttaagaaatgtgacaaatgccagagattttcaaagatacctagagctccacctaacgagttgactcagatgcaacgtccgtggccctttgccgtttggggaattgaaaggaggagtgcaatatgcagtggtagcggttgattacttcactaagtggacagaagccgaaccactcgcaaccattacattaaagaaagttcaagactttattgtgaagaacataatttgccggttcggactgccgtacaagatagtttcagacaattgcaagtagttcgacagccaatcattcattgacttttgtgcgagccatggtatcatacaaaatgtttctccgcagtggcccatcctcaagcgaatggtcatgtaacgccctgtccaacagggacgccacgtgtgtgcactttatttaaaata

SEQ ID NO: 343268 - DNA, 609 bp, Cannabis indica
ttcttatttttaaaatattttattaaactaacaaaaatggttaaataactatattttatatatataaaaatatacatatttatcaatcattaagtagtttgataaaattaactaatattattattttaatcattaataatttactaagtcttgtcctgtgacatggttgtgtactctttcctctagagagatattattctgtgtgttctgttcttgttgaaaaagttcttttttgtcatttttttgtgagtacttgtgtttatcatggcttccagtagtcggcaaggactggtggaagaggagaatggatacaatatttggcttgatgaagaatcggaggctgtcttggactatgacaccaatgaccaaactgagaaagactatgacgatcggtggtgtcttgtaggaaggtttttaacagagagatcaatcgattttgatgctatgcaacacctattggcctccctatggcaaccgggaaaatgtatgtttgttaaggaattggatacaaatcgtttcttgtttcaattttaccacgaaattgacattcaaagcgttattgatcagagtccgtggactttcaataagtttcttctggtgtttacaaga

SEQ ID NO: 343269 - DNA, 740 bp, Cannabis indica
aagataaaataatgggtaaaaaacaactaagtcgtcggccacacatgtgggcctcactagttataattttgccactttatttcaactatttatcttttctttcaataatgccatattttcgaattttaatcttataaatgttaaaattatttatttaatatttataattaattataaaattgtcatttatcttatttattaattagatcatacaaagtctcttaattaacaaataaactccaaaacctcttttcttcacaattaagttattgtttagtgaaaattcataaataggacatagtttaattttggaattatcattggttaattaaaattaattaatagagtctgcaagtaatattatctcaattagtgtggggatcatgagcctatataagcaagcttccaataattagatctagaatatactaagtaaattctctaattcattaatttctcctttagattcagaattgcactcttaactataaagaacgctctatatgtaccaatatatagacaccctatgaattatccatcgttctaatataaattgtcaaagatcctttatagatgatctacatcgaataaggataaatttaccgttctaccctgcaatatattttatccttataacacttagcttcctataaataatattttagtaaactaatataattactgaaatgaggtctcaatcatttattgtgataactctatgaaaatagagttatttatat

SEQ ID NO: 343270 - DNA, 769 bp, Cannabis indica
gtcgaagttggcctggggattagccttccaaaaatcaaagaagagctcgaggctggcagtctccaaagcattgaccttctccttcaaacggtccgcctcggccgcctgagcgtccttatcttccttcagcagaagaaggacctgccgcagagaactcctctcatcctgaagacgatcaacttcagcagataaggtctcgatggtttcctcaaagcgatcagcagcctcaaggtcctttgtcagcacggtgatcttcttctcggcggcaaacagcttcttgttggcctcacccaactcatgacgaacagctgtagtctccgccctggcctcctcagcttccttcttggccaagtctgcctccaccctcaaggtgtcggacagagccgcactcttggaagtagcagatttagcccgggagtaggtgtaagccaacttcataccggcctgcataaaggaaaaagtcagcatatggagctaagtgtgaaaagttaaaagggaagtatcaaaaaagactaaccctggtgagctccttcaagactccgcccaccaacacatccagagatgagtcgtcagcaccagccagttgctcaccgacctcaggaaccagccggttcatatagtgagccatcaccaccttgcccttcttggccttaggcagcacaggcatggatggagttggtgcctgcacccgctcagggatcctcctgaccaattcggacccaaatattggtggcccagactccttagacttggcagatttgggagtgga

SEQ ID NO: 343271 - DNA, 925 bp, Cannabis indica
tcttccagtgcccctccagacactatcgacttagtggaggaggatgaggtgcttcctgaggaagctaacgaaggtcaagaagagcaatgggctctacctaaggaagttgaagaaggtgaagaagagcaagaggttgctctgatccgcaaatgcaaaggcaagatggtagctgaggagacatctaagcggccgcagagagtggacactccggctccgagccatgattccgggatccctctcgaggcggaggaatttacagtgcctcccaacatagtgctgactctggtacccggagatgaggcaaggcaggagctccggatagccaagcacaactacgccatggacgagtactcccgggggtatgccgaggtggaggccttgaggagggttttgcgagatgaaatgcaaaataaccttaacgatcagaactaccagaacccgtgggatctaaacttggaccccctgtcggactggttcaatcgtttcctcgggcctaccttggctccttttaccgcggagatgaccggcgagtttgtctcccagctaacccggtgcgcgcccaagcggttcgctgcttgtgcatccttgaactccgtctttcaagttcaggatctcagccattccttgactgtggtaagtattccgtagtttacttctttcctcattattttccttaaggacttttctcactctcgcatccttttccagcttgctgcagaggtcggccgcctttccaagaacctaatcaatcacggcttcgtcttgtccgaatttgggggcatagacgaagtcatgaagaccctgcaggacctgtctgctgaaaggcggacgttccaagaggatgctgagcggcgggaggcccttgctaaggccaagttcgaggaagaggccaagcggagggaagcccaggcggaggcaatgatcc

SEQ ID NO: 343272 - DNA, 846 bp, Cannabis indica
aaacatgaaaacaacatataaacataaatgacttcttatcttttattgataacaaatcagattagattgaaatgtgttttatttagggcataaaatcccaacaatgcgaccataatagtcttttatgtccttcaactaattttaaagagcttgaatttgctctgaacgaccataaacgactttgaatttatattatgtgaccatcatggtcttttatggtctttaaccgattttaaagaacttgaatttgatataaacgaccataaatgatcttgaattacactatgcgaccataatagtcttttatgttcttcaaccaattttaaagaactttaatttgctctgaacgaccttgaatttacactatgtaacttgaattttctctaaacaaccataaatgaccactaaggttgcacaaggtcgcacaggtcacatagggtcgcacatggtttcactatctattttcataccacgtgtgaccttattcatttagttaaatttgtaattatttttataatttttatatttatgttcttatcatttatatgtttttttattcatttcacacattattattatagatgcccaaaactatattaacaacagagcttccatgtatatctcgtgccattactactaatacagctgcaaaatctaaagttaccatcaaattcccactaagtgtaatatgccaaataaagaattggctcacaaagtttgatcaggatatatttaaacattactcccaattgggtcgtcttttggacctcgatactaaaaggctttttcctggcaccttagtaaaccagatagttttgaggagggtagattgccaaaagaggcatg

SEQ ID NO: 343273 - DNA, 502 bp, Cannabis indica
tcaaagtttgaggggcatgatttggtagatatcaaagtttggagagaatggtttagtacataaacaatcactaaaagagtaaaattgaatgaaattagactaaagtccttaaatctaacaatctcaatagttcagagggaatttttaacagtcaaaaaagttcaggagacatgatttggtacatgtcaaaatttgggaggaaaaaatcttaatagtattatttttaatattaaaattttatatattttaaggaaaaaagttggagatcaatacatacaaaataaaatagggagactaattaaattgtacgtaattctatttgttgtagttttactaaaaagattaacattattattgattatagagactattttgtatcaaaattaatctctaattgaggaaatttattagaaaataaaaatagaaaggggaaatttaagaaaacataccaagattaaagattaagcttaacataaaaaaaaaatatatatatatcttatat

SEQ ID NO: 343274 - DNA, 430 bp, Cannabis indica
aaattacttgtgactaaaacataatattagacacaagttgtaactaatttaattttagtcacaacaagtattatgactaaaaggtcacaattaattataatttttgagactaatacttttagttcagaccttttagttacaacatagaaatgatgatttataattagtcataattttttttttttttagccacaagttttgttaagactaaaagtaaaaaaaattagtagtaatttcggcatttagaagagttttttagtattttttttatatgaccgtgtacattatagttattaaagattgcttttaaattttaaaaatgatgagaagtttacaatgtcgaaaataatattttttaaacattgtgttacatgtagggctgaacatcgggcgggtttaccgggtttcggattcgcgggtttcgggttca

SEQ ID NO: 343275 - DNA, 900 bp, Cannabis indica
tttttatttttttgcgtctttccatacttaaaatctacaagttgaacttgttggagaatttgttccccagacagtggcaaaggagccatatcaccctcttcagtaccatcgaatgctttcttcttccgtctatcaggatgatttgcaggcaagtaccgtctgtgacccatataacacatcttgtgtccatttgccaagcgacgagccgatgtgttagtgcaacaaatcggacaaccttcgtaaccttttgtgcttaagcctgataaattactataagcagggaaatcactgacagtccacaacaacacagctttcagattaaaaaattcttttttaaaaccatcatagacctgaaccccgttctcatacaattctattaaatcgtcaatcaatggttccaaatatacatcgatattatgtccaggttgttgcgggcctgatatcattaaagaaagcatgttaaatttcctcttcatcactaaccagggaggaagattgtacataactaggaagacaggccatgaactatgacgactacttagagatctatgtggatttactccatccgcagacagaccgagacgaatgtgtcttggttcagatttgaattcaggatttatgtagtttacttttttccaagcttgggaatctgcaggatgtctaagttttccatctttcactctcttggtctcatgccaaatcaaattttcagaatgttctgcactacgatataatcgtttcagtcgcggaatcaaaggcatgtaccacatcactttttgggggataagtttcctattctccttactcttgtttactttatggcgggataaaccgcaagtcgggcaataattcatgtctgcatattccttacgatataaaatgcaatcgttcggacatgca

SEQ ID NO: 343276 - DNA, 511 bp, Cannabis indica
ctcaaaagcggaagcaacactcgaacaagcagatgcatcactagcgcttgcaatattagtagtgttgttgtcgatttttgaactgtaacttcctacactcaaacttagtgtgacgtggtttcttacaatagttgcacatgatgctcccaatttctggttttcgattatcaggtccttgtgaattacttcatttgtatccgcttggagtagagttttttcccggtgtagaattgttacgactcaccaaggcgctattaagaggagctaaagaggtaatttctgtgcaaagaacacgagtaaacacatcttgtaaagaggagacatcaaaaccagagagaacttgtgactttgcagagtcaaattcagatgagagtcctgcaagaaaactcataatagtcatctgctctcgttggcgctgttgaactttcatatcaggactaaatagcaatagcacattaagttcttcatatttttaaaatgccataaaataactcataagagacttatcttg

SEQ ID NO: 343277 - DNA, 1325 bp, Cannabis indica
ataaaatagattacattgaaatggagttttatttagggcataaaacctaacacagacaccatgtactttcctgtacttgtgctggtatcactataatgtactctcaaaaaatattcacaataccaatgcactctgtaccataaccgtacaagtgttggtagtgcaactaacatataagcatgcatatacacttagcatatatatatacactcatatatgcatattacatattatacactgttcttaccttctttttagattcaagtgtgttggccgacttgaacggaaagtctcgtgctaaatagatgccccaatcacataatgaaaccgggtaaatcacatgatcgaaaccctaatctgggaaaccgaacctataactctaggctctgttataatcactaggaattacactaattcaggagacagggaaacacccaactacggtgctaaaatggacgagaatcgagaaaatgacttgttcgtggatcctgccaaaaccggctaaccagttttataggcctcgcaaaccggttagccagtttgcaccaggtttcccccaacaattcatttcttgctcaaaactcattcaaatgcaaccaaactttccagagtacctaattagggtatacacaatatattacaaccagtaattcacagaaaaacacactaaatcaaattatgccattaaaaatcaaagcttaggtttctaaattcaaacttgcataaatccaatcccatacaccaaaaccagttgcaagaagctatattctactcaaattaagcttagaattcgaattacaacataacataaccctaactgcccctataactcaaaatcactatttgaaactaactaaaatcttgagaaaaacatagctaaagagtaactagggtttaccttgattaaatcctcctccaacccttgctgaaaatacaaaattcagcaatgaatctccttggtcttggctggttcgaagagagagaagggaaagagagggtttctttgatttttggtttatttcttcaatttttcctctaattgattaaaggattttctaattaatcctttgctgaaattaaatggccatgtgtcactcacctaggcagccaccaaaccacctcattaacaaatgactaaaatgcccctaaacttaaaacttaagcatttttaagactaggggtaaaatggtcaaaaaccataaccccgctcaacctcggtattctattttctccaatatacatcccactaagaaataagattctagacttacccatgtgatcaaactagccaatacacttagagtttaataaaatctccggaattg

SEQ ID NO: 343278 - DNA, 580 bp, Cannabis indica
aaaagattttttcaaaaggtaatactttttgaaaccttcaatgagtagcaataaaaagagaattcaatccagggaatgtgaaggttttggacatgttcaatttgaatgtgtaaatactctaaaaaagagtaagaaaagtttcaatgacacatgtagtgatgatgaaactgatagtaataaagaaatttccaataatgttgcactaacctcagtttcttctagtttgttttgtgattttcaagtgaaagaaagaatggtatgtttgaataatatcattaaaaaagaagattctgattctaatgaatctgaaatctatgaagagtctctggctgagtcttacatcatgtatgaaaagtggatacagattacttctaaaaatagatcaatgtttaaaataaataaataattgtctcatcaaattgaatctcttgaattcaaaatagagaatatgagattgttttttatttaaaagatgaaaaaattattctattaaagaaggaacttgaaaattataagaaaaatattcaaatgcttaaccctgaatcttctatttttgagaaagttcagcatgcatgtcaaa

SEQ ID NO: 343279 - DNA, 1632 bp, Cannabis indica
acccgtaccccgtgacccgaaacaggatgcggaactataagcataccgggacccgggaacaagaccaagggactgggacccaatctcattcccggaactagaatctgactaggactaagaccgagacccggaccgggacacgggccgaattaaaactcagatcgggactcaggacacgaacctgaatctagacacggacttggacccaaacctagacgcacaacctggaccaagattagagactcaaacttggaaccaagtcccagacctagattggggaaccaaacttgaaattagaaccgaaatcgggacccaggagtgggattgagacccaagacccgaccccggtttcagtcctcgacccggacccagacccggacatggacacggacacagacacggactaggacccagtatccaaatcggaacgagaccgggaccctagattgggatccgaatctcgacccacgtcccggggcttacgacccaacccgtagtcagtttctcgatcttggaatcgtaccaagaaccaaacctggaaccatttctagaccaagaaccaaatccagactcaaactcgggacccgaaataggaacaagaatcggaatgaggaccttggaactggaattggacctggacccaaaatcagatctagatgcagaaccgaacatgaacccggacccaaactaggatcgataccaagacccaaacctgaacccgaaccgacacttgcgccaggacctgcgacccaaaaccttgaaccttggacccgtgacccaagacctggaccagaacccaaacccataccaaaacctagacataaacccagacccagacccagaccaagacccggacccaaactcagaccgaaaaccggacccagaccttgaccaagagccggactctttccaaaactcagactcgaacccaagacttggatccggaccgagatcaggacaaggacccagacacagactaggaccgagccctgaacctcgactgggaccaaaacttggattgggaccgggacccaggaacgagacccgagacccaagactcaaacctgggacctaagaaccgaatcgtgacctagatgggggactttggccccaaacccgaacctggaccaagacttggacaaaggatccgaacctagatgggggacttggacccaatactgggcctcagaaccggggtctgagacccaaaatttgaccctagactcgagacacaggacccgaccttagacttggaacccaggacctcactaccaggacacaaccccaaactcggacccaaactaaaacttaggactcggcccgggacccgggacccgaactagaacaagactgagatccaagaccgagatctgaatctgaacttgagtcttcaacatgacccataatcagtgtttgaatccaggacccagacccatacccgaactgggatccagacccaatcttggacccagaatcggaatcgaaccaggactgggacgagaacccagacctgggactgtaacaggacccaaacctaaacccaaactcaacctgaacccataccgagacttggacccagactgggacatgtgacctgggacctaaaccaagaccgagacccggacctagacc

SEQ ID NO: 343280 - DNA, 607 bp, Cannabis indica
tagggaagttgcgactggggtcgtgacttccagatggggtagtcgcgacttctggaacccaagaattttcagggcttctgttaaagtccaggtcgcgaccagggtcgcgaccactgggctccagtccgaaaaaaaatttttttttttttctatttctcacgtttttctcaaatataactaaaaagaataatttctggtactaatctaaaaattgaaaatactaaaaatactaaagcatctactaaaaacataatcaaaaagtctgaaaaattgaagaaagcacttgggttgcctcccaagagcgctgtctttatcgtcatatagccggacgctgagctgtgttcttcaaagtggcgccagaatcatggcggacttggcttggtcaaattgaccttccaagtagagctttaaacgttgtccattgactttgaaagttgctggaccatcaccttttaactccaccactccataagaaacaccttgactactgtgaatggccctgaccaccttgacttcaactttccaggaaacaacttcaaccttgaattgaataataacacttgctgcccaggttgaaactccttccttactagaccttggtcattcc

SEQ ID NO: 343281 - DNA, 655 bp, Cannabis indica
catgcaaagagtaaattacctttattcccgagatggttgtatccttcaaaatagaatcactcccgtgggagatgtagaaatcatcgtcaggttttctgacaacatccaggagagttttgaaataattttcagtcgactcctcgaacggaacatcctttttaatttggaaggcaggaatctcgtcccattcagccgacgcccgcgggggatggctgggtagaggcggggagccccggccggaagagaaggttgtagggtgtgttagagcaggagaaagggcaagttgggaagtcgacggcacgctgaggagagaagcaggagtccgagcaagagaagaggatggaagccccgaattatggcccagcgtagtcgccgggaggttctcaggctgagagaaaccttcctgatcaggaggccctagattggaagctcccatcggggccaaccccctaaaattgccttcaccttcactcacgcccgacgagatctcagggagagcattaagtagggccccaatggcatcatcagtggctgagtcatgctgagatgacatgccgagatccgatggagcattttcctcaacccttactcccttacttttcttcgccctgctttttcgtttaggggacttcgacataagcctcttccgacgggc

SEQ ID NO: 343282 - DNA, 461 bp, Cannabis indica
aaattcttcattaaaataaaataaaataaaactagaaaaattattttaatttatgttggtctaaaattaaataaattaattttcaacatatatataattttcctagttaattaaatctcttaaaaaaatatcaaatatttaagtgtcttgaacaaaatcgaacttaaatatcaattttcttatttaattaaatatatctagaaaaataacaaaaaatctacttagaaaatatctatctatgcaattcataaactaattacttattttctaatcaaaatataatatattttaatctatttatttaattaaatcattaatgaaaattacttgatttaggttgatctaaaattaattaacaaattaattttcaacttttatcttattttcaaaattaaaaaatttcgaaatatctttattgagacagtaagtagtcccgtgatccgtaaggggaaacaccgggt

SEQ ID NO: 343283 - DNA, 582 bp, Cannabis indica
ataagtaagatagtataaaaataatttcaagttataatgtagaaataaacaattagcactaagaaattaaatatagtgtttacctgatattccaggaaataaaaaacatttggtggttgttattcatcaatgataacactactgcaaatatcagaattcgtgacggtcctaaaaacgatttttttcagggaccgtcgctaaaaacattaagtaactatttaaaacttttggaaaaaatttagtattactgacggtttaaaatcatagtaaacaaaataggcaacgttttttaataaaatacgattttttaatggacccttataggagacggttgaaaatcatcgcctatactataggcgacgctattaaaccgttgcctatactataggcgacgctgttaaaatcatcacctacttctcgccacatttcccacgtgcctacctactttttttctatttcccacatgcccacctatttcttctccatttcccacaccctaaaacaaaaatcttaactctcccaaaccccacccactgcctccgcaccatcgccctcgtctctcgctgtcttcctccctctctc

SEQ ID NO: 343284 - DNA, 550 bp, Cannabis indica
ttatcccaatttttgcactctgttgtggtatcacacgatggtgacacgcggaatcaactttgagtatatgcttagagaatacagttcgaataggatgcctcgttggcatacccaaagcaaagcgatcagcgatctgcgcagagcaaccaacacttagcgaatccagttttcgtattatgagttatcaacgaaatccatataacttggggatcagattaaagagatatggaatacccacaatcccacaatcagtgtattctgcatctaccccacgatctttgtattctgcatttatcccatgatctttctgtttatatccattgtaacgagaggggaaaaacttcctctccaagttcacagccctataaatagtgatgtatgttcactagccaagggggtcgcaaacagtttagtcgagactttaccctaaagatattatctaagaattctcattcagagatactgctgtaagagctataagaaaaggaacctttctccttgttctttagtcaatacaataatgaggattaggctattaccgaactgctgg

SEQ ID NO: 343285 - DNA, 1208 bp, Cannabis indica
aggtgtgttctgacaggttggcgcggtatagtcacaaccgggtatttcgggccgaaaggggttcgagcccgaaatgcaaatgggattgatttatttggcattattatttatgggtgataatttgaatttttatttgagaataaatgagtaggaaatgactagaatgcccttgtatgtgtgaataggtgaaaattggccctaggggcattttggtcttttgacctttaatgatatactttgataaaaatggatttttaaggaaagaggaaattgattttctggtttctactccctcttacccgtccctctctctctatctctctaaacctattttttcaactttgattttggaaagaaattgcttgaattggagcttcaaatttgtgggtttttgagcttggaattgaagggagttctagctatatttgaggtagttttacagcttttaattttgattgttgttgctgaatttgttggttgagaagcatgttttctaagttttaatgctcttgattgcatgagtgttaatcttgataagtttgagtatcaatttcatgatcttgtggtgatttctattgttgatatttagatgaaattctagggtgcttctaatgattgaatatgctgctggaaaatgttggggttggaggatttaatgtcaagttcatgagcttgaactttgtttgtttaaatgcatgattttgaattgattgtgtaatttgaattttgagagttgttgttgatgttgtttgctctctgttgtgatgatttttatctataagaagttaattttgggtatggtttggttaaggttcaaatatatagaaaagtgggcatttctagaccttaaaatctggttttcttggtttttcgaacccagtggccgcggccaaatttatggtcgtcgcggccataaaacccagcagagagccatctttttttcgattttgttttggccataacttttgactcgggactttattttggacgttctttatattgttggaaagctcgttctgagccctttatgattatctgtattttgaatgccagatttatattttttgaaagtgaaattatggattaaccctatttgtgaaatcccgggttgtgtgactaggattaccggtacctgattaggagcacccagggtttggaatctctgctattacaagacaacaggtaagacagtagtttgcacgtagagt

SEQ ID NO: 343286 - DNA, 451 bp, Cannabis indica
actaatacttttagccacggaccttttaatcacaacataagaataataatttataattagtcacaattttttcacttttagtcacaaattttgttgtgactaaaagtaagattttttatagtgagagtgcagccccaccaatagcagaagagagcttccgtgcaagatatagaaaaactgtcaagcagcgactgaagggagtgaagcgagcccacaaggagatgtaccaacttggtcagccaagaggagcttataggccgaccatggtgagcctataggccagccaagatctgtgcacaagctggctggccagccaagaagtgacttccagacccaaggagacttcgttcgaccaggggaacctgaccttttcaaggaaacaatatacaaagttgttcttaacctgcaaaaggctggcctccacacttaaaggttggccttctcttggtgg

SEQ ID NO: 343287 - DNA, 687 bp, Cannabis indica
caagttagaggttagagtgttcatctttagtctctaatggtgtttttaaatttggagttgtttatgatgttctattgctttatttgagtttatagaggtataagtaggtattctggagattattgtagagtttggggttgaattggggtaaggggaacatttttcgggttccgagctcagaaccagaattccagttcttgggggcctgtagcaaccagtcgaccggttggtaccaggaaccggacttccggttgggaaccggtctgctgattgcggtttttttcccgagccctagtttttccaattgttatgtaatttagggtgtttgcatcctatttatcgatagggttatccttagttttaattttatatccccgatagatgttttagcgtgtctctcattgaattttaaatattatagtttagggccctgtaaagcgtcgagctacattccagtcaggctgaccggcacccctgagcacggagcgaggtaagatagcataaatattacatatatgtgaatgaatgcttatttgtatgtttgcactactaacactaatatgtatgtgttttaagaatgttagtacagtgtagataatcagtagggttacagtaaaaaaggtcgaccctatactagtggatttgggcctcacttattgcaattttgcaattttatcttttctgcat

SEQ ID NO: 343288 - DNA, 772 bp, Cannabis indica
ggcgtcgattcgtttcttgtccatttattgatacggcacattaaatgggtgtcagacgggtactcaaacgttttccacccccttgatgacgatttaatccaaccgttggatctatagaatttgaatggattcccatcccaaccgttcgatggtggctgatcacagctgtctcacctatgttctggcctataaaagccagtcttcttacttcatttggttactttcagcatttcaccaaatttcctcaaagttttccagagagaaaagaaacctcaaacaccatagatttcctgctcttattccttcgtcgttgccagtctaccttttaccggcgatcaacaccaacacccagtttccacactttatgtaagttcttcgtatcttgtatgcttgcttactgtttgtttatatagtaccttttgtgatttctaggttggatgtttgaacttctgggaatttttgtttgagtttctgaataatgcgttagattcctcctcttttgcgtttagattacttcttttcactatgtttttgtcgaggaaccatcttcgtcccacgtaatgacactttagggtttagggcagacctcgtctttttcaattttccccttttttccttttctctctttgcttttttgtaatatcactatctgtgggattcttgcacccgactcttgtcaaggaaaaccttttgaggccttcttttttggcaagtgtccggagggggcctctttttcaatctttcagaaccaaagatgtctacttctgcatcc

SEQ ID NO: 343289 - DNA, 508 bp, Cannabis indica
gagtacttcatggtgaaggatgcgagcattacccgaactcaatttcagcagattctgacatatcaccatcttcccctaactcttgctcttagggatagagctcaaaaacttgctctgttgccgggggaagatcagaatattatccagttgaccttcgatgataatcttgtgaggtacaggctttatcttgaggacgttactcataagtccatggtggggaggaagaggaaatctgatgctggcgaggccaaacgaactcatccggagaatgagttgattcaactgaagcgtgaagctaagttgaaaggaggtgcgcgggccaagcaatatgctcaggagctttcgaatccttaatatgaagctgaggaagagcaggtgactccgctgaagaggaaggagaaactctcagcctcacccaggcctgttgaacatgcaattcgcataagggagcccatttcacctgctcggccatctcctcccgtgtttggaaaagggaaagttgtcatgt

SEQ ID NO: 343290 - DNA, 512 bp, Cannabis indica
aatatctataaataattctccataattaaacataattaactgctaatttccaaattaaactaagcggtctttacaacaagggcgggtgccacaagaatttctggagcaaaaactgtaggagcaccctatcgtctaaactttctaatcacttcttcttgttcgttgattctagtttgcatttctgcaaacccgttttcccaattctgggcttcctgagcagctgcggcagcctgtggcaggttaacatcaccctgaccacgtgccctgcccctaagacctctacctcggcctcgagcatttgggggaaactgagctccctgaccttcatttgatccaaccgagtagccatggctcctggtattttgcctggcatccatctaatctgaacagcctgcgcaaccaaaagctagcatggtcagatcatgatcaacgagaacttactaatgccgcttatttggaaattaaaaacatgcacctattctactatcaggctactaacatgcttcctaaca

SEQ ID NO: 343291 - DNA, 880 bp, Cannabis indica
tcattactcccagtcaacaacagttgtttggtctaatgcatagcaaagcatacatgagacatctcactgttgatcctaaggaattattttcttggcctttatctcttatggaatagttgaaacttttccttagataaaaactatatctagaagccgagaagttccaatagatttccattagaaaaatgctcgagcaacttactaaggtaagttgctcgcactagagtaatttatataaccaggtataccgcaagccacaggtttagataatctcaaacgtataatactaggaataggaagttttattaagtccattgaatagacttattttcaaatctttccttcttgtctttgtaatagaaaactcttggcttctccatatgaatggttttaactataattctcttggctttgcttcttacttccttattctgaccatccattacttgtttaaactgacaatggattttaatcacaagtgtctcccaagtcataatagggtgagttccttgaaaccctcccactacgataaggtaccttgacttactgtctaagaacataaggggtattgtcctcttcggttgtatgaagacagcagtggcagtgggaccatcttatgcagaataagatgataaaacactttggaatcaagaaaaaatctctactttgcttctttattttcagacttagtcatattcttagaaaagtcatatttgttaagacaaacactttcttatcttaataaccatacaatggtccagccctaatcacttagaatagctatcaaacttgcaaatcttagttaacagttctagcttttcttaagttcaccattaggacatccctgaatctagtaatggtttacactaagtacacaacc

SEQ ID NO: 343292 - DNA, 1126 bp, Cannabis indica
catagttaacttgtagaacaatttgttaattgtacaggtgtaattttaattgagttgggaaaatataactggctggaacaggaaatgggacaggtattcgagacatgtgattaatgctcttaatatataccaaatatttacatgtgtgcacaataatgatgtggtagtaatgtgcattaaatattgattccaaatattcaatatatatatatattttttttttgagaaaggtaaacttcattcaaggttaaacaaaagttgtagcccaacatgactgacggataaagaattgcacaatctcactaggaaatgactttaaatattggtcaaccacgccgataaacaaaggagcaaaaagctcaaggctcacgcaggagcatagaaagggataaaaccctccaaaaaaaggcttaaaagccaacgacactaaggacatagagtgcacaacaccaaacaaactaaaataaacaaacctaaccaacaagggacaaaaaacactttaaagatcttccccctaacacacatgaggctacacaaaaacctgaagcaagcagaccaaaagcaagcgagcactgccatcttccgactagagatgtccacactcggcttcctaatgtggttctgaacggtgaagttgaagggataaggaaagcacatccctttgggtagagcccgattcccccacctctacatcaatggaactccgaagactcaacacgagtcaatgtgcaacagagccatgacgcctgaatagtaacccaatagaatatgtcgagatctaaaagaaatagaagagaagcagcactccaaggcccaaggtcacacctgaaaagggcctttgcaaaaagccatcctaaaaaatgaaggagagaaaatcaagagaagcccaccaccaacgccacattgcaacccaaagggacagacccatctgcaacctcgaccaaaggcgagggatgcctcaaccgaagtgcccaaccacaaaggacagtggccactcgcctagaaatcgaggcatctcgaatccggccccagggagctaagcccgacgctgaccagattcacccgtcgctgaaacccacaaatggagacctccaccttcgaacgagagtagccagaagcaaggctc

SEQ ID NO: 343293 - DNA, 561 bp, Cannabis indica
cttgttggctgctcttttgctcgatcatgttggcatcattcttgtgttgatattggtagctggatggagacggctttctcttcctggtggtacaatatgtcgcacgttagtgaacctatgttagaagaggctgctatggttgcttggggcgtttggcgagctagaaatgatgtcgtttggaatcagaattcttcaaacgctgctggtgttgttctctcggcaaggcgtgctcttgatcattatcagtttgctcaagctacgaaaaatgattctttattgttttttcgtagtgatgatagagttgttgagaattggaatactcctaattttaactagatcaaggtcaatgtcgatggtgcaatttttgagcagtgggggcgttatggtgttggttgtacagcccgtgatcatgaaggaaaaattgtggctgctttcaacaagtcttttgaaggtcgggttcagcctgagatggctgaaatcgttggcttcaatgcctgagatggtgtttatcaaggagggttttctgtctcctgagttagttgccattgctttggctgattt

SEQ ID NO: 343294 - DNA, 752 bp, Cannabis indica
gtttccttcaatccccgcagtcgttttatcaactcagttagggtaatggtcatccgtggtagctcctcttctccccgcggggcgtgcggctgccctgccttgcccatactcatcattaccgtccctcgggagttcctttcgttggccgagcggttgtcagttctattatgaggccgtgcagctggtgtccggctcttagattcgaaaaggaaagtatctcctgatgccaaagtttcaagcgacacttcctcattgtgccgcttctcttctacttccaaggccacatatcctcttgccatagttagggccctcgtgagggacaagccaggctccactatgatcgccttctttaattctgaaccatgtatcaatccctgcattaatgcttttatcgccactgaatcggtgcattttgggatactgacgtattcctcgctaaacttgttgatgaaatgttccagaggttcatcgaggcgctggtgtattaacattaagtccgtatccaccttggcggttcgcacacttatcgcgaaattggcctggaatcttaggatgagatcctggtaagaatttactatgcctgatggtaggttgtggaaccaacgtagagcgggccctctcaatccttgcgtgaaggtttcgcacttgatcgcctccaagtcctctagtgggacggagacagttaacattttttgctcaaattgacatgcgtattccgaggggtctcctgtcccattatactctggtaattt

SEQ ID NO: 343295 - DNA, 617 bp, Cannabis indica
gttagtttttacagtttttatttttggattcattgctgaaatcagctatggaaagagcatgattatgtgttgatcttgttgttaatgcatgtatggaagaatagtgatgtttttgtgggatttaagggttaattccttgagcttgttgtgattttgttgttgagccttagatgaaatgattagggtatttttcttacttaaattcaggtttaaatttgatggttgctgctggaaattgatagaattaggtgagttgaagttgaagttcttgagcttgatgtttgcttagttgaagcatgaagtttgtgatttatatgcaatctgaattgagaaattattgttggattttgatgcatgtttaggtgttttaaactccccaatgtttgttatcaattgaatgttataaattggaagttttgtttatgagttgggatgaattggattgagttttgagctgaaaattgtgcttgaaggtggctgattctgggttttcaacctaggtgtcgcggcatgctctgagcatgccgcgacccgcccttgtgtttttgggcagtttcgagttgaatttcgaaaatgcgtaacttttgattccgaattccgttttgggagttctttat

SEQ ID NO: 343296 - DNA, 968 bp, Cannabis indica
ccatttggggaattgacttgatcagataattatccaaaggcaaaggaggagtgtagtatgcagtggtagcggttgattacttcactaagtggacagaagctgaaccactcacaaccattacatcaaagaacgttcaagactttattgggaagaacataatctgctggttcagactgccgtacaaaatagtttcagataatggcaagcagttcgacaaccaaaccttcactgtcttttgtgcgaaccattgtatcatcaaaagtttcttcgcagtggcacatcctcaagcgaatggccaagttgaagcagtcaacaagaccttgaaggatacactgaagaaaaaactcgaagatggcaatggaaattggccagaagaacttcctgaagttctatggtcatatcagacaactgagaaaacgacaaccggacagacacaattcactatggcgtacggatatgaagttatgctgcctatagaactcgagccaccatcccacaaaagattgatgtgcaatgaagataccaatcacatactcctagccgaatcacttgatgaaatcaaagagagacgagccactccgaacttgaagttgatggcccatcaacaaaaagtagctcgatatttcaacaagcaagtgaaggcaaggaagttcttcgtgggagatatggtcctaagaagggtatttttaaacaccaaagacagtacgacggatgtacttggacctaactgggaaggaccgtatcaagtggttgaagttctcgaatccggggcatacaaattaggtaagtatgatgaaaatattgaatgaacatttaagaaaatactaccaataaagtaccaggtcggacgaccacactaagtactgaatgaagatttactcttaagtgaatggcctgttgggtggactacgctcaaaggttttgacagaaggaaaaaagtactcaggtcagatgaccaccatttaaag

SEQ ID NO: 343297 - DNA, 530 bp, Cannabis indica
aataaataattacttaaaaatatgattagtatgattctaatgtatagttaattataaatatattatcttattttatattattataaataatttatttattaaaaaataaatatacaattttattaattattatttataattatttattaagaaatttaaaatttattatatgtagtattttaaattgctttgttgaaagaaattatttttataaaaataaataaataaagtggtatagaaaaaatttcggtattttccataaagtattattttcatatcttgatcattcaaaactattgttattattgtatctcacttgttgtcttattgtatctcactttttcatcaccgtatctcagccgttgtcatcactgtatcgtattccttgtcattaccgtagttcacttgtagtcgtcactgttgtatttcccaaatttatatcttaatcttaaatttcatctcgagttttaaatatttttttatatttttaagatgtacattaaagaaaattcattagtttgttcttttat

SEQ ID NO: 343298 - DNA, 1029 bp, Cannabis indica
ccaaaaaaaaatatttctcttttaaaattatacaatttttttttactaattttcaaaaataccataattttttctaaatagggtcccaaaataaattttttttctatggcccactaaaagttagggccggccctgattcttatatattaagttatgtatgagtgattagtttttaaatagtattaatatatgtttaaagtatatatgagtctacatagatttttgtattattttttgatggttttgatgctttttacggcttatgtgtattttatggtttttgtgccagttattatggcttgttcttaattggttaaggtagttgttgtggtagggtcaatgggcaagagaagtgatcatttttgtgctcatgatttctacttcagcgatcttttcacttttaacatataagtatttcaagtctttttgagtccttatagttaatatggattgatttagcatcgttctttcacattatattttttctattatattgtgtagcaatagagttttatttttgttattttgtaggttgtctcctacaattacagagaatttactgataagtttaattttaaatttaatctatttaatatggattttcagcagttttgattagggtgctagtttgttgttgctaaccaaagggtaatacctttggctagttttacttataaattttgttagttttttagtttttttagtaaagttaagctaatgatatgggttgtgtgttaaattttgagtttatttattaattttattttgaagattgtcattctaatattactgtattttttagtttggcttgcaatattttttcagtttcgctagctttggtgacaactattattattgggaatgtgtttttcatatgatggggtgctgattgaagaagttatagatttattgtctaactttttggggacagttttgtcccatgtggctcgcaataagaattctccagctcatggtttggcaaaacatacccttcggttagacaatgagctatcctggttcgagaagatt

SEQ ID NO: 343299 - DNA, 710 bp, Cannabis indica
ttttaatttttttaatataatacgtgggctaataaaattgtgccatatatatactgtgtccacgtggacaatctaacatggcagtttacagctaaatttggatggaagttgtaatttgctaacggaattgtagtttagggggttaattgtaagtaaaatgaaactattgagggttttgctgcaattaaccctttaaaagcaactaattgatattttcttcatatcaaaagaaattaaatggttacttttttcaaatctcctaaaaaacaaaaatttttgaaaatgaaaattttccattttcggtaattattttgaatttcagtatgtatgctaacgtagcatatcggtatttgtacaaatgattttcttaaagatatttttataaataagatcaatttttagtataatattgaaaaaaccctttaataatttttaggagtattttcattaatatatttattttcttatcccgtacatatattttcctagaaagaacgagtaactaaccaaatctcaattgcacactaagggtgttcataaaatagccgatctaatcaatccgcacaatctaatccgcaaagtacggatatccgtacttgtgcggattgaatattgattaacatgtaaaagtaaccgatccaatccaatccacacatatttataaaaaaaattaaaaaattatatatgcaaataacatattaatataaaga

SEQ ID NO: 343300 - DNA, 633 bp, Cannabis indica
attgcttgggtactgagggagctagacagatgttccaccagagggagcttttggatggccaggcttaagctcaacttctgctctctgaatggcctcttcaagcttgatgaagcgatctgcacgatcaaggaagtcactcatggaatataccggtctgtctcttttgatatccttccaaagttctccgagaacttcaatgccctctagtatcacggtcaatttcccttcttcggtcaaccgtacaaccttcgttgcctccatcatgaatctgctgatataagcttggagaggttctcctggcctttgattcacttcgaccaggtcttccaaatgcaatgggagttggcaagaagaagagaattttgcatgaaattctgaggagaaagccttccaagagttgaatcttctaggtgtcaacttgaaatactattgttgggcggcttctgagagggtggcaagaaaaactctgtaacatacatctcctcatactccttgtaggtccatttgcatttcaaaatacttaacatgtgataagggatcttccttcccagtatacatcttccaggttggcatcatgaacttatgaggcaactctaggacattgatctctggggagaaaggggttccacgtgc

SEQ ID NO: 343301 - DNA, 725 bp, Cannabis indica
tgttttaaattaaatatgggatgcttgacctagtttggagttgttgggagttaggttatgttcgatttcttaactagggttttaatccggaatttcgagttaaggtatttattgtgtttcaattgtcgtgacataggaccggattgcctagcttgttttccactcaggtcggcccgtactcttgacttctgaactaaggtaagaaaagtggtaagcaccgtatgtggttaaagattaatggttgaatggaagtggccttgattattatcaagactttgattaaatatttattaagcctaggttatgacctagggttggaaacggttattaccgttacgagtaattactcttgaaaccgcggttaggtttcttacttatcgtttgctttatcgggcaacgatagtgacatattcagctcgtgggtgacgagtggtaaaggggtactttataaagtaccaagaatgtgtaatgtttaaaggaatgctttatgatattgtgtaatgagtaaacatgatgacatgagattaaattgataatcattttctttcagttattgttatggtcacttttcttgctgagtctctgtgactcacgggtgctttatggtgcaggtaaagggaaggcaaaggttgagcaaccatgagtttgtggtcgcagcagcaatgtacataccagccgcagtggcacggcccagtaaacaggatgctctattttgattgtatttt

SEQ ID NO: 343302 - DNA, 1233 bp, Cannabis indica
agtttcctattttgttggtagtttcctatttcctagtctcctagctttgtatataaatatgtactattctatgaaatatacacacaattcgaatcactattagggggagtgttagaatattagctgtataaaggaggcactattgttagtgtgatgagtggcaaagtttcaaatgacatttttctctaaggctcgcctccaaaatcaatggaaggcatagataggccaattaattgttttatggccgaggtacagggacaacaaagtgaaggttttttttcttagaattttagaaatctttccaagcagtagtaaattgaaaacagagatatgaaggctatttactctgggtcaagcaagaagcactagtggaagtacctgtagattgatctggttatatttgtgtttattggtaaagacagagtccagacaaaaatttccgaatcttgcagaaataattgtaggagatgactcctcgattccatccttcaataaatgaaataaaaagtcatcttgtcaaggaaaattatacatgcatattgaactattccacttgtctgaaataatgcatatatatttgtatcaatattatggcaatatcagagagaaaagcagcagaataaaatgcaagaactggaaatggagaatcaaatacagcccatttagttaacttgcaaatcacataatgggcacattcacatacttgtttttcttgttcaagcaggtgaatgttaaattgaggaacccttagttgaatcttttcacatgcttgaaatcctttctctactttctggcttttagaaaactcacaaaaccgcagaactcgggtaggaccatctgtatatacttcataccctacttttgccatgtcgatgctgtcaaggtcaccagaacttggcatgctattttctgatatttcttcggtaagaaaatgatgagccagccccctatgcctgaccttgtggaaaggcttccatgcccgcaccttatccaagttaatatcccgaggtaaagaactatctatgaggaaaattaacatagccagttaagtaatgcttgcggtaaacaataaaattgacactagtatctatcaatttaaaaagaaaaacaagataattttgtaacattgtgcatgcctgtatgcatttcatttctatgtgcatgcctgtatgcatttcctaaatttttaacgcaaaacaataatttgcatatagacaaactcagttatagagc

SEQ ID NO: 343303 - DNA, 507 bp, Cannabis indica
taatgttacaattagattttcactctctcatacctatctcattccttaaaatagagtagtgacagagtttgaaagttatcttttcgccactactatttttctccatcgataaagatgagttattttctttgcatcaattcctaaaattgatgaagatttggaaactaaaatagttttttgaggtgaaattgatggaaaataaactatttgttttttctatttgtgctagatttagaatgtagatgttctctgaattgagggagatctttgaattttaaaaatagcatatgctgcttaaaccccccaaagggcttggggatttctgatttgttgtttgataacgtatctttttagaattcaacttcaccatgctcaaattttttatatttatggccacttttaagggttatataatacgaaaggttgaggaagttgaccctattaaacaaggtgattcccttaagggtctgtttggaaacaattgtgtaattgttgggttttatgccc

SEQ ID NO: 343304 - DNA, 487 bp, Cannabis indica
ccacttgaaagtaggatcatctgtattagaacatatggatgtacaatcatgggtggatatgagttatcgttaaattcataaaacgatcaccctagattttaccttaggccaagaaatttgaaatgtttgagaaattttaagaatttctagcaatgttgaataacattaaggtaagtggtaaaagatcttgcgaactgataggggtagagaaatatttggtggatatgcagttcaaagatcattaagttgaattttgaattgtatcaaaacttgcctccctagaattttcgattacatattgatgaaattaaattgtctatgattagttactaaagttgcctaagtccttctaggggaataccctagtgataggaaaattttagaaaatgggtgtcttgatcgtgaccttaaaaaaagctagaactgttaactaatgtttgcatatttgatagctattctaagtgattaggggtggaccatcctatgg

SEQ ID NO: 343305 - DNA, 685 bp, Cannabis indica
attattacacccataactttaattaataaaaaatagtaagaatgacctctaattaaatgtaattctacactcaatattattataaatactttaagtgctaaataagtgtgtcgtaattagtttaagtgatttaattttttaaaaaaaaaataaaaaataaaatataataacaattataaaatgaaagataatttttttaccgcactcaacacaactgtacttcattccaccatctgtcatgtagttttattttcttagagaggcaaagctgctttattcttccttctttgcagttttatatatattgtatatgtatcaattgatcggagtgaaataataaaaaaagaaaaaattgtaaatgtttgaaaattattaatccttatttgatcttgaatatagattattgaaaggttggaaagttattaatgttatcagttattgatttggattacatattattaaaaaagtttaaaaattaataattgttattagttattgatcttgaatatgtattattgaaaatttgaaagttattaattgttattggttataaatcttgaatgttcttgataaacttagcaagaaggggtagaagtttaatttttataaaataataaaattttattatatatattataattaaatggattaactgttaaaaaaaatataatagagacttaaatat

SEQ ID NO: 343306 - DNA, 565 bp, Cannabis indica
ttgccaaagagttgttgaaagatatagaagcaatctgcagatcttttttatggaaaggcactcatgaatgctcgggtccaggattagtagcttgggaaagcatttgtcaaactaaatctgaaggtggtctcgggtttagaaacatcagaaattggaatgtagcagccatgggaaggtatgtttgggatattgcaagtaaaaaagattgtttgtttgtgaaatggattaataatgtatatctgaaaaatggtagctggtgggactatgaaccaccttctgattgttgttggtcatggaggaaaattgttggggtgaaaaacaaattgaagcaaaagatcaatgctgctggttttgtacagcagaggtacaaaattcagttgacatatcagcttctttttgacaatagggatcgcgtttcttggtccaaaaatgtttgggatagattcattattcctaaacatagatttattttgtggcttgtgttctggggaagattaaacactaaggagaggatagggaaatataatacagccattgatttaacatgtttgctttgtggacaaga

SEQ ID NO: 343307 - DNA, 796 bp, Cannabis indica
tgtttttttttatatttagaaaattggccttttggccgagacaatggtttgctccttgtggtattattttctgtaaagacaattttacaatgtttgatggccaactttgcttttctatctatctttgttttataatgcctcgtaccttatacttgaatttaatatatttgttcattgcgtttttatgcacaatctaaacaattatattttgatccaacttaagatatttttagaaagcatttccattgatctcacttttcctttgatattctttaagtagtgattaatctactatgtatgtatgcgagcaattataatttgcatataatttcaattcgagagcagttctgatatgctttattttatgcgagcagttatgatctgccttgttatacacaattagtttataatctaccaaacattgtgtaaacagttttagtttgccgaatataacatatttatatttaaagcaaacttaaaaaaatatttcgaataattcactccaggaactattttgtattttttcaattactcatatgaatagttaggccttctattcatattttaggtttagtattattttaagacatttctatgccttgtttataatacatgccttaataatgcaagttgttaactattgagcttcgcgtgtagctttaggttgttttatgagttaatctcatttactactactacttcgattttcctttctaaagaaaaggttcaatttttaatcaattattttttaaaatgggtgggtttgcaacatattgtaattctagataaattctag

SEQ ID NO: 343308 - DNA, 444 bp, Cannabis indica
agaattcttagtttatgaaaaatgattggatgactttttttaaaataaaaagaaataacaaattattagatgttgctatcaaacctaaatataattaatccactaaaatattgcaattaataataaatttattcatattgtttattttttattaaaagttattttcaaattttgatatttaaaattagttaaattttaaatattattttaaaataaatttggatgtggaaagctacaaattaaatgtatctaatcgcatatatttatgatcacataaacaacaatctacgatcaaatgtaataatagtggaaacttacaaaaaaaataatttttaactaaatcaaatcctcaatgatcataatagtgatttattgttatgagtaatttgcgacaaaaatatttaagttttactccaagtagcagataaatacttaagtcatatt

SEQ ID NO: 343309 - DNA, 709 bp, Cannabis indica
tcaaccacttgaagcctggctcacagaaatagaagtaccccgaccttccttgtttgggggtggacttcaaatcgaacaaccagacaacctcgtgaggagaaggagtaccccatccttgggaagcgtagaggacaaagagggcagtcaaatacttaatgcccttaggagtgaattgggtcgggcagagaccgaagaagtctgccacatccttgaagtacttatgcaagggcatcaacgctccttgctgaccattggctcccgaccaggcgcacatccccttgtcagggtttgtggcacgattattgtgggcgagaatggagcagtcctgcttgcccaagtatcggccctggtcaagagtttacaggcgcacctccgtaatcttggacggaggacttacacatctggcacccaatgcaccttgccttttatgaggaaccgctgctgcaagctcctcactgacgtagtctgcaccctcaaccgggatgtatccatcagcatcgactggttccccagcctcgttgtgccccccgtaatttgggtgctcaacctcttcctgttgggttttgtgccctaaataaaaccctttaaaatctgattagttatgaatataagaaatttgaagtgatttcaatttgcctgaattttacatgcttattgtttaatatgtttattatgtttatacacaaaatctgttaagtccagatcatat

SEQ ID NO: 343310 - DNA, 600 bp, Cannabis indica
tgacttcacatccatttgatacaatttgatatcaagaacacaagaaatacacaatagcaaacgaatagattctaatcttgctattggagcaaaggtttcaacaaagttaataccttctacctgtgtatagccttgtgccacaaattgagcgttgttcctcacaattgtactgaattcatcatttttatttttaaagatccactttgttcaattcacattgatatctgttggtcttcgaaccaaaatcttgttagattttctgccctaaataaaactcattttaataaaatcagatttactaattaacataatatcaaaaattgcatttatgttgtatggttcacgtgatttatttcatgattatatttaatgtataaattttattaagtccacaacatgcacatatatttgttcatgattatagtgtcctcagaacagtagaatataatcaagattatatgttcagaagtttaattcccataatttttaagttcaccggatttagaatgacatgataatcggcgataaggtatacttaaaccttagataagtattatgtctttttaggaaattggcaaactttaccagtatcggatgtat

SEQ ID NO: 343311 - DNA, 559 bp, Cannabis indica
atcacaactatttaataatgatccaatggctaaaaaaaatgtaaccatgatagttacataaaaatgtaaccattgtatctcataagagacccaattttatttttctgtgtgaaataaaatgtcaaaaattaaaagttgatgggcttgcaagattattgggttttgagggtgtttttattgttgatgcaattgggttagctggtgggcttgctctcttgtggaagaataaagaagatgggagtttgatgggttattctaataaccatattgacattgttgttcacactactcaatttggtaactggaggcttactgggctctatggagaacccaaccggagtcggcgccaagatacttagaatttgattcgaaccttgtctacacgttcggaccttccttggtgtcttattggtgacatgaacaatattgttcggcaagaagagaagagagggggtcggccatatcctcaaagcttactttcgggattcaatgcgactttacagcaatgcaacttggttgatattgatcttcaaggccacccgttcacttgggaaaaggg

SEQ ID NO: 343312 - DNA, 472 bp, Cannabis indica
agaatgcatttttatttttcaaaaacaaaaattttaaaaataaaaattttaatttcattttgcattttttgcaagatgtaatatttaaatttagagatgtaaggtggcatttgttagagcaattcaataaggggaatctcatctcacaactttttatactctcactcaatttagagtaatttgcggcataaatacttaagttttatgctcagtagcagataaataccaaagtcctatttttggctataaaaataccttttgtcactactttgaaacttccgtaagtacctctccgttttctgtcttgtaatgtgccagatgacatgccatgtcattaaaaataaatgccacatcatttccatcattaacaataaattattatatatgtcaagtagatgtatatgtggcaatatttaattggcccatgttatttaaaaaaacattttaaataaaaattttattaaaaaaatta

SEQ ID NO: 343313 - DNA, 584 bp, Cannabis indica
attttctttgaagaaacctttccctaatttggggttcttacttattaaaaatcggtatctttactcggttaggatatatcgttttaagttttatttcagaaaaaaatgtccttagtaaaaactcaatatctctctcaattttgatccattttaaaagatttttatctcgttttaaagcttaagaagagagctacatttttcatgaaggaaaagttgtctgaatcagggtgtaactatatttaaaattattattttagactgtatccataaatcaacatgatccaagattttaaagaaactgttttaataaaatatccataaatcttagattataactttgattttgatgatctctataccgttagaaaggtctttcgattatctaaaaattttgtgaatagtataatttctaattcaaaggttttatgagtcaaattttgagctaaacttgttgtatagtaagaattataaatatattgagtttatcggtggtctaagggttcgccaattgttgatagggcctagaagatatcgtaagagttaattacaacagagttgaggtaagaaaaaatagttatacttta

SEQ ID NO: 343314 - DNA, 549 bp, Cannabis indica
taggtattattaccgctaaaaataatctaaaaataatctagctatttatttgtaactgaaagttaaacttagatatttatactgcaaactactttcagtattaactaagcaatatagtcgtggtgagtttaattttttttagtattttaataaaaataattatttattaatataataaataataacataaaaaattaattataatatatattaagggacacgattttgtctcatgatgtactttcacggaatgtattttgtggtacattaaatgagtctcagtgtacattaaatgggtgtcaggatacgtttctactttttaaccctaattacccctagattaatctcagccatcagatcaaataactctctcatctgacatctgtcgtacatcacggactacaatccgtgaaagtgcaataacggaacaaaatcatatccctatacattaatattaaaattatattatctaattacatgttattattaaaagaaaattatctattaaaaataaaagggaaaaaaacaggaaaattccaaaaagggtaa

SEQ ID NO: 343315 - DNA, 556 bp, Cannabis indica
gtgtcgatggattggtttggtctgtaccaagatccacttgctccccctatggtctatatgattgtggagggtctatttttacaagtacccctgtaatcaacaaccccagcgagttaagcaccaataccacacttatgcacttattgccttaaaccctaactcaactatttcattttaattaaataaacatttatcatataacattctaagcatggcatcatatatcacataaatacgctagatgctcacctactgcctaaaatggaaagcggtaaataaataatcatatcagcagtaaaatgtttactctcaacacttactgctccacaagctgagcttgtctctgacgatgattgtacatgttcggtcggtctacaggaagtttaaaaactttggtgctctgataccaaactgtaaagccctaacaattaggcacgctacgctaaccaataaataaaccctattcccctaatccaagattactagatagataagcacgggaaaatttaaacttttatctaaaacagaataaaaattaaacttgtaataactttaa

SEQ ID NO: 343316 - DNA, 833 bp, Cannabis indica
attatgatttgttagagtttagtttaagtgattttaatggttgtggtgctgaaattggagaattgagtgttagaattcaatttctaggttctaacatggtgacttggacaaattgatgaattgaggtgatctgatgctttgtgaatgttgtatatatgttgtgtacttatactggagttgttggacaggtttgaagagagtttggttcgaatttggggaagaactcgaaaatttcctggtttgccagaaccggtcgaccggttggttctggtgtaccagaaccggtcgaccggttgcaagcaggggaaatttttctgtgttttcctcggaatttgatttttggctcagggttgtacccagtatccattttaggctatttgagtattgtttggcttactttggagctaatggaagttaagtttggtccggttatgaaaactagggttagttttcagagttttggtttagggtatttattagtttttgttgtcgtgacataggacccaggattgccaagctttgattccatttagaagggatgcacactaaacttctggactgaggtaagaaaagtattaaatactgtataaggttaatgttatgattgttacagtttcgattaagattgaaatcttgttatacgttgttgtggcttaatcctaatcgaggttaacgatatgtaatggatttgactcgattatgatcgagggaagtattatgaaacgattattatcgtttgactcgattatgatcgaggggaaaatattatgaaacgattattatcgtttgactcgattatgatcgagggaagtattatgaaacgattattatcg

SEQ ID NO: 343317 - DNA, 1515 bp, Cannabis indica
ccaaccacaacactgaaatggactaaaattagaaaatgaagtgttcgggaatcctgccaggttttagaggtctggcaaaatcggctagccgattgcaccagttatccccaaactcttcacctcttgctcaattttccaccaaattctaccaaactttccagagtacctaaacaatgcataaacaatattttccaactagtatttcacagaaaaacccaatgaatcaatttatgccattagagttcaaagcttaaacttgcacaacaaccaaaccaaccattactaccagctgctagaacctaaaatcaactcaaattaagcctagaatttgaaccctatgcatacctaaacctaacagccactaattctcaaaatcataaactcaaaccaagcaaaaacttaaaaactagagaagggttctactagggcttaccttagcttgattctcccaagatttccttgctgaaatcaccacaaatcagcagcaatcccccttgttcttgctggtttcgaagagagagagaaaagaaagagagcttcctcttaatttttggtatttttccttaattttcctctttctttctaaatgattaagggttaattcacttaacctaggcagaaaaaaaatacttgcaaggtgtcacaaggttgggcagccacctaacactctattaaaccaaaagactaaattacccttgatccaaaactagggtatttcaaaagctaggggtaaaatggtcaaattccataaccccgctaaaccccgatattttattttctctaaaatatttcccaccaagaaataaggttctaaacttacccatgtgatcaaactagccatccatcacattttccgttgtcgccgagcaaaaattacaaaaataatatttttcacatataagacaaataatacccctagagtttaattaactattcagaattgagaaattataactctaatattcatttctaaatattggggtccacaaataattaatttcataaaataacataaattagtgttaattgcctttactaatccaaattactaaagcggtcattacaactaatgatcatcattgtcgtataataaactcttttcatggtaaacgacatgttaatgaaagatctttattacatatcgatctagtcatgcataatctaattatacacaacacctttactacatgtccatctacatatgtgatccgaattaaaatcacacacactagaagtatagtgtatagtaaactgtacttagcaattccatattaaagattctcaatactttaaaacactaccgacttattttattcatatcgtacaatcttaattctcttgtacatccttacaagattatacattctccatacgaataggaaattttcagatatttaataattatacttttataattaatataccatttatcttataattgtatttcatatgttctataatatattattcattaagtacttgcttttaggacataaatgttggattttgtgccct

SEQ ID NO: 343318 - DNA, 723 bp, Cannabis indica
caatattaagttaaaaaaaataatttaattaattttttataaaagaaatcgaaaatattttaaaatttttaattttgtatgatatctattctatataaagtgtgcctatataactgaattcttggtttatgagaaattcatgggtaattttttatttttatttaataaaataataaaatattatttatatataataaaataataaaataaaaataaaacaacctccttttaactttcaaattcctaatttatcttcatctataattttctttttttaaaatctcaaaccgtatatctctcgtagcaaataattgagaggttatggagacggccgcgtgaaataataatgggagaagaagtaaagcttctgggattttggacaagcccatatagtcaaagagtgatatgggcactgaacctgaagggagttgagtatgaatacatagaagaagatatttcaaacaagagtgaattgcttcttcaatacaatccagttcacaagaagatccctgtgcttgttcatggtggcaaacccatttgtgagtctctggttattcttgagtacatcgaagaaacttggcctcaaactcctctcttgcctaaagacccttatgaaagagctttggcacgattttgcatgcaatttgctgttgaaaaggtaattattattattcttttaacaaacaaatacaaacagaattccttcattttcaacagcaaaag

SEQ ID NO: 343319 - DNA, 1003 bp, Cannabis indica
gaatgtgaaagagctttccaagatctaaaggcacagctcgcaaaacctcccgtactttctaaacctctggacggtgaggagctggggggcaacacctacatgccacgatcaagttcggattcaaggcctctaacaacgaaggagaatacggggctctaatcgttggacttaagctagccctggaaatgaaggccgaacacattgaaatctgcagtgattcacagctggtggtaaatcatgtattcaacgaatacgaggctcgaggaggaaagatgatagcatatctaagcaaaatacacgacctgctcgcacaattcaaaagctacagtctcagacaaattccaagagaggaaaatacaacagcagacgcattagctcgattggcaagcagcaatgtaagtgacaaggcaaacttggttcctatcccattccttgaagagcctagcatcactggcacggaagaaatcgaaatgatcgacacatccccaaactagatgacaccaatagcagcctacctcaactgtggggaactcccaaataaccgaaatgaagctcagaaaatgagaaggaaggcagcacggtacatcatagtagaagggttcatgtacagaaaaggattctcgatgccattactcagatgtgtcacacaagatgaagctgcacgactcctatttgaagttcacgacggattctgtggaaatcacgccgcgaaacagagattatccaagaaaattctaaggcaaggctacttttggccaacaataattgaagattcgagagcctatgttaagaagttcgacaaatgccagcgattttcaaagataccaagagctctgcccaacgagctgacatagatgcaaagtgcgtggccctttgccatttaggtaattgacctaatcgggcagttacctaaaggtaaaggcagagtgcagtatgtagtggtagcagtcgactactttactaagtggactgaagccgaaccacttgccaccattacatcaaa

SEQ ID NO: 343320 - DNA, 644 bp, Cannabis indica
tctggtttcaattttaaaggtatgaagtttagctcggtatcgaacaatgtgtagtgctctactcctctcttaagagttccgcaatttcgatcagcattttgtaggtttgtttctttatttcacagttacttaagatttgccatctatgaattttttttcttcaaatttataaatgtttaaattaatcattatataagttcatttctagacgagactctgtgccttgctttacttatttttgatctctctactgctcattttgtcattttttcttcacttgagtattactgcaaaaaaaaatatttgttttgatctttctctgtgatttcatttttcttgattttcatgtggtgtttatcattaccatatacacaaaagagacaaaactatggttagtaaaatttttatatgtacttttataatattcttaataagtgcgcctatgtgtttgtaacatagttcaaattaaaatacaagcttgataaatgtagtttatgactagctttttaattttaaagtaatatatgtgtatatatatactagtatattgttacgtgtgatgcacgtatgctatgttttatattaattattatattatgagttcggaaggaaataaatgaatcaaaaataaataatatttaatt

SEQ ID NO: 343321 - DNA, 590 bp, Cannabis indica
aactgtaggaatttttattcctatattgcccctacacacagcaatagattaatcaaaagcccaggtcaaattcgaccttttaccaatcaaagaccctatgctgactcctaatattaaaccaacaaaaaagacagcccctttcccattactacaggtcgtttatatcactcaagaaaaccttaaaaaacagttgacatatatgttcatcttttcattcaaacacacaacccagccacaaatataacctagccgtgagcctccttcttcaatgttcttctctgaagaacatgaagagcaccaacccagaaataaagcaacccaaaaaaatcagagaacaaaatcccctagcccagttcgaatctaaccccaaacaaagccttcctcttcgtggttcttcattgaagaacacaaagacaacaacaacaaaaataccaaggaaaactagaaattaaaagccttcccaaacaaattcaataccccagaaaaacacataaacaatatatataaacacagtattatgaatcgaaaagaaaaataggagaagaagataccagatttttgttggaatttactttaccaggatcttagat

SEQ ID NO: 343322 - DNA, 495 bp, Cannabis indica
atatatatatacaagaggagtgatatcaccaagtcatgacttcaccaataaaatttgctttccaagccatgggttgttctgcacttataaaaggccccttaaacgatttaagttaattctaccaacacatttcttatccagaaaaatatattgtatatccactttagttttttttattttaatttttacatttatttttatattttttaagatatatttacttttatatatgatatcattctttaaattaatgtaaattatatattaaatttaagtagaaagtaagagtatattgaacaacttactcgtaaaagtgaatatattttaataaaatataatataataatagttttgattaataaatataaaaaaatatatttttcaacttattcctttcttaccatgctcatttttggacattgcatattgattagtactttgatagtgccatagcagcggttgggtagtaatgaaatgttttttatttttattttt

SEQ ID NO: 343323 - DNA, 753 bp, Cannabis indica
atcacactaccttatttgagtgggataattttaaaattctttacccatcttcatttggttgatacgtgtgaacaccattgataaagtaaactaaccattcatatggatagaaatgacttatcagtattatgaaaatagtattcttgcatagtctattcgaatgacttgggcaagaattcctaatcctcataaataatgtggttattttacactcaatctaaaatactaggatgctgtgttgatgacttagtctagaaacttatagttttaaactaagataatatgtcacaacaagatatccctcaaaacaatagtaagaggttaagtatacttttatgtatgaatttaatcagactcctactgttgaatgggagccatctgagatataatcaaaacaaggaacattaagggatagtcaagaaagatttatgaatgtgacctatatgttatatataaggatgtatatatattagtagtccttatatctacaccaactcataaaattcgagatggtgattactctgggggtggaggtattattctggaagagtgtaaaaactcatatataataattcaagcttcatcagtgaagatacataactttacaaattcgtaatatcagaaagttattcaactgaagagaattctacactgtactatctctatttcattctttaatagaatgagagagatatcttctgttttttttttacagatgtccttaataagcagtaaagatttcagtatcccttg

SEQ ID NO: 343324 - DNA, 581 bp, Cannabis indica
acttttagctataaataaaagtacaaccttaaccaaatggaaccataatattacttgattgactgtttcattgatatttgttcagaaatttattaagtctagaaattctgaagttctttggtccaagtcaatgtcaaagaaactttgcccactcatgtgttagtttctaacacatcttaaattttagagtacaatttactcaaatatttttgacgagtacactttagtcaaaaaatttccaacagttatagtagcgtttaataatatttttttaatcagtttttgaaagtgaaaaagtgaaaatattattagaaaatatgttctataaaactgtttttactttttaattttataattaaaaataatttttttttaaaaaaaatcattttcattattttttaaacagttttttttttcttaatcaatcttttggattactaccagacccggacccaaatcccctcctcactgctttggcgctgaactcggcttctgacccaaacccgaatccaaccccagattttgacccgacttaaataaaatcaaaaaattaaaatgaaaatgaactttacagaacacac

SEQ ID NO: 343325 - DNA, 884 bp, Cannabis indica
atatattttgtctctatttaatcatattatcatctatgattaatcaaaatgatcttctttatttccttcttgcaggttgttgggcaggagatcttggagggccgattattgtatcgatttgcatcgaaaaagtatttggtattgaaatttagttggtgctaaacataaattatgtaaaatcttttattaaaatttaagtttactatgaaataaaaaaataatgtcccgtcaagaaaaatatatgttttgatgactaagagtgtatatttatgggtgaatattattttaaattttgtatttcacaaaagttctttttttttttttttataatctgtatttcacaaaaattactaattagaacttttatttcacaaaagttattgattaggacttttattttgttaaattataattccaatagtattttgtacaaattttgagctcactgttttatcttgtgccattttaaataatataaaaaattcgatcagtaacttttataaagcacataatctaaaatagtatttaccctgtatttaattacgacttaatgattttttttgggaaacttacaaaaatactggaattttggttaacttttacaaaaatactgtcacacggaaattttttcaaaaatactgtgtttttataaaacaccagtaaaacacaaagcagtataactcaaaacaacagtagaacactagtaaaacaccagtgaaacttaacacagtatactgcagtatgaaacttataaaaaaaacacagtaaaaaattaaaaaataccgcctgagagtatttttgtaagaaaatggcaaaagttagtataacatgtaaatttccctttttttttttctatttttattttgtttgtgtaaaccatcttt

SEQ ID NO: 343326 - DNA, 657 bp, Cannabis indica
aagtctttcatatcgaagactcctgatagttctttcttcagctgatttatcatcttaccatcctgaccgactattaacatgtcatcgacatatagtaataagatgacaaatttctcattaggaaatttcttgatgtagacacacgaatctgcagctaatctcttatagcttcgatccaccatgaatgaatcaaacttcttgtaccactgtcatggagcctgttttagaccatacaaactcttacgcagtctacagacaagatcctctttcctttttacctcaaaacctgcaggctgctgcatataaatttcttcttctaaatctccttgaaaaaatgcagtctttacatccatctgctcaatctcaagatctaaactcactactagtcaaaagattattctgattgatggcattttcaccactggagaaaatatttcatcgaaattgatccctttcttttgaccaaaacccttgacaactaagcgggctttgtactttaccaggtttccatgtccatcatcctttaatctaaagacccatttgttctttagggccttcctgcctttcagaagtttcaccaactcataggtgttgttcttgttggggttttatgccctaaataaaactcatttcatgttagcagatttacttattaat

SEQ ID NO: 343327 - DNA, 525 bp, Cannabis indica
aaatttacaccacaataaatgcaataactttttgtttacatttatgtcatttttattattttattagtatatttaactatcacattaaataaataaaacatttaaattattttttttattctcttacatattaaaataataataaaattgattataaaattattagattttattttttttaataaatcattaattagatattaaattttacatcaattttttttacaattgtgcattggagcacaaagctaaaatttggtataaatttaccacaaaattacttcttgtgctaaatatagcacaatttttacatttcccattagagatggtcttatgggtcttgaatgttgacctggagtctacgtgtccaatattagaaacgcgaataacaacttataatatatatatataaaggagaagtatgaggcggtgacgtgacactctcaaatcactccaaactattgtcctatactctccttaattctctcatttttttaatagcatctataaattatattttactat

SEQ ID NO: 343328 - DNA, 524 bp, Cannabis indica
atgtaaattttcccctttttttttttcatttttattttgtttgtgtaaaccatctttaactggtttgaaatgtttcttcttgtctattgtatgtatttctcgtttttatttaattaaattatttgaaagggaattccattaatgaaatcataaaggattaggcaagggaaatttcactatttggccttaataatacaacacatatcaaattttataccccttactaatttgtacaaaacaattccactattttcaaattctacccaaaataccccttacatttaattttcccactctctctttccctctctctctctgtctttccgtttctctctccgtctttccctctcctcttcgtccctgcccacgaaacaaaacaaccacgccgaacccaacccaacccaacccaacccaacccgaccacgaccacgaccacgccgaacccaacaaccacgacgacgacgacgacgatggcgacgacaacgacctccctctccgtttttttctctttcgctctctctctc

SEQ ID NO: 343329 - DNA, 236 bp, Cannabis indica
ggaccataacaggtggtcaaagtcctcgaatccagagaatacaaattaggtaagtatgatgaaaaaatgcaacttgttctagtaccacgatattagaatggggaacatttaagaaaatactaccaataaagtaccaggtcggacgaccaaactaagtactgaaagaacatttactcttaagtgaatggcctgtggggcggactacgctcaatggtttcgacaaaaatgaaaaagta

SEQ ID NO: 343330 - DNA, 679 bp, Cannabis indica
tttagttgtgcatctataataatgttaagattttttcaagatgagataattaccttaaacaccccaaacataacaagaagtatataaatcaagaatttttgaagcactgattagagtcataaatgttaaaacataaatggttgaaaatagctagtaatatgaatgattatagtatgactcttgtgtggaggcaggcgggtccgagaaatacgcattggagtggtcattgaatgagtcagatcttgcttgattgtttgcagattgttgcccctgagatccagtattttgttgacggtttgggccccctgagatccagtattctgttgacggtttgggcaccgtcgataatcatggtctgatgagcgacaaatgcgacagagtcttgagtttcttgggatctgctccccgtttggtccttcccttggattttacgtacccttggttctcacaacttcggggtctttaataatgttgggattgttacgatatcttccaagttgtggcgtctctccttccggagtggaactcaactcaaattcttccttgaacattagagttagctgttcaatctcttcctttgcacggttatacgaatcctctgattttgatgcataaaaagtgaagttatgttaggttatttttagtattaattttagattaagtttagtatatttttaat

SEQ ID NO: 343331 - DNA, 495 bp, Cannabis indica
atttacacaacatatgtcactagggtaataaccctagtctatcaaaccgctcacattagggtaataaccctaatcctggttattaattactcacatatcccatttccaatataagtgccaccgtgcataactctacgtgcaaactactgtcttacctgatgtcccgcaatagtagagattccaaatccccgggtgctcctgaccaggtgccagtaatcctagtcacaataccgagattttacacaataagaattaacccctgattccacactcataaaatatattcatggcatttaaattcaaataatcacatagagcttggaacgagctttccaacggtataaagaacatcccaaacagagtcccgagttaaaagttatggcaaagacaaaaacttaaaaaaattactaaactgtcagtatcatggtcgcgaccagacctatgatagtcacgaccacttggtttaaaaacccagaaaactcagttttcagctac

SEQ ID NO: 343332 - DNA, 853 bp, Cannabis indica
acaactagtagatgagacaacttctatagtgatttttagacctttattgttcttcaccaattttcccatagtgacagagtgccatgcccacacatagcaagtcaagtactcaatcatagtgcgaaagacagtggtaaccaacatgaaggagagaaagagattcaggctcagatctactgtgtgaaagaaatgaacaagggttagagatctgagcagaatgagtcattattattgcgctgtaatcaatgtaagattttctaaactcttatgtgtttaatttcatcgtattaaagaattcctatttagagtgttcatgaaacatgcatgttagtaaatatagattctagtaaaataaatcccaacactctattatatacaatacctttcacttaaatttcatactacatcagtaatctgaatcgatatcgcttactccgaataatagacattagttaactgcgctattaactgttgattaaagattccaaaacataaatatgttggcgactatttcattcatggcttagtgatcttaatactctgtataatacaagtcatagcctcatgtatgaataataaatttttcgatatttatatataagttattaaatattaataatttaacatttaaccctatataaaatatttaaattatatttataaactgaaatgtctttaaaggattttaaaggcataaatcctattagaaaagacctagaatcaggaacgtggacctacaggctcaccacctgtcactaataggacaaaccacaatcattcttggaacaatctgttgggttttgtgctctaaataaaactcatttcaatataatcagatttacttaataataaa

SEQ ID NO: 343333 - DNA, 526 bp, Cannabis indica
gcagggtgccttgggcgccaggtgggtaagtcctccgtccaagattcggaggcacgcctccgaactctcgaccaggacgggtacttgggcgagctggactgctacattcccgcccacaacaatcgtgccacaaatcttgaaaagggaaaggctcacggccagcaaggggcgctgatacccttgcacaagtacttcagggatgtggcagacttctttggcctctacccaacccaaattactccaaatggcattaagtatttgtctgctctctttgtcccgcttcctaaggatgggatgctccttccccccacgaggttgcctggttcttcgacctgaagtctaccccaaagcaaggaagttcggggtacttctacttctcttagccaggcctcaagcggttgagccgcacggatgacaaggccatcagcaaaatagggcattttgttgatgattacttcatggtaaaggatccgagtatcacccggactcggtttcagcagattccaacatatcaccgtcctcccct

SEQ ID NO: 343334 - DNA, 1066 bp, Cannabis indica
gacaaaactagttacattttatgaatctgactgtgttagaaatcgccatcaagttggttatattaaaaaaataaaattatcgaaaattaagtttagggtcctatttttacaattttaaaaaatataggatccattttatcatttaacaaaacagagggtctaatcagtaacttttgcaaaacacagggtccaaaatggtatttaccctaaaaaaaatatcaaaatttgagttcaaggtcctatttgtataattctagaaaatataaagtcaattttgatatttaacaaaacagaaagtaaaatcaataacttttacaaaatatatggtccaaaataataaaaaaaattaacaaaattaattaggaaactatggtaggaaatgggagtgaaaaagtagttaatgtgctattatgtcctattataattgaaagatttaagatagtattttttagggtttctttttttaaaaaaaaaaaaaataaaggatttatgagtcatatgttattcttattttttggaagttttggttcataaactttgaggtagatttatggagtttcaaatccatgtaacccatggttgttggtgttatttaagataaaatcttaccatataaaagtgaaattgggttgagacaaaagagatgatttcagtttgtttatagcaaaagagatgataatcattaataattctcaagactacatctattcataaatttgaatattctcattgtttttcatcttaaatttttaacacttttgttttgatcacagttacatttacaggacatacttaatatgaattattctcagtttcttgttgcgggctcttacaagccaccacttttgcaagttagagcttcaacataccaggtaagtattcataatttaggggtattcatccgatttaattcacatttttttagtcaaacaatatccaatccgcattaagtgtggattttcatatgttggatcaaatccgattcgcataacagtttaaatccaatccaatccaatctgcaatagtacggattggatcggttattttggatcggtaatttttttaa

SEQ ID NO: 343335 - DNA, 1368 bp, Cannabis indica
gaatgacaagtggccaccggaagacgaaaacacgacatcgagtaagtggggatggcctggataacagatttaagcagagtttccttgcccccttttgagaagactttattcttccaattatggaggtgaccccagaccttgtcatgcaggtaatggaacaattgcttttttgttcgcccaatgtcctgaggaagtcccagatatttttcgaaggaagaccgcaccgggatacccataaaatcagagattaaagtttgatccccgagctcaacatttggggagaaatacaatgaagatttttggaaatttaccttctgtctcgtggccctctcataggcctcaagcacgtctttgatgatattacaggaactgatggtggcttgacagaagaagaaactgtcatccgcaaataggaggtgagagatagcacgggctcttctagaaactttaaagcctaaaagagctctccttctttcttgctggtgcaagagggaggaaaatccttccgcacacagcaggaagaggtagggagaaagggggtcaccctggcgaatgcccctggaaggattgatgctgcctaagactttgccattcagattgaattggaaggatgcggtggagatacaggcataaatcagatggacaaacctggggggaattggaatttcctgaggattgcaactatgtaaggccattccactcgattaaaggctttagccatgtcaagcttgatcgccatccatccctttttcccacgcgtcttaagtttgatggagtgcgcaacttcctgggctataatgatattgtcagaaatgagtcggcccgggaggaaagcactttggttcggtgagattagagaattcaaaacaagtttcagcctattggcgatagtcttagaaatgattttatatatgatgttagagagactgataggccgaaactcagaaatgaacttaggttgcttgactttgggaatgagagtgatgagggtgttattcagaggggccacatttgcgtttccattgaggaagctggaagccgctttgagcacgtctctcctgacagcatgccagtttgctttgtagaaatgagagtcgaagccatccgggcaaggggctttgtccagaggaagctggaaaaacgctttctcaatttcatccaaggaaaaatcctcgcttaagagggatttgtcagtgtcagagagcgagcagctgatgccctccaaggctatattcatgtcagaatcggtggggttggaggaggtgtagagctggttgaaatgagactcaatttctcgaataattatttcctcgtcagagaccattcctccatttggcgtatggagttggtgaattttgttggtttttt

SEQ ID NO: 343336 - DNA, 580 bp, Cannabis indica
  modified_base (496)..(496): a, c, t, g, unknown or other
  modified_base (575)..(575): a, c, t, g, unknown or other
tggagttggtgaattttgttggtttttttcctttgggaggaaaaacgatggaagaacttcgtgtttttatccccttgagccaaccattgggtacgagcgcactgtttccagtaagcttcttccttgtagaggaaagcatcaagccaggattggagatcttttatagttgctatagtacggtcgtcccaaataagggtggaccgggccgattcaagctctttctccagcttactgatttactttttgaaattgaattttttttgtgattccaattgtttagcttttgagcgcacgaggattgggtagcgatgagattagggatagcttcctctgcggtcgaggggttattccaagactggtcgaagattctaccccagttagggtcctgtaaccacacattctcaaaatgaaaccgcttactatggtcccttgaccgattccccgaaattgtggatgtgactaattccaaggctctgtggtcagccccaaaaaaacncaagtgggtaagagtggcatcggggaaaagatttacccaaggactgttaatgatcccccagtccaaccgctcttgaatnttttt

SEQ ID NO: 343337 - DNA, 525 bp, Cannabis indica
actagtaaaaaatgtgcagactttgtgatcccgtagttctaagtaatccaaccacaaagtccatggtgatatcctcccacttccactcaggaagtgtcaacggctgtaataaacctgccagtctctaatgttcacccttgatttgttgacaacttaggcactgggatacaaattctaccatattcttcttcatcccgctccaccagaagtagggtttaagatcttggtacatcttggtagtgtcaggatgcaatgaatatggagtggtatgtgattcctcaagaatctcatttctaagttccgcactacttggaacacaaaccctagtcttaaacaatagcatcccactatctgatactgtaaattctttggcttgaccagatctaacctcttctcggatcttcactaactctagatcaagtaactaagcagctttaattcattccaatagatcaaattgcagcatcaagttatgaagtttgcctacaacaaactcgatgcttgatctgaccatgtcttctgcta

SEQ ID NO: 343338 - DNA, 683 bp, Cannabis indica
agaaaagaaaggtaaaaatgaaaatgggttaacaaaaaaaagtatagggtgcaattttcacgatctcttttagggtcggcccaaatagtttgaaccattgtcccaacctcctatttttaaggtgtttgaggaaattaaattgtatatctattttactttatttgttttaattttaacttttgtttttatattctttaagatatatcattatcttcaaaaatttatatacatatatatcctattttatagatgatgtctttattatattcttagattaatgtaaaaatatatactaaacttaagtagagtgtgagggtataattggacaatccactcacaaggtatattataatgaaatataatatgagagtatttttaattaataaatacaaaaaaatgtatttcctcaatttatcccaatattaattaagaaataacaaatttattaagataaatattagggatacgttgatgtaatttaatattagatttttaatgagaaaatgttctattttaagcaaatgtacttgaatgtgtgatacataaaaatatgagattattttataaagggaaatttacactctttactaactttttcatttttatttcaattatactgttgtacggtaatcttaaacgtttttactgttttttttttaatttttaatttcggcagtatactg

SEQ ID NO: 343339 - DNA, 2868 bp, Cannabis indica
tggaagtctatgtcgatgatatgttggtaaagtcagtaaaatgtgaagaccatacaaaacatctcgaagaatattttgaaatactcaaaaagtataatatgaatctcaacccgaagaagtgttcttttggagtctccttgggaaattttctaggtttcatagttaatgctaggggcattgacgcaaatctagacaaaattaaggccttaatagagatgtcgtcacccacaaagcgaaaagaagtctaagccttaacaggaagaatggcagcattgaacagatttatttcaaaatcaactgatatgtgtctaccattctttaatgttttacgaggcaataagaagtttgaatggacagaagaatgtgaggaagcttctaaaggaataaagaaacatttatcaacacctccagttttggccaaaccaatagctggagaaatttaatacctttacttagctgtctcagagagtgcaatcagtgcaaccttggtgcgagaagagagaaatcaccagcaacctgtttactatgttagtaaaagattactggggccagagtcgagatatccccctgttgaaaaactttcactatgcttaattcatacatctcgcaaactacggccttatttccaagtacatcccataaaagtcttaacggatcaaccattgagacaagttttatcaaaacttgatgcttcgagaagattgataaaatggtcaatcgagttggggcagttcgatataacctacaacccgagaacatcaatcaaaggtcaagctttggccgatttcctaattgaagggatagtctccgaagaagatccacttatcaagcacgatacaaaaacttggaaattatatgtggatggagcatcaaatgaaaatggctcaggtgcaggagtgataatgatcgcaccagaaaacattaaatttcactacacattaagattccaatttgaaacttcaaacaatgagcccgagtacaaagctttgttggctggtttaagaattgctgaagcattgaaagtcaaaaatcttatatgctttggtgactcccagttgattgtgaatcaagttctaggcgagtaccaggtgaagggtttaaagatggcaaaatatttggagaaagtttgaaagaacttggagaatttttattattttaagattgaacaaattctaagagaacacaactcaaatgtggatgcactgtcgaagttggcctcgcaaaattggtaatttaaatctggtaccggtggaagttttaagcgatccaagtatatgtgaaaaggacaaagttgagatgatagatgcctcgcctacatggatgacacccatactaagatatctacttagcggagaacttcttacagacaaaaagaaggcacgcaaactcttgtatgcagtacctcgctatacagtagtcgaaggaaaattgtataaaagaggttattcaatgcctctcttacggtgtgtattgccaacagaagcaaacgagataatcaaggaaattcacgaaggattttgtggagatcatgcaggttggcaaagtttatcaaagaagattatccatgaaggatattattggccaacgataaacaaagacacacatgaatttgtcaagagatgcgataaatgctaaagattttcacgtatgcctcacataccaccaacaaaattaagaatgatgacctcggcatacccatttacaatatggggaattgacctaattggggcattacccacaaggcgaggaggagcaaagtatgcagtagtagcagttgatttcttcataaagtggacagaggtcgaacctctagtttccataacatacaaaaaagttatcgattttgttgtcaagaacataatttgtagatttggaatacccattaaaatagtatctgacaatggaactcagtttgacggcaaattattcactgagttctgtgaaaggaataaaattattaagagcttctcgtcagtttcaagaccccaagcaaattaacaagtagaagctgttaataaaaccttaaaggatactatcaagaagaagttggacactgcaaaagggagatgggtagaggaactaccataagtactttggtctcacaaaacgacagagaaaacaacaatagggcacactccgttctcgttggcatttggctcggaagcgatgctaccggtagaagttactattacgacccacagacgtgaattctacaatcaagaagaaaactaagaactccttaagttgtccttggatttacttgaagaaagacatactgagtcgcaaattactaatacaacttattaaaatcgaatcatgaggtacttcaataagagagttaagaaaagactcttcaatgtgaaagatttggtgttaagacgagtatttgcaaacacacgagatgcatctgttggactgtttaacccacactgggaaggtccttatgttatcgaggcagtagtaggaaccagtgtttataaattggctcggctggctcagcttaatggctcgctaataaagaaccactagaacaatgaatattggcgaccctattaccagtaaattttaaatgtacatgctgtgtttatctatgtaacatgtaaattcctattattaataaagttaaatttaattcaagtcattacaaagttttattctctaaaattacttgaggggcatattgttgggattttatgccctaaataaaactcatttcaatataatttgatttgttatcaatagaagattagaagtcgtttatgtttacatgtagttttcatgtttatggtttaatgtatacaatttttgttaagtccataacatatagttattcacaaatatagtgtaacaccctaactatcttaggcg

SEQ ID NO: 343340 - DNA, 1662 bp, Cannabis indica
gaggttgagataggagggtcctcctacaatacctccttagcatgtgccaaccgctctggttcttatggtgccaacagagcaatttgttgttgtaaccgcattgagcctctatatgagagattccgtaagaaagtgcctccagtctttttaggagggcacgatgttatgaaggtcgagcagtggctaacagtaattaagagaatcctaaattttatgggtgtcaccagaaatgaccaggtgacatgtgccacattccatttccaagaagaagctctcgtgtggttggaaatggtgtagtacctacgaattttattaaaaaggaaaatacttggcgtgattgaatgtcaagattggacatgatctggtcattactacatattatcgcaatttttgtcctactggtgtggcatgcctacagtggacaaaattagtgttacgtggcagtgcagctcaccaatgagaaggccaagtcatcacttgagtaaacagggatcccagcactcaaacgggcatcgagtgatagactagatccctcacaagagttggctggccacccctggaccggccagccatggggctgcaccatggtcggccaccctgcctccataggggcttggttggctaagaggtgtcctatagggtttcttgtgcacttctacaggtggacaacactctctcggctacaaattgggccctaaaagcccaatataatagctgaataatatctaggttcaagggaactttggtcttttgtaactaaagaataagatatacaaatatctagggtttcatattgtattctagggtttaggcctcctttataaagtccttaactctaacctagaaaacctaagcttagttaaacctaacacttgcctccaaactctaagtctaagtctgacaacttctctctctctcacacacctatacaggcttcatctcaacacttgagttctgtcattcttgattcaatcattgtattactaagggtactatagccgattccacctatagtgatttggatagtattaaccctcggtattaatacaactaaaaggggagtaggtcatttccaactatcacaagggagcaaaaacatctataacaaatcttgtgtttattacttttcattgttgtttgttctaacatgtagcaagcatcaaatctatacgaccccgctatcggttgatcactttttgaggtcaacagtttggtgctttcattgagagcgtggacatcatatctaatcaaacgccatggtgaacacaagaacaacacatgttgcacctctacatcttctggtctccctcaagacccatagactgcagatccaggtacacagattccagtcacaactagaatccccatgaacactataaatgtggtgaatcttgtcaccacaacaccacaagtctggccattatagttggacaaactaataccagcacctagtggatccaagtggtaggcccttgccaacaagagtagatccaccattggcacctaatactaaagggaggacccaggggtgacagtcccctagaacaacaaatgggtctaatctctggtttctatgatttcgagacaagcccgagaattggcaatcctatcataggcgagccaaatctggacttaggaaagatcttgagttagccaaactca

SEQ ID NO: 343341 - DNA, 577 bp, Cannabis indica
atttatacacaagttgtcactaatttagttttagtcacaacaaatattgtgaataaaagcatatttagtcacaaccaaattgtaatttttgtgactaatatctttagctacgaaccttttagtcacaacataagaataatagtttataattagtcacaacttttttacttttagtcacaaattttgttatgactaaaagtaagattttttgtaatgtatattgtatatatatatatatatctgttaaaaaaaatatattgtatatgtctttggctagagaaagagaagaggttttgtttggttgttttttttaaaaaaaaatgatgaaaaatcctaaagggataacttcattttaatattattaatgtatttttttttttattttaaaacctatattgcaaggaaataataatttatatatgatatgtttcaatttcttagtctttcttcataaataaccattaatatttattaatgtccgaaaagaaataaacaaatatctcgtactaatataatcttaaaaaaagttttctttattaatactaaaaaaaatgaaactaattttaaatttgattga

SEQ ID NO: 343342 - DNA, 563 bp, Cannabis indica
tttttttagatcctgtaatgtccacagcactaacaaaaaagaaattaattaatgaattgatttgtaacataatctaaatttaaaaaattatatcttacttttggatacaattcataatatcaattgggataaagtcattcgtcgagtcaagatatgcaacactttgagtattggcatgaatcataattgtcatccagtgatcactacagaacaaaacatgttaattcagtcaactcactaatcgatccaaatcaggattagccacattctttacagaatactccaaaaagaaatcaacacattccctatattttaccattaacctattcacactcatccaatctctatcaattccgaaacttctaacagaacaacaaaataacaatttaattaacctaattaatacaataaaataattctatatcaacttaacctaattaattcaataaaatactaatcctactgaaatttctaccaaaatttcggcaacataacatctataattcggacgttcccaaaaattttagacatgcaattaatctattaaaacatccacaataata

SEQ ID NO: 343343 - DNA, 448 bp, Cannabis indica
taaaataatttccaacactaacacagctgcaaagtccgtggccctttgccatttggggaattgacctaatcgggcagttacctaaaggtaaaggcggagtgcagtacgcagtggtagcagtcgactactttactaagtggattgaagccgaaccacttgcaaccattacatcaaagaaagttcaagactttatagtgaagaacatcatatgccggttcggactaccgtacaaaatagtctcggacaatggcaaacagttcgacagccaatctttcactgatttctgtgcgaaccatggtatcatcaaaagtttctcagcagtggcacatcctcaagcaaacggtcaagttgaagcagtcaacaaaaccttgaaggatacactaaagaagaaactcgaagatgccaaaggaaactggcaagaagaactccccgaagttctatggtcata

SEQ ID NO: 343344 - DNA, 1864 bp, Cannabis indica
gagaggtgtagatgatcagattgtcacgacgatcattaagcttggaacccatgctcaaattcccgcttagaaagatgttgacgtgattcaaattgaccgagcacgtgattcagaaagatcattcagcccagccgtacaggcacagctagacgaactgaaaagcatgtttcatggcatggctggacaaagaaacaacaatctcaagttggaccgagcacgtggaactcctttctctcctgagatcaatcttctggcgttaccccacaagtttaaaatgccaacatggaagatgtatactggaagagaagatcctctttcccacctcaagtatttcgaaatgcaaatggatttgcaaggggtacgaagagatatgtgttgcaaaaaatttcccgctactctgtcagaagccgctcagcagttgtatttcaagttggcccctggaaactttagttcatggaaagccttctcttcggaattccatgcacaattctcctcctcacgccaacttccactgcatctaggagacttggttgaagttaagcaaagaccaggtgaacctctccgggcatacatcagcagattcatgacggaggtgacaaaagtgtcacgggtaactaaagatggaagttatccgcgatactcgggggggcattgaagtccacggcgaactctagaaggatataaggaagaacgggccggtagactcaatgggtgactttcttgaccgtgttgaaggcttcatcaagcccgaagaagccattcaacaagcggaaggtgagcaaaagcctggcaagtcaaaaggctctttctactagaacatccgcccaactccctcattacccaaataatccaagctcaagtggcaagcgttccaacaacaaccacaagcaagggaatgggaagaaaggaaaatttgccaacaaatctgagcaagctccccgggagaatcatgccaaatacactacattcagtatcttgactgaagatataaaaattgtttacatggaaactcagtcactggccccatataagaaacccgggcccatgaggaaagatgtcagcaagagagacatgacaaagttttgtcgattccatggagattacggccacgacactaatgaatccaacaacctgaagcgggaaattgaattcctgataaggaacaacaacccacatctgcagttttatgtcaagaccgacaagggtgggaggaacgacaataactaggatttgctacctccaccggtagatgggcatctgcaagttatcattggaggcccgcacattgctggagattcgggaaaagctcaggagaggtatgcccgaacagcatagcacgaacaagaagaagttatcctggccgcggaagaaagaaagcccaaaattccacgggcaggagggccaaccataacgttcaacgacgaagacgctatcaaaattaaatttccacacaatgacccgctagtcgtggaagtccgtatagccaataaaatggtaggcagaatcatgatcgataatggagcctcttccaacatcctactcaaaactgcttatgaaagaatgggactccagctcaaggatctaaccccatgtctccagcctgtctatggtttctccgaacaaggagttgcacctctaggacagattcgccaacccctcactgttggataagctccgtcgagcatgactatcatggcacagttcttgatattagatgttcgttcagcttttagcgtaatgctaggccgtccagccctgtatgactgaaaggctgtcacttcaatattccactcgtgcctgaagtttccaacaaagaatggggtagggtgtctaagaggaagccagcagtctgctcgggaatgtt

SEQ ID NO: 343345 - DNA, 525 bp, Cannabis indica
caggaatatggatgttagaacagtgattcttttttacaatggaacttgggttgacagaacaacatacgttgattatgaagtcgaaggtatactaattccaacagattgttcacattatgagctttctcacatagtatacgaagctttgaatttggacagaaacaaatatacgattgatcttcaatttcaagtaactgaaggcataccaccaataagaatcaaagacgatagtggatgcaagttttatgaacaaatacgaaggaaaaatgatgatgagaccaaatatcctatctgtgttaacatctcaacatccacaaccgacaatgaacacaatgatagagtaaactatacctacaatggggaaactagtttacaaacaaggcaactgctaccaacaagaacagaatatgcaacaaagatggcagattatgtgattgaacaaactcaaaaatcgatggaagaaagctccgaagaaaatcaaataattttaaatcctcaagttgctgaaatacacattggccaagt

SEQ ID NO: 343346 - DNA, 724 bp, Cannabis indica
gaaaagatggggctccaactaaaagatgaatttgcctacccctcactgttgagcaggctctaacgagcgtaaatataatggcacaatttctggtattcgacgttccatcagcctttaacatcatgctaggccgaccagctttgtatgacttaaaggatattacgtcgatattccattcatgcctgaagtttgcaacaaagaatggggtaggctgtctaagaggaaaccagcaaattgcttgggagtgttataaccttgctatggccaaggctaagatggaagtatcctccacagacacggacaagggaaaaaacatttcgaagtagggaacttcccaagtcgaggatgaagatgtggatccccaacttggggacccaagcagcaatgttggacctgtggaagaactagaagagatcgagatcgatccagatattccggctagaaagctaaaaattggaaaaggttttttgctcaaagtaaaatcagcattgataaaatttttgagagcaaacttggacggttttgcctggtcacatgaggatatggtcagaattgatccttctgtaatttcgcacgtcctaaatattgatctcaacttccaaccagtccaacaaaagcgaaggctattggacaaagagcgagcactagccctgaaggaagaggtagagaagctacgcaataataatttcataattgaagctttctacccagcttgggttgcaaa

SEQ ID NO: 343347 - DNA, 672 bp, Cannabis indica
gtaatgggttttatttagggcacaaaacccaacagaaacatcatcctaggacttgtaaccggagagcttgctttcaatgtggatcactagggcacctcaagaaagattgtccacagttgaagaaagaggaacctaagcctaaagttaagcctgcaccagcacgtgtattttctatcactcaggctgatgctgccgccagcgattctgtggtcacaggtcagctacttattaatggttttgtctttattgttttatttgattcgggtgctacacgatcatatgtatcatcgagagttcttaatcaacttggtaggcctagtgatgtttttgagatgagatttggaaccctattacataatggggaattaattatttcaagaaagtgggttagatcagtgttaattagagttgaaggtagagaattgagcgctaatcttgtggagttaccattagacgattttgatattatactcaaatggatttttcatccaaatactctgctagtattgattgtaagcataaaatggtaactttccaactggagaatgatgaaccatttgtccttgttggttcagttcaaggttctcgtgttccaagatttcagcgttgaaagctagggatttattacgcagtgggtgtgtaggattcctagcggttgtagttgattccagt

SEQ ID NO: 343348 - DNA, 1136 bp, Cannabis indica
cctgatggttctatcactcatgacactcagaccatattcactcaattccactcctactatactgaccttttttgctctcaaggagtttccccatctgctatttcctccattctccagggtgttaacactaccctctcttcttcccaatccgcttttcttgctgaggagttcactgctgatgagataaaaacagccatgttcagtctctctggagacaaatctcctggtcctgatggtttaaattcctacttttatcagaaaaattgggatattcttggatctgatctctgtcagggtctcctccaaatccttaacaatcaaggggacatcactccaatcaataacactattttggtccttattcccaaaaagaagaactctaaaactgttcgagatttttggccaattagtctttgcaataccctgtataaatgcctttcaaaagtcctggctaattggctcaaaacggttcttcactctgttataagccccaaccaaagtgcttttctcactggccgtcaaattactgataatactgttattgccaatgaaatcattcatgccattcattctagaaaatctggcaaattaggttgggctgctatcaaactggatatggaaaaagcttttgatagagtggaatggtctttcatctctcattttcttcatcatattggggctcctccgagttttatctcccttatctccaaatatctttccacagttacctaccaattatctctcaatggtaatttatcaaatgtgttttcctcctcccgaggcattcgtcaaggtgatctcctatcaccgtatctcttcctcattgtagctgaaggtttttctgcagccatccgtctccatgaggatgctgccctgttctctggcattaaaatttgtcgaggggctccctcgttttcccatctcctttttgctgatgacagtatgttatttgtgcctgtttcctctcaatcatcaatagctataaataatattttgcttctgtatttccaagcttcaggccaatctgtcaacaggggaaaaaatcttccattctcttctcccccaaatacctgcccctgattccccaatccaggtttcagacctctttgctcctcatggtgaggtttcattgtaaa

SEQ ID NO: 343349 - DNA, 417 bp, Cannabis indica
agatcctggtaaaataatatccaacaatggtacggcttttgtaggacgcgactgtgatggtagagtaattgaggcgttttcaactatttcttctgtcagttgccgacccgaaattgcagaaattctaagtgccaaagaggcacttagttggataaagaggaataacaagtcaaatgtcattttagagacgggctgtattttagttgttcaagttattcttagttcggtatttatgccttctatttttagtttatttttcaagattgtcaatttattttatcttcttaaagtaatgtttctattggtcatgttaaacggtctgctaacaaagtcgcgcactgtatggcacgtggtgcttgttattggtcaggtcgtctctttactgacagtgatgttccccttgctcttcaggccttt

SEQ ID NO: 343350 - DNA, 571 bp, Cannabis indica
gaattgcaagtgaccaagacaccgtaagtttgtgtgctcacttgaggggaacctacaccgtacaatgcattgaactagcacggagaacttatgtagagaaattttaatgcttagaataagctactaaacctgcctctaagtcaagtgcaggcatacttaagcttagcttaaaaaaatgtaaattcagatacttacatgtcaaggcaataaagagatagtcaagacgatcatatgtccatagtaaaaggctttaaggctaaacaatggtagtgttcgaaaaaagagtgcatataggccaaaagcaagaacatgaaagcttcaaggccaaatatgaataaaaaatctgttcaaatgcataaggccaaggccctgcaagaactgtacatgaaaagaagaatcgaccaatgttcctatagaaaccacgtatcaggctaaggcaaggcagagttcctggcaagttctaagccaaaaggcagagttccttgcaggttctaagccatagcaaaactctgggcaaccgtactcaagggtactttccaagcaatgtcattgtactgttgggttttatgcc

SEQ ID NO: 343351 - DNA, 648 bp, Cannabis indica
gcgcattacatccgaggtatgcgcattccctgttccaagccttggtatgaagcagatcacgtgcttttcatcatcaaaaaagatgtgggaatgctcttgctcgctaccaagattattgatgatgtgttcccatcgagacatcccagaacgttatgatttacaacgtatttaatacacgattaccttgacccggtaaaagcagacatatcacagctgtgtgatattcaaatattatctgcatttattgtacgtggtatgtaattaaaccccacgattttaggggataactgttgtaaagatatcagccaactatgtaattaactgcctgactatgtaattataaatagaggcatgttatactgaaaaaaggaccaaaaaaattcataagaggaaaggccctagaattgtatcaaaaatctaataaaattgactcgtggactatgcagaattttaactgcaaaaccacgtaaaaactttcgtgttcttactgttttaattttctgtgcaagtttattacaacttaggctcaaatctagttaacaaaaatctgtgttaacagtttggtgctttcattgagagccttcgtgaaagagctcagaaaaaaccctccttacatacaaaaaataatcctcttcatggctgacaaca

SEQ ID NO: 343352 - DNA, 554 bp, Cannabis indica
gatcaggaaattaaaagtagttaagcacgaatgaaatagaatacatagaaattagggggaaataaatcatattaataccataaagcaatatcaaacaatgtccgtctaaccctaattaagtgtttagctactcatgtttatggaagaaaaatcacacatattaactttaagaaaagagaagaaaatagagaagaaaataatgctgaaaatcctctgaagaatgcctttagtattgcagttgatctctgaaattcgtatctgtattctatgtttaattccttttgaattgcttgctccaaaactattgaagtccatttcttttatagccaaaaaatgataaaattaaataaaaatcgctgaagaaaaaaccctaattctccttaggattagaaaacctattctcctaaggattagaagaagaggtgagttttctgcagcgttgactgatagtattttagctataaatctcttgatattacttggaattagacgattcaagatgttctggaaagataaaagaaagatctagatctttcatgttttgactttctcca

SEQ ID NO: 343353 - DNA, 1287 bp, Cannabis indica
taaatgattgaggcctcatttcagtaattatattagtttactaaaatattatttataagtagctaagtgttttaaggataaaatacattaaaggatagaacttttaatttttccctactcgatgtagatcatctatagaggatctttaactatttggattgacgcaatgggtatatttttgttaatagtgtgttctatgtaattaatagttcaactacaaatcaatagtgacgtaaggaggaattaaaaaatttacttggtaaatttcatatctacttattattagcttgatgatatagggtcatggtccccacacaagttaagataatacttcttatagactcagttaattagttttaattaattaattataattctaaaattataatatgtcttatttatgaattttcactaatggcttaattgtgacgaaaagaggttttggggtttatttgttaattgagagactttgtaaggtctaattaataaataagctaaatgaaaattttatttgacaatttattataattattaaataaatagttttgacatttataggattgaattgggaaatatgacattattgaaagaaaagatgaattatgaaataaagtggcaaaattataactagtgaggtccactactatggccggccacttagtgttatttttgcctattatttaatcactttttaatccatataattaaatcctaaaccctaaaataaatactataaaaggaataagatggctctcattctcatccacctatttgaagctagttttcattctttgtcagacaactagtaaatgagagcctccttcatagtatttcaactcttcttctattgttcttcataaattttaagctttttgtcacggcctgagccctaggtcgtgacagatatgtaatatccataactagggtggtcaaaggtcacactttgacccttgtaggaagataaagcttataaatgatccttcaatttatatcacaaaatactaactttaaagtagtggattaactcctatattaataagaaaatattagtaacaaaatcaagatcactcatcaatataaaagaaaaataatatccccacagttatgtaatcaccaaatagatagatttaacaagtcaatgaaataccaaaataatacctagcatccatcattcctcatttctaactagtacatagctaatttgtgtcatccaggccatccatttcaacttaaatacaaaatcagttttattagaagattaaagagtaaaataagactaaactaata

SEQ ID NO: 343354 - DNA, 682 bp, Cannabis indica
aacataaaatcaacaagaaaattacataaaagtaacatgaaaataacatcaaaataacaacaaaaactaatatatagataacaaaaaatcaacaacaaattaacaagattacaacataaaaaaacagtattttctgtaaataaaataaaaaaaaatcgtaaaaatatttaaaattccgtaaaaccgtatttgtgtaatttttttgttatttttatgtttttgtgaaataatctctaaaaaaaattagagtaatttgcggcataaatacctaagtttatctcttagttgcagattaatacctaagttaaaattttgacggtaaaaataccttctgtcatacttttggaacttccgtaagtgtctggccattaagtgccaggttagccccagatgtcagttactcattggtccaaatcatttaattttttttatttagaaaaattattttttaaaagtaaaaatcattttaaatatttaaaaataataataaataaaattgaattaaataaaaaatatcaaaatcaaaacaaacctaaatctaattgcttcgtctattgagttcaaaagaaaaaaaaattagcttcgtctaccttggcaccgacggacgagagggagagccttcattgccctgagttttcgacttctctcgagccttttttgaagaaccaccacgagcatcaag

SEQ ID NO: 343355 - DNA, 477 bp, Cannabis indica
aatatatcagtggcgcaccattctcgcatggctggctcagttgggctgggcgcatcaattatatatacaaagagtacaagtccaaattattaaaaacaattagataaatgtgtttttttttcttttgataaactttgataaataagaatcacatgcaaataatatatttggaaaaagaaaacagagatattgggaaggataaaaatggtgagtttggccgtagaaatgaaaatcaacctaagattaatcgatttggtggaggggctggtagcttgtaaccggacttgattcttcgaagcgttggcaaaccagaaagcatctggtgtgatatctttcagtttttttaggaaatttttggggtataaagtatacttaataatacccttttggtaaaaaaagtggggtgtgattataaaaggaaaattcgattttttatccttacagtaaggggaaatttttcccttaaacctaaaatac

SEQ ID NO: 343356 - DNA, 616 bp, Cannabis indica
attactaaaagtaacagttttttatagtgtgtaaatattaacgagcattgctattaggcaccagtggtgtcgagcaccttctcgacatgtcacgttgcgattagttagcgatacttcctaaaagctattatattaaattatgtgggacccgattcttagttggaccaatagcgatactgatacataagagagtactaggcaccactgatgccctttagcatttctcatattacaaaggcatctccatctatcccccaataatcacaatataaatgatcctcataacaccttaattaacatctactgaaactcacctatgcaaattgcatttcttgaaaactacaattcacactttgtttattaattgaatatcatcttcatatcaattacatttatcaatatacatggttaattaggaaaatcgaaaagacatatcattatattttataaagatactctttacattgatgaatctcaaaacctttttcattgattaataatgttagggttgaaaaatactctttacaatcagtttttaattttagaattatattgaatgtaaagtagttggtgtgtttattaataaaaaaaacgtaaatgaggatgtattttgtta

SEQ ID NO: 343357 - DNA, 560 bp, Cannabis indica
cggaaaggagttccgaacagctaattatccttcttggacgattgatctccctagaaggcagtttcggatagtcgactctagctggttctatcctatccagaagcttcttcagcgagtgcccttagtccgtaatctcaaaagctcttacatattcccggatgcacttagacttatgctacgtagagatctcgctcataagaaagttggttaagttatttattgtctagctaacttaacaacttaaatttttgcagggaccgattttaagatcttgatccaaagcctataaatatcaccaacacttaagcttttgagcacgacgaaaagaacacaattcaaattaagattgagaggtagagagattgggttggattttgtatgaagaattttctttatagaagattcttgggtaagacttaagagtgtgagagttgaaacattttgaaagaactcaacagagaatttgtctcgactataatgtacatgttcttgctcaatcaataaaatagatttggtggtgttccagaactagagtagagtcatagatcacattgatctat

SEQ ID NO: 343358 - DNA, 660 bp, Cannabis indica
tatagctttgtcactatatataaggatagaccataataaaaaggagtcaattttttttattattcttataattacttccctaatttttccctaatttctcctaatatgcgtaatttttctctttcaatgcctgaaaaaaaaaactacaatttattattttttatatgatatatatagttatataacaagtaatttgctaatttttgataaattttaaataatttacatactatatattgaactatattcttaatttacattataagtataatttattaaaaataattttaaaaagtaatgaaaattggaaacataggtaaagacactaattatttccacaaatattaaagtttttaagtatttttattgtgacctattaaattaatgattcgtctcgtttgttgtagtttaaaaggaacatatcatcatcttacactaacaaagaaatcaatgaaatacgtgatgaatgggcaaagtatgtcatgcagatgatggcagcaggcaaatgactaataacatagagtatgatgaccaatgatcgctcatggacgatccccatgtgatccaagaagacaattgataggtttgacatcgatcgcagatactattgtcttgttttcttggtttttagaaagtgatctccagttatttgattaaagt

SEQ ID NO: 343359 - DNA, 541 bp, Cannabis indica
ttctttatttatatttaatttaagattttaattaatttaataatttcaaaattttatcacattatattaattaatttacttttcaaaattataatgttcaatgtatttaaaaattttagatataaaattaattatttactttaattacattatttatataatcatgcataaaatagtaaataatacatattcataatatattttttcttcaacttagttcaatgttgcatatttcatttatttcattttttggaagagttttttatcttctctttatcattctcaataacggtaatcatacaatccattccgcactatttttagtgcattcgatttgtactaagtgagaattttatattttggattcaatccaatccacataataactcaaatccaatctgcaatagtgcggattggattggttgtttttaatattgaattacttgggtttgattggtttgagatttgaaaataattttatgtttttgaaaacttaaaaggtgggggtccacataaaaatacttgattggtagagtgtttt

SEQ ID NO: 343360 - DNA, 565 bp, Cannabis indica
tgttgttgttttcagaagcttagatgtgtttaattgagtgaattaaagctagtttggttgttagttggtgagatttaaccttgtgtaaaactttaaactcaaaactatggtttttatggtaaaatgaggaattagttgctgtgattgttatttgtgcttgggtttgtttcctggtgttatattatggttatatatggtgaattgagcaggttttgttagctaattagttggatgagcaggctttaagttttgaactcaagcttgactcatcaatggtggtttttgattataagggtgtggggttgttttgatgctttgagaatgttctttggggtatttagaacaggtctggaaagtttgatatggtttggggttgaattgcatgagaaatgaatttttaaagtttcctgcactgaaccggaattccggttcaatatggtctgtaggaaccggaattccggttggtgttctgggttcctcccagaaccggaattccggttgtagaaccggtctgccggttgggaaaaaattgggaaccctagttcttcccatttttgtgttgttt

SEQ ID NO: 343361 - DNA, 895 bp, Cannabis indica
gtacattttaagcccgtaattatgcacatataattaatacaaatataatatttcatagttttaataataaatttattttagttagaaatatttaatttatttaattgttgtgttatttttcagatttaagcaaggtggtaaaaatcaatactcaaaattcaagcccaattaaaagtccaaatggaaccctcaatataatcatttatatggtaaaatattgatttgttgggagtcttcttttattttggtctttcacgtgaccacccatttcaaaagcccaatcagttgaagcccaagtcctagccaatgttgtcattaatcactaggggcctcatttatcactttatcaagcaagacaccgcataaagtctctcaacaaagtccactcacaagcaaccaaccaacacaccaaaagaataggatcacacattcatggttgtacgtcccaactcccaagcctatcacacagtcaaacaccaaaaattgataggcttgttcaacaagcaatgaagccacttaggcagcttttcatgccactctctccattactctttgcacaactattaccgaaaatagatccaaaaattatactataaatggagagtttaggaaatgtaaaaagcatcagattttagagtagagaaaatacactttgtcattttatttttctctcttattattattttatgtatacttattttagtgacaaaaatgagtgtattaaaatagtaatattggtgaggttagagtgtagctattgtacttcttactttaattattgatattgattcttttgtgcttcatctccatatcttatttattaaattattcttcatcttctaatttttcttccaaagttaatagtatcttttatataagttcagtcatgcttttc

SEQ ID NO: 343362 - DNA, 509 bp, Cannabis indica
cccctttggtatttttcattgagaatctctctaacaccttatcaatgtaagttgtttgagagagagcaggggatctgttcttccgatttctaatgatctgaataccaagaacataagcagcttcacccaaatccttcatttcaaattgagtgtcaagctattccttgatgttagtcattttcttgatattgttaccaataatcaaaatgtcatcaacataaaagaccagggatactaccactaattatccttgagttgataaacacaaggttcatcattattttggtgaaagtcataggtcttgattatcttatcaaaccttttattccaagagcgagaagcttgcttaagtccataaatggacctattgagtttgcaaactttcttttcctgccctaaaagcacatagccctcaggttgctccatatagatggtttctttaagaattttgttaaggaaagctatcttgacatccatttgccaaatttcataatcgaaagcagcagcta

SEQ ID NO: 343363 - DNA, 796 bp, Cannabis indica
tcctagtgttgatgagcttaagaaagaaatacttgatgaagctcataccacatcttattcactgcatccgggaaccaccaaaatgtatcagggtttaaaacgctacttctggtggtatgggatgaaaatagatgtggtggactatgtgtccaaatgcttaacctgccagaaaatgaaggctgaacatcaaaagccggcagggatgttacaacctctaacccttcctgagtggaagtgggaggacattgcaatggattttgtaacgggattgcctagaaccacaggaacgtatgattcagtatgggtcatagtggatagattcacaaaatcaactcactttctgctagtgaaagtgttttgaccaaaaatggttcattattgatcaaaaaccagtcaacaatttttagtttttgggaactcttttactccctgttcattcccccctttctcacctgccccctcacttctatttgtactcctcttttatccttaggtgtcaatttcttaaggtatcatttgacatgtgtctatttttacttatgaggtgtcattttatgaggtgtcattggatatctttgacaagtgtcttgtataaaaggtgagtcataagtctaaggtgtgtgggtcatcctgcctgagatattgagtcatcgcgtccgagataagtgagttcgaactgatcgaggtaggccatatcttggaccgaccgtgataggtcatatctcggactccgtatctcgaaccgaccgtgataggtcatatctcggactccgtatctcggaccgaccgtgatagg

SEQ ID NO: 343364 - DNA, 786 bp, Cannabis indica
atatttttaagttaaaaatttgttaatgttggatcaactcaaataggaatatttttcaaattaaggtgattagttcaagatacataatttgatatttaattaaattttggaaaattatttatgttgaattttttttttttagaccaacttaaattagatatttttcaggaatttattttattatattttaatataatttcaaaattttatattcaattacaaatggattttcgaaattattgtttgaaaattaaattaaagttgaaaattaattttttaattaattttggatcaacttaaattaagtaattttccttattaaaatatatagattaaaataaatgattaattaagaatacattatttttaaataatgatctttaatcaaagagatattcgatctccattattggtaacaatggttaattgttttcaatataacctcgagacgctagacttcgtcccccttatggatggttattcgttgaaagcacttaacaccgtaagatctcatatgataagtattttgtaagttttcgtttctattagactctcccctaaggtgactactaagatataaacttacaaaatatgaaacaatgatagaagctcaaaaatgagaataaccttgactctcgcgtaacgtgtcaacgttggattcttattttgatcgaataaaaggttgctaaaatggtgtccattttagatgagctgactactcttttcaaaaaatgttatctttgactcttgcttaccgggacactgtatttcattatgttggaaacc

SEQ ID NO: 343365 - DNA, 612 bp, Cannabis indica
gtaaaataatatccaacagccttcccccacccttgccatgtacgagagggctcttgcattagcccaactgcctgactataaggaggatctaaacattctaacatccccccgggcgttagatgattttgggttcaactttgttgttaccccttctagcggagtaggggaaatcctgcgacccgtgggacctccgatgctggtactgaagccatagcgaaaagcactatgcccgggtgttctaagaaaaggccaattagggagtgtgactctcttggtgatgatactatttgtctttgaggatgtcggagatcttccatcgaatgccactgaagaccatctaaaggatattttcaaagatttccagagtatggtctctattcgagtctgtagggactctcagactggccgctctctccgctatggctacaccaactttcttaacgccaaagatggctccaacggtgtgcatgatttcttctccggctccgatatcgtgtgccccactttctcaagcctagatgtgttgggttttatgccctaaataaaactcatttcaatacaatcagatttacttattaatatagatcagatataacatttaatgttgcatgg

SEQ ID NO: 343366 - DNA, 1174 bp, Cannabis indica
aaaataaaaaataattttttttcttatcaataactgacaagaaaatttaagattaatttatttttattcatataatttagggtaaataccattttgaatcctgtattttgtaaaagttactaattggaatctatattttataaatcacaaaatgtaccctgtatttttgaaaaatgtacaaataggaccctgaattgattttttgtcaaaataaaacttaataataatttgatctaaagatgttatgacaaatctagttacattttctgtatctgttcgtgttagaaattatcttaaagttagttatgttaaaaaataaaactgttaaaaattgagtttaggatcctatttttaccattttggaaaatatagggtccattttgtcatttaacaaaacaaagggtctaattgataacttttacaaagtagagggtccaaaatagtatgtatcctataatttatagttaataagaaaatattttttaaaattttaaattaaatatgtggcgttgacaataacacatcaactacattgacatgttttagcagaaaaaatttcaagggatacgatacgatcattgtaatagttcaaggttataaaatttttaaatagcctaattttattaatattttctaaaaagaaataggtaaaaatacaattcgcttgaccttcctatttggcccctcctcagatttttgtctggttccgccactgagaaggataactcacatttagggagaaataatattcttagtcagcataaccgtttaaaggataaagacaaaggatggctgagtagttattagatattatcccatgcgcatataaatgaaacgtggagaatgtccacgtttcttgagcagttgctagtaaatagatcctaataaaaataactatcatcctatacacctataaatagggggagatttcatagaaaaataggcggcgaattaagataaaatactattatttacctttattaagaattgtactatgtattaaaataaatatctctaagtgtagcatgtaaattttaactaaaaccacgtaaaatatttggagttcatttattattattattattattttgtaatatatagaaatttttacaccaaaaatccaaaatgataaatttattacataaatacctatacatggctaaaccaacttttt

SEQ ID NO: 343367 - DNA, 931 bp, Cannabis indica
ttgcggtttgcctgcttgtggtctcccattacaatatccaatgagcagttgtgatattggacatatttttttactttgaatgttgaggtacttttgaactttgaagctcttagaaactagttacagtgttcatccacacaagtcaccacatactctcttggttcagatcttttggttttaaattggaaattattcatcatagcaaaaaaaaaacccatagcagtcttgaatattttcttgtccttgtaaatctgtcctttttcaattttaaaaaccgtatgatctgttattatttctctttcttcttccatccttttccttttgttttcttgtgttttcctaatgatacaatcggcaacactatcagctacttgaaatatatttagtaatactagttgttaacccaaattttcgttaaccgaattttagccacacgatgataattcaacacagaaaaaaataaaagctatggaaaaataatatatgaacacatggttttttacgtggttttgcagttaaaattctgcatactccacgagtcaatcttattcacatttttgagtattttttctagggcctctttcataagagttttctcctcccttttttgagattgtttaccactatttataattgcatagtgacagttaattacaaagctgaccaaaatatgattaaagttattatccctaaaatcgtgggatctgattacacatcacaaaatgtaaatgcagtgaatgattttgaaaatcatatagctgtgattttcccgcttttactgggtcataaatattgtgtattaaacatgtctttaattgttgattctggagatgtctcgacagaaacttgattgtagtgatctcaatggcgagctggaaccattcttctttccgaggtcgacaagatatgtcttacgtcgatcgcgggtata

SEQ ID NO: 343368 - DNA, 549 bp, Cannabis indica
atttaattaatcacttaattaaataatcaaactgggaatattaaaatacagaatttcaccatgtatcttgagcaaaatgtcaaacatttatcagctaaatatccttcgacaatacaaccttctagtttgcttctgtttcgaacatatgatttcaacttcgacaagtacctatatttattcatatgagcattagaagaaaattaaaacttgttcaaatttaataaaataaaaatgaattaagattttacctttcaatacatgcaaggataaactgatggtccagcaattcttgcctcatatgataagtgtatcaccaaatgaaacattatattgaaaaatgacggagggaataatttttcaagattacaaagagtgattggtatttcttgttcaagttgcataaaatcttgtggtcgaccaacttttgaatacatcaagcgaaaataattgtttaagacagttatatgtagacgaacatacaaacttgatattcatctcaatgctagtagtagtaattgagtcatataatatgaaaatcatgacttttga

SEQ ID NO: 343369 - DNA, 502 bp, Cannabis indica
cctatttatacaaatacaagagtgaaatattaagaaactaagaaaaaggaaaactaagaaaaagaggaatgttgattacaattaatggtaataaataaaaaatttggacatctacataattattaatatttataacaaatttatctttttcctcaacaaaatatatatatatctaaaaattgaggaattagaaagaggtccttggaaataaattaggttaattaagatttttgacatgttgtaaattatgttcttaaacttttaaagtttgttaaaaatgttccttaaactattgggattgttgaatttaaggatttttgtctaattttatttaattttactatttcagcaaattgtttatttaattttaccaaatcatatcccttgaattttgacatgtactaaattatcccttgaattttcatttacattaaatttttttggctaattagtaattttttcctccgaactttgacatataccaaattataccccttgaact

SEQ ID NO: 343370 - DNA, 633 bp, Cannabis indica
tttcaatctctgacaatggaatgctattgttcaaagcacgagtgtgtgtccctgttaacactgaacttaagaaagagattctggatgaagctcacactaccccttactcattgcatccaggaaccaccaagatgtatcaagatctgaagccatatttctggtggtatgggatgaagagggatgtggtagactatgtcactaagtgcttaacctgtcaacagattaaagcagaacatcagcaacctgcaggattacttcagccgttatcacttctagaatggaaatgggaagacattgcgatggattttatggttggtttgcccagaaccacaggaatgtacgactcagtttgggtcgtggtggatcgctttacaaagtcagcacatatcttgcctgtcaaggtaactttttcagtagatcaacattctgacttgtatgtgaaagagattgttcgacttcatggggtaccaaagtctatcgtttcagatagagaccctaaatttacctcgaagttctgggtgagtttgcagaaggccatgggaactaacttaaaatttagcacgacctttcatcctcaaacagatggacaatctgagcaaactattcagatacttgaagacttgttacgagctt

SEQ ID NO: 343371 - DNA, 578 bp, Cannabis indica
cccagacccgaacttgaacctacactacaccaaaaatctaaattagtgacattttattagtgaaatttttttaaaaaatgtcacaataataattttttaatcacatttgttaaaaaatgtaactatagtaagaataagtgacattttaattagtgacattttttttaaatgtaagtattgatgtattttagtgacatttaattaaaagtgtcactaatttgtgaatatataattttagtagtattttaaaaatgtcacaagaataaattaatagtgacatttttaaaaatgtcacaaaatattaaatttagtgacattttaaaatgtaaaatgtcatttaaataagtaattttagtcacatttcacaagtgttactagtgaaaaattttagtggcatttataatttatttttaagttatgcatattatataaatctataacaataaattaaatttttacgtttacttattaattttgtagattcaaaataactaagtaaatattagtattggaccacaataattttttctcaataaacaaaattgatctctataaaaaatattaagaaaataataata

SEQ ID NO: 343372 - DNA, 582 bp, Cannabis indica
tatattatatccatgtttaatcaaaagatcaaaagatcttttcatgaaacagaatcttaataatttcttaagaattaacaattattcataaacattgattttaaagtctagtgtttatgtggtattatctctttgtagagaaaaatataccatagattttgtatcattaataaaatacaaacacatacaaaacatgataaacatataatataattggtattggcatataagttaaagaaatatgaagctcaattcataatgaaaatttcttaaagagtaaactttaataaaaatctcaaaaaatgtcataatgaattgtctacataaatatgaaatagagaacaaaatctcaaaccaataattgaaactaaattgttcataaactgaaacaattaaatcaaaaataaaagtagattttgagcttcatcttcacttggacaatctccacccttctgtccaaccatctgactcaactcgctaggatagcaatccaagtttaagcagttggagcagaaataagaagaaaataaacttggttattagatcccgaattaataacccaaggggataataattctctaa

SEQ ID NO: 343373 - DNA, 485 bp, Cannabis indica
tttagaaaaaaaggtatagtttttttagggttttaattattggtttagaaatcaaattttttgattttctaagcatagaaaatcaaatttcccaaaaaatattacaatacccttacttaaaaagaatgcacttttattatcccaaataattttttaatcaaattatttttaaggtcacataaaattttaaaaaattcataaaaatttaacataaagttaatagagttttaaaacatgattattttattttatacgagtgtaaaatacactattcaaaatattattttttatattataaattattttatattttttaaaattttacaaaatattttaaatagtgtatagatttattatagaagtacacaataaagggtaaataccattttggaccctgtgttttgcaaaagttacagattagaccctgtgttttgttaaatgacataatggaccctgtatttctaaaatagtaaaaataggaccct

SEQ ID NO: 343374 - DNA, 523 bp, Cannabis indica
aatccaagtttaagcagttgagcataagaaaaaataacttggttattagatcccgaattaataacccaaggggataataattctctaagacacgtgagtttatagcataaatagacataccttgtttctttgcccaaaacttatgacactggggtttccagtgacccttttcgttgcaatagaagcactttcgtttttgctttgcattgggattatcagcctttttcttattagctattttaacagcattaagaggcttcttgttattcttccaattcttctttttgatgggtttgaagtagaggcaatgcctgcctcaactttggccgtaccattagcagtgccagattaggagctttagttcctcctttctgtggtcctccaatcaaattttcaaatgtctgaaggttgttgattaactcgtggaagtcaagctctaacttgttcatgacataatttgatgtaaagggcagaaaagctggagtcaaactattcaagatcaaactcacttgagttgtctgat

SEQ ID NO: 343375 - DNA, 1315 bp, Cannabis indica
aaaatctcttgtgaggatcgcctataacgatcgattgtatctccttggttcggaataatgggatgatcttcagtcttggaatctttcgtttccaatttaaactgaggtttaaagtttttgggaacatatggagaggaaagggcggttcattaatgctaataatgacccttgaaaccgtggagctgttaaaattaagggcatgcatgatcttgaagaaagggattgtgacgaatgtaccctcagaagcatttaaaaatcactttttatcaaaaaataactttttaaggggcaattgttatacccaaaatttgtccatcatttcaaaggaggacacgtgtcaaactaaggagaatatggatcaatgcatgaaacggtaattatatttgaaaatagaataactcattaaatgcggaagtgacagggtatatttacagcttgctgactataaggtcttacgcgagataaagatatacaaactgttgcctcgtgtattaacgagaaaccatacagccttggatgcgcaagacgagacctcaacctcgttacgtatgagtagacgtaagtgacatataataattgtgaaaacacttagcgtataatatacaatatacaaactaagtataatagtcgagtgaacccaagcaattaatatcgaggtgcctatctcgctataggaagacacgctcctggtactttcaccaatcagcttcagacatcttttagtgagatttatagtcttgacgagtcagtcctcttgagcagaagctgacattcaaattatggtaactgttgaagtactccttgtattaagaactgcgattgtcaagacgaagcgttgtaccttcaagcgaagaagcgacgaggcgtacattatcaacctcatagagataggggaaaagctccagctcgatatcaaggtcattggtactgagttcctgtcaagacatcccagaacgttgtgatttaaaaagtatttaatacacgattatcttgacccaataaaagtagattaatcacaactgtgtgatattcaaataataaccgcatttgtattacgtaatataatcaaacctcacgatttcaagggataattgttgtaaagattacagtcaactctgtaattaactgcctgactatgtaattataaatagaggcaagttagactacaaaagggaggaaaaaattcataagaaaaaaagggtccaagaacattatcagaaatctaataagattgacttgtggagtatgcagaattttaactgcaagatcacgtaaaaaaccttcgtgttcatcattttctttttatttctttact

SEQ ID NO: 343376 - DNA, 627 bp, Cannabis indica
tggtaaaatatattccaacaatctttgtgtcccaaaagatggcacatttctatcctaccaattggccaagaactagtgtggtcatagtgtttttctagcatccatatgactaaactaagcaagaaacaccatcaaggcttcccataagccctacccgacccgtgccatttggcacatgtctctcgttaaggttttagacgttaaaattagattttgggatcctgagatcccaaaaatataatttatcatcaaaaaaacaagtcaaaaacacacattgaggtgtccgaaaacatgcacggtagacctgtgccataattaggtgtcacagatcatgatcatgatgacgtgtccgagaacatgcacggtagacctgtgccataattgtacaagtcagatttggagcaaaaaagtacatactaccctttggtaaaatagacataaatctcttaatttttattcaaatagacatagaaatctgagcgagatgagtcatttaattccgctgcaaccactgtaaggtttctcataccttttatgacacaggtcatcatgaaattttaaaatgtaataagatatttaattttaaattttaaaatgtaacaagatattttgctaacttttaaattt

SEQ ID NO: 343377 - DNA, 521 bp, Cannabis indica
ggaatgttggtgtgaattcgaaaagtcttgtgtggaggactttgtagaatccagaaggtgtttccagataagcttgtattgcgtatgaaattgaatcgtctcaccagatagcttgtcattagtctggagacgcacatccaaatagcttactgtcaatgttggttgttcatccgggaatgagcaatacttgtatgagtccagaaggcatgtgagtaatttggctcccgaatggttcgtactgaaagcgcgccttcaagctgatgtggattattgtgtgatgagctggatcatttaaagcggtgtaaatgtgtcaccatattttcgaagctaatttaagcaacaatgcaaatttacaaatagctatcaatctttgtaatcagagaaagaatgagactattattgcttgagtataaatcgtgatagtgtaaggttgagagagagaatctaaactagagagagaaaccttttctcgtaatctcttagagtttgtgaagattcttgtaaccttgtaaacactgata

SEQ ID NO: 343378 - DNA, 659 bp, Cannabis indica
tatcatcactattaattagctgtttaactatcataaaaaaaaatcaaaagtcatgtcattaaatattatttgaggctcttcattatcattttatatgtaagactactcactagggattcacatttccctcacggggatggggcccgtggggacccgcctctaatggggcggcgattccccatctaaatggggaacgggacggggacagggatcactttttgtcctcgaatgttaaacggggcggggcggggatcacactccccgccccgacggggatcacactcctcgccccgacaggaacccgtttagtattttatcttatatttttaataatattttataatttataatttatgtttgcatttttttagtattagtatcttttttatgaattttaagttatgttttcgataataattagtttattgaataataattaatgtgcaatattttaatttttatgtagtttaatatttttgtatattaaaaatttcattataaactttattttattattagggaattcccgccccgtccccgccccattagtggattccccgccccatccccgatggggaataagcggggatagagattaaaattcttaacgggaatggggacgggggaagcactccccgccagggcattggcaaagttta

SEQ ID NO: 343379 - DNA, 1530 bp, Cannabis indica
ataattttatcattaattttataattaaaaaatataaatactaatgtattgttaattattctaataaaataatataaatgacgcaaatgtgaataaaaaaaaatatatttattatgatacaaattgtacattatagtgttgtgccaaatttgacacaaaatttgatatgtgctaaattcgcgtcacttttttgcacagggcacactattacttggagatgctcttataaagtattgaaatgtcattccaatgaatgatttttttattattttggtggaatgactattctattttaaagtggaatgaattatcattctaatacgatgagaaaaattataataattttttttatacaatttaaatttgattccaccaaattcattttcatattcctatataatcattcatggcaatcaaacaccacagttcgcccccagcggatgatggatcagtagagatccccgcccgaagggctgtaagttgtgtactatcatttaaatttctaacccttgcagcagccgcgcaaaaatgacttaagtatgccttaagtgtctcgcctggctgttgttttatgttggttagcgaggcacctcgagtcgtctcccttgcggcctagaattgtttcttgaagccattggacagctgtttctagaaagttatggaatgacgagtaaatttgttaaaccaactgcttgctgctcgggaaataaaatacaacgtaaattgtttgtcacattactatagctcgcattattgtgttgaagttattcaaatgcgagaccggatcggtagttccatcatacgataagacatgagggtttctaaatgccaggggaaaaggagtattcatgatatctggatggtacggctcaagctccttgcctgagtcgtatccagattgtctccctaattcccctacttgatatctcctgaacttatcctccaactcgtctattcgcaattggataggatcctcttgctttggaccaagttgttggcaaagatcaggttttttccgattttagtgatcttgcatatctgactaggagtaattgctagcagatctcgttttactcactgactatgtcctactcacggaccttgtcttgcccatggaccttgtcctcgagtgacttgcgaatttactggttcccatgttttctcgatcattagctcgtcgagcactctctcctctttgagttgatcgactatgggtccttgaacgccctgaggtcacatttgcttcttcacgctctgttcttctcccctgagtgttgtttatcgtatttccttcaccggggtttgtacgagccctctctctatgggttcgggaagaacgttgggttgactgtaatctttacaacgtttatcccctgaaatcgtggggtttgattacatatcacttagtataaatgcggttattatttgaatatcacacagctgtgatttatccgcttttattggatcaaaatcatcgtgtatttaaacacgttttaaatcatagtattctgggatgtctcgacaggaact

SEQ ID NO: 343380 - DNA, 1209 bp, Cannabis indica
tacatatgcaatgagttgttttcgattgcctatgtctttttgcaaccaagttgagtcgatgatggctaacttttggtgggggttgaatgaaaatggtactaaaatatattggcgttcttggaagctcttatgcaaaagaaaagaagatggtggtatgggattccggtcgtttgtgcacttcaaccaagctctccttgcaaagcaagcttggagactacattcccaaccagattcactactagctaagcttcttaaatgtcgttattattctaacaactccttccttgaggcctcgcatggacattccccatccttaacttggcaaggtattcattggggtaagaagctcctatcttcgggtttaaggttgaaagttggcgaagggtgtcgaattctttgtggcctagatccatggatcccggggcactctactttccttcctttccattataatgggccaaccaatggtgtagtctctagtcttatcaaagataatagagaatgggatctagaccttcttcaacaatggttttctgaacctgatgttcaacgaatacttactatccctttgagttttttcaggaatagtgatactttaatatggcatcatcacacgtctgggatttacacagtccaaacgggttatcacttagcttcctcacttgaagatgtggctgtttgttcgggttcatatacaaacagcccctggtggaagtttttttgggcacttaagctgccccaaaaaataaaaatatttgcttgtagagtcttccatgacgcccttcctgttgccactggccttgtcaaaagaaaaattattacggattccacttgctcaatatgtcgacaagcgtgggaaactgtgggacatgctctttttggttgtaagtatgccaaagctgtatggagaatttctggtttcaactttgattggtataaagcctcatcaatgcataaaggggattacttggttcaccttacaagtattcactctaaggctgaaatggaacaaataatatgtactttatgggcaatctggacagaaagaaaccgagttatacatggacacaaagccaaaaaggccatggagttgtcatcctttgctggaaactacctgctgaattacagatcagctatttccaaatatcaacagccttttcaagctccggtagcagcaccaatgcagaattcttccattccctctgcttc

SEQ ID NO: 343381 - DNA, 654 bp, Cannabis indica
catatggatctaaatgacttttttatgggtttggttattgatcaagataaagattctcttggtattctgtattgttttctgtgggcgctttggaatcaaagaaataatgtcttacataagcaattttctattccgcctaaagatatttttgattggagtcttgcatattttttccagcatttagatgcgcagtcaaaacaggtgccaagaccaggttcagattgtaactcagcccctgcagggattcaaccatcttgttccaatggttttaaactcttcacagatgcagccacggatcctcatagaaaaagacatagtattggtgtggttcttttggatggttgtaacagagtaaaagcaggtttttctatccctttttctggtcttgttcctcctgctgttgctgaagccaaagccgttcatcatgctatccaatgggcccaattgcttcgatttcctgtggatgtcttgatgacagattgtaaatctatagttgataaacttaatacttgtaactggaataatagtgtatttgatgatgtaatttgtagcattaagaacttgttatcgttcagtccagacctaaccatctcacatgttggtagggattttaatcttttagctcataggatagctaggatgggtcttggatta

SEQ ID NO: 343382 - DNA, 1059 bp, Cannabis indica
ccaagtggctcggcacgccactttcccaacgccgaacaagatccaactgtccaagaggagggggatcatgaaggggacgctgaggttcaggaaattgaggagcaggacgatgtccgtcctagaagtccctctgaggcggaggaagaggtttcacccccaaactatggggggatacaatgaggccggggagccaatcaatgctgatggagacgtcctggttgagggcgtggactatgtcagtgaggaacttaccgctgcggttcctcatagaaggcaaggtaccttgggtgccaggtgggtgagcccttcgtctaaggttactgaggcgtgcctgcgagctctcgaccaggatggctacttgggcgaattggactgttacattcctgcccacaataatcgagccacaaacccttaaaaggggatgtgcacctggtcgggtgctcatgcccagcaaggggcattgttacctttgcacccgtacttcaagaatgtggcagacttcttttgcctctgtccgacccagctcactcctaagggcatcaagaatctgtccgccctcttcgttctttatgcctcccagaagtgggatataccttctccccacgaggttagctagttttttgatttgaactccacccctaagcaagtcaggtcggggtacttctatttccctcaaccagacttcaagtggttgatgagcaccggggattcggccatcagcaaaatcgggcgctttgttgatgagtatttcatggtggatggcatgggcaccacccttactcggttccagcagattcctacatatcaccgcccttccctcactcttactcttagggatagagctcaaaagcttgctcaactgccaagggatgagcggaaaaacatccatttgacctccaaggacaagtttgtgaagtatgggctctatccgaaggatttcatgttgggttttatgccctaaataaaactcattacaatttgattagttatcaatttagaagtgaagtatgtttacatgtatgttacatgtttatggtttaatacatatacttgatatat

SEQ ID NO: 343383 - DNA, 705 bp, Cannabis indica
acagaaaattggcccttttgattatttttccagaaaacctgatccgagaaaggataaggaattctagggatattaaggatacggtgtcccatatttggaccaaaaatctgcatgatgatctcctcattccaaacatttccaattgacacatctgctagattggtaataataaatcttctacctcttaactgttgcataaattctacaaattctggatattccatccatgggatccatggttgtttcaagaaattgatcgattcacccgaagcatcaatcgacattgacccctatttcacccaatttaatatatgaacaaaataaataataattacatatattttcaataaaaaaggcttaatatttgatcaattttgatgagtcacatgttcctactaaattaaaggtaatagcttatcttgataatacatttatactttatggtattcacttgacatgtttcctaataagtatccttgtgatttagatatttggtttgtttttgattaattaaacttgatctttgttctactattttcagttatggtcctatttataaagccacaataagtgattgggagtaagtataaatttgatgagaatgtcagttacaaatttgaaaaatttagaatatacataataaaagttatcattatgttataatattttttctaagatatttttgtaattaagtacatattgttg

SEQ ID NO: 343384 - DNA, 705 bp, Cannabis indica
attgtacttttgttgatatgatatataattttattagtatcctatatatttttatttttatttagggtaaataccattttggaccctatgttttgtaaaaattgccaattggaccctctgttttgttaaatgacaaaataaaccctatattttctaaaatagtaaaaatatgaccctgagcttaatttttcaacaattttattttttaatataaccaactttaagaaaatttctaacacgaacagatacagaaaatgtaaccagttttgtcataacatctttagattagattattattaagttttattttgacaaaaaattagttcagggtcctatttttacaattttgaaaaatacagggtccattttgtcatttaacaaaataaaaagtccaattggtaacttttacaaaacacatagtccaaaatagtatttacccttttagttattgttattatatatttttttattgtaagatacatgtttctttattacatggtatacaaattttattgtatggtacatcattttattttagatcatgcatgtttagtttttttttattatatatacccgtaaggaacacttcttaatgggtattacccatgaatggttactaaacaaatttaactataaatattaattttaaaaatatcaaaccatcgaattttgatcttgtaaagtccttttttggcaagttaggtg

SEQ ID NO: 343385 - DNA, 441 bp, Cannabis indica
atcaagggctagagatctcaacggaaggagtcattatattccgctgcacccaatgtaaggttccctaaactttatatgtatttatttcattgttttagaaattcatattaggatgttaatgaaacataattgttagtaaatctagatcctcgtaaaatatttccaacatgcataccatccgcacgcgcatttcagggttgttgggcgaggaatgccgcacatggatgctgcgtgtagcatttctgcgcgcgtaggggctgttcaggcagcctgggagagcaccttcggacacattcttctctaaatgtgcgtgacaccgagtgatgcctcttgtccgcgcgcgcaaggagggtgcacccgaattctgattttttttcaaattttcaacaaatcataactaattcaaataaaataaaaatcaagttctgtaaaaaagtgaat

SEQ ID NO: 343386 - DNA, 1622 bp, Cannabis indica
ggagaaggggctcgccagtcgttatgagcatcttaagctggaactatcatgtgcttgagcctccacggactatacagttcctaaaagaacttgtattgtaaaataagcccatgatgatatttttatgttaaacgataaagaaagagttgtgtggttgagaagacaaattgggtttgaggggttgctttgttgttgaggcttaagatagaagtggtggtatcttatggaaaaataatgatgaggtaaaaataaatatcttttactaaaaattacatggagtgtgtgttttctcttaagtgggtatccttcgtttcgtcttatttgggtatatggcgaaaccgaaccgtagccttcgaagaaaagcatgggacttgcttcgtgttagcccaagatatacttccaagaggagggagagggaattggaaatttaaactaatattaaaaatttaaaaaccccaaagacaatatatacaaatattcaaatttaatgctatcacatcgataaacacaagtataaacaaatagcaaacttgaaatgtaaagaagttagtgatagaaattataaactctcgatttttacaaggtttggtagaacaaagccacctacatccttggtcgttaaagctatggacctatctttgagttcaactgtcggccaagttaacaggcttgactaacccctacaactggggaattttttaccaaagttttctccaaacctctcacaatagttttcttccaaggactatcaacctcaccggattattgaagtatcaatctcaccaaccaagtctttttttccactggtgtcaacttcacatcaactaatagttttccaaaagactatcaacctatttgaattgttgaagtgtcaattgtctttgctcaagtaaaattaaactaaatacatatcgtgagtacccatgtaccactaagtaaagaaataaaaaaaattaagaagtcacaacatataatccagaagtttatatgttactcaagaaagtgaatagtcaatatgtaacttccaaattcacatacatttgagtattaactgagaacgatcgaaattgttcttttatttattttgtaaacgttttcatattaattaaatataattaaagttgtaatggtcctatctgattagttatgttactcaaaggatcacctactttttatataaagagtgttgggattaaactcacttaacctctcaagtcactatgtccatctatttgctaatgagatgaatctgaagaaagctactgcaattataacacttggctttaataccaacttaaaggggacccaccagcaactatatacaagggttattttagaggtctgagttgagagttctgatctttaatctccaaagctcatactttagattcagttgagagagagagagagagagtccaagatcatagtgagtgagtgtggagggatggtaaaagggagtatcactcttgaagtgtattttcctcaatgtgaggttatttctttgtaattacttactatgttgagttgtaatcgttgggctcattctatggtgtactactgactattcctattcaataaagatccattattgagtttaagttttctttgtcttatttcaattt

SEQ ID NO: 343387 - DNA, 685 bp, Cannabis indica
atgatcgggtggagtggggctttttacaggctatgaagaggattgggatttgatgagcatgtggtgaagttgttaatgcagtgtgttagttctgtctcctacacaatcacatcggggggtcatgaaattgggcctataattcctacaagaggtcctcgacaaggtgatcctatttcaccctatcttttccttctgtgtgcaaaaggattctcggctttgataagagactatgactggttggggaagatccgggggtgcaaggttgctcggggggctcctgtgttatctcacatgttctttgctaatgactgttatgtgttttgtaaagcctctgaggatagtgctattaacatgattgaaatgtttaatatctttcaaaaggcctcaggacaacaagtcgatctacagaagtcctctatatttttcaacgctaatattgtcaatgagatgaggcaacatctgtgttctatgttgggagtgaatgaggcaggtgatgatagcacatatttgggtttgccaaatattgtgggtcgtaataaaacggccttacttgggttcttgaaggataaaatgcgtaaaaggattcaaggttgggaaggaagattgctttctagagcagagaaggagttgctaataaaaacgtggctcaatctcttcctagttatgcaatgaatgtgtttttgct

SEQ ID NO: 343388 - DNA, 678 bp, Cannabis indica
ttctatgcctagtgatcccaaactcttgacacatcttgtcaaaatcggagttaacaaacatcaacccattatcagtcctaatgttcttaattttaagatcattctagttttccacctaagttttccaaattctaaactgttccaaacactcatcctttgtggttaacaagcaggtccaaacacaccaactataatcatcaactatcgatagaaagtattgcttaccggagtgagtaggcaccttgcatggtccccaaagatcagcgtgcacatatccaggtacctttttagtgtgtgccttgtcggagtgaacttcagtttatgttattttcctaaaacacaagtttcacaaaatggtaaggcacaagaatttaaatttttgattataccttgtttgtgtagttctttgaggccttgtttactgatatgtccaagtctgtgatgccacaacttcatatctgattctagccttttcaccatacttgcttctccaactaggacagtttgtccttggaaacaaaaaaaccatcttttcacctttcatcactactaaagaacctttggtgatccttaagcttctatgcatggacttgtatccatatccttcatcctcaagtcgcacccagggactatgaggtttcgtctaaggtccagaactgtgccttagacttcgtcagc

SEQ ID NO: 343389 - DNA, 943 bp, Cannabis indica
atatatcgggccttgtacattgggcagcgtacataaagctccctataacacttgcatactccaattgagccactgctctaccactatttttaactagtggtttactatgatcgaatggtgtgttggcctctttagcctttagatggctaaacttattcaacactttctcaatatagtgtgcttgccctaaagcaaaacccccactatgccttgtaactttgatacccaaaatagtatccacttctccaaggtctttcattttaaaggttgaagaaagaaacctcttagtttcttctattcctttcatgttatcactaaggattaacatgtcatccacatataagcaaacaattatcacataatttttacaagtttttgaatacaaacacttgtctccattgttatgcctaaagccatttgaaagaatagcattgtcaaacttgacatgccattgtttcggagcttgctttaatccatataaggatttcttcaacttacacactttatgttcattgtttggtaggacaaacccctcgggttgttccatatagacctcctcatcaaggtcaccatttaggaatgccgtttttacatccatttgatgaacatacaagttgtgtaatgaagccaatgcaaacaacacccttatggtagttgttctagcaacaggagcataagtatcaaaataatcaataccctccttttgcctaaaacctttagctactaacctagctttaaaggtttgtatagagccatcagtgtgatatttctttctaaatatccacttacacccaattgctttgcatccttgcggaagatccacaacatcataggtgtcattggagagaattgagtccatctcatcatcaactgcttctctccaaaatgcactatctctagattgcatggcttctagaaaagtcttaggatcatcctcaataag

SEQ ID NO: 343390 - DNA, 523 bp, Cannabis indica
aactttaagttactcgaaattcagtttatttgcatttaacataaaaacattagctctaataatgtatgtatatattctcataatctatcattatattgctatttatgcatttactgtatgtcaggactcttaaattgggctagattaacgctatgttagtactacattaaaaatttatttaaaaaaatgagcagaatgtaacaaaaagagatatttacaacaattttcacaataaacaaaatttcaagaggcaaaattctacaattgtcatagtttgaggagaacaaatcctatttattcaaaagtttaagttgatagctcaatagactagaagaatctttaggtacttacagtgtaaacaattgagtaccagaaccaagtgctgcagcaagcaatgacttgtgagctggtaatgtaaatacatcatctagaatacacttccatcttctttcatgttggtaattgttattcaattctttataatgcaacctcctattgtagtcatcatttatgaaaaacaaaa

SEQ ID NO: 343391 - DNA, 806 bp, Cannabis indica
tttgtattaccaaatatttgtatgctgatgtttattcgtggcagatgccaatagtgatttggattttatcttatgaacaatgtgtgatggtttgattcttattgtgtatgaatgacaatattcaaataataaactatatgattgctattattacttttcttgttgattccttctgactcatgggtactatgtgatgcaggtaaagccaaagaaaagccagatcaactatgaggtggcagtcttctccagcattgtacatttagatttcatcttatgaacattgggtgatagtttgattcttattgtgtataactgacaatgttcgaataataaactatatgaatgttattattagttttcttgctgagtccttgttacttacaggtgctatgcggtgcaggtaaaggcaatgaaaagctagatcaaccatgaggtgacagtattctccagcaatgtacatattgacctcacttgcctgcataccgagttgccaggagttgttttggactggttgtatcggttgtgtattttgattttatgtttaaatggttgtcgtacatatttctttagcaaaactttttataacagagattctcggaacacactttttatgccgttataatgtccgtttttagtgttttattttagtgaagtttttaatattatcacagtttttcataattaattattatattagtattaaactaatttataaaatcacacacgtggcatccctatagattagggcgttattgttgagttttatgccctaaataaaactcaaattcaatgtaatccatattatt

SEQ ID NO: 343392 - DNA, 808 bp, Cannabis indica
tttacactactagcactaaatgtttgtatggttttaagggtgttagtatagtgtaggttttagaatagttacagtgttaccaacacgagtattagggagtacgtcgtgcatgtggtacaacacttagtaacttttgggggtacaataatggctctaccaacacgagtacagggttggcactttagtgcatttggtacagtggtcgtacttcacttaagaacgttcttaatcatttggtgagctcgttgttgagctcagggcggcttaagcattaaaccgatctagcattgcttatatatatgttttgcatatcttactgagtctgttgactcatcagtttgttaccttgtgtaggtaaatgcaaagctaagctagaggaacagtgagatggagcttggcaatgattgtacatatcgcggcagtgcaacctggagggtctcgatctttcaatattttgaaatataattttgttgcttgttgtttgtaaaaaaaaaaatattactagtaagtattgtattagaaaaatacttctaaactatatattaaaactcgggatcccgacccatataattataaagttataatataataaagctatcttttgagtttagaaatatttaaatacgggcgttacaattctcttacatttgtttacttacattattaaaattaggaaagggagaacttgattaaataagggagaaaagaaaaggaaaatttctcccaccaattttataaggaatgtcattaagggtaatggattttaattatttttattttattttttaatattaaatatataatgaca

SEQ ID NO: 343393 - DNA, 633 bp, Cannabis indica
ttttttagtggtaaaaatatattctatcaatattttattgtaaatgaggtacctcacgttaaattctttgttaaataacaattaaacacacacctaacattatttaattggtccaagtcatttatttttaatttattatattaaaattcattcaaaaattataaaatcatttaaaattttaaaaaattatttaaaaagtaaaaaacaataaaaaataaaattaggaaaaaaataattatatatttatattttcttaaaaaaaaacaatttacgaaagcaatctaaatcgattcttcattaaaaaaaaaaggaacaacaccaccattgtcttctcatggtcccattcatcatcctcaacaaataaaaaaaaaattaaaaaaaatctaattcatgaatatgaaaaattacataaattttaaaagaatcaatctcttcacaaactcatcaaacacatccaaaataacccctaaactttttattcaaagtagaaaaaaatttcaaaaatttgttacctatttgcctagataacctactcgatccaaacccaagagagcctcctcgccttcatataaccctcggagccaccacactgtcgtcttgcagagatccttgttagattaaaaatcctatgtg

SEQ ID NO: 343394 - DNA, 928 bp, Cannabis indica
agaaatcgaaggttaatgttgcttaaaatatttccctctctaaagttaagaaagggaagaaccaagatgatgagagtctgaaggtttctttctagtttctttatagttttgcactaacattgtcctaactttttttattactagtttctttgggaggtaaaaatccaatttattttatttttaaatatctctaagaattttaagtttctttttttatatatacaaaagtaataattattttttattttttaaatgactgattaattgttccattgagtgtgtggtgtagttggttggaatattttgcaatagttcctcatttagttgttctccagagttcgagtccccatggttctttatcttaggccttgaaaattgctctattttagtaataagaaatttttaaagattcaacagaataatcaatgtagtaagaaaaaaattgaaacttcatattaatgtgtcaaatatgatattgataatgctttatatatttgttaatattctggatatgacatacaataaagcaattattgtgcaactaatgagttgctccttgcaaaaaatgaggtgttgttgtgttgctgaccatgttcacacacaatggatactttgtgaaataaggattttcaattttagttgtatgtagaagaataagcttggatcgtcatttatcctcgacggttggtatccttctttcacttggtatttcagttgtagtagagtattttctttgttgcattccagcacctgttttaacttgtgtactagttcttcatatttgtaatctattgaaatgtattggtcagtagcttcgtaatatacataatttgttacttgatcaaactgtccatagtaaaatatgagaaacgaaattgcatctttttcttgacagtttgaaaatataagtattgtaagtcaactatgg

SEQ ID NO: 343395 - DNA, 1329 bp, Cannabis indica
ctacgcgtcactagtaggggtatagtgtcaggtttttgtcagactagaaaaggtaatagccacacatatgaagtgtcactatatcattatttatagagatatagtgacatacaaaaagtaccactatattaaattatttttcttttttattaatattgttaatttttatttatttatttattttgttttaataactaaaaagtaaaataaaagtccaattaaatattaatttaaaaaatataatatttaattattttaattcaaattttatatattataaataataatttatattaattatatgcaattataattaaatataacaataataattttaattaataaaaaaaaatataaattacaccattatcataattccaataaaactcatatctattactaaacaaaatattaatccaattttttacagacacaatatttacattattacattatagagctcaataattcaacaaacactactaaaataaattaggtcagtacctaaacattaacccaatttcttttttacagacacaatatttagaacaagaaatataacccagaaatagaccattcaaactaaaaaaaaaacctaaaacaaattagatccacggcgggcttcaaacgaaccatgagccgagatccacaacatgattcaaacgaaccccgagctaagatccatggcgagcttcaaacgctgacacttgagatcgctgcacaaaaataaataaatgtcgtcaccacaagagagagacgcacgaaaaaaataaaaattataaaaaaaaaacctatttaccttaggcgaacgagatagagatctcaaaacttcggtctagcggaggtttgtgcgcgaaaggagaatgagagagagagagaggaggggcgacggactgtggaggagaaaggtggtcgacggtggttagagccccaccggtgctgggaagagagaagctgcaggtgcggctgcggctacggctgagaagagaggaggtgcggctgcggctgagaatagaggaggtgcagctagctgagaagagaagtgcgactggctgagaagagaatgcggctggctgagaagagagaagagaagtgcgactgctgagaagagagaagggaagggtgcggttatgtttagaaaatttagggttttttaattatgaaggaagagagagagagatagttagaaaagtaagatatgagtaggtttttttatataaatatgttatttatttatttaataaataaaatatctaattatatttatatataattattgtttttttttctaaaaatattaattaaagttgaaaaaagtaaaatgatata

SEQ ID NO: 343396 - DNA, 639 bp, Cannabis indica
aagaatccagtttcaagagaaggagattcagactcatatcttggtgataccctggtacagaaaggatacaaaggttagagatctgagtggaaggagacattatattccgctgcaaccactgtaaggttcctaatactttatatgtgtttgtttcatatcgttttagaagttcatgtttaggatgttaataacataattgttagtaaatctagatcctggtaaaataattccaataactggcctcagagccatggtaattgatttacttttaagaaatttggacttaaacaatttgtgtgtgatttggatggtttaatgttgatatgtgtgttatttgatgattgattgatgtttgcaaaaattttatgaaaaataattaaattttcattctagaactatttttgttggatagtttggaaaaaattaaccatttcgcttttttacagaacttgattttaatttaatttgaattagttatgattttttcaaaaataaaaaatatcaggggtgacatcacccgtatgcacgtgcggatgtcttagaattctgggttgcacgcgcatcagacacgcacatgtccgagaattctcggtctgaaggcgctgtttttgtttgaaggtgggctgcgcgcgcggaaat

SEQ ID NO: 343397 - DNA, 669 bp, Cannabis indica
atataaaaaggtatagagtgtaatttcctctaattaatggggtggactctctcgacaattcacatggcgcaatgggaatcacatcctaggatgatgattcaatagcccacgcccacggtataagcagcttgtatttgtctaataactattctaaaattgttttgttgtcttttcatattcgttgacaattttatccactttttttttttttaatgagaattgctaataggcatgaaagcatggaggtgtaaaaaagtagtagaaagttaaaatataacttatttaataaaaagtatgctttaataatgtgtcaaaaagtgatgtaaagttagttcatagtaaattttgtgccaaatttggtacaacatttactatgatataaaatttataccacaataaatgcacttttttatttatatttatgtcatttctattatttattaatatattaaactatcacattaaattataaaacatttatattatttttttattgtcttacatattaaaataataataaaattgattataaagttattagattttattttttttaataaaatattaattagatgttaaattttacatcaagattttgcaattgtatattagagcacaaagctaaaatttaccacaaaactactttttgtgctaaatatagcacaattt

SEQ ID NO: 343398 - DNA, 870 bp, Cannabis indica
cgtgagagacatccaaaaattaacaggtaagatagccaccttaagccgcttcatctcgaaactctcagacagaagccttccattctacgacttgctaaggggaaaccgcaaattcaattgggacgaaaagtgccagctggccttggaggcattgaaaaaatacttgacaacgcctcccgtcctttcaaaaccagagcccggcgaaaccttgctcctctacctctccttgtctaagtatgccgcaagctcagtactggtaagggaccaagggaagacgcagttaccgatttattacaccagtaaaactttctcgggggcagagggaagatacccaataatcgaaaaattagcatgggccttagtcacttcagcaagaaaacttcggtcgtacttccaatgccatacaatctcggtcatcacgtctttcccactaaagcgggtcttgtacaagaaagaggtatccggaagactaatgaaatgggcggtagaattaagcgagtttgatatacagtacttgccccagacggccattaaggggcaggcgctagcggattttttggtcgagataaccccggagcctatcctgcccaagaaggaattcgccggaaaggactggctactgaaggtagacggatcctcaaatgtcagaggaagcggagtgggaatagtattgctatcacccaacggggaaatgatagagcagtctctaaagttaggcttccgagctaccaacaacgacgctgagtacgaagctctaatccacgggataaaactggtaaaggacatgggtgccgagagggtgttagtccagtcagattctcagttgatagttcagcaggtcaaaggagattttgaagccaaagaactgaa

SEQ ID NO: 343399 - DNA, 555 bp, Cannabis indica
ttggcatataatctttgatcctgctcattgcattaaatttggcaaattaatgtaatttttttactactactaacaataacattcatatatgtacaatttttggttctgaaattatgtttgggaattcttatgatcattttagtgtttgatttaatggttttacatattggtctctctttttattgtacttttttgttattgattaattactctattgacatacatttgtctttgctatgcttttatgagtgtcactagtaattttgtgtgtaattttcttattcttttgagagtttgttagtttgcttggcttgttttatattcttgcaataacaagccaattgaattctaacttctctattattgttttttcattataaaacattttgttaatatatatacatatagaataattctatggtagtgactatatttttgtccctatactatatatacactttttttaaccgttcatttatatgacttttttaaagtcaatattgtgtaacatgtatttgtttgtagctttattaaatttactatttttttttttaa

SEQ ID NO: 343400 - DNA, 551 bp, Cannabis indica
tagcctaggttctattcttcatcacaaataaaaattgtaatttatcacaaacactttgaatcctagactattaggtgaatagtaatcctaagatgacggtagattaaagtaaaaccaaatttagtggccatctaaacaagattaaaacaataatcatgacattgaacatagaagaatagaagcaatttgatataatagaaactaaaaattaacatttaataatgaaattaagaattcatatttcgggttttgaaataacacttaactaaaagaaaactactcagaactagacattataaccaaaatcataatatttagtaaaagtagaatgagaagaaaggaattatgatgaagaacactttgaagccgatctccatctcttccttgctctctctgattttctctctctaatttgtagcttttagaattatttcatttgtagcctaagaggttctatttatagtgataggaaagttagatgaatcctattagaattaggattctatttataatagtattaggaaatatctcactaaaagaaaagataactc

SEQ ID NO: 343401 - DNA, 628 bp, Cannabis indica
tttgagaagaagctcgctgaaaaggaggtcaaaaccatagaacgaagcaacaaggttggcatttgtactgtatattgagcctggatggcgaatcgcaacatgcacacaagcttcttggaggagaaggaagaggaaactctggccttctgtgagaagtcaaggaagaaggaggaagaggccgaggcagaggaagaagaagaagatttatccaagtctcccaccatgtagaattggtttttatttatctccttttttttttgaaaatggcctttaagccgagacaatggtttgcccctggtggcactttttgtaaagacaaatttgcaaagttggatggccaactttgcttttaatgcctcatacttttaagtttaaacttcaacatgtgcttgtttgattgtgtttcattcataatttaaacaatcatttgcataaagtttattagaggtttccattgctcgtatttcattctaacgttaggtagttaataacctactttacgcgtgagcagcttatcttctgccctaccctcaatttacgagcagttattgattctgcatcgcgatcatcaaaagtgattttatttcaagcaaacgtaaatatatttttaatgaccttgtcactttgt

SEQ ID NO: 343402 - DNA, 594 bp, Cannabis indica
aatttcttttgagttaatgtaatgtgttgttaactaattaatttatgtattaatatgaagttgttatctaattattttatttcttcatatgtaattgttcaatcaagagaaaaatagtttatgttttagtttttcatggttcatactttttgttgtttgttggtttcttttatattttctacactattagttgatgtacaattaattttcatattaaaatagaattgttattgtgttgtttatttattgctattaggttgtttaacaagagaaaaatgagtatatttttatttttttaatgtgtagacatatttttaagttggtgtacaagtgttatgtagttgttgttaaatttattttatagattatttctgtatttttttcttggatttgatgtaatttatgaagtttttttcatgcctatttaacttgtatattaaagtaagttgttatacagttgttgatttgttgttatttagttattcaaccaaataaaaatgaatatatatatacatgtttattttattttatacattagtggtgttttttaattttttttttagagttgttgtcatgcctatgtaatttgcatat

SEQ ID NO: 343403 - DNA, 1043 bp, Cannabis indica
gtcgtatattgtatgttataacattttattattttcgggatatcatttttagggatgttagtatcgggttttgaccggaatatttttataattaaaagtccttagaagcttttatcaatctttggtatttatttatggagtaattgctcttttaattttttttaattcttttattcttattgttatttcttttcagcctaataacttaaatatattaggtaatagatttagataaatctcctttttctcttggaaaagctagaaagccctagaaaattcactcttcttcaacctctctctctcttgctctcgatttccctaggagcagcttgaagctgtgaattttcagcttatctacaagaagtctagctgaattctaaagtctcaattcaaggtatctctttctagttaccttccttatgtttttccttaagtttaggttgaattgtgagggttgagttgaaggttatggtggctgtttgttctagagtcattctaatttgtaatctggtgttgattatgttctttgttgctggtttggattaatttaaggggttaccttgttgtttgagtcaattggagttcatgaactccaacttgggctctaatggtgattccaagttttgacttgtttactataatttgatgattggaatgtgttatttggggtatgagcaggtgttctggaagttatagaaaagtttgggcttgatttgaatttaagcgatcgaatttttgttcccagctcagaaccgatcgaccggttctgagaagcctcttgcaaccggtcgaccggttggtacccaggaactggggttccggttgggaaccggtctgccggttggggctttttcccgagccctagtttttcccgtttttgcgtaatttagggtattggcatcctatttatcgatagggttaagcttagtttctattttaaatccccgataggtgttttagcgtgtctctcattgaattctgaatattttggtttagggccctgtaaagcgtcgagttgcgtttccacttaggctgaccggcac

SEQ ID NO: 343404 - DNA, 1123 bp, Cannabis indica
tttagatgagatctaaattatattttcaccagtgaactaattgtactaaaggataaagaaataattataagggtaaaataacaatttaactaagactaattacgaaccgatacatggaggactaagtactggaattgattatattaatggacagcgtagtaaaactcagtaaatataattcaataattaataagagttcaattctatatttatggtggagtaatcatagaattaataaatatggattatttggctgatgagactcaataaataatctaatttattggagcttagaattataggtcaatgattctcgaatcgccaccttgaaatattatcaagggaagggataaagagttgcataatgttgttcgaaaaaatctattttaaattggcaaaatagtcattatttatttttgtaataaataaatgacttttcaaattaattaaatggggaaaacacaaaagttgttaagataaaaatttatcaagataatatttgttgagataaatgtcgttagcacaaaagacatcatccttgtcctaattgagacaaggtatgatcctaccgtatagtagggtgtccctattggttttgtctttttgagttaattaattatttaattaattcaattagataaatatttgaatttaaaaagtggttaaagatatttatagatatttaaaatcaaatatttatagatatttgattataggtatttatttaaataattaaatatgatttaattgattgagaattaactactataaatagaagcctaatttgataaatcaaagaagcttttcaatatataatttttgaaattaatagaggagtaaagaaaaattattttttcctttcaaacagttcttactaatgtatatagaattaatcaagaaaaaattatacactttatcctaatagcccacattattcattgtgtgtggttgatcgatttggaagactatagtatgagtttctgatcaaacaaaaggatacaacttacgagaactttcgaggataccctaatagtcatcaagaggtatatattcatttcctattatttaatattttgatttaatgtatacacatttggaaatctattgagactgtggtacaatt

SEQ ID NO: 343405 - DNA, 528 bp, Cannabis indica
gtaggagaattcaattagaggcaagtactattccatgaaccctcaaagtccacgacataggctcgcagtaaatcttctagtatctgaattgttctttctgatcgcccatctgtctgaggtggaaagttgtgctaaacttcaactttgtacccatagctttctgaagactcacccaaaattttgatgtaaactatggatccttcacatacaattcagcatactgatccactgaataagtaactttcactggaagaaagtgagctaactttgtgaatctgtccaccatgacccatactgaatcatacatccctgtggttctaggcaaaccagttacgaaagccattgcaatgtcctcccacttccactcaggaagggccaaaggttgtaataaccatgtcggcctttggtgttcaattttaatttactgacaagttaagcatttggacacgtagtctaccacatctcttttcatctcataccaccagaagtagggttttacatcctgatacatttaggtgcttcccgtat

SEQ ID NO: 343406 - DNA, 1023 bp, Cannabis indica
tttttaaatagtttattttcagtttcttgagcaaaatgacgatttataaaattgacttaatttgcaggtaaagccaataaacgagagcatgttcgaagtggtagaagtaacaagatcatgggtaatcaatctaaaggagaaaacatgcagttgcaaccgattccaacttgacgaattaccgtgtgctcatgcgcttgctgttataaaagagatgaacttgaatgtctacaactactatttaggttattacaccacaagaacatggcttgaaacatacagtggctcaacatatccggtacacaatcacacaacatgggatgtaccacagaacataaaaggtatcattattctgccaccaaacccaaaaataagatctggaagaccaaggaaaagaagctttttagctgattgggatacaaaaaaaaataacaggtgcagcaaatgtggtcaacacggacacaaccgaaagacatgcaacaatcaagcaataaaatggatatagctgaattatttgaattgtttaattccctatgagaattcacacaggatgatatgttatattcgatagactgattttattttgcaaattttaaataatttgctaatagttgcaaaattgttttatgacagttttgacacttttaaagtttaactactgttgacttcgcttttagccaacgacaatgagtctattttataagcgataaacgatatgtcataaaagtatatatataataaagcagtaataagacacagaaattttatagaggtttagccccgagcagttcggtaatagcctaatcctcgttatttgtattgacttaagaataaggaagaagattccttttcttatagctcttacaacaatatctctgaatatataattcttagataataatatagtcttagcttggttgcgtatcgactttcaatctctcggtccctttgcccagtgaacatgtatcactatttatagggctgggaaacttgaggaggaagagtttcctctctcgttacaatgcg

SEQ ID NO: 343407 - DNA, 614 bp, Cannabis indica
aattttacaatcaacctactggacaaaacatgcagctgcagaaggttccaataagatgtgataccatgtgcacatgcaatagctgtatttgcaaaaaggggattaagaccttatgactatattgccgactactacaaaactgcaataatgaaggcaatatatgaaagaaatgtacatcctctaccaaatgaaagagaatggactatatttgagagtctcgagcagatagtgttgccaccaaaatcaagaaagccagcagggaggtgtagagaataagatcaaaaggagaatcaaaagttgacataaaatacacaagatgtggaaaaattggacataatcgtagaacgtgcagtaatccacaactttataaacctccaaaatagaatagccaaaacaaggagtcaaagaagaagcattgatcaactaaaaaataaataaatacagattaacagtttatgaaaactggtttctcagcattgattaaatttgagaactcttgtactttttcaataagatacttacaataacatttttagatttctaaactatgatctggttaaataaactttgctttaaagattttttcataatttcatatattttagaaattaaat

SEQ ID NO: 343408 - DNA, 666 bp, Cannabis indica
ttggttttaattaatcaattatgttatactcgaaattctattggtactttagaagatgacgcgtgtcaaccctggaaaatatgaattaacaaatataatggcaattatattaaaatatattaaatggaataactcattaaatacatagtcaataaggtatatttttaacagactgcacagtctttagcgagacaaagatgtacaaactgacgagaaaccatttcgcgtcagaggacactgttgtaaggaggacatcgataatacgtaaagaggcatctacctcgcgatacgagacgtgttggctgttagaacacttagcgtacattatactaactaagtaggacatgaatagcgattagtgagacatccatctcgctataggaaggcatattcccggtaccttcactaatcagctctagacatctttcaatgagctccactgctacgtcgcgtcagctctccaaaaaggagctgacattcaaatgatgttggtgttggatttattttaccaggatctagatttactaccatgtatgttgtttaacatcctaatatgaatttataaaacaatgtaatttaaacacatataaagtttaagaaaaccttacattgattgtagcggaatataatgactcctttcgttcatctagcccttgattcctttct

SEQ ID NO: 343409 - DNA, 733 bp, Cannabis indica
caatttacatagactaaaaataatagacagtacttatataaaataatttaaattaacttttttaaaataataataatttaaattaaaattaataaattttatttttaatttaatttaatttttaaataatatataattaaatattcttataatatacataaagttttaattgtatacatggtaatttaagagtatacaccttacatcttaataacaacatgatctaaaatcaatggtcagaaaaacttctctaccagtaagaaactagtcctaccataatcttgccctatatatatataataatcatataacactaaagtaattttataatatttgtaatgtttctttttatggttgtgtatgagttgtatttttgtaaaaacaaaatcaatattatatataaatgaaatatttattaaagaaccgtaaaaatgaataaaaaactttgtgtatatgtactaataaaaaagtcccaaaaaattatccaactccaaatattctcttgctctaaggttgggaaccaggaagtaaataaggataataataaatttttttagaaattgttttttataaaagtgcaaaacaaaaaattagaagggaaaaacgaaaaaaaatttaataaattgtagtataatggataatttctctaatatattatgatgttaaaattttaataaaattatttatatattgttttttttttttgtaagaaattcactgttattaaaactga

SEQ ID NO: 343410 - DNA, 618 bp, Cannabis indica
tctatctcttagggatcagtgggacattattccttagatagacggataccatgtctagaaggcatcactgcacctttagtgttagtcattgagaattgttccagcaccttttcagttgcttgcgagaaagcaagtgatctgttcttccaatttctgatgatttgaatacccagaacataaccaacttcacccaaatctttcatttcaaattgagttttaagccattccttaatgtcagtcattttctttatattgttaccaataatcaaaatatcatcatcataaaggaccaggaatactaccacttgattatccttgagttggtaaacacaaggttcatcttcattttggtgaaaaccgtaggttttgattattttatcaaactttttgttccgagagcgagaagcttgcttaagaccataaatggacctattaagtttgcaaactttctcttcctgccttggaagcttataaccttctggttgctccatatagatggtttcttcaagaatttcgttaaagaaagctgtcttgacatctatttgccaaatttcataattaaaagcagcagctatagagagaagtattctgatggatttgagcatggcgactggacta

SEQ ID NO: 343411 - DNA, 822 bp, Cannabis indica
ggatgagaggggaagtcgataaaatcaagaaagagcgtcttcatatagcttgagaaagaccgtctacacatagcttggagaaagatcaggtacacgtagcttgagagagagcgtctgcatgtagagagccttgatctctgcacagaccccattctcatcatcagatcccatttcctgaagccaagacctctttcccagcctcaagaaattcctcgataccaaaaagaggttggcataagggtcttctggtgcaggtttagatcttgcattggctggattctctgatagaaaccacgccaacttctctcccgggtccatccaaaaccatgtcgactttctttcgggattccttgtcagcctgaggaggacctctaagattgctcacaagatctatgtctattcctgtggagacatagaaaaagaggtcagtggagtaaaaaaaataataataaatataatgatccaactcagaccaccatttacaagggataatactcaccctccagaatcacttgtgatgatcacccgtaattatctatgggcctcccttggtttggattggttggaagctcctcagccttggaatccatcgtttctggttccaattaaggtttgaagtcctcgggaacggatggagaaggaaaatggttggtgtatccggaagttatgaatttgggaaagtgaacttctgaactcagaggggacattctagcaagaaagagatgatccattctcaagatggatctcaccaaaaaagccaaaagtttgtgaaaaatgacaagcttgagtcgtccttttttacacaaagtccagtgacaagaa

SEQ ID NO: 343412 - DNA, 785 bp, Cannabis indica
aaaggacaaagtcagatgaatactgtgaagcaattctccagacagttagcagatgaaatgacccgagctaaaaattgagtttgttgtggggtaattggctagtattaccctacaatctactcttctggagtgaatcaaagaagcacaattgcaagatccagagtaagagaaattctgagatagggtttcagttgggaagacaagtgattttatagtggatgacacgggaatgctacgatttaagaatcgtgtttgtgtgcctatggatggatattaatatagagattccttactcagttcatccaagatcaacgaacatgtatcaagatctcaaggccatgttctggtggccaggtatgaagaatgatattgatgattatgttgtgaggtgtttaacttgtgggaaagtgaaagttgaacaccagaggtctacagggttgctgcagccactgaatcttcaagaatggaaacaggaagacattgccatggactttgtggttggattgcctaggaccacaggatagtacgactatgtgtgggtaatagtggacaggtttacaaagtaagcgcacttcttacatattcggacaaacttctccattgatcagtatgctgagttatatgttagagaaattgttcgtctccatggtgtcccaaagtccattttttctgagagggatccatgggtactcagttgaaattcaacacacctttttgttgggattttgtaacgccctaaaataattaggcacgctacccaaaaatgattatgaaaccctaatccc

SEQ ID NO: 343413 - DNA, 516 bp, Cannabis indica
tgaaacatattcttcaattcgtcgagctgggtctgtacggctgggctgacttgattggtgttttggtcgggttggattacgtcagcgtctttctgagagaggatttgtgtatgggctccgggctgcacgatcgttgtagtattctgctcgtctgtcccccttcttctgtttagatcgtcccttagatcatgggtcgttcccagcctatcgaacacagaagagcctggttgccttaaccattggttcacttggttgacaggcggaatggctccattattttggttggatccgtcgggtattgctcctcctgatgaattcccggacaaggtctgcccgcttacctcttggcccacgagttgaactcgtgaccggggattggacgactgaccgttggttgtctgggaagcattcattgtcgggtcatcctccatttctcccaggggaatgacgctcggcgtttgctggcctacagtctggtaggctcttcgtatcaacacagtagcttgccgactacga

SEQ ID NO: 343414 - DNA, 854 bp, Cannabis indica
tgaagtgttggaactgggggtttgctgttgatcacacaaagaaatgtaaactgacagtgatgagcaaaggttagcaaagaaatctgtaaagtgtttgaaggttttctggtctgaggatttctttctctctggaaaactcgaagaaagttggcgaaaaaaggaaagtaaccaaatgaaggaaaggtggtggcttttataggccaaagtgcatgaggaacaggcgcaatcacctaccaatcgaacggctggggaggcgcacgattcgaattcccaagaatcaacgggtggattgattcgtaattaaggcggtggaaacgtttgagtatccgtctgacaccattaatgcgccgtatcaatcaaggggcatgaaacgaatcaacgcctgcaaaaagtgaatcgctgcattaatggcgatcattaaatgcaccttcacgcgcccaaagcacgtgccaggaaaccgaggagtcaaccggaggcacatgaacaagccttggttttatttttcaaataaacaaggcttggggggtaaatgttgcccctgattttgcccaatatacgtggaccaaccggacagggacacgtggatcaaaacatcttaatacttgaattatttgctaagtctttatgaaagaaggcagcatccgggacgtgcctcccggagaaggcatacggagccccctatgctcccggaagcctaagtaacatcaaagcatctccgcgaggcgtcaggcttcccctgagcagtcatttcgcatttaatgccgcatgggaggaaatgtgttgggactgctacacgcaataaagtctgacggcacaacccccaatttgcacctgcgaagtaatgatcatttaag

SEQ ID NO: 343415 - DNA, 563 bp, Cannabis indica
cacctagaaactcgagaccagaagtttagaggacacgtgtactcaaatttccaataaaagctgagatgtccatgagagatcctcgaagttttaaacctcgcttaaagatagaatcagcgagatgcagcgagcatgaccaaagtctgatcgcatgattataactcgtattacgtgagacaagagagtaactcgcatatatcgaactatgtgcgagtaacctctccatgtccttgtataaatctggagaccgactttctataaatgcgagttggtcctaagaaccccgcaaccttgacaaaccaatatagactcgcatgtctaagttctgtcagctcgtcatgcgatgtccacaaaggagactatctaagaatgcaggcatcctaaatgtaataatggacctgggagtttaacatcggaatatgaacagtcaactcgcagattcggaagacgcatacgttgatgagcttagtaactgtcgttcatttattaatgttaacgttgtttagtttaattattgtaattcaatgtgtaaaaaacggattgacaatgaatgcaatccttgt

SEQ ID NO: 343416 - DNA, 509 bp, Cannabis indica
acaccttgatatccggatcaagtatagtatgtcgtattctctctgtaacaagaactgacaagttgtattcaatacaacctttctccgctattacataactttaatcacaaaatccttgatattgtgaaattcttctctatatgtctactcctctagggatactagattctttactttttggctactacttatgtgttagttagaaagtaacactagtagttaataaattgttggtacgatgccaaaaactgtatagaaatttccatagactgaataagtatctttcctgcaactttaacattcagtctcactggtaggttaaaaacctcagataggtttttacatttctccaaaatcactgctccaccccagagtaatcaccatctcatcagtatactttctagcattaaggcaagtctagaaacctgatttggtgtagtctaagagtattaaaatgccacccatatcgactatcatatagttcctcttcttgatcttaagattttctt

SEQ ID NO: 343417 - DNA, 761 bp, Cannabis indica
atgccatagccacgactcatctgcttgtgcttacatcactacactacttgcatatttctattgtatagaaaatcatttgttttctctcatttttacctttgcaatttgaaagaatcttgctgcacaaatctccttcaatatgcaaaagagtaccctttttcaatcattttgcctacatgcactaagtattgggtaccaaaagtacatcattgatgtatctcttgccttttttagtgtcaatggcaatggtgcctttgccgattgcttccaagtcactattaccgattttgactttagtctttattttttcaagactacaaaagatgcttttattttttgtcatgtggttactgcaatcactgtcaagataccaagtatctattccttcttctgttgcagcttagcagacatagaagagattactctcatcactttcctcttaaaaaaatagcttgaagggatttcttaaatcgacaagtctttttagtatgcccaatttttttacaattttggcactagttttcctttaaactagcagtcttttttcttgtgtctttttcccattagcttttggtttttgactctgcagattgattttagactgaaaggcattttcaacttcactttcctatgcctttctcgtctacttttatatgcttcaagagagctcattcgttcagttggtgatagactttctaaatctttagtttcctctatcacagaaactattgaattatatttttttgtacaagaaattagta

SEQ ID NO: 343418 - DNA, 559 bp, Cannabis indica
ctcgattataatcgagtcataacaataatcgtttcctattatttttcccacgatcataatcgagtcacaatgataataatcgtttcctatcatcttcctcgatcataatagagtcacaaccaatacatatcgttactctcgattgagattatgtaacaacaaacacataccgagatcttgatcataatcgaatctataattatcataacgttagccatatatggtgcttaatactcttcttatctcagtcaaaaaattaagcgtgcatgccggcctatgtggaaaacaaactttgacgacttagggccctatgtcacgacaacaaaaaccaataaataccttaaaccaaaactcctggaactaacccttatttcaataaccggaccgaacctaacctccattagctccaaaaaaagccaaacaatactcaaatagcctaaaattgatactgggtacaataccaagccaaaaatcaattccgaggaaaacccaaaatttataacctgcaacgcaacttgtcgacctgttctgctacaccagaaccaaccggtcgaccggt

SEQ ID NO: 343419 - DNA, 662 bp, Cannabis indica
aatgtggtaaataatccactctatacttaactggttttatctgcaaaacagttggatattcagttaatttcagttaagatctttcctatttaggaagtcggttagttggttaataactaacttgtcttaagttgttaagtgctggacatgtcagctactatcaactatataagaagttcttgattgtattcagagcaaggcaagaaatcgagggaaaaacagggagagttgttttggaatgctgcaagaagatcaagttcatgttgactaagttgctctggttttttgagtgttgtagagtcaattatgactgggattgttcttgagtgcattgcactataattgaagcttgtaattactggttcatagtggataaatctccttgggggagagctggagtaggactcaaacttgagatccgaaccaggataaaccttgtgttttctcttgtttttcattgcttatttatcttgctttagtttctggtttgattgattatttaattgttgattatttgttcattaattggtttgagtttgtgttgttagattacaatagtggtatcagagctccaggaagaattcaagaacttctgaaactcaaatcgtgtgataatacgcaatgggttcatcatcagctaggttcgatttggaaagattcga

SEQ ID NO: 343420 - DNA, 684 bp, Cannabis indica
agattgtcatatcagtaaacccctgtattttgataaatctaggaatatctttaatcacatagtcttgattactttccactgtgcttacgacataataaacaagaatataaatgtaaaaagggtttggatgaatttataaatcaaatagacaagtaattgataatatgaaccaaataacacacaattgaataatagagattacattaaaatgaagttttatttagggcataaaacccaatactttaaaatttagttttgaagactaggaagtgagcagcgaacacacaccttcctcggagcccgaggtgcaacattatcagtatcccgactagatatgtggcgagggatatgggcatttcatctaggagctaaagaaaggttagatgcgttatctttctacaaactagacatacagggtccatccgggcgttatcgacactctgctcgagggccgtccaactaggggtgtacgtcggtcggtttagtcgggttatagcatatttttatcaacccaatataaatatcgggttgcaaatatttaattgtaacccacccaatcaaaaattagagaaagttcaacccgcccaatgatttcatctgtttggtcaggttaacccattcaaattgttcttcacttttttttaataattattattgttagtttctactattcaaataattaga

SEQ ID NO: 343421 - DNA, 1441 bp, Cannabis indica
ctagtctaattctcacaggttacaaagatttatagttatttatagatttgcattattgccaaaattatctcctaaatcatcatggtacatttacacttccttaaataatccatctcatctccaacaacaataatccacatcatcttgaaaacacgctttcaatacggacaattcagaagctttgtaaatacacaagccttctagatacgtacaagacttccttctcggatggaccttcaatacaaacaataagctattcgggagtgtacctccagattaataacaagctattcgggagagacattctatacgcggtacaagcttatatggaagtaccttccaaattctacaagaccttccgcacagggcttttcggatccacactaagcttccggtatctattttctggattaacaacttctattatggatgacaaaacttgtaaccataactaacaaatctccaccttagtttcaagttgaagtcgcttgataaataattgttttaaatgctgatgtctccttagcaccttcgagctcagctgactccaatcatcttcaggcaatgctcaaacttactacttggcactaccttggttatcatatcagaagtattgtctttagttggaaccttggcaatcttcacagcttctttctccacaacctcttgtatgaaatgactccattagttgaccattgatagttgttgctagctatcctttccaagatatcaacagcttcattgtaagacttggaaagaatggctccattagctgaagcgtccaacaccatcctagaggctgcattgagaccattataaaatgtctctagttggatacaatgaggaataccatggtgtgggcacttcctcaacaactccttgaatctttctcatgcttcactagtggtttcatcttccaattgttgaaaggacatgatctcacttcaaaactttgcatttcttcttggaggaaaatatttctcaagaatttttcagccaagtcattccaagtagtcactgaataagggggaagggtattgagccatgctctagctcgttcccttaaggaaaatgggaacaacttcaaccttaaagcctcttcgcttactccttgtagcttgaaagagtcactcacctccaaaaaagagcaactatggaggtgaggaactttcgttggaaatccactaaattgaccaaccgtttggagcatttgatacatgacgggcttgaactcaaagtgaggtgcttggatttcgggtctcacaatacccggattaagctcgttgaacataggggctgcatactctcttattgctcggtctttatcatcggccaaagcaataggattggcaccattatgagcaccccccaacttcaaacctatcgaccatattacaacattttttagccttttgttccttgtctgaaagtgcgttcaatt

SEQ ID NO: 343422 - DNA, 534 bp, Cannabis indica
tgtatttgcaggtgggcaatatccaattcaattgaactgaaccaatcaaattcaatctaattacaaaaaattggatatccaattacaattgaattggattgattattgaatgtcaatcttaaaatttaattaaaaaccgattcaatttatttacatttatatatatattaaaaaattatgtatatttatttatataataaaaaataaaatatatgtattaattacatttttagtaaatttttttatgttgaatatgtaacacttaattattttgtatatttatttgtatgatatattgttctattttgttacttagtaatattgttgttttagctatttaaaaaaaaaaaaaacttttagctgtcttacacttatatcggtagtatttttataaaatattaaacttatataaagtgtgatatttagtttttacttatttttttatatttttaagttaatattaaaatttaagtgtatgattagatattcaattaaaaaactaatccaatcgaattagtaattgaattttaaatt

SEQ ID NO: 343423 - DNA, 2204 bp, Cannabis indica
taactcttgcaattgtatcttcagttctttcaactcagcgagagccattccgtacagtgccttagataccgaatccgttccctgaacaaattcaatttctcgggtaggtggcaatcccagtaagtcttcaggaaagacatcgaggaacttgcataccaatctcgtactctcaggccctgatgtcacaagttggctggtatccactacggtgactatgaacccccgacaacctctgctcatcaggtctttagctttcaataatgttattctcggtattcttgccccctgaatcttacccacgaacaccgctgggttagcactatcaggctcaaacaccactatcttttgcttactatcaattgtcactccatatttagaccattcccaggattatatcaaaataagatagttgtaattcaattaaattgacggtcaactcacaactgtcaatccaaaaaagacaaagaccgaatccacctggtggatactaaaaggtataccgagggtaacagggttccaaacctcgaagcataaatatcacatggcttgtgaaaactttctatcactctacttgacacataagagtgagtagctcccgagtcaaacaacacagtatatgaacagcccttaatagacaactgacctgtcacaactgacggactagcatcagcgtcagcctgagtcatggtgaaaagtcgccctaggttgtaagcagtattcttcttagggtcctctttcttggcctaagggcaatccctgataaagttgcccaccacgccacattgaaaacaggccttggcttgacacttgccaggatggtgtttcttgcatttaggacacttgggatatgatcggaatgaggacccgcgaccctgacggccacctctatttccccctgatgctttggaagcctcacccttccgtttgtgatcagggttgccactgtcggtccccttagttttattaccactagcaggagaatttggtaccgtgacggcatcccttgcagcttgctttttaattacttgctagtcagcctcctcagcaattaaggccaagtctacaactctcttatacagagtgtcatgtgatgtggtaattttcaagtcccgactgattgtagcatttagtcctcgaacatacttttgtttcctggtgaaatttgtgggcaccagatcaccagcaaacttggataaccgatcaaactccaaagtatactcggccacagacacttttcctgagtgaacttcacaaaatcttcctgatgtgaagtccttacagcaacattataaaacttttcttcaaataatttcttcaattcttcccatgtcattacactgacatctcgggtctgacccaccatgtcccactacacacgggcatggtcttgtattatgaaagctacacaattcaccctctcagttcccgtcacccgcatactgtcgaggatatggaaaacaatagtcatccaatggtcaaccttaataatatcaatacctcccagaaaagtcggaggttgcagcttcacaaactgctcgaacacagagtcctggtgcggcatattatacccttggttaccaaccactggcacaggtgcaggttgtaacccttgatcaactagggcagccggttgccttaaacattgtaactcttcttcttgacgaagtatgatacttcacatttcttggaacatctgctgccagtcagcaggaggattagcattaccagcccccgcattatcccccaaattttgcagaggtggaggaggtgttgaaggatcacttagggtagccctgggctctacttgctcgccctatcgtctagatgattgcggtgggtccattattggtacccctgtaatcaacaaccccagcgagttaagcaccaatacaacacttacgcacttattgccttaaaccctaactcatctatttacctcatataatattcacttaaataaatagcatttaaagcatggcatcacataactcatacatactctagatgcttgcatactgcctaaatggaaagcgataaacaggtgatcacacaaacagtaaagtattaactctcaatacttactgcaccatgagtagagcttatctctgacgatgaatgtacatgtttagggtttaggggatgtaaaaactttggcgctctgatacaaaattttaatgtcctaaagaattaggcacgctacccaa

SEQ ID NO: 343424 - DNA, 630 bp, Cannabis indica
gtcatgcataattccaagttttgaaaaaagatttttaaacacaagttcaggtgcattatcagaacgaaatcgtttaattatgcacttaaattgagttttaacatatgaaatgaattgaggaattatgtcaataacatcagatttgtgtttcaaaaggtagatccaagtgaatcttgtatgatcatcaaccaaggtaagaaaatatttgaaattagaatgagaagggatatgatagggaccccaagtatcacaatgaacaatatcaaacttattattagcaatagaagtgttattaggaaagggtaactttctttgtttagcaagaggacaaacaaaacagggagaattcttgtgtaaagaattaaaagtacaattcagtttatcactaagaagggcaagtctttgtggagatggatgtcccattcgagaatgccatagctcagccgagacagagaatgcatgagcagtatgcataggggtatccatcatgtagagaccattgatgacactacctttgccaatcaccttccggttgtgcttgtcctgaattaaaaaattgtcagtatctaatttcacagtaatgaagccattatttgtcaagcagctgactgaaataatgttgtatttaaa

SEQ ID NO: 343425 - DNA, 582 bp, Cannabis indica
acattactcgcttgcattattgtattaaagttgttcaaatgcgagactggatcagtggttctgtcatacggcaagacatgtgggttttcgaatcccaaaggaaaaggggtattcatgatatctggatgatatggcccaatatcctcctctgagtcctatccagattgtctcccttgttcccccacttgatatctcctgaacttgtccaccagctcgtttatccgtaattggatgggatcctctagctttggacagagctattggggaaggttaggtttcttctgattcaagtgctctcgtagatccagttgggagtaattactgacagacctcgtcttactcaaagatcgcgtcctactcataaactttgtctttgagtgactcgcggatttactggttcccatgctttctcgatcaatagctcgttgagtactttctcctcttcgagttgatcgactgtgggtccttgactgcctcgaggtcacacttgcttcttcacgctctattctttccccctaagtgcagtgtgtcgtttttccaccattaaggtcagtatgtgtaacaccctaactaccttaggcg

SEQ ID NO: 343426 - DNA, 1204 bp, Cannabis indica
ttgtccaacaatcttcttttttattgaacagaccagaaattaggatcaatatttagggcgtatgaaattatagaaggatcgattccgaccatgtcctcacgtgaccatgcaaaaatgtccaggtttgctctcataaattttatcaatgctgattttacttcgagcagcaacccttttccaattttgagcttcctggtcggaacatttgggtcgattctgatttcttctagttcttccactggcccaacatttgtatttggttccccaagtcggggatccacatcttcatccctgccttgggcggttccctatttggcaatgtcttttcctttgtccgaactctgactagaggacacttcctttttagccttggtaagggcaaggttgtaacattcccgtgcaacttgttgatttcctcttaggcacccgaccctattttttgttggaaacttaaggcacgaatgaaatatcgacgtaacagcctttaggtcatataaggctggtcggcctaacatgacattaatggctaatggaacatccaatatcaaaaagtgtgccattacatttatgctcttcagagtttgcccaacagtgaggggtaggcgaaattgccctagatgtgcaacactctggccgaagaaaccatatacgggctgaagacagggggttaaatctttgagttggagccccattttttcatatggtgttttgaacaagatatttgcagaagcttcattatctatcatggttcgcgccaccattttgttggctatctgtacttcgacgaccaatggatcgtttgcgggaaattaatcttgacagcatcttcatcactgaacgttatggtgggttcccctacctgtggcacttttggcttcctttctttgacggccaggaccagtactttttgctcgtgctgtaaggttcgggcatacctttcctgggctttgcctgaatctccaaatatgtgcgggcctccaataatgacttgtaaatgcccatccaccggtggtggcagtaaatcttaattattgtttgtctgggcgatcctctgattttgatcgaccttgacatatttttgcatgtgcgagttattctttcttattaaaaattcaatttcccacttcaaattgttgcattcattggtgtcatggccataatctccatgaagacgcaaaaacttggacatgtccctcttgcttat

SEQ ID NO: 343427 - DNA, 708 bp, Cannabis indica
tacaatgcctatgcaatggcgagaatggagaagctttggggcgagaattgttgcgagtttaggcccgagaggtggctagggcaagacgatatcagtggtggtttagtgtttaagcctgagaatccttataagtatcctatattcaatggtggaccaagaatgtgtgttggaatagacattggttatattcaaatgaaatatattgctgcttgtttgattgagaggtttgagattagtcttgaagataaggagagagttcctcagatttcttttggtttactattgggatgaaaggtggcttgcctgttactattcaacctaggaaaactactacttaattattggtatagtcatgtgttattttatgtttcaatgtttttcttattttgggataattatctctgatttatatattcatttggattgtaatcgaaatgttacataaatcaaaaagagatatctatgtaaaatataatgaatttgatgaagaaataaagaaatattatgcatgtgttagtttgttagttattaattccctcatcattttcatgttatatatttatttgaaattccgtattttaatattcccagtttgattatttaattaaatgattaattaaatgcggaataataaaactggtactgaaaacagttttctgtagttacagaatgcaactccgtaactccagagaaacccagaaaaacaaa

SEQ ID NO: 343428 - DNA, 695 bp, Cannabis indica
attatttttacagaaaaattatttaataaaataattattttaattttaatttttaatttaattaagaaacgtgtttaattgaaattgattacttagtcgtatcaattaatgagacacgttcaactaatcaactactccccacgattcagaaaatgttcttcttcctgttatattttttcaatccattcatctatataatgcgattgaactgatagaaaaaatatatcttcttcatatcgaaaaaaagacatagttttcactacaaaagttccatctgcaatatcataaattttaaggtgtattcgacggttctctacagtgcagtgaagttctgatagagtacgactgggttgttttatcttgggaacgaccgataaattctaactgcttgcatattcctggccagtgtcgtgaatgttaggggtgttcatctaatccaatccgcactattttgcttgtagtgcatccgatccgcactaagtacgaatttcattttttggatccaattcaatccgcacaatagctcaaatccaatccaatccaatcctcaaaagtgcggattagatcggttactttttaatattaaattatttaatattttatgaaaaaaaaatatttttttttttacacattaactagcaacaaataaataaattatagtcattttatgtctctaacaatacattaaaataaat

SEQ ID NO: 343429 - DNA, 569 bp, Cannabis indica
atgcttctcggcagttaaaggagtacgaggagaggtaccctactcacaatttagaactcgcagcagtggtatttgcgctaaagatttggcggcattacctttatggcgagaagtgtgagatatacactgatcataaaagtctgaaatacttctttacccagaaggacttgaatatgaggcagaggcgttggctagaattggtgaagaattatgattgtgagatcctttatcatcttggtaaggccaatgtggttgctgacgctttgagtagaaaaggtgagaatcagtttagtactatgaagcaaatctcccgacagttagcaaacgaaatgactcgtgcttagattgagttggttgtggggcaattggctaatattaccctgcaatccactcttttagagagaattaaagaagcacaaaagcaagattcagagttgataaaaacccgagctagggtttcggctgggaaggctagtgatttctcagtagatgaaacgggaatgttgagatttgggaatcgagtttgtgtgcccatggatgagaacatcaagaaagagatcatggatgag

SEQ ID NO: 343430 - DNA, 1078 bp, Cannabis indica
attcataatggagtgcaaaaataaataaattacttaaattaaaaaaaaagatttacctggcctccgtttgtggtgcaacctcagaggtagctcgtctataatgtaggggtaggagctgactgagatcaccgcaatcaaccgggtgtacataattgttatatggaaaataactgctagctcgaattagattcgcaaatagctcgttgtaaggcttcaaatatgactccatggcttcctcaggggtggcaccgatatcacaatcatatacaatgatctaccagttctcaatatccacctcaactgccacccagtggtgctctttgggaaggttcaacacaaagtatatgtaatcctggttctcccaacatggcaagtgtctgtgctgtatcccctccacataattcatatcggcctcatcccatttcatcttgctcttttcaccctcatagaaattccaatacatggcgaatactgtggaccagatgtgtctaaaactacaccttttcgagtgtagacttctggatagaggttccgtcttcttctcagtaagtgtgccatggcatcaatttgctgtgtttcaaaagagaacagtaagacagatattgcataaatgtcgcacaattatcgcaggaaatcgcatatcgcatataatcgcatatatgtcgcatataatcgcataaatgtcacaaaatcgcatataaatcgcattaaactcgcacaaacatttaaaaacacaataaattaattttgttaagaaatacttacagcatcttcgagccattctccatgcaccatcagtttcacgaaccaggatcgagtggctacgccagtgtgaacatccctaggacggtcgttgtccctagcctaagtgatccacttctggaaaaattttaacagccgggagtctgccggtttcacagtgtctacttcaacgggcccatgtcgttgtttcttcttcccagctgtgcagtccttcaagaaaaccggcttccgctttcgcctaacactgcaaaagtccaccccagctggtggccccttcaactcttccacatcctgagattctgtatcacccagggaa

SEQ ID NO: 343431 - DNA, 549 bp, Cannabis indica
gtacccccactccgggttcttgagtagctgggaagaatcttcttaagaccatatcaccaatagtaaattttctacttttaaccttggagttaaagtacttagtcaccttcttttgataagctgtcattcgtatttgagactcatcccggaattcttcaatttgatccaacgcttcttgtaataaatccttgtttgttgttggatcttaagttgttctcctatgggacgggaataacgtttccaccgggaccattgcttcacaaccgtacgccattgaaaatggcgagtggccggttgtggttcttggggtcgtccggtaggtccataacactcttggcaattcttcaggccaattgtttttgcaggccagtagctttttcttcagggtgacctttagaatttgttgaccgcttctgcttgtccgtttgtttgcggccttgccaccgcggagaagcctttaacgactccgcgttggttgcagaagtcagtgaactctttgcaatcgaattgctttccattgtcagagactattttgtgaggcaagccgta

SEQ ID NO: 343432 - DNA, 795 bp, Cannabis indica
gaatattgatcactcctataattattgtctaatagtaaatagtttattgggttgttctttgtaactgtggttttaaatactatcgtcaaaacaatcccaattcaaccattattcctgatgattcagactaattcgagttgttttgttcagtgtgatttgtttgaaatatatttattaattattaaataagaaaaaaaattataggtaattataatttttaccttataaattttgacatgtactaaatgatgttctttaaattttcctaaactattgagattattagattgaaagacttttgtccaatttcattcaattttactgtatagaattattacatagaaaatataaattgacactttatttacaaatatatattcataagctgtggacaacatttataccttttatgtgattttatttactaaaatacctcttatattttctaagttgttgcgtgcacgtggttgcgcggtggttgcatcagacgaatatttcaatcagacgatggttgcagggtggttggtcgaaggttacatcagacgaagatttcaatcaaatgaaagtttctggatggttggtcgaaggttgcatcagacttagatcagacgaaataactgttaggaaaatgtttatgtaactgtaatgcaactgttatgaaacattaataatcataacagtgtttgcactaactcatgtctctttatgatttaatatgagcaaattcaccattagaaatttggaaaacaatgaaatacaccaggataaatattttactatagtattgatgtaatt

SEQ ID NO: 343433 - DNA, 773 bp, Cannabis indica
ttcatgatgttgtccatcctcctgagaagtaaggcttgacttgtctccattcttcccaaatgcaagttgaattcagccatttctgtagaagtagaagtggaggcaaatgcagcaacaggttcatcagtagcactaggggaagcagaccgagcctttttcttagcaaattttccttgaggaggtttctttggaactttgaaagtggtaccaacagcaggcatttttgtggtttcattctcaagaatcaactcctcttggttagacaaaatcttataaattaagtgaggaaaaataagattgagtctaggtttcttgccctttctaagagagacaatccgctcccaaatcatgtcagccaaatcaatttttgcaccaatagaaactttatacaaaaagaaggcaagtttatttgaaacatttaccagatttgagcaaaaaaactaattagatagggcaaacctcataagagcagcatggtgataggtgagttgagacatatgcattgtgttgaagagttccacattattatcaccagtgagatatctgaacaccttttgacgatcaaattccacatcaattggctcaattcccataggtagattgagagcttcagccatatccttcacagtgaaggaatacaatgtcccttgacaaagactttgccaaacataaaagaatcctcattaaggcactcatcagtgatattagcataaaactccttgacaattcgatccacatagccatcaaaatcgatcaaagtatccacccattgt

SEQ ID NO: 343434 - DNA, 548 bp, Cannabis indica
aacgagattattagaaatcgtgaatgattaaaattttgcttaattatttaaaacataatatattacacatataaaattctgtgatcccgtttacaaaatacagttacaaaagtttactattcatatacaaaatatttgtcacctagcgactaaacagcaaaagccctgacgtcccgaggatcgtacgctttaggcctaactgcccgacatgtacaatcttcacctgctcgctctgctcctcagctttagccttgcccttacctacacatagcaataaaactgtgagtcgacagactcagtaagaaaagcataacataaaaacatactaatatcccgggttataatcaggcgctcaatttttttgaagtcaaaatttctgattttcaatctcttattaagtgtgagccattactttctaggtttaggttggtaattacttggcattaaaataataaaaatattaattgaaaaaatcacaacaagtggccagccatagtgttaatgggccccacttggtattttgcaattttgacaattttcatttctat

SEQ ID NO: 343435 - DNA, 729 bp, Cannabis indica
ggacctagaaccgcaccccaaacccatattggaatcgggaccgggagtgggacattggacccgatactcggacctaggacctaagaatggaaccgtgaccaaggccgagacaaggccaagacccgagacaaggaccagtacctaacatggaccgggacctgcactacgactgggacccttacccagacaaggacctaagaccttaacctgaattggtgaccgggacccatgacccaggacccaagacctaaacctagacctaaaccttgatttgagacacaaactgcaacccaagacatgagctagatctggaccaggatctggatttggacctgggacccaggacccaagaccagaggcttggacgtgaccccacagtcggtgtttaaatttgggaattggaccatgacccaaacccagacccacaccaaaactcgtacccgtactagaactcgaactagactcgacatgtggtggtgtttggatttgggacaaagactcagacctgaaccaaaatacggacctagaccaagaccaggactcaaacccagacccacacctgaaccttaaatcgtaccctgcgacccgaaatcagaatcggaactgaaagcgaacccttaaaccctaaaccctaaaccttaaaccttaaatcctaaactctttacacttacccctaaaccctaagccctaaatccataaacactaaacccaaatccctaaaccctaacc

SEQ ID NO: 343436 - DNA, 1160 bp, Cannabis indica
caatctaatctaatcttatccattatttgtacataaattggccgtgatatctactccaagtccaactttattattgtagatttaattgggataaatgtaatataaattcgaaaatttgtatggcataaattcttatgtagtgttcattttattgtatttaaattctaaagttggtttattttgttgcatttgtagcaaaaactctatgtggtgttgtatgttttctatgtcaattaatctatgtatatatatcaatatactcaaaaaatttagaaataaaaatatagagaccatgtatagttaagttttaaaaaaaaaatgaaaaatgaaaaaaaaaaaaaaaaaattaaaattagaaaaaaaacaacttacctctaaatgttgttaatgcatggtgtcgaagccacaaaaagaagatagagaagataatggcgaaatgaaactcatgcctatggcatgttaagaaatagcttttgttaattagtgttaattaactgatcattagtgtggttgtagtgaggttgttagcattgtatctttttgttattgtttggtctcctctacaaaactagggccactcggcacattcctattagtgtttgtattacattttcagagtataaatagaatatgatgtactcagcctccatcaagctgagaaatccattttaccaaaaattgtgcaaatcttaacttagtatcaaagtaagaaaagtctgcccaatgtcgtcccattctcagactcttcaagctaccaccacaattacagcaggtgctgcaagctcaatagtccatgttcttcaactcaaccacactcagccgtttaatacgttgaaccaagcatttcttttaatgctaaatttgttgattatgacaaataggatgagcctcatcttgagatcattaactgagccgagatgacaaagagactttgtcctagagttgggacatatttggctccgttcttttctgacttgttagattaaattgaaattccgtattttaatgttcccagtttaattctttaattaagtgactaattaaatgcggaataaagaaactggtactgaaaatagtttttccgtagttacagaatacaactctgtaactccagagaaacccagaaaaacaaacagtgcataaaagtaaaaacacacaag

SEQ ID NO: 343437 - DNA, 509 bp, Cannabis indica
aattattcataattatctaattagggtttttgctaatccatttcctaattccaaggtattacaatatcactataggtttaacctaaatgatatgatacatggtcgatacttttttctaaccagagaaaagccatagccgaccatatagcctctctctctctacttgtgtgatacacttgtagactctccctctctctcatcattacaatgtcatgagttgagtacacattggatagaaaagtaattatccttgattaatcctacaagcccaagtaagcccacacttgtcctatagtgttgatgatttatctggaagacttttgtgtaagctatttacaaatcaaaagctttggattggatgtttgtttatatacaaaaaaattgagaataccctgatagactacaagaggtaaatctttcttatcatgtagtgcacatttaatctatgtaaatatattgaggaatcaatattatctttctcccccaacacaaccttcgccactcaaatt

SEQ ID NO: 343438 - DNA, 1276 bp, Cannabis indica
aaaaaaaaaaaaaattcactccaaatatattttttcgtttagaaagtagtggacattctctccaacattttaaagagaaatgctaaagggcaccaatagtatatatgtgttagtatcgctattagtcaaactaagtatcgagtcccatataatttaatataatagtttttaaggaatatcgctaaccaatcacaacgggacatgtcgagaaaatgctagacaccactgatgccttacagcaatgctctttaattaattatatttctaaatattggcaagttggcacttggcaaccattcggaaatctgaaaggactatcggcaatttattccctttaaattattttgacctttgagaagaaaagtcataataataattggttattaaatattagtttgttgcctttcaagtttagaaagaaagacaaagaaaaaaacataattcttattaatatatgagtggtacacaaaattaaataattatttatattagctataatcaatatgtaaatataaacatattacttataaatatagctagctagagtgagagaagtcatgaacatgggaatctgaattaagttattggagttcacaaataatatatacatgattcttattatatatccattttgaagaaaaagccaaaatggtgtcaaaagggaacacaatgtagtcggtataagtaactataatattattgtgtagtataattaatatttaataatgtttcgtcggctttcctcttgtaaatgttcttttcaaaacaactagctagagtctagggaaatttctaaaatcacccaagatatataatttctcataaagaaataagaacaaacccagaaaattaaaaataaaaagtacaaaatacatattataacaattaatattaattaagctacataataaaaggagagagtattgcagaatatgagccaaaagtatataaagtcaggagccaatataaaacaacttatgtataaatttcaacctaatttaaacatcattaaaagctagtgaaattataaacccatatattacaacctaatctgatcatatgcatcattgcatccaacggatcagcctacaactttaccaaatttggtctaagagagaagcaaaattaagctaataaatttcttctttctcattgtacatttgtggtgcatatataaattgtgaaagatattgactgtataacaaatttttcttgttgagttatagagattagtgttggattaaaaatcctaagtgggcacatatgtataatgtat

SEQ ID NO: 343439 - DNA, 839 bp, Cannabis indica
aaaaaacaagcaagatacaaccaaactaggcacaagtcaacaaacggcacacaacagccactaaaccagcagccaccaaaacaaacaaaggactaccaattcttaattacattaagtaaatatgaattcccatggctccttttaaagggccctttactcgaaactctaagttgcacaatgtttctaacttccaaactaatacttttgggagaagcacaagtcacgtcaaaaaaacaacaatttctattagcccaaatctgataatagacggcagcagttaccatgttcatgaggcgatttcggaggtcatgcttcttgaaatcacatctgtagctaagatcaatgttcgagctcggccaactgtagtttccaagccaagagttaacttctagttgaacccgcttagtaaagatgcatctatagaaaatgtgctcgtgagattcctcttcactatcacaaaccgggcataaagtgctttgcagcggcagaaacttgctaagaaagtcacgagtaagcagttgggtgttgatgatttgccaataaacaaatctatgttttggcagcagaaggttgtcccaaatgcctcttgagtattggactttcggcttctttacaaggaggttgtaaaaaacctttgctttaagtttggttcccttcacggcctgcctcaacttggcctcatctgtagaatcccgaagcttcaacaactttttaaaataccagctagtgtcttgagtctttgggaagctccatatgtctctacccttcaaatagatggaattgatccatttgacccataaggaatcttgtttgttggcaagagcccaaagaaatttagc

SEQ ID NO: 343440 - DNA, 657 bp, Cannabis indica
gcgattgttggatttaagactttcgtctaattttaataagaaaagtctaacatggatgacagtttaggggcatgattaatatatgtcaaagttcgaggggcatgattttgtagttatcaaagtttgggaaacatgatttagtatataataatcatcgaattagtaaaattgattgaaattagacaaaagttcttaaattcaacaatgtcaatagtttaggggaatttttaatagccagaaaagttaaggtaacataatttaatacatgtcaaaatttaagagacaaaatttaatcagcctatcataaattaataataaaaccttaccaacaatatttattttttactattctcaatttatcattttctaatttaaactccaccattaatattttacattttatattatttattgtatatatattttttaaaaaaaaaataatatgcaagtcatttttttcttctcttctcttctaaaaaaaaaaaaaaaaaaatagcaataatatatataatttaaatattcattttcgttttaaaaaacatattaagtataatcatatattttttcatttttttaacgttaaaaatgttacttttataactatgttaattttaggaaaatttacatcaaaaatataaaaactcaacaatattacat

SEQ ID NO: 343441 - DNA, 913 bp, Cannabis indica
agcatgttcaattgggccacctgctgctcatcgaaaacactccgttgggccatgaaatctgcatgtgcatgttttgctgaatcagataattcagctgatcatgagtgtactgcatggctaggtcaagaggcccagcaagacgtggtggttcaacgtcttcatgctcctcttgttctcttgcaggaggatctctctgagctggctgttgaccataagggtgaggtggtttgaagcgaagcacagtggacaaagtaatacagcgttgtggcgctgcttttgtatcataagagtactgtggtactccatgtgcctcacacaaagcggttataatgtcagcaagcccaagtccacctccacaagagccctcaaccatcatatcaaatgtcactctaactatgtcccccacattcaagttgtaacctttcataattccataaacaaacttaagcctgtcaatctgagcatcagaataatgtttgttcgggaccaaccttgcactaacgaagtatagccatgccttggcttctgggttgagttcacaccgatacaattgatacggttctccatcaaattcatgaaacctaaggcctggatagccaagggtttcggctatgtcctcataattcaagctccttgctcgaagttgtgcttcaatggttgctcttctaaagtgaaggttggtagatcataaatagcatgaattgcggctgtggaagcaggcactttaaccctccctaactctcactttgtcatcctctctttctggccagttggctaggaattctaaagctaatgtttggttgctgtgcctagtgacatccacaaacttagtccactgcctatttaagatttgatctctgatggatgcaaatacagcaagaaagtttgtgtttggttttgtgccctaaataaa

SEQ ID NO: 343442 - DNA, 685 bp, Cannabis indica
gtcgagaacctttaatttctaaatttttttttgaaatggcgggtttgcattatacaatgtatttccagacgaattccggttagtcatacataaatgccccttaagtaattttaaagaatgaaactttgtaattacttaatatagatgattctctttattcataactaaagttttaaatttacatgagtaatgcgagtcacatcatttatttattgatagtagggtcgcaaatgttctacgttccagtagttttttattagcgagccatcaggttaagccaatttataggctccgactccatctattacttcaatgacatatggacccttccagtttgagttgagcactgctgctaatgcatctctcgtgtttgcaaagactcgtcttaacaccaaatctccaacattaaatagtctttccttgactcttttgttgaagtatcttgtgactcgatgttgatatacagcattggcgatttgcgactcagttcgtttttcgtcaagtagatccaaggacaattttaaaagttcttggttttcttcttgattataaaactctcttctgtgagtcgatatgttcacttcaacaggtagcattgctttcgaggcaaattctagcgagaaaggagttgtcccgtggctgttttctcggtagttctgtgggcccaaagcacctgaggtagctc

SEQ ID NO: 343443 - DNA, 648 bp, Cannabis indica
aacaaaagcagaacacacaaaatgcacaccagacacaagaccaagaaaacaagataatacaagtcaacccaagtaaaaagaagaagaaaaaataaaaagccaagaaaaaaaaatgaatagtagatagaagagtagatgattattctctcatgaccttaataatgtgtatggtatcttttattttagggaaattacaataaatggccctaaatttagtactaacgatagtaaatgtccctttttaaaatttttaaggtaaatgtcctttttaaattttagtacctaaaatatacttgataacaatgagtgtatcattatttttacatgatatttatactcaaaaactcaattatcacaaaccaagtcaaagcctccatactaaacgaggaatgaaggattttgatttttttttttaacttttctccaaattattgtgattcctcccgaaaaaatcattaaagcttctactctcatcaaattttttgaattaatttaccgaatttcttcaaccatttcctcctaatttcttccaaagtaaggcaacagtagccatttcttccaaacaaaattgattcgaaccaaacaaaagcaacataactggtttcttcaaataaaaaatacatctgctccaaagaatatgaaagtttt

SEQ ID NO: 343444 - DNA, 570 bp, Cannabis indica
tcctagtaaaataattccaacatatccttctttgcatcgtagccataagacctagccaaagaaatagaataccatataataatacaagaaatatatatccaatgtgaatgcttaaggacaccgatgatgcaaaacaaaataaaaataaaatattacaataattataaacttctggccccaaaatagccaatctcctcgaagcatcatacctgaagcagtcaagaaggtggtatgggaaaagtactttgctctaaagattctcgtagggagagagtccaggcatgtaagtattctccatgcctgagcagccagtagcgcctggttatgatactcaaatgttcgaaatcctggcccaccctgagtctttggcaaacacattttcctccaagctaaccaatgtgttgagctccaccaatatcttgccataataagagcttccaattgatcacacaaaatcactggtaagcaagacattgtatacgtgggcatagcttggatgaccgcttttaaaagtatttctctaccaccatacgaaaacaactttgaattccaagaattaagacgtgacca

SEQ ID NO: 343445 - DNA, 1092 bp, Cannabis indica
aaaaatcaataagtgttccctaacactttcgaggacataaattgacaacaaaagtttccctattgatagatatcatagaaataccctatgtattgtgaaaaaactcaatcggggtcctgagaaaagtcttaagatggaccccccaaattcttcctaaatcggatagctcgaaactccactatcaaattttaaaacttgcataactcctgctattctaagcccaaccttacaaaatttttcaaggtatctgaaaatatcacaatgaacattttttgtgaagaaacctgaatcaaattctcaatagaaatcaaactaaaataccgtcctaaaactacctaaatcggattgcctgaaacctccctgtccaagtttggaaatcccataactcatccaattcggattgaaatattacaaaattttttagagcacttaaaaacatcataatgaacatattttatgaagaaaccttaacccaactcgtaacagaattcaagttatcacaaccaagttaagtttaagttctttgaactcaaagttgcaaaacttttgctagaaccaccaaaaacaattcaaaccacttctaaacagtcctaaataaccttaagtaatcatttcatgaccttcctaaacttattcaacatgttctactataaacagtcactgaaacctaacaaaaaccctagaaaaccaataaattttaggttaggtttaccttagaagtttggaggagctaggggttgaactccttgatgaatttaagctaagaagaggcttgaaaatggtagaaaacactgtgttttggccctggttcagaagccacgaagtagagggggaaggagaaggtgatttggtgtttttttacttttctttttgcttttgactttgctttttgttttttgttcctttttactttgtttttcctttctgtttgcttcctaagtagctggccatcttcaaaaggatgagccacaaccacctatcccttccaaaaagagtgactactctcttagggtaaaaagactaaaatgcccttacttccccaaaaagttatctcgtaaccctaggggtaaaatagtccaattctgttatttt

SEQ ID NO: 343446 - DNA, 618 bp, Cannabis indica
aatatacaaagcattcaaaaaacattttttctgtgatcagccaaacacggcccttggtccaaaaacgtgatataagacctagaaagaggtgtttggctgatcactaaaaaacccatcttcaatctctttttccagtttaaaatgttatttttttaatttagaaccaaatgtagcccttgttcccaaaaggtttgagacacattttgaagcgccaaaattaaaagtggggtaaaatatttcagcacatcttttatcccattttttattttcttatgtataaaaagtgggataaaaagtcccttttcttgtaatgaactaagccaaagaagtccaaagcctcacatgtaaagtcgccgctctaaatcgctttatatcgcgatcttctgataagtgcaaagagtttttcagatcttaaaaggcaataagaagttccaatgcaccgaaaaatgcgaggaggcttttcaagccttaaagacacatttggggcaacctctaatcctatcaaaatgcatgaccggcgaagtcttatccatttacttagcagtatcagaatatgcaattagttcagtactaatacgcgaggatcaaggacgataatacccagtgtactatgtcagt

SEQ ID NO: 343447 - DNA, 719 bp, Cannabis indica
tgcgacaagttttctcaccaaatgttaaaaaaaaaaaataattaaaattttaaatcacatgtcatttaattaagagaacaaaattagaatttttgaaattggataatcaagtaaagagttacgcgcgttttagaacaaaaaaaataggttttgccattgccctatttttggcctactgttttccaaatggcaagctatttttttcagaaacaaaaatctgtttagaaaaaataggccatttttcccaatatatttttgaaaaatgtgctaacggctataaacaactagtttttgtttaaatcttatataaactcaattttttctcaaaaattcaagttggttgagaatttattttatacacctaacatattcaagtgagtttaatgagctcccaaatgtaaaatctaacaaacactttttacacattttgagccaacatttgtgcttaattctttaaaagtgtgcttgccaatcactctaggtttttcattgtctcatcatacttatagagtgaatttgcttgtaattccaaacacatttttatatggtgattgaggtgaggttgccatcggtattgtaaacagttcggttagagtgagattgtcactacaataatttgagaaataggttgatagtccttgacggtacaaaactattataagaggtttggaaacaccttgatgaaaaattcccaattgtaagggttagtcaagcccgtt

SEQ ID NO: 343448 - DNA, 1309 bp, Cannabis indica
acacagaaggaaaagatagggtgaaagtggatcaccctgtcgaagacctcttgtaggaattataggcccaatttcatgaccccccgatgtgattgtgtaggagacagaactaacacactgcattaacaacttcaccacatgctcatcaaatcccaatctcctcaacatagcctgtaaaaagccccactccacccgatcataagccttgctcatgtccaacttaagtgccataaacccctccctccccatttgcttccttttcaaataatgcatcacctcgaaagagattaagatattatcagttatcagtcttccgggtaagaaggcgctttgagtttcagaaataacactaggaagaacaactttcaaccgattggccagcaccttagaaacaattttataagccacattacacaaagcaattggtcttagatcactcatgctttcgggtttagacttcttcgggataagcacaatattcgtttcttttaaatgatcaggaaattcaccaaaagtaaagaagtgttgaactaaccgaatgatatccttactaacgatatcccagaacttctgataaaacccaagattaaagccatcaggaccaggagatttatcaggatgcatttgaaagagtgctttccgaacctcctcagcgtcaaccggaatagtaagagactcattcatagcagtcgacacccgattatgcacacaagccgtgaccctaccccaatcaatctccgaagctatgaacaactctttaaaataatcttcaacgacacccggtaagccattttcccaatccacccaaatcccacttctatttttaagagacaaaatctgattgtttttccgcctagtactcgcacaagcatgaaagtacttagtgttttggtcaccagattgcagccacaattgttggatctctgcttccagaagacctccttctgggtgaatacttcgaataaacgattttgagccttcttgtatctattaactgaatcaacatcccttctatttctcaaaagctttaggattttatgacaactatttatttgctgcttgaaattaccagtgatatccttcccccattcgctatagcagtactacaacatttaatttttgagctcaaagaattcgactcatgaacatcccaattatcatgcacaatttggcgacacataggctcacgcacccaagcatttttaaaccgaaatttctttaaaactaaccacttttctgaataaattaagattcaacaaaataggacaatgatcagaagcaaaaatttctaaattttctaaccttgcat

SEQ ID NO: 343449 - DNA, 685 bp, Cannabis indica
tttaaaaattatttaagtttatattttttttaatattggggtgtatttatcattttatggggtgcaaataaaactccccatgttatttttgggatcaactaggggtaatatggtcaattcgtattctaattggcctaattaatattgataatgaaatcttattattaatatttcagggggcggcttaatatatttataatgtcaacatcattgttacttgttagcatctatttataaataaattattaattattaattcttaattattgttctataaaaaaaaacaatacaaataaaaataaaactaaaaataaattcttaattattgtatttcttcacattttttttttaacttttcagatttaccaggttgaaaagtgattggttctgttggaggtggaataaaatctttttactgtaaaaagtcttagggcagacgtgaattaatagtatgattttgggaattgcatatttaaaaatatctccttttctttctttgggtaattaaaaagtgaaatcaacatatatcaatattggaagatgagatttaaacttgaacaatttaaagggataattttcttacgaaaataagtgttttatagataggttatcagggtttagggcaaatattatatttaataaaagttatcgatttaactttttgttttattaaatgacaatttag

SEQ ID NO: 343450 - DNA, 667 bp, Cannabis indica
tagccgcggccatacatcccctcgccgcggcgactgtaactcccaaaatctctcatttatttcgtgttctagccgcggccaagctgtgtctagccgcggccagatatgcataattcttcaaacatcgtgttttccttggctcagctcgtcttttactgaatttttgcatccgagacctctattattccaaagaacctgaaaacatagaaaacaagcgtaattccgtcccaacacagtgaaaaacgcacataaaatagatccaaaatataggctaaaaatagcctaacatagacaaatatgatataatttctcaattatagagattttattatattatgtgtgccattgactcaaaaatctggagtaaacttctaagccacacccactcactagattggcaagaatgaaatagttgttaagtaattataagcgtgacacaacaaatttatagtagttcactccctgtattgcgactgtaatggagctacgtctatttcgaatttttatttctcatgagatggtattacagaaaaaggcaaagtgtcagaagctccaatttctatagagagaaactagagagagaagctctgaccttgtgattagttttctgaaactgaaaaataagataagggatctctccttttataggtgaaggagacccacaaaa

SEQ ID NO: 343451 - DNA, 563 bp, Cannabis indica
atgtttttgtttggtgtgtttttctgggttctgctggttggattttattgtgtataccctgtttaggtattctggaaagtttggtggcaattagacaagttttgaggaagttttggagttgttggagaaacctggtgcaaaccagttaactggtttgccaggccctgtaaaactgcttaaccggttttgacagattccccgaacaactcgttttctcaattcttgcccattttagtgccttagttgggtgtttccctgttttctaggttaatgtaatccctagtgaatataacagaacctagagttggagattcaggtttcctggataagggttttggacatgcgatttacccgattttaatatgtgattagggcatcaatccagcacgagactttccattcaggtcggccaactcacttgaatctcgaaaggaagtaagaactgtgtataaggtttcatatgaatatgcgaatgtatgtatatgttaagtgtatatgcatgcttatatgtttgatacactacaaacacttgtacagttatggcacagagtgcattggtatag

SEQ ID NO: 343452 - DNA, 871 bp, Cannabis indica
atcaacattagcaattctccatgaagataacgcgaaatgtattgctcaactaaagctataatgaagaagatagagccaaaaacattttcaccaagttcttcttactacatgatcttcaagaaaataattatattggcgtccaacgtattcaatcaagtgtcaatcttgcagacttattcaaaaaattattaccaacatcaacattttggaagatgacatataagatcggaaatcctcaataagaagatctccacgaatgcctaaatgagagggagttaattcatactgcactcttttcctattgactgaattttcaaccaaatttttaatgagaaagtttttatggacattcaaggggagtgttataaaatattattatagatgtctaaatcaatgcattaataaacactacaaatacttgattatattttcctttatttcactgatttaattcttcattagtctagtcatatttttgtataaacagaaatttacctcattagaataaactactgagaaaaatttcatcctctcttctcctattaaaatttatattctatattatttcataacaaaaaaatattatgtttagcgttaaaagaaaaagttgaatggcgtcacaaatgaaaagagaggttaatttatatatggcttttataaaaatattatatttttaagtaaaaatttacaattttactgtcacacgaatttttttaaaaaaatactgtctttttataaaataaccgtaaaacaacagtagacaactaaaaaacaaccgtgaaactttaaaatatctacgttaaaaatttcagtatgtagtgtagaaaacctatttgtgtcagagtatactagctcacacgtttttaaatca

SEQ ID NO: 343453 - DNA, 899 bp, Cannabis indica
ttttttaaaaaaattttactttcattttgtgattaaaaaattaaaaaacaaaagtgttaccaaacggcaccttagtttcctataaatgatatttcagtaaacttatattattactaaaataagagctcttccatttatctctgttaagccaagcttaaaggaaattatcatttcacttctctatcattatagaagttatagattccttatatatgactagtgctcccactcaattgtactatcatgttcccaagatgtaagtatagggaagattcatttggtcaactttaacgaataagtcaaagaacataaataatatagttaagctagaacctaaccatctcaggattaagatctattgatctattatcctaaattttgtctgcctgacgtggcatgtccacgtaggttaaagatagagtacatgtaaagtatagccctgtcaatagcagaattgagcctccatgcaagatatagcaaaaccttcaagcagcaactgaaaggagtgaagagagccctcaaggagctataccaacatccttagccagccaagaggagcctataggccgaccaggatctgtgcacaagctcgctggccaagaagtgacttccagacccaaggagactctgtttggccaagaaaacctgacatattcatggaaacgatgtacaaagctctcctcaccttgcaaaaggttggcctcctcttggttgagcaatagtggccggccaggattgacatggcaggatcatggcccgccagacttccttgtaggcctatggacggccaagattgacctgacaagactccatgtacaactctacacgtggaccaaggcatgaactgcgaatcgggccccaaaagcccaacagcaggctgagaagtatctagagtctaa

SEQ ID NO: 343454 - DNA, 740 bp, Cannabis indica
ggataaaatacattgaaaggtagaacaataaatctatccctattcagtgtagatcatctgtaaaggatctttgattattaggatagataatcataacgtatctatatcttggtacatatagagcgttttatataattgagagtgcaattcaattccaaatctatagtggcgcaaggaggaattaataagttagggaatttactttgtaaattattgatctacttgttggaagctcggttatataggcccacggtcccctcactaggttagatgatactgcttccagactcaattaattaattttaattaatcatttataattctaaaattagactatgtcttatttatgaattttcactaaacaagggcttaattgtgaagaaaagaggttttggggtcaatttattaattaagagactatgcatggtctagttaataaataatataaacgataattttatttgataattaattataattattaaataaattgttttagcatttatatgattgaattaaaaaatatggtattattgaaagaagaataactagttaaaataaagtggcaaaattgtaactagagtttggtccttttagtggtcgaccactctagtgatttatgcctaatattttgttcatttttggtccatataattcaaacctaagccctaatataaagaacatgatgcttgttgggttttatgccctaaataaaactctttacaatctgattagttatc

SEQ ID NO: 343455 - DNA, 666 bp, Cannabis indica
attgactcaaaaatctggactaaacttctaagcaacacccactcactagattggcaagaatgaaatagttattaagtaattataagcgtgacacaacaaatttatagtagttcactccctgcatcgcgacagtaatggagctacgtctattttgaatttgtatttctcatgagatggtattacagaaaaaggctaagtgtcagaagctccaatttctatagagagaaactagagagagaagctctgaccttgtgattagttttctgaaagtgaaaaataagataagggatctctccttttataggtgaaggagacccacaaaacagggaaaaataaaaattagatatttttgatcgtagatgattatctaatggtgaaaattagcttctgatggtgatagccatttttcagagctggcagggcccgctactggtaacctagagcttatttttttaactcccttgggatgaaatttggtgcagataacttcataattgtagttgaattgtgagacatgacttgatataacattgaaatagcttcgaaatgaagtggaatcgtatcaatcggatcaatattgagtgagttatgattgtttttctgaaggtagttcatgacctagcgcccaggttgacatatgacgtcaacctggatgttggataagtg

SEQ ID NO: 343456 - DNA, 547 bp, Cannabis indica
gagatctttgaattctatagaaggagtttctcaagttttctagttgtcttacatagaatgtaaacttgaatgacttaggttggatagaatgagaaccatcttattccttttgtaggatttctcctagggttagagttaaattatatagcattaaaaaattgataaaaaattgctaaaattctccttaagtgggcagccataaataagccatagtctaattttagaattataattgattaattaaaaccaattaactaagtcttataagtagtattgtctcaactagtgtggggaccatgggcctatataaccaagcttccaattagtagatctagaatttatcaagtaaattctctaacttattaattcctccttgcaccactttagatatggaatcgcactcttagttatatagaaagttctaaatgttacacaatatagatacgctatgaattatctatcgttctaatccaaataataaaagatcctctatagatgatttacgtcaagtttcgacaaatgtaccgtttcacccctcaatatattt

SEQ ID NO: 343457 - DNA, 813 bp, Cannabis indica
ggtaagcactgcgtgtttctttatttttatgtcttttattttgaaactgtgtaactcattttaaggtttaattttaatcattaatggcaaaaactataatcctacttactgttaggatcgtcagtttttaactttttattttttttttggaaaaaaagtaataaatgttggagcaacaatcttacttggtttttgtttcatggttttggaaatgaaacttgaagagaaagtgatcatcaaagcatttgctgattttagttgagatgatgtgctgacgtaaaagaaaactaattattttaaaaacggtaagataaaagggtataactttaaattataatagatctgttaagcaaaaatttcacatttaaaatattaaaataaatgcaaaacacaatttcacctatgctgaatttatagcataagagtttatttatttaagttcgacccatccaagattataagaataatctcttaattacaatccttttatttaaaggaaataccctttgattccaattacaatgacattaaataattaaaataaatttggggtttgggataaatttggaattgcagctgaactcagtccatttaattaaccgagctgcctacataccttctttgtgaaggatcaagtcacttgtagttcagaatacggtattttaaaatttagatataaagattccggtagatgaccactttcaggaatcctttgctatttaaaaatttagaaaaattcctaggtgtatgaccttttatagaattttgagagttgtgttttataccatttttgcggtatcggcgactgcactt

SEQ ID NO: 343458 - DNA, 575 bp, Cannabis indica
ggttccatgagtttcgccacatctagtgatacaacagaaagtgttggtggtacaggaatagacacaagtcgaacctgttctctcatatgtcaaatctttttccccttgttgtctaatcatatattgcatggcaaaatttacatgttcccagtgttgcaccaataaaggattctcttccttatcatttgccccgagcccaaacaactcgctaattagactattcgattgcccttccacttactacataacttatcacacagttaatctgcatcttccaagtatttagaactcagacagatatcaatatcaatatgtattttccatacacatattcttatcataatcatcactatactactttttccaacatacttgataagagtctaggcagtaatccaataacaaataatataaacacttactagaccacgagtcgatctttcttcataacaaatgtatggtctttaggacctttaaaactatggctgctctgatactaagttgtaacaccatatcccatagggacgctacatgtgtaattttataaactagtttaatactaatagattaattaa

SEQ ID NO: 343459 - DNA, 517 bp, Cannabis indica
tttatcttgcaggtcaaactcatcagtaaaatattagtaaaattaaaaaaaaaaaaaaactaaattagtactaaaaattaaaaatttgaaacaacaaaattagtactaaaactaagaagaaaaaccaaattagcataaaatttaatttttaataatattgactaacaatccccgataacggcgccaaaaacttgctgtgatattttgcacacacaagtgcacatatcgtttacaagtactagactcaccaagagtgaggtcgatctcatgaggattgtagttaactacgttaaaattaaacttttacttctatttgattaaataaaaattaagaataggttaaaactagaatataataaaaacattgaaaggtgaaacaatttaaggatatatattaacagttaataaaaattagggtttcgatttcagttatatttattgattatgtcttaatatgattatcttcctattatcaatttctatgcaatagtaggtttactaaggtaatttatagtct

SEQ ID NO: 343460 - DNA, 509 bp, Cannabis indica
tttattattttttttttttgagagaatttattttcatcttcattacttaagccttgtttttttgaacaaattacttaagccttgttagttattagtattttaccaatgatatgaattaataatattacttttcctttcaaaaataatattattttccattaattttctataacttatttttctattaattgaagtattacaattaattatgattcaaagtatttcataataactttaagggaaaaaaacaggaatattctaaaaatggtaaaatattacaacaatactgtgggccggcccaatcaacatttgtacagcccaaaatgaaaatattacaaaaataccacttgcccttaccttcagccgcacgtcacaaacggagaggatgaatgaagctccatcgatgcagtcggccacgcaaccagaatgaaaccagatcgaacgtaaaacaactgtaaatcccgtcgaatttcaataggaatcgaacaaatccaacgatctaaacagaa

SEQ ID NO: 343461 - DNA, 598 bp, Cannabis indica
tcaatccatttaagccctcttcaactgtgtaatcccatacctacacagtctcaaaatcatcccacttgaccttccccaggcggtgtgagattgcacagtttacccggtgtttcctcttacggatcacggaactactgactcacacagtataacattaaagaagatgttataagacaccaataatactttttagcaattatcttattaatagcctattggaccgacattaattgtgtagatatgaacatattataagaaaaaatgagaagccaatgaaatatatatatagtgtggcataattgcatgcatggtagtactgctcccattagaagagaagacaaagaacagttctggtactatatatatagtctatatagtctatactgtacactccaaaaaattggtaaatatttattaactctatataggtcttttaacctcattcaaagttactcacttgtcactctcaaaaaatctacatgacttctatccaaaaaataaataaacatagttagctagtatgtaataacatccatgcatgtgatcaagaaaaaaaaaaaaaaaaacaaaaaaaaaacaaaaaaaacaaaaaacaaaa

SEQ ID NO: 343462 - DNA, 810 bp, Cannabis indica
gggatcctaacccactccatgagaagctttggatgatccatggcctggaaaccggaggagaagaagaagcggtgatgatattccttcacgtgcttctgataattataagggaccgggccctcagtcaaaggatgggctcggagaccgtaaaaaccgtccttaagtttatctccttgttttgggatggaaacaagttcgtaaaagtacaaaatttctgccggactgggtgagccccggctccgggcagcgtaaaaaatgaacaagcctgaaagcaggcggtaagcttgaggaataagttgatatggtgcaaggtcgacaaatacaaggaagttcatcaaatagtcttgaaaagggagcatggccccggccatgaggtgcgtctggctccaggctccgaagcccccgtagttgtggttgggcgtctcctcgtcctggggcagctggtggtaagtctcggaggttgaaggctggatgcctgccactaccacgatttgctccagttgatgggtgcaggtcagggtaggatgaagctcagccgcttcccacccgttggcacgggacttatgcccctcttgggctaagggacccttcatgacctcctccagggtggccaagcacttctctcccttctttgaagacttagaactggatgtagacattttggttctgaaaaagatcgaaaaaatccagcagtcaggccctaaaccaaatcctaattcaaaaagggaatgggggtcccctaaccgctggaaacgaggcccccctcggacacttgccaaaaaaaagaaacctcacaaggtttccttgaca

SEQ ID NO: 343463 - DNA, 540 bp, Cannabis indica
tccaagtttgagcttcaaagctcaaagcttgtctaacacaacgaccaaccaccagaaccaacctaattcaacataatacaacacatctagcatccagaaaacaaacccaaacacaaacaataatcacagtagccaaaaacaccatttcaccatgaaaaccaaagttttgagttcaaagcttcaaacttggataaaaccaaataacaaccacaaaacctgcttaaaactccatatctaaacacaattcaactttaagaatcaacaacaaacatacacaacagctacacatcaaaatcatcaagcatgcataaattttctttcttaaaactcaaggaaactagcaagaaagttacacaagggttaccttagcttggattgtactaaaaattgatgcaaaacactaaattgaggaagaaaaatcaagaaccctagctgtatctaggggtggccgaaagagagagagctagagagaaaatgatatttgcctttcttttgatttttcaataaaatgaacaattatcatactaatccacttatttc

SEQ ID NO: 343464 - DNA, 667 bp, Cannabis indica
atgtatttataaaataaattggattatttttttttaaagtttggtttgggcggtttaaaccgatcaaactgaggttcaaaacagtcggttttaagataggttttggattggtcggttggtttttgaattgaactaatccataccgaaaactgaattttagatttttatatagaaaaaaactaaccaaaccgaccgatgctcagccctaattccacgcacagttctcctcttctcgtcaactcccctcgcacctagaagatttggtcgaggtaaaacaaataccaggagaactcctcagagtctacataagtagatttatgacagaggctataaagattgcaaggttaactgaggatggaagactggctgccatacagggggcattgagccactcggagaaggacatcaaaagatgtggccccgtggggtgtatggcagaatttctagaccaagcagatgggtttattaagctcgaggaggctatttggcgagtggacaccgtcgaacataagccaggccagccacatatcccctcggcaaagagacctgcttagagtccacaatatcctagcagctcaaatccgagtgagaagaagtcaaacaacagtggtaggcaaggcaacagaaaaaagggaaagttcacaggcaatgccgaacacaaccctag

SEQ ID NO: 343465 - DNA, 1111 bp, Cannabis indica
ggtcgaacaggtgaaatgggctcccttatgcgaatgccatgttcaacgggcctggacgcggccgggagtttcttcttcctcttcaaaggagtcacctgctcagcctcagcctcaacttcatcttaaggattcatggacttctgagcatactgctttgcccgggcacctcccttcaacttagcttcacgcttaagttgaatgagctcatcctccttattagctcgttcgggccgggcagcagcagatttcctcttcttccccgtcacggacttagaagaaaagtcctctgggtaaagcccgtactgcaccagattttcatcggaggtcaactggatgatatccctatcttccgccggcaaccgggcaagtttttaagccctatccctaagagtaagggtgaggggaggacggtgatatgtcgggatctgctgaaatcgagtccgggtgatgttaggatccttcaccatgaagtactcatcaacaaaatgccctattttgctgatggccttgtggtccgtctcgctcaacaacttgaagcctggctgagataagtaaaattaccccgtgcttgggggtagacttcaggtcgaagaaccaagcgacctcgtggggagaaggagcatcccaaccctgggaagcgtagaggacgaagagagcggacaaatacttaatgcccttaggagtaatcttagttgggcagaggccgaagaagtccgccacatcgcagaagtacttatgcaagggcatcaacgccacttgctggccgtgagccccggaccaggcgcacatccccttataagggtttgtggcacgattgtcatgggcgggaatgaagcagtccagctcgcccaggtatccatcctggtcgagagtgcggaggcgtgccacctaaatcttggacggaggacttacccacctggcaccccaaggcaccctgccgtcctgtgaggaactgcctcagcaagttcctcactgacgtaatcaacgccctcaaccaggacgtccccgtcaggatcaactggttgcccagtctcattgtactccccatagttagggggttcaatctcttcctctccctcaccagcggagggctacccggacgcgcctcgtc

SEQ ID NO: 343466 - DNA, 1020 bp, Cannabis indica
tctcacatttttacccaagaatcgtcttcatctagattcttcatacaaaatctaaacccaatatctctctttactctgtacctctttctctctacccctcaatctttttcctctctcaatcttgaaaaatctcctctcgaaactcgtttgaaccctgcattcataaaatgataagtgttggtggtatttataggctcaagataaaaatcctaagctcgatagctgcaattgataagttgttaagttagttatgccataactaacttaacaactttctcgtaacagaatctccacgtcagcacaagttctggatgagacatagattcccaggacaaaggactgaagcgtatgttgaaaggacttcccgaataggaaaagagctagcaggagtcgactatccggaactccctttcagaaggaagattagccatccggcatttctttttggagtggacacgatagtcattcgagaactctctcctggatgacaactatcactccacgagacttcttttgaatggacaagctattcttctgggagacaactaacttttcattacttgaatcaatcttatggagattttttcatttgaaaaaattataccacatctattattaaaatcatccacatttccatttatatatataaaaagaaaacaacaaaatcaataatatttgttcttacacaaaaaaataaagaagaaaaccctcatttcctcatacatcttgatcttagtgtttctttttgatcttatacttgttggctgaggaagatttatccacataccaactcaactcatgacactccttttttaaagaaagacttgtgatgagtgacttcaacttgtcgttcttgaaaagtaatttgcaaccattgcatgtaatggcttctgtatccatcttatatgtatcatgttggtgactaagtaatgcttttgccttcccataatcaaacttgcaaagctgcaagttagaaatgtaacgccccaatattttaccttattttacgaaatactaatt

SEQ ID NO: 343467 - DNA, 736 bp, Cannabis indica
ttagtaagatgctggagaattttttttctaatgatcaactatagaagcttctcgacttctacacatagattttatttatctaaggaaaagtctcaactattacagaaacgataaaggccaaggaaagatttttttaggatcaacagtgagaggtcttagatatgctttgctatgcattagacaagacacctgttgttgagtgggagtaatgagttggtatcagattaattcaggaaagcaacattaaaagacaatcaagtgaatcttaagatcaagaagaggaactatatgttagtcgataagggtggtatttaatactctgagactacaccaaatcaggtttctagactttccttactgctagaaaatctactgatgagatggtgattactctggggttgagtaatgattttggagaagtgtaaaaaccaatccggactctctaactctaccagtgaaactaaatgttaaagttgcagggaagatacttattccggctaaggaaagttctatacagttttggcactgttccaataatttatttactactagtgttacttcctgactaacacaaatgtagttgccaaaaagtaaagaatctagtatccctagaggagttgacatatagagaggaatttcacaatatcaaagattttgtgattaaggaaatgtgatggtggaggaaggttgtactatcagatcctattacggagagaatactacatactacacatga

SEQ ID NO: 343468 - DNA, 1300 bp, Cannabis indica
gcttgacaggaacttggtccaatggccttgatagcgagctggagccctttttccccatctttctgaggtcgaccatgtacgccttgttgcttctttatttgagagcttaacgctttatgtaacaatcatagttcttattaacaaagaatttctcaaggctcatttgaatgtttagcttcttacacgtcaagattgcaagtctcactgaaaagatgtctgaagttaactggtggatgttacaggaatgaaccttcctatagcgagataggcacctctcttatttaataaactcgactgttatacatagtttgtgcattttacactaagtatttccacagtcgatatgcgttgttttggccttcctagatgtaacgagattgatgcctcgctttatgcattcaatgacatatggtttctcgttaatacactaaataaaagtttgtatatcttttcctcgcataagaccttatagtcagcgagttgcaattatactctactacttatgcaattaatgagttattccattataagtaattttatcgatccgtattccctttatcttaatatgtgtcctccactaagatggtagccgaattttctgtataacaattgccccttaaaaagttttttttttataaaacgtgctttttaataattatagagggaatttttgtcataatcactttttggaaaaatgcgtcctttgattctggcggttgtacgatttcgagggtcattatgaatcatcttttcatcttctgccccactcccaaccgttagatttcccaacctttggccttcttgtcactagactttgagtataaaatggtggcttaaccttgccatattccacaaacttctagttttttggtgagattcatcttgagattggattgccattctcttacttagatgtcccatccgagttcagaaatttacccctccaaattcataacaccaaaatgcaccaaccactttagaaatttacccctccaaattcataacacaaaaatgaacaaaccacttttcttctctatacgttcccaagaacttcaaacctcaatttgaattggaaacgaaggaatccaaggctgaggagctatcgatcaatccaaaccaagggaaccccgttgatcgttatcggcgatcctcacaagtgattcttgagggtaagtattataccttgtgaatggtaatttgaactggattatacatattattattttgttgctctattgatcttttatctctgtctccacaggaatggatatagattttgcgagcgatcttagaggtcctc

SEQ ID NO: 343469 - DNA, 541 bp, Cannabis indica
ttttggattgaagggagcggtttcagggatggaaaaaaccagaacaaagaaaaaaccataaaggacttttgtaactgcctcagagcacaataacggcagactctcttaagattgacatataatcaatatattgcataatatctttaaattaatagaaatgctaaaagacactagtggtgtctaacactcttctacgtgtcagtatcgttattggtctaactaagtattggatcccacataatttaatataacactttttaggaagtatcgctagccaatcacaacatgacatatcgagaaagtattaagtaccacgggtgtctaataggaatgctcttaaattaacaaaggcataatgttgggaagaatttatgaatgcattgagaaacacactgttgtaaagaatttatataaaaataggataattgctattagccactttgaacttagtcaataccatactcatataatatactcatataatatgaggtgacattatttattaaagggattatttcataaatacaaaaaaaaaaaaata

SEQ ID NO: 343470 - DNA, 1205 bp, Cannabis indica
aaaggtttactggtacgaatgattttgtattatggaagatgaagatgaatgctttgttagttcaccaagggttgtatgaggctatacttgaagagaagtctcttcctgaattgctatcgagaaaagataagaaagcgactcttgtaaaggctcatagtgcgatcattttgaatcttagagataaggttccgagaaaggttagaaaagaagatatagccgcaggtttttggctgaaacttgaaagtctgtgtatatgactaaatcgttagtgaatagtttatatctaaaacaagccctacattcattcaagatgatgtatgacaaatatgttggagaaaagctttatgagtgtaacaagttgattctagatcttaaaaatattagtgtaactattgaagacaaagatcgaaatttgttagtacttagttccttaccaaagccttttgcgcactttaaagataaaaatattgtatggaagagattcgatcgctcgatgatgtgcaatcagccttgaattcgaaagagctgaataagaggaatgagtcaaagaattctagaagtggtgatggattatttaccgtgggaagaaatgacaagagagaaagttagaaagattcaaaagggaaattaagatctaaatcgcagtctggtagccaaaaaaatgttagatgttagatttgcaagaaatcattgttggggattgatttaccaggatctagatttactaccatgtatgttgtctaacatcctaaatatgaattacttaaacaatgaaatttcaacacaaataaagttcaagaaaccttacattggttgcagcagaattaaatgactcatttcactcagatctctaacccttgttcctttctatcgcagagtattatcaagatctgagtcggattctctttcaggtgttagattcttcacagtcttacccactatgattgagtacttacttgctatgtgtgggcatgtactctatcactataagggacgaaaatttgaagagaaagaaagagagaaggattcaaaatagagagagaagacagaaggctcaaatttcactgaagacttaagttgcgtcaactgccagttttgagtctatcactatttatttataagaatcactatctatttataagaatccttctaggtttaggtttgaattatttggcattaaaaaaattgataaataaatggctaaa

SEQ ID NO: 343471 - DNA, 797 bp, Cannabis indica
cctaacaaatattgtaaattctagaaagatattgggcatacgaccgacgaatgtcgccaattgaaatataagattgagagtctcatcgctcgaggccattttaaactgtatgtgaaaagatagggccaaggatacaaccagccccgttagcctaataacccaaacaaccaggggttacaacctattcttgtggaaggggaggacatcctggttatttcgggagggtcgtctattgcaggggaaagcaataacgctcagaagagatatttgaaggagataaagaacaagcagtcgatctttggccaacaccattcctagaaggtggaaaactgaaaaacccctcattacgttcacagaggaagacgaaaagaacgtgagataccctcacatcgataggctggtcataaccattcaactagccaataaaaggattaagagagtgttaatcgacaatgggagctcggtaaatatcatttataaggagactctaaagaaaatggggctcaaaaaggtcaagttaaggccttgtatggtgaatctttgcagattcatcggggatagcatcgctagccttggcataatcgagctcgcattaactttaggcaaggcacctttaactgctactgttatgcaagacttcttggttgtcgacctgccttctgcttactacatactgttcggtcgtctagaactgatcagactagaggcagtcagttcgatcaaccacctatcttgaaagttccaaacaccagatggcgtgggagtggtgcgtggcgaccagatgctggctcgcgatt

SEQ ID NO: 343472 - DNA, 538 bp, Cannabis indica
ctgaagactccattcttctcctccattgcgtagatgtggtcctgcgggactgctaattctgtatagttcacaaaacctgggcctttttttctcttaggagatgactctttctttggaggggatttggccaactttggactccgctatctttggggactgcgtcttctagggcttcttcctctgaaattttttcctctgggactacgggatcttgatcgcggtatgggtgactcgcgtttatcctttcctttctctagttcatccagagaattttcaatccttttatgcggctcagccataatgaagaactcgactaacgattcaggcctttgagcctgcaactccttccaaaaattggttcttggcaagatacctattatcagcatacaaactaacaaagactcgagggccttctctactttagttacttcatcattaaaacatttaaaataagcttgtattgactcaccgaccccttgcttaatgttagccagagtagtatagggcggccttgttgggaataattttaccaggatct

SEQ ID NO: 343473 - DNA, 399 bp, Cannabis indica
aaaataatttccaacaggtagtatcccccataggccactatctgggcctcctctaggttgatgtatttttggactcttttctagaaattttgaaggttggagctctttcttgctgtaactcgttccagaacggaatccctgtacggatgcctgcttgaagaagagcgagctgttgtccgtcatcaactttcttggttttcgaggcttcttccttaaacctctttatgaaattcttcaatgtctccgtaggcagctgcttgatgttagtaaaggcgctgacctctagattaactttctttgcggcgaccaactgtctccggaagctgttttgcagcttattccagcagtccacagattttggctccagtttcttgaaccattcttccgcggacccgctta

SEQ ID NO: 343474 - DNA, 840 bp, Cannabis indica
tcccggtcttcacagtcatagtcgagtcatcccctttttgtctccaagagactcgaccaatgtcctttcgaagtatggcaagctcagctatgattccttcgtttagtgttccagtggagaccgcgggcacgtgtttctgttggtttaggtgatcccaaaggtcatcgtgctttccgttaatctgatgtctcagatcgacgggagggtatttttggctccttcgtcctctccctcctggttcctggtgcacagaaacgctctttcggtcctctcgatcctgagggccaagactccctttttggagtttgcccctttgaggatctttcctttcgggaaatctgagtggacctttcgcggatattgcacctttttctttttcccaagagtggaagtagggtttttccgctggttcccttcagatagataccttatagggctaggttccctagatttctgcttttgggcacgtggcggggattctcctggtgtttctccaagtccagcagggatggcattatgatgcacgtggattcctgccgcctccatggctttttgcatggccagcatcacctcttgcatctttttgttttgttctttttgggccgtgatttcaacttcgtgatcagcagccttttgtctcaagagtactagctctgtataggtgccttcgtcgtaggcatcgtactcatcaaacttcccttcgtattcgtcgtcgtgggttccttctccttcctcagagcccacgttcgctcttgaggccacatcctcatcgtctgggtcttgagcgtcttgaggaggacggggttgacgcgtattccgagtctccaccattgtgttttg

SEQ ID NO: 343475 - DNA, 1542 bp, Cannabis indica
ttgaaagcaccagcaggaggaggctgccacgggggagcagcaggtggtcgaacagtcggcaaaggttgttgctgaagctgctggtttgaaaattctggagaagcagccggttggtatttggactgggcagatttgaagttgttcaagtaagtcaatgcaaagctggccgtggcttgtgctagtttagcttttttattatgcaccacttgattgcgttcagtccaaatagcccaaagagtgcacataatttgttccatttcaggtttggagtatattgtggaaagatggcatatataatcacctttgtacattgcagaagaaagacgccaatcaaacaacaatccagagtgcctccaaactgcacgagcatacttacaagtgaaaagagcatgtccaatcgattcccacgcttgttgacaaacagagcaggtggcatctgttattaccttccgtttaaccaatgatgttgcaactgggagtgccctttaacatttctctaattcaatagcacacctagaagttatgattaaatttttttttttatgtttccgcatttatgacagttttttaatttgatttttttaatgataatatatgttataattatttaaaatcactctttaatattatatttattattctaccagtataaataaatctatataattttttacatatacagaaaatttttataataggaacacttagtttgttctcataagacagtgatattttattagacattaattatgttaatttttaaaaatttaaactatttattgtaaaatagcatgtaaatcatataagttagaaaaatggtttattaattttatctttcctaaaaacaaaataggagatacaaatttcttgggaagcatgtattgagcatgtggcatttaactaacaccttatcaacaaataaaaatcaaatagtcatttacaaaaaagaatgactagcattttagggctcgtttggtacgtttattaagttgtattgtattgtattgtatatcatattttttttatataatattatgttaaattttaatttatactgaaatattatatatttagttgcacataaaagtcaataccacgtatagttttacataaaaatattgcatgaaatacaattcaacataatactataaaatacaatatgatgtaatacagcgtaccaaacgaacccttgatatattttttataaataattttttttataaaaaatacattattttttaggatatattattttttctaataatgtattttttttttcgaaaagtcattagtgtatttgtaatgaaaaaaaaaaatccttaaaaaatatttatatactaatcaaaatatatatatatatatatatatatggaacacttcttaatgggtattacccataaatgattactaaacaaatttaactataaatattaattttaaatatcaaactatcgaattttgatctaataacgaataatgaaaccacaaatttgaatttatatgcttaatttaactacttaattaaaaaaataatacaaaaaa

SEQ ID NO: 343476 - DNA, 713 bp, Cannabis indica
ttctggaaaattcagaaccctcatccggaattccggatgcacaaccggaattccggttcctcgcaggcagcaacaatcaaaaattcatatcttgcacaaatcaaccccaaattgattcaaaccttccagacctgttctaaaccttccctagaacatttctaaggcatcaaatcaacccagaaatcccagaaacaaaaatcaccattggagctcaagctttgagttctaaactcaaacttgagcaaatctaaacaacatgcattcaaaccagcttaattctacttaatcaagcatgtctaaacttctggaaacaactaaaacatcaagcaacaacacagcaacagaacataaccatttctttcaaaaatcacctattttacatagaaaaatcaaagctttacacaacctaattaacatgcatccaaaacaactcaaataaccctaatctaacaagctttaacctctgaaaataaacataaaacacagcaacaataacaaccaaaaaatcatgcatgcatcaactatattcatcattttttctagaattacaaaaagaaaaggttagaaactttaccaaagatttgaagaacactaagattggatgaaactagctgtaaaaatcaaagttccagcccttggaacaccctccagccgagagagaaagagaggaaaagagagagagtttttttctattttctaactttgtatttttt

SEQ ID NO: 343477 - DNA, 545 bp, Cannabis indica
tagatagccttagcttatagcgtttcggcgtacaatttctccgtcctttgcccagtaaacattcctcactatttatagggcaggaaacttgaggaggaagagtttcctctctcgttacaatgcgcataaacagaaagatcgtgtgatcaatgctgaatgctaggatcgtgggattgaggttgaatacactgatagtgggatcgtgtgtatgccacatccacgcaagttaatccctgagttatagggattgagctggtgactcacgatgcgcttggttgaatttcctaagtgttgctcattttgcacggctcattgagtattccattatggacatgccagcgaggcatcctgctcggcatgttgatccgaccaggtgctataagtagatgccacttgtcaccattctcgtgatgccatgtcagagtgccaattttgggataacatttgccccccaagtctgtacgggacctccgaggttgcatgtagacttattctgagctagttctgcctttgaaaggggacacgtgttgagcatgaccgttcga

SEQ ID NO: 343478 - DNA, 714 bp, Cannabis indica
atgccttgctcgcataaccctatgtaaatatatatatatgtaatccatacactatgttcttttcggtggtttgtgatatatacgagttctaacccagttatgtcttatacacataacttttaacataaatgcatgtccacaatttatactataacatatagaatcttagggtaataaccctaacttgcatactaagtagtcactcatataacatattacagtatgctaaaagtaacagctattgagggtaataaccctaactcaagtcttcactcgattaacaatattaccatatatcatcactttcttaccttcataatattctaggataataaccctagaccgcatttaattaaactcaagatacttgtgtaccgggtccagcttatttacgcacaatgcataaactcaatatacatacatatatcatggcatatcaatacttattaataattcactagggtaataatcctaggccaataaatagctcccttaagggtaataaccctaagccaataacttgctcactttagggtaataaccctaatcccaatttttaattgctcacatatatcacatccattataagtgccactgcacataactctacgtgctaactactatcttacctgatgtctcgtaaatatggagattccaaatccccgagtgctcctgaccaagtgccggtaatcttagtcacaatcccgagataca

SEQ ID NO: 343479 - DNA, 1104 bp, Cannabis indica
gcatgccctaaagactgttttccacttccaagaatcgatcagctcgtagatgcaactgcagggcatgaaatattaggcctcatggacgcttactcaggctacaatcaaatcaaaatgcaaccaccagaccaagaacatacaagtttccgaacagatatgggtctctattgctacaaagtcatgtcgtttggtctaaaaaatgctggagctacgtaccaaagattggtaaacaaaatgtttaaagaacagatcgggcgaaatatgaaagtgtacgtggatgatatgctcgtcaaatccagaaaggctggggggcacatagacaacatggacgaatgcttcaaagtcctcagaaaatacaacatgaaactaaatcccttaaagtgttcctttggagtcagctcgggaaagtttctaggcttcatcgtcaatgcccgaggaattgaagctaatctagaaaagattcaagccctcctggatatgaactcgccaacaaaaaccaaagaagtgcaaagcttaaatggtcggatcgccgagctcagcagattcatttcaaaatcaacagacaagtgtgtcccattctctaacatcctacgaggaaacaagcagtttgagttgacagaggagtgtgaaaaagcttttcaagagctaaaggcacaagttgtgaaacctactgtactctcaaaacctctggacggcaaggaactgggaatatacatagctatcacagaacatgtcgtgagtgccgtactaatcagagaagagaataatgtatagcacctagtctattacatcagtaaaagacccattgaggttgagggccgatacccgttgatagagaaactcgcttactgcctcattctagcaacaaggaagttgaggccttattttcaagctcatcctgttcgtgtgtataccgaccaaccactacgccaaatactgcaaaaaccagatgcttctagacggctactcacgtgggcggtagagttgggccagtacgaaatcactttccaaccccgaacagcaatcaaaggccaagccttagcagacttttgttgggttttatgccctaaataaaacctatttcaatataataagatttactta

SEQ ID NO: 343480 - DNA, 810 bp, Cannabis indica
tgggtcttctgatggcagtcccccaactggactgaagattggaccatctgcagtatggctggcttgatttcaaaagtgttggcgtcaacagcaggtggccttatgtaggatcgggcccctgtcaagttaggaagtaagtagtccctcaagctacggtcattgttgttgtgtccattagcctggtcttctacacctcctccgttgtttccgttgttgccattattggcgttgtcagccatgactccttcttgtgcaatctctagtgctgctctttctaatttcttccttcttctgttccttctgcacgtcttttctatctcagggtcaacaagtaatctggcaattggaccttgacttctcataaactattgaacctgaaagcagaataagatcttgagacaacagagttaatactaaaactaaaaagaaaaaccaaattagaacaaaatttaatttttaataatattaactatcactccccggcaacggcgccaaaaacttgttgcgatattttgcacacgcaagtgtacgtatcgtttcaagtagtaaactcacgaggagtgaggtcgatcccacagggagtgtagttaagtacgttaaaattaaacttttacttctatttggttaaataaaaataaagaaagaattaaaaataagaaactagtaagaagcaattattcaagaaaattgatagttaataaaaactagggcttcgatttcaattgtttctattgaatatggcctaatatgattattttcctaatattaatttctatgcaatagcaggtttactaaggtaatttatagtct

SEQ ID NO: 343481 - DNA, 801 bp, Cannabis indica
atcataatcctacttcattttccaagtaattacatatttaataaaatatgtccatttaaatattatttattttctgggatattacagttgatgtgccttccattccgacaactgatcctccagctcctaccgacccagaagactcgtaccaagagcctgggactccagctgtttaaatacttctccttttatctttcttttttatatatgttattcggccataagccctttttttaagatatcatgaccggccaagtggtctttaaacttggaattatttttcattttacagacaacaggttgaccgtgcagcttttaatcccggtattacgtgcttttgctatccttaatgaatttcattctctgtttataatcattgtgcaattgtgtttattttatctttaccaaatgctttgtataggtataggtgccccccaagtgaccgagcagacttatgactctgtgtcacttattttttacaagtatactttttcatctgttcggggttttgggtttgaccaaactttttgtacgcattggatggtaaattagtaacatattagtaatttcgactaaatttgaattttaaaataatctttattcatttattgatcggaaatgtcattgttaccatagtaacctacattagagatatttgatatagtctgatcttttaccttaacatgaaataaaataaattgcagaaattagaaattgtactttaaatggtggtcatccaacctgagtactttttcaatttatccgaacctttgggcgtggtccgcccagcaggccattcac

SEQ ID NO: 343482 - DNA, 848 bp, Cannabis indica
tatcttatatgtaattattattattattattctatcttatatgtaattaaataaatgcatgcatgcgtggaagtgataagaatgaatattagagctacaaatattatactaaaagtgccataaaatttacaaataaaacaacttaaacttaatatttagccttataaattataacctactaaccaaagaatcagtattaaccaacaaacgccaatattactttcctaaaagagccaaattaaaatctctcaaacatcggaaccccaatccccctgcatgtttatgacgactcaaccgttcccagctcatccaattaatacttttacctctactcgaagctgagtgccaccagaacttggccataagccgctctaactccttgcaagtatttgaaggcaagagaaaaatattcatagcataactcggcaagacttgagcaatagatttcaacaataccccctttccctcacgagataagatacacccttcgcacccttgaattctctttggaagcttatccttaagaaaaccaagaatagcattcttatttctcccaaccgaatacagcaggcccatgtaatagccattttcatcggtctcataaatttccaacatagcacaaatagaatcccgtacctcacttccagtattattactgaaaaacacagaagacttagagaaattgattctttgccccgaagctacctcataagtatgcagcaactccttcacattgtacgcttcttcctcagttgccgtacaataaatgtagctgttatcagcaaagagcatatgagagattaccggcgcacctcgagcaactttacaccccgtgagtaagccacttt

SEQ ID NO: 343483 - DNA, 503 bp, Cannabis indica
tcggatgaaaaaaaaaaaagttagattggattagatgcccaccttaaatatggctcttgctaccctacttttgagccaatcctattaaataatactatatatttcttttttataagcaagattcaatataattatatcttgttaatttttctatataaagattagttgtggtactatttacaagaaaattgaaaatggatgacacaaaccttaatactatacttgctatagaaaataaagtaaataacagcatagatacttaaattttgaatttgtaaacaacataattctaagtactaaatgttaataaaagtataattttcttctagtgtactgactccattagtgttttaaacatgatgtacgtaagacctaaatttttaaattattggatttaaacaaaaacatgtagtacggattgtatttttaaattttcttttaataaataacatgtattaatgaaattggataaaattaaattataattttattaatattgagta

SEQ ID NO: 343484 - DNA, 519 bp, Cannabis indica
gtttcctcttagacaccctactccattctttgttggaaacttcaggcatgaatggaatatcgacgtaacagcctttaagtcatacaaagttggttggcctaacatgacgttaaaggcttatggaacagaccatacccgaaattgtagccattatagttatgcttgtcggagcttgtccaacagtgaggggtaggcaaatttgccctagcggtgcgactctttggccggagaaaccatatacgggcagaagacaaggggttagaagtttgagttaaagccccatcttttcatatgtggtcttgagtaagatgttagaagaggctccattatctatcatggttcttgccaccatcttgttggctatttggacttccacgaccaatgggtcattgtgcggaagtctaatcttgacagcatgttcatcattaaatgttatggtcagttctcctgctcgtgggatcttctgcttaatctcttctcggctaggctacttcttcttgctcatgctgtactgttcgg

SEQ ID NO: 343485 - DNA, 862 bp, Cannabis indica
gggacaagaccgttagcaaaattagacatttggttaacgagtattacatggtggctagcatgggcaccacctacactcggttccagcagatccctacatatcaccgcccacccttcacactttccctcagggatagagctcaaaagcttgctcagctgccgggtgccgcccgaaatatcactttgttgacttctaaggacaactttgtggagtacgggctctacccaaaggatttcattccccaacctgtgaaggagaaaaagaggaaacctggtgctggtcgggctgagggagctcatcaggagaatgaactcattcaacttaagcgtgaggctaatttgaagggaggtgctggggcaaaacagtatgctcaggagcattctaagcatgaagacaaggttgaggaggagtaggtgactccgctcaaaaggaggaagaagtttcttgccgagaacaggcctgttgaacatgcaattcgaattaaggagcccagtctacctgctcagccatccacttctgtagtaggaaatggggaaattcgtcctggaggagataagagacttgtcaggtgatgatgagccttcaagtcttgctcgggaaacgcttctcccgaagcgcaagatactccgtcttgtttttaaccttcttaattattatgcttttctctaaccatgttgcttttatttcatgcactcatgtctcagaaaatgctcgaagctcttaagaagagagtgggaggaaactcaggctcatctcctccggccaagaagtctaggggcggtgagacaacaccgtccagagagagggcaccagccaaagtttttatcgatctttctgagaagctaaccgttgtggacccttc

SEQ ID NO: 343486 - DNA, 602 bp, Cannabis indica
catgaggaatgcgaggagcaaaacagatcgatttaaattccataaggatattggacacacgactgatgaatgtcgccaattgaaagatgagatagaaagtctcatcctttgaggccagttgaaatattatatgaaaagacagggccacggatacaaccagcccagtctgcccaacaacccaaacaagtaggggttacaacctctccctgttgaaggggaggacatcctagttattttgggagggcctcatatcgcaggggaaagcaataacacccaaaagagatatgtgaaagagataacgaacgagcagtcggcattcgccccagatgcttctaaaaaggtgaaaactgacgaatctccaatcatattcaaggaggaagacaagaaaaacgtgagataccctcacatcgatccattggtgattaccattcaactcgccaataaaagggtatagagggtgttaatagacaacaagagctcagtaaatatcctttatgaggaaacgctaaagaagatggggcttgaaaaagctaaattgaggccatgtatggtaaatctttgcggcttcactggagacattattgctagtcttggcataactg

SEQ ID NO: 343487 - DNA, 715 bp, Cannabis indica
accaaagggtgaaacatcactgggcgtgtgatagacttcaagtagtctttctcttctgtgaaggagggttgaagacatgtcgtaccctcagtgatctttcacgaacaaaaaactttgtgcacgcgagagtcaggtttaatttttatgaggcaaaataattgaatatgttttatttttgtatttttgcaaacatgtttacttacttgttagtttctgaacttgtgtataaatttaattgaaccaaatgatttatttctgtttattgatatttgtaatgtcaaaatgaaccatccacaccccaatcgtcaccttttacatgcctttgcaaataaactctatagtgtgaaaatgtctcctgataagagcattaattcacacttaatcatgatgaatctgaagttccagaaagaaaatttcctgggaattgatttataaaatgagcaatggattcaattcattctcaacagtcttccacctgagtataatggatttgttgtatcatacatgtgtgggaattattttaccaggatctagatttactaacaagtatgttattaacatcctaaacatgaacttctaaaacaatatgaaataaacacatataaagtatcaagaaccttacagtggttgcagcaaaatataatgtctccttccactcagatctctaacccttgtatcctttctgtagcagggtatcaccaagatctaagtccga

SEQ ID NO: 343488 - DNA, 722 bp, Cannabis indica
ttttttttattaaagaagtattttattgtctttatcttaaaaggttttaaatggactagctagtgtgacgtctcgggaaatcggggcattacacttactgtcttacctggtaatctaagtatgtggagattctaaattcctaggtgttcctgagcaagcattggtaatcctagtcacacattcttgagatttcacactttcacatatacacatagtttgcattccatttatagattaacaaatagagcttaaaatgagctttctaatgatatcaagaacgtccaaaatggagtcccgagtcaaaagttatggcaaaaataagaaaattaaaattctcgggaaaaatagggtcttgtcgcggcgagccaagccgtgactgtagcagccccaacctgttgggccacgccacgacgaggggccctggaacccctaaaattgccacttttcaaatactcaaaatttaacacaattaatttctgtcatctaatcgatccaacatctattagatgttagattggattggttctatccgttggatgtatttcatatatatttattagtttattttgggtttattcaatattttagacctagtattttttggatcggatcggatccatctaatattttaagtccaatatgtattggattagattggattggatccatccaatctaaaaaaaaaaagagtaaaattttaatattaatttttatatatacat

SEQ ID NO: 343489 - DNA, 716 bp, Cannabis indica
acctcccaatcaacatagacctggttgactctgttttggatacgatcttcttcagataagaactctgttggaggaggctcttggatgaacttgagaagacgatttcctctaatcgcagcaagaacttgctgtttccaaaggaggaaattatgatcattaaggcgtatcgagatgctatggttgaaatacactggttcttgaggagattgagatctggtttgaggagtttgagctccattggagttggatccattgttgccgatacctgcaacacctacagttgccatattagcactgagcggaggccagcgctctgataccatgttaaacctgtgagccatgagcaactacacaccatgaacaagaacatgaaagaaggaaagagcagagaaagaaagaggagagaaagatagagagaaagacaatggagaagaaagagtattattgaatgaatgagtgtacaagatatttatacaacattcatgtagaagcagcaaggaaaacaactaacagaaatcagttgcaaccaccaactgaaaggctaacagtactaacaactaacaaactcaactaactgttaagtaactgccttaacagaagtaaattacttttaaagattcctcgtattagtcatgttattatacattgtattacttgcaatgttagaaattattgaatctgacatatataaaagattaaattttgcatacatcttg

SEQ ID NO: 343490 - DNA, 557 bp, Cannabis indica
gtatttattctaaactaactattatctattttgattattttgatttaatgtacacacatctagagatccattgggatatgatacaatgataatcagataatatgaaattctttcgctgcgtacctgatttagtagcataaaaccaacataaattaggttttatttagggcataaaatctcaacaataaagaaatggtttcctagaaaccctcccactacgatgaggaaccatgatatttcgaataggaatatttgtaatagtttccttaattgagtcaatttgcattggttcaactgaggtagtgggatcaccttctatttgagtagaagatgatggaacatttgtttgagttaatgctaaaattatttcttctaatactaccttgctttgttgcttgaagtctttgatatagtcattctctagaaatgtagcatttgtaaaaacaaacactttattatctttgtaaccataaaagattccatccctagtctctttagacttgccaagaaacatacaaactttagttcacttttctagcttgccttctttctttctt

SEQ ID NO: 343491 - DNA, 594 bp, Cannabis indica
aatatgtcgcagccgctccaaaacctttacaagctttatcctcctccaccgtcattgcgctcgtcttcatcctcctcaaaattttcttttacaagtttcggattgcttttcacttgacgatccttgaaactttcttcgatttgcaagcatcagatttattttgaacacacacaaatcaagattaacaaaccaaatcatggctaatagaaatttaaacaacaaataagagaatgttgtgcttacctttgtgctaccacgagagagcggaggtgagggacatagcgagagagagcggaggaaagaattctcgacggtctataaaagtctcgcctatagtatagctgacagttttaaaccattgctatagtggtttgcccccaaaaataaattatcgtcttcatatttatcgaaaccacttctcgaatatgtcgcagccgctccaaaacctttacaagctttatcctcctccaccgtcattgtgctcgtcttcatcctcctcaaaattttcttttacaagtttcggattgcttttcacttgacgatccttgaaactttcttcaatttgcaagcttcagattcattttgaacacacac

SEQ ID NO: 343492 - DNA, 863 bp, Cannabis indica
agggagagagagatgatgcagagagagagaatattgtgaggggggtatttttggggttttgaaacaaaaggtatagtttttttagggtttaaattattggtttagaaatcaaattttttgattttctaagtatagaaaatcaaatttcccttgggcaatgtccggtgataactttttaattatttaattattttagtttttgaaaaaagtttattaaaaaaaaaaaacaaaacaaaaaaaaatactgtatttttaacaacatttggagttgactactattttttatagaaaaagacaaatcttacggcaaaggagataagcttatataattttggcaattataaaaggagatgcttactcattttagtttcttctcacttttgttttaaccacttggggctagctcaagtggtcataggtgggtgtgtgagtgttggaggtcctgggttcgagtccaagtaaaatatgttgtaatatataaacgcttaacgcttaaatcattttagtttcagtgtgtactaggggtggatatggggctcgctgggttaaaagttaataattacggttcaaataaattataaattatttaatattttggtctatttacaaaaatatgaaaaaataaatataaattttaatatatataatataaaaatttaattacactaaatataatattttttaaaaaaaaaaaacttataaatatagaaaaaaaaaaaagtcaatgagtaatgtcattaaaaaactttaaatttgtgtttcttttaattttttttccttttttagaaaataacactaaattaaataaaaataatttcaactgtagatgctgtttttttaacagaaattaaacctgttttttt

SEQ ID NO: 343493 - DNA, 791 bp, Cannabis indica
taggctgggaacgacccatgccatgaccaagggacgatctaaacagaagaagggggccagacgagcagaatactacaacgactgtgcatctcgaagcccatactcaaatccccgctcaaaaagacgctgacgtaatccaaactgaccaaaatgccaatcaaatcagcccagccgtacaggcccagcttgacgaattgaagaatatgtatcatggcatggctggacagcgtaacaatgatcttgggttagaccgtgctcgcggaactcccttctcactagagatcaatctcctgccactgcttcacaagttcaaaatgccaacatggaagatgtatactgggagagaagatcctctctcccgtctcaagtattttgagatgcaaatggatttatagggagtgcgaggggacgtatgttgcagaatcttccccgccactgtcagctcccattgcatctgggagatttggtcgaagtaaaacagcgaccaggcgagccactctgggcatacattagaagattcatgacgaaagcaaccaaggtgtcgcgggtaaccgaggatggaaagttatccgcgatactggggggcattgaagtccttcgtgaactatggaacgatataaggaaaaacggaccggtcgactcaatgagtgatttcctcgaccgagccgaaggcttgatcaagctcgaagaagccattcaacgagcagaaggtgagcaaaagctgggaaaaacgaaggctcctccactggaacatccgcccaacttcgaaattattccagcaattcaagtgg

SEQ ID NO: 343494 - DNA, 523 bp, Cannabis indica
gtgcctactgatttcagtaagaaataaaatatctcaccagtttgaatgtgaagattagacatgattttgtgatcactactaatgaagcaacatcatatgcagaaatggttgagaaggcactggagctgagggtgcggtaaaattccttcaagagccccgagtgactccgagtgttggtggaacctccactctccctactcctgtctatggtagagatggtggtgattcaaccactgatcagaagagaaaagctaccctggcatctggtggctcggggcagagcaagcggttccgtgggaaccaaggcagaggtgggcgccaaggttactcttaccctgagtgcccacattgtaagaaacatcatcccagagagtgcaaccgaaagacatgctttcagtaaggcatggtagggtatttcaagaaagatttccctcaggcaaagtaagaaaagcagaagccagaggcaaagcccgcacctgctcgggtgtttgccatcactcaagctgatgctgcagccagtcct

SEQ ID NO: 343495 - DNA, 683 bp, Cannabis indica
gactataatttaatgggccaattatagttttagggtgctctcatgtgcctctaatacatttattaattattaaccatcccattatggtagtgaataaatattaggcacatagttaatgattgtgtttatggtattaagctcatgattatattagtccacaataataattctaacattctcccacttggacaatataatcaaccaccataacattgtctatcacacataaggtaacctattaagacgtacataatatcatatcgacgggatacatatactatgtatgaattgaccttgaagacattttaattcaataacaatcattaacaatcaaaccaaacatgcatgaggtacaacaaaattgagactatgcgcattcatctccttttgtacctgtcacttcagtaaacaacacatgcttgcatacatatgacaacaataactagaagtgactacaatatcattatgcatgttcaaaatacaagtcatgagcattccatacaagatactagcatgttcaatacataatagaaaaactcccactgagctcaacagctaggcttctaacaatcccattcgagcaacatgctccaaaaatacacatatgggtaagcctttcgttagtgggtctgctaacatgccagtgctaggcgtgtattcaatggaaataagagactctgtaa

SEQ ID NO: 343496 - DNA, 809 bp, Cannabis indica
agaatggggtggggtgcctaagaggaaactagcaggctgctcgggaatgttataaccttgccataaccaaggctaaaaaggaagtatcctctagccagagttcggacaagggaaaaaacattactaagtagggaacctcccaaggcggggatgaagatatggatcctcgacttggggacccaagcagcaatgttggaccagtggaagaattagaagagattgaaatcgacccgaatattccgaccagaaagcttaaaattggaaaatgtttgttacttggagtaaaatcggcattgataaaatttatgagagcaaacctataaatttttgctcggtcacatgaggatatggtcggagttgatccttccataatttcttacgtccttaatattaatccaaacttccagttagttcaacaaaagcgaagactgttggacaaggagcgagccctagccctgaaggaagaggtagaaaactacggaacaacaatttcataattaaaactttctacccagcttgggttgctaatcccgtactggttcccaagccggacaagaaatggtgagtttgtattgatttcactgacctcaacaaggcgtgccccaaagactgttttccacttccaagaatcgatcagcttgtggatgcaatagcagggtacgaaatattaagcttcatggacgcctattcggggtacaatcaaattaaaatgcatccaccagaccaagaacatacaagtttccgaacagatatgggtttgtattgctataaggtcatgccatttggtctcaaaaatgttggagcgacat

SEQ ID NO: 343497 - DNA, 820 bp, Cannabis indica
gatgaaaaacataacatccaacccccaaaaaataatgatgtaaaaacatattttaagttcgcaatttgttccaaacaaaaatatatggaaggcactaatgttttgaaaccatcatgataatttatggaacttttcgtagtaaaagaatgacataatatttgatttgttctttatttattgttccattcacttatatatagagcttataatattcataatcatgacatatcataccttgcttagggtatatatgtcatggattaaacgatataaatctttcaaaatcatcactcaaagccttcatgtctgaagcaaaccgaacttatcctgcagatgattaagtaataaagcgtgttctttattttatcactcactaactcataaaataaacaataaaattcataaattctcaaactgtaaacaataaaactaagcaacaacaaataataaatagactgaaaatcaaaggcactcacattctgaatctaggaatacaaagtatatgagagaccacaaatacctcaataattggtctatttgggaatgtgattcaagctttggcgagtcaagaatggaatgaacattatgattccatcgaactactaccttccaaccctttccgttcccaaatcgacctggtttcgaagcctctgcctcagccaccaccatctccctagaaaccgaatcaatgtttgcaagcacaccaccgaccatgacgccatcatcgagactcagcaagcaattaacagaaatcctaatctaaaaaccccctcataagcaatcaaccagcaacaccattaagaaaaaggcatgaacttgt

SEQ ID NO: 343498 - DNA, 803 bp, Cannabis indica
gaagtttacttcaaaattttggcagaatttacaacgggctatgggtaccaaactgaaattcagtacaaccttccatccacagactgatggacagtctgaaagaacgtttcagatactggacgatatgttacgagcttgtgttatggatttggaaggctcctagattaagtacctaccattgatagaattttcgtacaataatagttattagagtactatagggatggctccctatgaactattatatggccgaaagtgtagatctcccatccattgggatgagacaggggagaggaaatatctaggttcagaataagtgcaacagactaatgaggcaattcagaagattaaaacgaaaatgcttgcttcctagagcaggcaaaagagttatgtagatctaaaacgcagagatgtagaatttcaagtaggggatcatgtgttcctacgagtgtctccaatgaaggggattaagcgtttcgggaaaagaggcaagttatgccctaggtttactggacctttcgagattctcgagaaggttgggcaagtggcataccgataagctttacctccagctctttcagcagttcacaacgtattccatgtctcgatgttgaggaaatacgtttcagaccctgctcatgtacttagttacaaaaatcttgagctgcaaccagatatgtcttatgaagaacaactggttcagatccttgacaaaaaggataaggttcttcgaaacaagaccatagctctggttaaagtactctggagaaatagcaaggaggaggaagccatctgggagttag

SEQ ID NO: 343499 - DNA, 1304 bp, Cannabis indica
tccttcaagttcttgttgactactttaacttgaccatttgcttgaggatgggccattgctgagaaacttttaattataccacggttcgcacaaaagttagtgaaggattggctgtcgaactgcttgccattgtgtgaaaatatcttgtacgacagtccgaaccggcagattatgttcttcacaataaagtcttgaactttctttgatataatggttgcaagtggttcggcctttgtccacttagtgaagtaatcaaccgctaccactgcgtattgcactcctcctttgcccttgggtagttgtctgaccaggtcaattccccaaatggcgaagggccacagactttgcatctaagtcaactcgttaggtggagctcgaggtatctttgaaaatctatggcatttgtcacatttcttaacgtaggcctttgaatcttcaataattgttgcccaaaaatatccttgccttagaattttcttagataagctttgcccgacggcatgatttccacaaaatccgtcgtgcacttcaaataggtgtcgtgctgcttcttcttgtgtaatacatctgagcaatggcattgagaatcctcttatgtacataattccctctactatgatataccgtgcagatttccttctcatttttcgagcttcattttgattatatgggagtttcccagagtcgaggtaggctgctattggtgtcattcagtttggggaggtatcgatcatttcgatttcttccgtgccagtgatgctaggctcttcgaggaattgaatagcgaccaagttcaccttgtcacttacactgctgcttgccaatcgagctaatgcgtctgcagttgtgttttcttcccttggaatttgtctgagaccgtagcttttgaattgtgcgaacagatcatgtattttgctcagatatgctatcatcttttatcctcgagcctcgtattctgtggatacgtgatttaccaccagttgtgaatcagtgcagatttcaatgtgttcggcttttatctcacgggccagttttaatctagcaattagagcttcatactcagcctcgtattgatgccttgaatccaccttgactgtgcgtgcaagtgtgtccccatggtgtgacaacgtcaattcctacaccagatagctgatctgtagccgcgttgtctacatgtgtttccaggtcgacttatcttcattgttacttggctgaggtgtttctatcggcttggggttgctttctggtatgctttctttcttgcctgtgcattctaccaaaaagtctgctaaggcttggcctta

SEQ ID NO: 343500 - DNA, 727 bp, Cannabis indica
aatttagaatttcccaaaaatatccttagaatcctttaaattagttttgtgtgggcaagggcattttagtctttttgcccttttagcattttgttcttatgtagatcaattaagtgatttattattgtttttgattaattagtttggctgaaatatgtaattaaaattacttttgtctctcatttttacaaaattgaaaaaaatcaagagcaaagcaaaattcattttcctcaaactctctctctctttcggccctctttgagagaagctgggcattttctttggtaattcaagttattttctcaagatttagtgatttctaattgttggtaaggttcttataattttatcctttgtttcttgagtttttttgaagaaaaatgataggttccatgcttagttttggattgttgttgctgctgtgattacgtgttgtttttagaagtttaagcatgcttgattgagtgaaatgaatctgattttgatgcatgcttggttgattttaagctagtttagaattttggctcaaaactatgaatttttgattgtttcctgcactgaactggaattccggttcagggaagccttcagcaacctgtctaccggttggggcttccaggaatttctagaaccagaattccggttgtagaaccggtctaccggttggggaaaaattgggaaccctagttcttcccaattttttttatgttgtttagggtattgccat

SEQ ID NO: 343501 - DNA, 717 bp, Cannabis indica
cagaatgcagatcaaggtcttcatgacaattccaccattgctaaagacaactcaactcagactctccactcacgatcggttgttgatgatcattccagcccgttcttcctcagcaccgacgaccacccaggtctggttcttgtgaccacagtcctcaacggaaccaactaccaaccgtggaaacgaggtatcacaatggcattgacggccaagaacaagatcgcgttcatcaacggatctcttcctcgtcccgaacctggtaacacaaatctaaactcttggttaaggtgcaataatatggtaatgtcttggttgattaattctgtttcacctgagattgcacaaagtataatgtactttgatttagctactgaaatgtggagcgatcttgctgagcgtttcaatgaaggcaatggccctcgaatttttcaattacaaacacagctcactcggcttcagcagggtgactgttctgtttctacatattttacgaaattgaaatccctttgggatgagttgaaagaatttcaacccataaccacttgcacttgtggtgcaatgaaagttttcttggattcttacaaccaaaatcaagtgcttcaattcttgactggtttaaacgaatcctatgcttcggttcgtgctcaaatcttgcttaacgaacctataccaaatctgtcccgagtgtttgcaatgattgttcaagaagaacgtcaa

SEQ ID NO: 343502 - DNA, 1047 bp, Cannabis indica
actggtttgatatgtacattggctgcgaagactcgttcgactcatggtttagtaagtgctaattattcgctgattagtgaattatttattgattatttgaattgtctgcttatttgaaatgtgtaaattgttagagaagcatgataagtttgatatgatataaagttgctgagtatatttatgcgtgtgcggtaatgcttattagcattagttttagttataaagattctaactttgagcaaggaatggtcgcgagtgtactagaaggtgtacttgaagcgatctagtaagaataattgcgactctactaagctcagggtaggtggtgtgggtatgaatctccactaccataggaccgagagtaaatgcatgctatgaagtaagagatcacttgagtaataaggtagtagaacctgtatggttaatctcgggcagcatagtgatggaaaatgacactaggctgaaccgattggtaaagttttgttaaaatgcagcgactactaaggccgctaggaaggctttaaggtggaacgggtatattgttcagaatgtagatattatgactaaataactaggagttttctagttttatgctcaggtgattgagctaacccttaatgttgaggattggattgactggtaaaatatagtacaaatgtcaattaggaaggaaagatggtagcttcggaattagaaggtaaggacctttgtgttcttgggcaaggatcaaaggttccagaatccattgatcatggtgtttaaggctgaagatttattatgggatggatgtaccaacctttcagttagtgtggcagatattgcaaaggaaacatcagtgaaactgagacacaattttgtggctcaagggcttctggatgccttttcggaagagctaccaagattattgatgaaatgggaaattaatttagaattgaattggtactaggagtaaaaccggtatccaaagttctgaattggatggtaactgtaggattgaaaagggtaaatattccgttataggaaatattaggtttgaaatttctagtt

SEQ ID NO: 343503 - DNA, 756 bp, Cannabis indica
ttcagatctctaatcttgatcctttttgttgcagagtatgatcaagatctgaacctggattcttcttctgataacgattgaactacataattttcttcactatattgagtattgctttgacatgtgtgggggcatattatcaacaccaaggagcacgaaatttgagagtaaaatcaaagagaattttaaaatttacaaatagaataataatagttagcttttcattcaacttgtcagacaaaagagagtcaagagagttagtaatgaaagaaagtcattttattctatttataaggagacaatagggttagatttataagaaatgaactgaataaaaaagaatataaaattgctttatactcatgcttggccgaaattaatatagggccaatgagtttaaattttgatacttttgtttctaaaagtgatacaatcttttctatcttcaaaaataccatttatctattctaattacttaaatgttaattttatctatttgataattataattaattattaaacaaaattactatttaaatatgtttattaattataccctccaaagtctcttaattaataaacaaatcccaaattctcttttcttctcaattatcccattctttagtaaaattcattaatatgacatagttattatttagaatcttaattaattaaataaatcaattaatttagactacaaaataatattatctcatttaatacggggaccatgggcctatgtaaccaagctcctaa

SEQ ID NO: 343504 - DNA, 576 bp, Cannabis indica
aaaagaattaccccttggaagaaaccactaagtccactaaagacaaattttaaaaccgttgggaaaaattccatttttgcccttgcttctcccatgagaaaacttaaggcttagaggtaaaatggtcaaataccataaccctgcctaatcctgataagtcgaatgccacatatgattgtcccatcaaataaaaggttctaaactcatccatgtgactctattagtcattcgtcgcatttctgtcgttaccaagcaaaaatcacaaaaataataaatttcacatttagcatataaattacacctagagtttaataaaatttctggaattgagaaattataactctaatgcccattttttgaaaataggacccacaacatatatatttatatataatcataaaataaaagtaattaaagctaattgccctactaatccatattctaatcatgcgatcattacaattatacttgtgggttggtcttgaactactgaaaaagatgatgaaggtaatgttgggttttatgccctaaataaaactccatttcaatgtaatccattttattcaacatcaataa

SEQ ID NO: 343505 - DNA, 1006 bp, Cannabis indica
acatatcagcgactagtaaatgagatgtttgaaaagcagatagggaggaacatggaggtcctacgtcgatgatatgttggtgaagttgataaaaattggggaccacacaaaagacctcacggagtgctttgaaatactgaaaaagtacaatatgaaactcagcccgaaaaagtgttcctttggagtctcctcaggataattttatgattcatagtcaatgcgaggggtattgaggcaaatccagagaaaatcaaggctttggtagaaatgtcgtcaccaacaaaggtgaaggaggtgcatgccttaataggaagaatggcagctcttaacaaattcatctcaaaatccactgttaagtgcctaccattcttcaaagtattgcgaggcaacaaaaagttcaaatggacagacgagtgcaaggaagccttcagaaacataaagaaacacctgtcaacccctccagtcttggctaaaccaataactggagagactttacttaattacttggctatctcaaagaatgcgattagtgcagcattagtgcgagaagaggggaagcaccagcaacctatttactatgttaataaaaggttattgtgttggaattataaatatgaacttctaaaaccattataaataaacacacataaagtatgagaaaccttcaattgggtgcagctgaataatatgtctccttccactcagatctctaacccttgtatactttctgtcgcagagtatcaccaagatctgagtccgaatgtccttctgttgaatctagattcttcacgatcttccacactatgattgagataccacttattgtgtgtgggcactactttatcactaaggggttcgtaaacaataatgaagaagaaggaaagagaggtggcggctaggttagatagaaggctcaggttttgctctgaaaaagaataagatgtatatggttttctgaagccatcactatctatttatagtatgccacatagggttaggtttgaat

SEQ ID NO: 343506 - DNA, 680 bp, Cannabis indica
agccgagccacttgaggatcataagcgccggccagacgcgtggttttcttgtacgagccatcaatggcaggttcaaggcagagagttccttcgctagaaggaggactaacacgaagacgaggatgaacctcgtgcagaagttgaagcaaatcctggtcgatctgatgcccgagttcccaagactcacctgggttcatctacaaaagacaacacacgagatgagtgttggacggagtatcaaatgcaaaacaagcaaatatgccgaccaggagtactcaacagattaagagaacgactatgtttaaagaaaagtcaaaactcaagaagtcagaaagttttcttgagttagggcgaaaaatttcatgaagcttagaataagcaagatggaagacaaatacaatgcggttcaaaaataagctctacggctgaaagcccacatgaagacatggtaaagaagagtcgcagaagttcctagccccagggtttcctaagcattctttctacagcacagttgcattcaaagcgtaaacatgcaaagaaaagcataaaggaaatcggaaacttactcaaagatttgaatgtctgagtttaagcgatgtcaagcaaaccagcaatcgtctgataacacttcggcaactttgaagccaaaaaactctcttttcgctatgaagtttacttaa

SEQ ID NO: 343507 - DNA, 976 bp, Cannabis indica
cggccagattgggaataagtacccgagagagtgcttctccaatagacacaaatcagcttagttcctcaaactacatactccgaagacatggcttagagatgatgtaagcttttaagacttttttacgtctttagtttttaaagactttatctaacttttttatttaatctctgacatatttaattttcatgttttagcatttggatgcggtatttcatttgatgaggaggagacaacacttttatctgaaggtgtacccaaatagatgtgtcatcatgccgtgtattttcccattaggagttattggtcggtggcaagctgggggtgatgaccacactaactttcagtgggatgacgacatattggatttgattcgaggggataaaggtcaatacttggacagttggaagaataaggagagaatatatatggcccacttcttcgatagtgcaaggcattgggtgacattagaggtagaccaagatcattggttgttgagcatatttgactcgagcctcagatcgatttcctcgaatgaattgaagagtcacttggcattgtgggagaagatactcccaactttgatgctgcagtctggcctattcgagagtcatgaaatgattgtcatgcctcaattgacctcctcagagagccaggttagaacttttacttcaaaagtcatcgaccggagcattgtacgacagacaaaatcaaggtaacttaattacaattgattttttttattatttaacttgaatttaatttgcataattttatttatttattttttattgtctcatacaacgatgattgcaggatgtatgtaataaagtacatcgagcatagtatgctagagactatgtttgataatgtgaacaatgacaatttgaagaaatttagagagcggtagtgtgtagatttgttttactagaatttagcatgaataattatgttttttaattggtatttattaaga

SEQ ID NO: 343508 - DNA, 629 bp, Cannabis indica
acttatatcatccatttaatcacctatatatagttttaaggatatattaaactaaagtaacttataataataataaataataataataataaaagaggggaaaaaaaagtgagtaatgcagccctagaattaatgtctcaatagcaattttagctaaaaattgctaaaaactaccactggtgcctaatactctctattgtcataccgctattagtgtaattaagtatcagatcctatataacttaaaaataatttttaagaaatattactaattaatcgtaagatgccacttatagaaagtgtcgaatagtacccaataacaatgctccaatatttaggctgcacatcaagtttaaagtttcaatccaacgaattagttattcaagaagagaaattgaggtttttttgtttatagaaaattatataaattgttattttttgtaaaaaaatttaagtttaattttttactatttttatggtattctataaagacataagaaaaataacataaaagttataggaaaacaataaaaaaatataaaaaaataatacacaaataacaaaaaatcaacaacaaaataataagagtacaatataaaaatttattaaaaaattgtattttatgtaaa

SEQ ID NO: 343509 - DNA, 468 bp, Cannabis indica
aagcgacaaatttaccgttgtacacttcaatgtattttatcgttaaaacacttagctacctataaatgatatttcagtaaactaatataattactaaaatgagatctcaaccatttatttctattcagccaagctcaaaagaaatcatcgtttcacttctaaatacttataaaagttatagatttcatatctatgatcagcggtctcactcaattgaactaccatatttccaagatgtaaatatcccccaaaaccattagttagcatccatgaacaatttgaagaacataataatacaactaagttgaatctaaccatattaggattaagatccatagacctaagactaactattgatattgacatagaaagatataacagtaagtttaaggtatcttattcaagttcaatatcggtcccttccaatgtatacccatacatctgatactggtaaactttgccaatacc

SEQ ID NO: 343510 - DNA, 915 bp, Cannabis indica
actattttcactttaatccccattgttctcaataaccttcattaatgcttaacattaaagccaaggatataaattttgggatttcacaagattaaactattcttttgtatgaattctatatcctcatttatcgtatatattgtatacactgatagatagcatattaactcattatgtccaaccattactacttggtcaaaaccataagatcccacaacacatagttcataattgtgtctttatgttcctcctatgggaccttctaaagtggtctactgacttaacttattaataagttaagtattcattcatgatagatattcaattaaagtacttatttgtacttattgacatatgcttatctcgataccttgtaaatctttacttattaacacatcatttcctcttggtaatctctggaacgactattgattctgcatcctaatatgaatctttctagcgtaatttgtcctcacttgtacgctttctgagatgactccccggaagattcccaccttgagattaccctaagttaagtatgcttaactccaaggtaagctcatggcgagttattagaaagtagatacttctttgtcgttcctaattgtatttcttattttcattcttctgatatttaaatccaatttcctaaattcttagctaataataattaatcaaagatcatccattgatctcaaagcttcgtatctgtgttaggtagaaatcctaaaattctccttttaacacacctagaaatacctcaagtgtattatttgttttattgataatcccttggtatgaactaccactccaacttgtagtgagtctctcgtcgatggtgttgattcatcagcatctaagactcttatattctttttctgttattaccacaaaggttttactccatgattcgta

SEQ ID NO: 343511 - DNA, 1315 bp, Cannabis indica
cggccatatatgtgggccccacatgttttaatttttccatttatttaagaacttatcttttcttttacaaatgccatattttaatttcaatcctataaatgtcaaatatatttatttaaaaattataattaattatcaaataaaattaccatttaattaagttattaattatcttacaaagtctcttaatcaacaaataaaccctaaatcttcttttattctcaattaagtctttgcttagtgaaaattcacaaacaagacatagtctagtttaaaatgctaactggcctgttaattaaaagcaataaactgagtctacaagccaatattatctcaactagtgcgaggaccatggacatgtataataaagctcccaataagtagtattagaatttaccgagtaaattctcaatcttatagattcggaattacaatcctaattacataaaatgctctacatgttccaaatatagatacactattaattatctattattattatccaaataatcaaagatcctctatagatgatttacatcgagtagggacaaatttaccgttctatccctcaatgtgttttatccttaaaattacttatcttcctataaataatattttagtaaactaatataattactgaaataagagctcttctatttatctttgttaagcgaagctcaaaggaaataatcatttcacttttatgtcattatagaagctatagattccgtatctatgattactgttcccactcaattatactaccatgtttccaagatgtaagtattggaccgattcatttggtcagctttaacgaataagttaaagaacataaataatacagttaagccagaacctaaccatctcaggactaagatctattggtccagtctgatgtatactccatacattcgatactagcatattttaccaatgccctagaaattgcatactacttatccaagtgtaagtaaacttttattgatgattatcacgtcagtgtaaattcaatgcaataataaatcatgagacttagctttgaagcatataatcacaattactttccacggtgatgacatcactgtaattatgaataacaatatgctctggatttatcagaaattgtatattaaaccatgattatgaaaataacatgttaatttaaactacttttaatcttctattgatagcaaataagaatataaagaaatgagttttatttagggcataaaatcccaacaataatctccttcttatttgtccatcacttgtttttttttatgttgatttggcctcgaatcttgaggtttacttc

SEQ ID NO: 343512 - DNA, 592 bp, Cannabis indica
ggtagatatgatggctcaggtgaacaacgtccaggaccatttgctaaattcctagaggaatgtggtattgtcccacagtacaccatgccaggatcacctagcatgaatggtgttgctgagagacgaaataggactcttaaggatatggtaaggagcatgatcgctcattctaccttacctgagtccctctggggagaagcattaaagacagcagcttacattctgaatagagtaccaagtaaagcagttgcaaaaacaccttatgagctttggacaggtcgaaagcctagtctaaagcatttccacatttggggatgtccagctgaggcaaggccttataggccacatgaaaataaattggactccaaaacagttagcagctactttattggttattctgagcgatctaggggctataagttttatgatcccactgtcagaaatatttttgagacgggaactgcaacattttttgaggatgttgaatttggggggaaataaggttagagacattgtttttgaggaggaattgaattcaaactcagttcctactatcattttagacaatgttcaggcttccacacctgtcatt

SEQ ID NO: 343513 - DNA, 487 bp, Cannabis indica
gatcctggtaaaataatttacaacaaaagctagaagcatcctcgccgttccttattcgatatttcagctagaagacaaaagggtgtggtctcatgatcaatgagggaggtattcactaaagagtggctattgggcataaattagagcttgttcaattggtgaagtgtctacgtcttaaggagattctgaatggtagaaatttttgtggaagcctaatattcctcgcaaggtaaaactctacctttagcaagattctctagatcggatctcgaccaaagtcaacctactaaaagtggaatggatctagatggtttatgtcatgtttgcggtgctcagtttgaatcaacgactcatgaattgatccaatgtaaaaagcttagaggtgtttggggttaatcttatttgcattaaccttacaacttccctcatggtattagtttttatgaaattattctcgagctcattagctctctttcttttaaggaag

SEQ ID NO: 343514 - DNA, 712 bp, Cannabis indica
attctctcaaaccattttgctgaggggttttgatcacagttctatgtctctcgattcccattgtggcacacaatcccttgaactcatttgagcagtactcaagaccattgtcagttcttagtaccttgattttgttcccagtctggttttctagtagcctcttccatgtatcaaaggttcctagagcctcatctttgcttttcaacaaatacacccagactttcctgctgtaatcatcaataatactcataaagtagtgtgctccacctttggttggaatcctagatggcccccaaaggtcagaatggacataagctaacctttctgtggtggtgtgttctgccttgttgaacttcaatctacaagccttccccaaaacacattcatcacagaattcaagtctttctgttagcttctccttgaacagtccttgcctgttcatttcctcaagtcctctctgacttacatgccccaatctgaggtgccatagccttgcttgactgtgtttggttgagtccaaaacaggtgctgcacaacctgagattgtctttccatccaagaaatacaatccattactcaaccttcctctcaacacagttcctgtgccttgtgcaattttcattacaccttcctcaactttgacaacataccccaatttatcaaacataccaatagagagaagatttcttttgagatctggaacatacctgac

SEQ ID NO: 343515 - DNA, 874 bp, Cannabis indica
cactgttttagtgtcttcttccgtgaatgtaatgggttgatccattagccggggcctttgagccgagagttgagtaacttcccacacctcatcgtgtttcacggcccctgcgtaccgtttcagctaattgtgggtagttcctccgatgtggggtcctcccgagatcatggccactctcccgataggtctaggtggcaggccgggaatatgctgagcatctccgggggaaacaactgaagccaacactcctacttccccctggtgctccttgtggcaaagccccagccgcctgacctgggttgagatggggcaaccggtttttgatccactcgtagaggtgtcccaatcggatcaagttttcgatctcgtctttgagatttttgcattcattggtgctgtgcccaatgtcattatggtactcgcaactcttagtgggatccctctgggagctgtctttgtacaaagggggcggtctccggtagtgtgtattttgcctagtagcaaagtacacacgttcttgggagtccgttaactccgtgtactgggtatattggggagtatacccccttttctgtcgcttttcctccgttcgggtgctgcctttggaggaccttttactcctcgagccctgggaaggaccgactagactggttgtcggagcggagtgcgagggagtttgcccatttatccctaagggatttcaaaaatgggacaatgcgggggccagggcctggtcttggttatatctgggagtggcagtaaattgtatgccgctcatcggcggagcttctactggcacagtgcctgagagctgggctccgggcacctttcccgctaccccggtgggataaatcctccataggccactatttgg

SEQ ID NO: 343516 - DNA, 653 bp, Cannabis indica
aagggcagagtacaatatgtggtggtcacagtggattacttcacaaagtggacagaagtcgagcccctagaaaccataacatttaagaaagtatatgtcggtttaaactttcgcacaagattgtctcagacaatggcaagcagtttgatagccaaatgttcacagatttctgcaaggcacgtggaatcatcaagagtttctctgcagtagcacaccctcaaacaaatgggcaagtcgaggcagtcaataagacactcaaagataccatgaaaaatggcttgaagaggccaaagggaattggccggaggaactaccagacgtattgtggtcgtaccgaataatagaaaggataacaatcgtgcaaacaccatttgtcatggcttatggttatgaggcaatgtttcccgttgagttagagcctccatcccacataagacaaacttatgatcaagaaaccaaccacgccctcttggtacttgatgaaattaaaagaaaaaagaacttcatacaaacctaaagctagtagctcatcagacaaaaggtggctcggtacttcaacaagcaagtggaggggaagaaaattctttgtggggggtatggtcctaacaagagtcttcttaaacacaaaagatagtgcggctggcatgttcaga

SEQ ID NO: 343517 - DNA, 571 bp, Cannabis indica
aaagagttttatttagggcataaaacccaacaatcactacctccattaccggccgttctggcctcccacctagccgtattgtctttctgtatatgactttcacacaactcaacttctaaaactttttccagtacctcaacatacgtggttgcctttacccctgacatcgctatgtcccgacttattcaggagtcgagcccttcagtaaagcgatgaatcctacgaaactcagtaggaacgaaatctgtggcaaactttgcaaatttttcaaattggtgagcatactatgtaactgtagacttactctgcctcaagttcatgaactcattaactcgagttgagagtattgcttcactgtagtattttttattaaaaacttgcacaaagtcagcccaggtcattgcggccacatcctgtgtttgtttaataacgtcccaccagatgcgagcatcctttttcaataaactagcagcacaagctacactatctccgttgtcgagcctcatgtactcgacaataccttccactattcttaaccattcctcagcttccattggatctgagccccctt

SEQ ID NO: 343518 - DNA, 1411 bp, Cannabis indica
aagcctaccacagacgaaacccgaaactgaaccttgcctcagactcaaatcatgacccgaacccagagtcggatccaaactcgaccaaaacccgtagcccgtgacttgaaactggaatcgaaactagaagcggattaggaccgaagaataaaccatgaccaagacatgaacatagagccaaaactgtaaccggaccaagacccagactcggtcaaagagccactctgggattgggtccaaaatctaaatccaaacccgaaccaggactcgagacccgaacaaagacctaaattcagaccagaacattgaacatgactcgggacccagaactgggatcgaaacccagactggaccccagtctcggtcttggacctagacccaaaccaagaccctgacttgggacaagaattgaaacaagactaggacccgtgattgggatgcagatcttatcccgtgatcagagaaccggagcttggacaagacccatagtcgatgtcttgattagggactcggacaaggacccgaagctggacaaggacctagacccaggccaaaacctaggacccaaaaccgaaacttgaacaagaaggtgatcaggaccatggaacaggaccgggaccgtgacctggaccttgacccggacccagaactagaccgaacctagccccagaactcgggctcagacccagtcccagacccagactaggactgagacttgaaccagaacctgaacacgaactcgggagtcgagcccagacccagaccaagcccctgacctaaattggaattcagatgtagacatggacacgaactcatacacggacccaaataccgacccaaacctagaccgggattgaaacacgggacctagacccagacgcagacgcagacccagacacaaactagggacccacaaccaagaccccaacgtggaccttgactcagacttggatccagaccgagatctaaaaaacccgtaaccaaactcgaactaagactcggtacccttactccaacttggacccagacccagaccttgaaccaaacccggaccaaatcctggacgaagaccttgactaggactgggacatgagacctaagacttgaacatggactaggaccaggaccgggacctgtacctgacctgatcctaaacgctcaccgaatcctgagactcgcaacacagaccaggatccagaccctgacaaggacccgaacctaaacccagacaaagatagggatcgagacctggacctgaacccgtaccgcgacctggactaaaaccaagactcaggaccagactaggaccgtgactaggaagttgacccaaacctagaactgaactcgggcctagccccagacccaaaccgtgacttgaagttgggccctgacacgtcgtgtacccagacca

SEQ ID NO: 343519 - DNA, 417 bp, Cannabis indica
aattaaaaaattacatttaattttttaaaagacagtatttttgttagtggaggtatagcccccacatcaatcaaagtgggtccgtccctgcgaagatgggagttacatgttatacatctgagattaaagatggagatgatcctaaagcatgtttggcaatgcgttatcaagatttgtccagatctaacaatcatattgtcactacaagaaaacccacttttgtcggcgcatttttgcgccggaaaaagtacactaactgcgccggcaaagctttatctgggaagtttggtcggtaaaagactttttaccggcgcgtagagtaaatgcgccggtaaaacttccttttaccggcgagaaattacgctggtgaaaaataagcggcggtgttaaaaaaatacccttatccgctatgaacct

SEQ ID NO: 343520 - DNA, 569 bp, Cannabis indica
tgttttgtttttatttttaatgtaatttttatttatggaaccagttattttatttatcatgtgcttgttgttgttgtcactggctaaatcttattttataactggttttttaacaggatgtttacttgaagatgaaaacggagcaccggttcacaagtaagctctagatttggaataacccgtgggttattgaggagatcaatgcaaatcttactccttctcaaaaggcgttattttttacgacgcctttttagcaatttttgaagatgggcattgttaagtggcacattgccctgcctcaccttgctttagtgagggaggttcatcaagagagggaggatgtagaaaagtggttcttaatccgggacagagttgtccgtttcggtttggaggagtttgtcttgatagcggggttaagtccggaagggtcatttgacttgaacgattttaaacagaagatgtcgttcaagaagaagatgtttcctgatttgactattaaagtcatttaagaacaagttagagaaggttttggcgggagaatttgatgatgatgatgttgacgctgtgaa

SEQ ID NO: 343521 - DNA, 647 bp, Cannabis indica
agaacagaggttccggggaaccaaggtcgaggcaatcgccaaagtggcactgaaacccgatacacttaaccagagtgcctcagttgtaaaaagcaccatctaggggagtgtaaagggcaggggtgttttcagtatggtatgtcagggcattacaaaagggatagtccctaacttagaactgaagcaccgaagactgcagcgaaacccactccagcaagggtgttcgcgataactcaggctgatgtagaagccagccactctgtggtaataggtcagcttttggtcaacaactcttatttctctgtgttgtttgactctggggccacttattcctatgtggcggccataatttttagtaaattggatagaccgcatgatagttatgaattagggtttggaaccctactacctcgcggagagttggttatctccaaaaggtggattaggtctatgcccatcagaatagaggatagagagttgagtgctaatttgatagagatgaatttagtggattttaatattatactgggaatggatttcttgtccaagtacttagccagtattgattgtaagaggaagatggtaatcttccaaccagaaggcgaagaaccgtttgttttttcagatcggttcagggatctcggatc

SEQ ID NO: 343522 - DNA, 1483 bp, Cannabis indica
gacgacactataatcatgaacaaatatatatttattcatatctgttctggacttaatagaatttatacatcaatcataatcatgaaataaatcatgtgaaccatgcaatataaaagcgatttctgatcttctattaattagtaaatctgattatattgagattggttttatttagggcacaaaaccctacagaagcaacttgaaaacattgaaagtgaatcggaggcacctccaaaccttcagaagaaatgatttgttgttttcaatcagattatgcttgctttagttttttggcagtgtttatatagtttgtttgaacaaacattggtgttcttttacgttttaagctttctctggacaatatgcaatttttattttcctattttgttaccttattgtgacatgttttatgttgaattgtttagtattcaaattatatatttctgttattttggattcttttgttgttgttttccattattttattgtttttttacagttgttttactttatttattagtatttcataacattattattctgttataatcttaataaaaataaatgcattatttaatgaaaaacaaattatatcaataaaatcattcatatatatatattcaatgtagtatccaattacttttaaaactcttgtaaagtatgaaaaattaccattaacatcaattgttttaataaaaatagacactttagttctgtatgaaatttatattctttaatatcccatgctcaaatgtatgtgtagttttctcatgtttttccactgttgttatgtagttgtttgtattcactttctactttctatgccttttattgcatgttctcttgttatgccccagttcccaacatttgctgcacttgttatgttgattcttttcccatccagcttgcctcctcaatttttttggtcttctaaatttaaacctttcatgtggaggcaagactataatgtctttcacatattccagtacatcccactcactttggtgtcctattggatacactattcctgcataagttgctagccaatttttcttatgtagtaatttgaactgtatttatatgggttcatgttcatctccttcagcacagccacggcatgttcgcagggcatttcatttatttggaacctgttgcacatgcatgttctttctttgaggtctactgtccatgatttttttcattcttgttacctcaaacaaataatatgttgttgatttaacctgtttattttttttttgttaaaaacaacaaccatttatgctatttatagaacaatgttggaacaacattacagcaatactagaaaaacctaacaaaattcttagatgtttatgtttaagaaattttaaatttgaaatatagatctcacctccagatttaataagtacgtgtagttttctagcaatatgtcttctccaggtggtgccagcttagtaaatgtgttttgtgcttttgtcctatt

SEQ ID NO: 343523 - DNA, 562 bp, Cannabis indica
ctataaaagtgaggaatgttcattgggcaaggaggacaaaaaaaacagagatcatacgacgaaacgccataagctaaggctatctaagaattatatattcagagatactattgtaagagctataagaaatggaatcttcttccttattcttaagtcaatacaactaacgaggattaggctattaccgaactgctcggggctgaacctctataaaatttatgtgtcttcgtattattattatttgctttattacgtattcttacaacgacacatcattttatcgcttatcaaaaagactcattgtcgttggctcaaagcgaagtcaacaggtaccatcaaactttccctcaaactaaagagtttttcatctcgaaactcttaattgatctgcacctcttttgcattctggctttcttctattttgagtcttgaaagatgatcaacaactagattctcagtctgcttcttgtcctttatttcaatgtcaaattcttagagcaaaagcgcccaccaaatcaaccttggttttgcatccttcttggtcataaggtacttaattgct

SEQ ID NO: 343524 - DNA, 556 bp, Cannabis indica
aataaaataataaattataaaaataatcagacttaaaatcttattatcaatccattattttagaatatttacacatatgtttttcacataaaaaaaatctattactttataattttttccgtaacatatacaaaccagtacaataaaatccaaaataatcactacaataaaaactacaaacactcaacaaccacgaaccaccataaaaaaattaccacaaaccatcgtcgatgccacaaactaagaagcaccatgggtaacgaactgccacaaacctccaacctctgtcaacctaagaaaacggaatatactgtaaagaccgcttagtttaatttgaaaattagcagttaattatgtttaattatggaaaattatttatagctatttaaataattgttatgctgttattattgaattatgaaatgcattttatgtcatttagtgattttcataattttgcatttccggtgcccggtaacatggaactcggtgtttggcttagtaaaatcacaacttagtatgttagtattgtgggacggtttattagacattggga

SEQ ID NO: 343525 - DNA, 714 bp, Cannabis indica
taggtgttgatagttgttgagcacaacataaggtgttcatgctcaccttaacaaagcatggatgattgatcacaatatgcgaaagtactagattgatcgtctacgagatcaacataaccattgatgcaacaacttggttatatggaacaatggaatggacacggaagtatggaggattgatcagaatatgaaaaagtatgcattgtaggggctttcacagtccgaatggacatggaaggtgctgatagttgttgagcacaacataaggcgttgatgctcaccttaacaaagcatggatgattgatcacaatatgcgaaagtactagattgatcggctacgagatcaccataaccattgatgcaacaacttggttatatggaacaatggaagaatttcagcagaacatggagcaacttgggaacaaagggagtgttcgtagttcttaaaataaaaaaaatgacaacgattattatacctgaagaaagagactcaaagggatggaagagttttgttaattgtttgtttggattagtggattaaaaattacaatgcaaaaatcatgttgaagaaggaaggaggattcacaaacttgggcaaactcggtgaaaaaatcattgaaaccacaaaaggaaaaaaaggattgcaattaaagttattaaggggaagaaatgtcagtaagtagctcagcatgtgatgatatggaagagttggga

SEQ ID NO: 343526 - DNA, 706 bp, Cannabis indica
tgtgcagcttccgacagagtggcagggaagattctgcagcatacatccgcccgtactccttgtaaatccattttgatcttctctcccagtatacatgttcaacgttagcattttgaacttgtgaggcagtggcaggagattgatctctggtgagaagggagttccgcgtgctcgatctaactcaagattatattacgctgtctagcaatgccatgtaacatatttttcaattcgtcaagcgaatgtacattttgggaacatgataatacaattgagtgggagcgctaaacatagatatggaatctatagcttctatcggacatagaagtgaaatgatgattttcttcgagcttggtttaatagagataaatggaagagctcttatttcagtgattataggaagctaagtattttaaggataaaatatattgaggggtttatttgttaattaagagactttatggagtctaattaataaaaaatataaatgtcaattttatttgataattaattttaattattaaataaatagttttggtatttataggattgaaagtgcaaaaaatggtatttgtgaaaaatagataaatgattgagaaaaatgacaaaaaactaactaatgttgggcccatttcatggccagccactagtggctatttttgctctatttttatcattattttatttcaaataattcaatcctaac

SEQ ID NO: 343527 - DNA, 552 bp, Cannabis indica
aaaaaaaaaaagtactactcccccttttggtctatcaagtcaaaatagtttaagcattcacaaacaaaaagcaagagatagagaattgaaccacttattcatcatcattggatcggaagcatttcatgaagttgttcatcttcctgagaagcaaggcttgacttgtctccattcttcccaaacacaagttgaattcagccatttatgttgaagcagaagcggaagcagaagcagcagcaggttcaacagtaacaccaagggaagcaaggttgtaagtcgactttcgagctttggtcttcgactttctggtagttttcgtgggagcagatgacgaaccaggtacttcggtcactagtgcaggcggtgcaggtggggttataggagatgcagaagcagagccacaagagagcttcttggacggttgagcattcttagttttggccatttctctttgaaaccctggaacacaaacacactctcacacttgaaaaagattagacttttgagaaaaaataaaaagagaagagatagtggtgattgtgggtgagtggg

SEQ ID NO: 343528 - DNA, 602 bp, Cannabis indica
tgtacccttacctgtttcgttattacaaaaaaaaaaaaaattagtctaatttttttttcatatttttacgttataattatttaagatatcctacaaaactttgaaaaattcaaaatactttacaatataaaaagtagtgctcaaaaaatctatttcacacgcgtataaaataaattagtcacgcgtgcaatacactctttaaactctatttttggcgtgttaatttttttttttaaattttccaggatgtcttaaatagctatattgaccatgaaaaaaaattgactaaaaaattatttcggatactaaaacagataaggatatatcaatgtactatctatttaaattgggggtacattgtagaattctctaataatttttatatttcagttttttattaaaagaaaaacatattaattaatatctaaaagacgtagccagcgaaatgacttacctatttttttaggggttttttatttttacactttaaaacaattttttttttgtatttttacgaaattatacataaaaattcctattgcaactagcgctgcaatctaaattgcaataaaaaatcgtatagaaaccccctattgcaacta

SEQ ID NO: 343529 - DNA, 809 bp, Cannabis indica
ttaatgagagaactttaacatgttgctcttgctcatcttccttctgatgggagggggcttcttgtatgggacattttcctaagtggccatgaagatgacatcatgtttttctattagaagggtgaagcaagtgtacttctcctccttatcttttagatttagtggcatgggagaagtattatactttcactttttgctattgtttcctccagagttattgttgttgcgcttgcctctagtgtttttgccattagaggtttgcgcaaaagtgctggcgttagcatgcacttttggtaagttatggggctacaaggtaccctaagattgcatattgccaactttcccaatctgggcttgccagacaacatcttccagcgtgataaagctgccagctctgtcaaggaactccttcattttattggttgagttcctccagatatctttccaaaagtcacttagtggaaggatgcccccctgtatggctatatactaaccttcttctattaagcctttgaccttggtggcctcatccatgaaactttggatgtaatcctttaaaggttccccttatcgttgtttgaccttgacaaggtctttcggctgagatggtataagcctcaaggatgagaattgtgtgtagaattctcaggaaaactcattttttggaattgaatcttcatggagctaacttaaagtaccactgttgagctatttttgatagagttgccaggaatatctgacaccgcacattaccagtaattttttggaggtcgagttacatctcgaagtacttgatgtgtgctagtggg

SEQ ID NO: 343530 - DNA, 713 bp, Cannabis indica
gataaataaattaaatattttttgaacataaaaaatatatgaaattagaagatattttcttttacgaaaagtaaatataaaaaaatatcaatacccataaatatctttccaaatgtcagcaacttaatgcgttacccgcgcgcgtgccaaaatgacttatgatttcccaaagcatttaattactaaaacaatttttttaaaaaaaaaatgaataaattttattcaaactacatgtaatttttcttactttttttttatcataataaccaattttattgctgagagtcaaacaatatattggtcattatacaaggaggaatttcttccaaccaataaacctcgttttccatctgtagtgcatatcttgctagcccatgtgctgcagtattactatttcgcatcacatgaaggagacatacacccgaaaagacagacaacaaggacctaatagatctaacaatacaaccccattgggaaacacattctaaagaagagttgactgaattgacaataatttcagcatcactctccacaaaagaaacaaaaaagcctaattcctaatatcatttttgtaatatctcaataagcttaataattaataattagggtttatatttatattatgagttaaccaggtaatgagtgggatgataatccaactaatttagttcaacataaaattttaaatttgttataagtggataaataagcgt

SEQ ID NO: 343531 - DNA, 1035 bp, Cannabis indica
tcgtttatccgcaattggattggatcctcttgctttggacgaagctgttggcgaagatcaggtttcttccgattcaagtgctcttgcagatctggttgggagtaattgctaacagatctcgtcttactcattgaccgcgtcctacttatagactttgtttttaagtggcttgcggatttacttgttcccatactctcccgatcattggttctttgagtactttctactcttcgagttgatcagctatgagttctagatcgcctcgaagtcacacttgcctcttcatgctctgttctttcctcctaagagcggtttgtcgtatttcccccatcagggtacgtacgagtcctccctctatggatttgggaagaacgctggtgattcctagcaggtgatctccgttcctccggctgagttccaagatcttcctcattttcatgaggggtttctcgtttattagttttcggttgtctcctttctggctgttcatcctgatttttagggggtgtctcatcttccccaggttgttcttctcgggccttttcctgtctcctggttcgggagcctcaaggtttgcctcgcggtcttctcactccaggttcaggttgatttgggaattcctcccctgcactgccctggtcgaggctgcctctcattctaactcactgttttgacgttgcacctcttccagacggcgtctcaggcggcgactttctgtttcataagttctttctcccacagattgggcacccccacggttgagctcttcatcccccgcctcgagattctgaccattcccacgctgaattctcctcgagcgtgttgtcctcgtactaggaccattgtcaggttgagttctctggggatgcgtggtccgagcactgggaccatcctcaggttgcgccatcctggaacgggtagtccttctggacggcggactagttgatcttctaaagcccacaggctattttccgaaacgacggttagttacctcatgtcgggtgttaatattctctggattttcagccataaagg

SEQ ID NO: 343532 - DNA, 595 bp, Cannabis indica
aatgactaacatcaaggaatggcttaacactcaattcgaaatgaaggatttgggtgaagctgcttatgttcttggtattcaaataatcaaaaactggaagaacagatccctttctctctctcaaacaacttacattgataaggtgttagagacattctcaatgacaaataccaaagggacagtgatgccttctagacctagtatccgtctatctaaggaacaatctcctactgatcctcaagagatagaagacatgagaatggttacttatgcttcagtagttgggagtctaatgtatgcaatgttatgcactagacttgacatttgctatgaagtagggattgcgagtaggtatcagacaaatccaggagaggaacattggactacagttaagcatattcttaagtactgaaaagtacaaggcattatgtgttagtctacaagggtgatgctataaatcctgtaggctataccgacttagatttctaggcttgtcttgatgacaggaagtctacatctggtggagtaattgtttggagaggtgctaaacaacatccacgtcagactctaccatggaggccgagtacatagctac

SEQ ID NO: 343533 - DNA, 694 bp, Cannabis indica
tagaaattcaaatttcccttgtatatttacttttatttattatatcatgaaattttctaacatacatatttttttttttcgggaacacatacatatttggtatatatactctaaaagatatgaaaaatgctatatatcataaaaatgaaaatttatcatgaatgcatatggtatgtcataatttttttattttattaattaatgttttactttttttgggattattttttgataaatatgttactacattactcaagatgttaattcatgataatttgtcatgtcattgctcaaaaaaaatataagtaaatagattacaaagaccaatttttgttttacttttaagttattttattatttcttggtagcttctgtcacatcatttttttttccttactttcagcattataagaaaaagttaaagaatattttttttatttattaaccaaatttacttctaaataaaatttaatttaaatatactttttttattagtattgtatctaaaatatcctcacactcacataattaaaacaaatttaaaatataatagatttgtattctttagatagatgtgcaagtttgtgagaaagtttgaacaaaattttaattagagaaaaataaaaactatcgtgaaataaggataaaattgatagaataattgaaataagaagtaaacataataaattttgaa

SEQ ID NO: 343534 - DNA, 931 bp, Cannabis indica
agttcttaatgaaagtaccaaaatattaacgcagaaatctggacacagatatttagtcacactcacttgctaggttgacgagaatgtaatgagagttaagtataagtaagagagagacaacaaaacagaagtggtaaaaatcaaaacataagtgcaattcaggcagtggcggacccaagatttaagttgagagggcaaacttttttttttaagtgagggagggcgtaccattttttctacatgatataacatattaaaaattgatgtaaatttgtatttttatagtattaaatatagttaaagtaaaaaaaaaatgacttcaatgattgaagtagtaaatacaaattttattgataggggatattggcggctaaaccccccaaacttttgggtttgtgacagttaaccaccaaaactcaatttttggcggctaaactacctgaaccccacttccgttttggtccgcactattccgtcactttggctccgtttaaaggcaaaaatgacttacgtggcacgatccttgtcagcaactcatgccaccttggcattaaataaaccactctcctaaaataaaattaaaacttaattacaaaattaaattaaaatcagaatttaaattaattttttttttttacttttttttcttttttcttcttcttcttctttcttctttcttctttctttttcttctttcttccctacgcctcttcgttctcacaactgtggcagtggcagagagagactttgttcattctcttgtcttcttcatcttccccttcctctccatccatctccagacgttgcatttgcatgcacaacccaaagtgacctttgctctttgctccgtttaagttcgccgcctctagctccgactctcttctacagaagctctgctttttgactcttttctttagctactcagccccga

SEQ ID NO: 343535 - DNA, 573 bp, Cannabis indica
atcttattcagatttttgagtatcttaatccagggcctctcgcataagagtccttttttgatcttatctaccactatttataattgcatagtggcagttaattataaagctgagcaaaatgtaattacaatcattatcccttaaatcgtgggatatgattacaaaatgtaaacgtgattgtagcgaccccatcggtgagctggaaccattcttatatctgagatcaagaagatatgttttatgttgattgcagatataaggaaatctattgactttccagggttatgagccttgctcctgttagatgggcggactatagggagcttccgcgtagcgagatgactatcttgcattcttgctcttcgagtcgattcgacttttacacttagttttcttgtttcaagctagggtatgcgttactcttctcaggtgcctcgctattctcctttagccacatatggtttctcgttaatactctacgtaccacttcgtacatagattcctcgcctaagactttacagtcagcgggttgcaaatatactttagtacttactcaattaatgagttattcca

SEQ ID NO: 343536 - DNA, 827 bp, Cannabis indica
tttgtgttctcgattgtttgtcaatagttttcgatggtgtgtatagttgtgttttcaaactttcttgccccatgttattgataatttctcaacgtgttctcagctgtttctcgatgattgaatgattattattttcaacgattattgattgcttttctataggttctcgattagttcttgacaatttgtcaacattatttcccattattgtaattttttgttatttttgttattctgatttagttgtttgtggtttgtattgaattgaaagatcgcttgtatttttggttgtattgtatgatggtgcttaaagtgttgaggaatttaattgggtgtataaaagaaatggatgtaaagaccgcttagctttaatttagaaattagcagataattagggctttgttatggaaattatttattaatattgagttaattatttatgatgatttatttgaattcagaattcatttttatgtcacatatagaagtttcataattttgcatactttgtgcccgacaacattggaacgcggtgtatggcttttgaatcacatcttagtatttttagtatagcgggacaataagttagactttgggaatgtcgggaatagtcgggattttagaatttcccaaatcacccctaagtacccttttatgttattttacgtgggaaaggcaaaaatgtcattttgccccatatgtattttgtcttttagtggtttttttttaatggtgttaatctgatttttagggtggaaataagctgattattaagtaaataaaaaaattcttttctcattttattaaaaaatcaaaagtatcatttt

SEQ ID NO: 343537 - DNA, 612 bp, Cannabis indica
tgtaaggtttctcatactttacatgtgtttatttcataatccgtttagaagttcatatttagggtgctaatcaacatacttgtgagtagatctaagatcctggtaaaataatttccaacactaacatgctaagttgtgattctactgagccaaacaccgagttccatgttgctggacaccgaaaatgcaaaaatatgaaatctcactatatgacataaaaatgcattcaggaatcgattaaacatcataaataattatttaaatatctataaataattttcataattaaaccataattaactgctaatttccaaattaaactaagcggtctttacaccacatgtagtttccaagtcagtttgtcttcattgttacttggctgaggtgctggctcgaggtttctttctgttatgctttcttctttgcctgtgcattctaccacaaagtcagctaaggcctagcctttgattgttgttcggggttggaagttgatttcatactgacccaattctaccgcccacttgagtaaccgtccaaaagcttccgacttttacagtatttgtcgtagcggctggtcgtatatacctgcacaggatgagcttgtaaataagg

SEQ ID NO: 343538 - DNA, 650 bp, Cannabis indica
ttaataaacaaatctgattatattgaaatgagttttatttagggcataaaacccaacaaccggctagccgattttaccagacccctaaaactagccggttttagctagatcccaaacacctcattttctcaattttcgtccatttcagtggcgtggttgggtgtttccctaattctagagtttgagtaacttacccgatttcataatgtgattagggagtataacagaacctagggatatggattcgggtttcgtgggattagggttttggtcatgtaacttacccgatttcataatgtgattagggcatccatctagcacgagactttctgttcaggtcgcccagcacacttgaatctagaaagaatgtaagaactgtatataatgtgtgatatcaatatctgagtgtatgtatatgttatgtgtatatgcatgcttacagtgttagttgcactaccaacacttgaacagttaaggtatagagtgcattggtatagtgaatgttatttgagagtacattacagtgataccagcacaagtacgagaaaatactgagtgtgtgtggtatatcactcagtggtactcagggtatgaaacaaaccctaccaatatgatattagtatgcttttcttactgagtctgtcgactca

SEQ ID NO: 343539 - DNA, 1205 bp, Cannabis indica
taaataggacctagagagcagtcgaatgatttttatctcttatagtctcatattttcatatctttctttgtgagaatagtgtttcatttgtaaaaacctagagtgttcaactaggttttggttttcttattatgatctcatactattcatagaataggttgaagagaagttttgaacaagtgtgggtcttcgggggaagacttttccaagtttcattttgggaggaagtgagcatatatctttaggagaagatttgtttaagccttcttcgggaggaagtaagcacacatcaatagctgaagggagttcactacttggtgtgtttcagagatcagattagcaaggtggattacaaagggttgcggcaaatcactagagggagtctaaatttgtttaagtcaattgcttttgtaaactttgatactttactaattgatttcattctctaggcgtggtcccgtagactaatattgcttgaaagaataaaaatactacatacaattttcttgtgtcaagtttttaaatgctgaactatttattctggtttctttttttgtaaaattgtgttctgcagtgacagaataacattctgctgctgcagactgttacagtaatatttttactgaaatttagtataattattggcatttgtaaaaaatcaatttttcagtacatgacaagaaaaaattcatattcatatttttttttctcttcctcaaagcataaataaacactgaaaagagaaaaaagaagaaaagagggaggaccccgaattatctatgaatcttagtgtatatggttgtggtgattttttttttaaactaagttgaaagagaataatgtgggtaatgtttttctttcttaaaaaatcaaaatcaaagactcctttatatatattatatataaatatatgtaaagtgagattgatgtgcttagactctctctcttaaatgtcaaaatacgtaaaaaaaaaaattacattatatattgttatacttatatctgtacctttttaatctaaaagcaataagtatatacgtagaagcattaagattaagcataacaatgctatctaataatttcttgagccaaacttattataatgcttcattgaagctattaagaaaattacattgaagtaattttgttatattggaagatgtatatattatatacagcagggtcggtcctaaggtatatggggc

SEQ ID NO: 343540 - DNA, 492 bp, Cannabis indica
tcaaagctttgatcattaatggaagttgagttttaattgtttgttctgtgattttctgattgaattatgttgtaaatgcattgtacaggtatactggaaagtttggtagagtttggttggattttgaggtcatgtgggcattttttcgggttctgggggacctgtagcaaccggtcgaccggttggtgacccaaaaccggacttcgtgttgggaaccggtctgccggttggagcagtttttggaaccctagtttttcccatttttgagatattaggacatgttcatgttatttatcgatagggaaaattttagtttcaagtttaagtccccggaaagtgatttagcgagtcactcatctatgttataattaatgtgattagggcatccatctagcacgagactttccgtttaggtcgggcagcacacttgaattcaaaaaggaggtaagatctgtatataatgtgtgatatgaatatctgagtgtatgtata

SEQ ID NO: 343541 - DNA, 764 bp, Cannabis indica
aagagatatataaagcctccacccaatttattaattagttaattacaatttcaattcaaattttactccaacaataaatacgaattttatccaataataaaagtttgagtgcttgtactgtccactcccaataataaatgttatacattataatattaatttttcttatatatataagatgatgtgtgaatgagaattgctaaaatgtactattgatgcttagtacctttctcggtattatattgttattgttgtaattaagtatcgaatctcatagaacttaaaaatatagatattagggtatcatacctctcgagacacccttgatctatttgagccgaggtgatcatcttcctatatttgggttgaagtgatcaccttggcataacacttcctttactcatgttaattttctcacctcccctatttgtctttacagatgtatttttgtgactattggaacgatgacaaccatataaacgaagaaatctagctctcatttttctttggcgttggccttgagtaacacttcttttcattttgagctatgtacctccactatggagtttcaaacataagatggagactcatgacttccctagctatataagtttcgagttacctatctcatcccattagatattcgagttgagttgtttctgttaaatagagttagagcctcttactcaaagactcttttaaaagttggcctaaggtgtctttccagttttggcttttagcgacactcaagcgcttgtataagt

SEQ ID NO: 343542 - DNA, 537 bp, Cannabis indica
aaggacaatggcattggaagacatcttacaattcctagaaaccctcagcaaaatgggcttgctgagagaatgaacagaacaatccttgagagggttagatgtatgctgatatatgcaggtttgcctaagaaattttgggcagaagctgctgtaatagcatgctatttaatcaatagaagtccttcctctgccattgagtttaaaactccaatagaagtctggacaggaagcaattctagctatgaccatctcaggatctttggttgtttggcatatgctcacatcaaacagggaaagcttgaacctagagcaagaaaatgtatttttcttgggtacccagagggggtgaaagggtacaaattttggagcatcgaggatggtaatcaccagaaaatttttatcagcagggatgttgtaacgccctaaataattaggcacgctacccaaaatacttataaggccctaatcccctaaccgggattactaattaaaatagcgcaaaatttaaacttttatattaaacagactgaaaataaa

SEQ ID NO: 343543 - DNA, 500 bp, Cannabis indica
aaaaactcaaaatttataattttataaaaacaaaaaaaccatggcctatagagacgtaccacgcgtgtgagcaaatctatttgccaacgcgttatgcgtgtcactgaagaggaattctcataatttatattaatttttttcttaataaaatattgatctacagtgacccaccaagtgtgactcggtaaacgtttccctacttgctcagcgtgtcactatagcataactttaaatttatatttaaaataataaaaaaaaagtacagtgctcaagaaaaatattttaaataattttttttaatctgataaaataagtaatactttttctttattttatttgaaataaaataattaaatatttttcttttgctgaaaaataaattgaatgtgaagtttttttttcattaaaataatataaatagtcaaagattcctttataataaccctagcatcccctttcatcaaccaaaccctcaggcgtttctcattcactctctacag

SEQ ID NO: 343544 - DNA, 525 bp, Cannabis indica
tccataggaacactattaatagaaaacatgtgttcagctagagaaatagagtaccgggcaacaaaatgcgcagcacaattcgcagaacgcttaacaaacaaaagcgaaacattaaacaaactctcaagaattttcttgcaatcttccaccactgaaccgaaggaagaaacaaacacctctgcactacgaatggcttctgcacaaacgaggctatctgtctcaacaatggcctgagtgaagaagtgatttttcagccaactcaatgcttcccgtatgcccattacttcggccaaatcgggggaaacactgccaggtttcacaccagcaaaggcagcaatcaaagtaccctcagtatttcggacaacacacccaaaaccgtgctttgaagatcgttcaaaaatggctgcatcgacattgagtttgatacctatactcggttttaaccaaagctccgaaccatctccatctttgagaggagacaacaaagaaatattaccctttccttgagctttcaaccattgatca

SEQ ID NO: 343545 - DNA, 417 bp, Cannabis indica
ataactgaaattggacctagatccaaaaccgtagccggaccaggacccagactcaaaatcagacctagacccaaaatggcagccggagccggatcccaacctaaacctggactcgggacccgaacacgaacctgaactcagacccaaacatggaaccagagagggacacagaaccatggttgggacctagaactgcaccctagtctcgatcccggacccaaactcagaaatgggacctgggatttgaaagagaaccagactgagacccgtgacagtgatccagatcttgactcaggattcaggtaacagggcctggaacaaaccagtagtcggtgtctagatgttgcactcagactgggaccaaaacccatacgaagaaccaattctgaacgctgacctatgttgggttttatgccc

SEQ ID NO: 343546 - DNA, 616 bp, Cannabis indica
ttatttgtgcgttatgtgattttaaaaattgtcattggaaaacctgtttctatatgaagatcacagtttctatatcaggtgttgtttgggcttatcatatacctaatttggaatcagtttaaaaccagtttctgagattacagtttctatattagttagaattgatgcaggggttgtttgggttccttagatttttggtttgtgaggtgttttaatgttcaggttgcaaaataatgcacatattgaaaatgtgttttttcatttttatcatacctttttggaaacctctttgatcatacctattttggaaacatgtcaaaaaccagtttctacagattgatttgtgttatttgtgcgttctatgatttttggtgtgtgggtggttttaaggttaaggttgaggtgtgttactgttagtttgtatgaaactggtttcatgttaatttcgtgattgtttttgttgttcgtgtctaatgtttattttgtggtttgttttttatcagatggagagtgaatcagattctaaagtcccatccattgttcaaaaggtagagccttctacgaaggctaaagggcgaccaaaaaaagattcacgcaaagctaaagtatgttttat

SEQ ID NO: 343547 - DNA, 652 bp, Cannabis indica
gtgctatgtcctttccagggcataggtaaaagtaagcttgggttggatgtatggagtatgcattggaagggaccgatattgaacttggattagatatgataaatttactgtaatatctattcaattcaatatcacctagttgatcctaaatcaaatgatcttaatcctgacatggttaggttcgatctcaagagtgttatttgtcttctttgattggttagttaagactaccttttggtccggataataggtagattttgggaacatgatagtacaattgagtggcagcgttaacatagatacgaaatctatagcttctatccggacatagaagtgaaataatgatttctttcgagcttggctaaatagagataaatgttagagcgctcattttagtgattatattatttcaatgaaatatcatttatgggtggctaagtattttaacgataaaatacattgaaagggtgtaaaggtaattttgtccctatgcaatataaatcatctatagaggatcattgattattgggattataacaatggataattaatagcttatctatatcgtggaacatatagagcgttctatataattgagagtgctattccaagtgctatagtggttcgatgaggaaataataagttagagaat

SEQ ID NO: 343548 - DNA, 663 bp, Cannabis indica
tcagggtgatacgtacatattaggaacatgaaagtatgattgagtgggagcgctaaacatagatataaaatctatagcttctacaggtatttagaagtaaagtgataatttcctttgagcttagctaaatagatgtaaatggaagagctcttatttctattattatattttagttcacttaaatataatttacaggtagctaagtattttaaggatcaaaatacattgaggggtgaacggtaaattagtccctactcggtgtaaatcatctatgtaaagaccgcatatgataaaaatgctttgaattgttaaataattaaggtttttaaatgagattaaatgaataattatgaaatgtatattttggaaatatatttaatatatcatatatgttattatgctatatattacccgatttctgtgattgtgttcggaagctgtggaaagtgacgttgggcctttagagagtcgcgttttatgtctaaattattatcgggatatcaagttaaatagtaggggcattagaaattttcggggtttagtaatttaccattttacccttggtttagtttagctattgttttttttaggaggggcatttaggtcctttgccaattttggcttgtagtgagtttgagaagttgctgtagcttaattttaatt

SEQ ID NO: 343549 - DNA, 1085 bp, Cannabis indica
agttcttacctgttttccgaatccaaatgtgttggccgacctgaacggaaattctcgtgctagatggatgtcctaatcacaataattgtaacacagatgagtggctcgctaaatcactactcggggacttaaacttgaaactaaaagtttccctatcaataaaccacatggcaataacctaaatatctcaaaattgggaaaaactagggttcaaaaaattctcccaaccagaagaccggtctcaaccggaagtccaaaaactggacaccaaccggtcgaccggttggtacaggtcccccagaaccggtcgaccggttttgtgctgggaacacaaaaaccaacccccttaactcaattcaatcccaaacttaatcaaactctccagggtacctatacaatgcttaaacaaccatttccaaccagaatatcacagaataaaacaaagaaactcaacttgccattaaagctcaaagcttgagtttcaaaactcaagcttgcttaaaactatcaccaagcatcaaaaccaactaccaaaacctctaatcaactaaaattgaccataaaaacctaaccctaaacatttctaaacttaacagcccctattactcagaaacacaagctcaacctaagaaataagcttaaaacataaactcaagagttctagggctttacctcttgatgaatcctccttgaattctagctaaatcttagaaaaatggaagggaaaagtctgatctttgcccttgcttgccccagccgaaagaaagagagagagaaagagttctatcttgattttcctttgtgttttcttttctcaatttaattcaataagaaaatagttaattatataaatcccttgctggaaactaaatgccatgtgccatcaaaataggtagccacccaatcaacttaatagcaaatgactaaaatgccccttaacttaaaactagggtatttctaaaactaggggtaaaatgggcaaatcccataacctcgataaatcccgataatttattttctctaaaatattccccgctaagaaataaagttctaaacttgcccatgtgatcaatctagccatccat

SEQ ID NO: 343550 - DNA, 683 bp, Cannabis indica
aaaacaagatgcaccttgttgatataggtagtaccaatcaatctatttaagccatcttcagctatgtagtcacatacctacacagtctcagaatcatcatagatgacctttcctaggtgatgtgagactatacatgtaacggctgttatacttagacatgggattagtggaacacttagcattaattaatatgactatgtgattatttatgtattttatgctttatagaccctattttcatgaaaatatgtgttatgattattatttctcaatttcagagattttattgagttatatgtgtgatatgcatgctatctttgaattttcatatatttacttttttatacccagtaactgtggaaatgggtcgagtgacaattttagtcacatggatacaaatttgtatcaagcattttacggggcaataatattccatatcttataatatcggagtttaacgaaataatagaattggaccgttttaccactagggttatgagataactttgtgggaaaataagggcattttagtctttttaccataagagcttagtcactcttttcggaagggataggtggttgtggctcatccttttgaggatgaccagctgcttaggaatcaaacaaaaaggaaaagcaaaataaaaagaaacaaaaaagaaaaagcaaagtcaaaagcaaaa

SEQ ID NO: 343551 - DNA, 1299 bp, Cannabis indica
ccacatctcttttcatcccataccaccagatatgaggttttagatcctggtacatcttggtggttcctgcctcatcaaggatttctttcttgagctaataaatattagggatacaaacccgaggcttatacagtaacatttcattacttgagataaaaaagtttttggttgaccaaccatcacctcatttcgaatcttaatcagctcagctcaggattttccaactgcacttttctgattctctctagcaaatcagattggagtgtcaagttatgcaactttccaactacaaattcaattcctgcattaatcatctcctaagcaagttgaagagatatcacaacagtagttaaaacctgcccgggacctcttctactcagtgcatgagccacaatattggctttcccagggtgatacaaaagctcgtagtcataatctttaaccaattccagctaccttcttagcctcatgtttaaatctttctaggtgaaaaagtacttgagacttttatgatcagtgcaaatctcgtattttcaccattaagatagtgtcgccatatttttagagcaaataccacagcagcaagctctaaatcatatgttggattgcgctgctcataatcttttttagttggcaggaggcataagttataactttgtcagcttgcatcataacacatcccagaccctgtctgcatgcatcacagtaaacaacaaactttttctggatctgatggcaaagctaatactggtgttgttatcaaatggtgcttcaacttttggaaacttgcttcacatttgtataatcatataaatctcttatttttcttagttaactcagttaaaggcaaagagatcttagcaaatccttcgatgaaacatcgataataccctaccagaccgagaaaactttaatatttcgtcacagattttggcctcaaccaattcttcactgattcaatctttcctgggtcaaccataatttcatcttttccgacaatatgccctagaaaagatacctctgacaaccagaactcacactttttgaacttttcatacaacttatgatccctgagtcactgtaataccgttcaaagatgatactcatgctcctcttctgactgagagtatacgaggatgtcatcgataaacactattacgaagttattgaggaaatccttgaatactctattcatgagatccataaaggccgcatgagcattagtcaatctaaatgacattaccagaaactcagacccatatctggttcgaaatgtagtcttcggtatatcttcttccc

SEQ ID NO: 343552 - DNA, 978 bp, Cannabis indica
catttcgctccaccagaagtaaggtttaagatcttgatacatcttggtggtcccgggatgcaaggaatatggagtggtatgagcctcttcgagaattgcagcgtcaagttatgaagttttcctacaacaaactggatgccagatctaaccatgtcctctactaactgagatgaaatctgaacaatactagttaccttcccgggacccttcctgctcagggcatcggccactacattggccttcccaggatggtaaaggatttcacaatcgtaatccttaaccaactccaaccaatgcctatgtgtcatattcaaatctttctaagtcaagaagtatttgagacttttatggtcagtataaatttcacatctctctccgtaaagataatgccgccaaatcttcaaagcatatactaccgcggcaagttctaggtcatgagtcgggaaccgctggtcatactctgtcaactgacgagaggcataggcaataacccgatcagcctgcatcagtacacaccctagaccctgtctagatgtatcacaatacactatgaatttttccttatcaaaaggtagggctaacactggagctataattaatctctgctttagctcctagaagctagcctcacacttatctgtccatacgaaacgctgattctttttagtaagctcggttaagggtgttgaaattttagagaagccttctacaaaccgacgataatatccagccagtcccaagaagatcctaacttcagtcactatttttggtcttggccaatccctgacggattctatctttccaggatccaccttgatcacatctttgctaacaatgtgtccaagaaaggacacctgagacagcaaaaattcacacttcttgaatttggtgtataacttattttctcgaagccgttgcagaaccacaggatgtcatcgataaacataataacacagatatcgaggaaatccttgaata

SEQ ID NO: 343553 - DNA, 557 bp, Cannabis indica
atatatacacttttattaaaaaaaatataaatcggtttaattcgatttattcaggttaattgggcggtttagaataatttgtaaaccacccaatatattcattgggcggtttagacttttattgtattatttcgggttgtatttttttgtgagtttattcggtttggtttgggtggtttgtaaattttgttgaacactcctactccaaaataccccgatattctaaaatcaacttatctcaataatctcatcaatattactaactaaaatttttgtgacatttttagcctccaatcgagtctttagaattgtcgaacttgaaaatatttttatttcataaataacttacattatatccacacattctaaataaatcttcataattaataaattatacttatttatccatttatagcaaaatttataatattaaattaacaagatcataatcatattcattactacctaactacctcataatatataataaatcttaattagtcaggtttctcgaaatgttgatggtgcatgcatccttaaaaaaataaaaaaataaa

SEQ ID NO: 343554 - DNA, 696 bp, Cannabis indica
aaagttcagggggcataatttggtacatgttaaagtttagggggcaaaagtcctaattagcctttttcctttgtataattcttgggaatttcagttaaaattatttttctaaatctaaattaactaatatagaatatgctaacattttataaaactcaattttacatctctcatttcaaatacctgatcctttctcttcttttctcctctctcgctctctaaactcacccaagggctcgacccacaacccaccacctacaatctcggtcccttctctccatgaccaccgcgaccacagacccaacgacccacagacccaatgaccactgcggtcccaacgacttttccatcaaccatggcttctccatgagcaatattgtcaaaggaataaattgtatgattaatctatgttatctgtgagttgatgttaaaattagggtaaaaaacaactggatttgagttttgggcagaaaactagtttttttgctaagcctaatggctcgatgccttcctgttgttaaaatgagcaaaggttgaatatgaaggtctgatggtggcccgatgctacctataaatatatgatatggtccgatggtggtccgataccttcctgccgacttaatgaatggagcttaacatctataaatatagaatatggttcgatggtggtccaatggtggcctgatgctaccattt

SEQ ID NO: 343555 - DNA, 510 bp, Cannabis indica
gctttcatacggttagcaagaacttttgaaagaaccttataagtaacattacaaagagcaattggtcgtagatcacccatggaggttaaattcttcttcttagggatcaaaaccaggtatgtttcatttaactcccgcagaaaacagtcggtaccagagaaatcagtaacaagcttaaccaaatctactctcacaatgtcccaatgtttttgaaaaaatcccgaacccataccatcaaggccaggtgctttgtgtggatgcatctagaatagggcagttttaatttcttcttcggcaactggtttcaaacgctcttcgttttgagcaatggttatagagcatctgacattagtggcaacagtattttgcaaggaacaattagcagtaaataaatttgaaaagtaagaggtgataacctggtcaagaccgtttccccaattggtccaagctccatcagaaatttttaagtgcaagatttgattgtcccttttctggcactagcagtggcat

SEQ ID NO: 343556 - DNA, 708 bp, Cannabis indica
aaacagcacagagaaataagagtgttgcaagagctgacctgttactactgggaggctggcttctgcatcagcctgagttatcacgaacacccttgctaaagtgggtttcgctgcagtgtttggtgcttcagtcttgagttggggacaatcccttttataatgccctgacatactgcactggaaacacccctgccctctacactcccccagatggtgccttttacaactgtggcactctgggtaagcgtattgggtctcaaaactaccctgtcgattgcctcgaccctagatccctcagaacctcttattcttacctgagcctctagatgcagtaggtgcctttcctttctaataagaggtcgagccactacctcccctactaaagcctgatgtaggaagggtaggagccccgccaacaaccagagtccctcgagattctaaagggcacttcacttcaccctcagctcgtaatgccttgtccaccatatcagcataggtagtgttgtcatcagtagtaatcattaggtcatgtctgatttttgcatttcacccgtccaggtacttctctttcttactgtaatcggttggcacaactcccgaggccaaccttgacaagcgatcaaactgagttgtgtatttagtaatactcttgttctctttctgagtcagttgagtaaattcttttcttttggcacttctgactgcctc

SEQ ID NO: 343557 - DNA, 634 bp, Cannabis indica
tttttattttattatatttaaaaaaaagcatgttaagcgtgtcgtgtcgtatttgactcgtttttatttcgtgtcaagtcgtgtcgacctgtttttaacccgtatctaattttcttaatcctaacccgtaaaattcatatcgtattcgtgtaccgtgtcgaaacttgttttgtcacccctaatataatgttagatttgtcgttttgttggagaataaataaatccaaatttacaagtttgaaggatccttggagctggctagaaacaagcactattttctttgaaatttgagattttgacgcttcaagtctcacatgattcctttgacctgaattctgtatctcctcgaaaatagaagaaccatgattaattattcttacatttttctcaagtgcatttaaatcttttgacaacttactaattttatcattttttgaaattatttcttcttcaaatttttcatttaactcagaaagttgtttgatttcaaatgatagttttttatttttgcttaccaaggatcagttttcagaaaaaagtttcaaccatgaatcatacatctcaagattcctttaaagattcatcaatcaattcatattcattactgtaaagtcttttttttggcaagttagtt

SEQ ID NO: 343558 - DNA, 536 bp, Cannabis indica
aattatttgagtgtgtcattttaaaattgttactgttgccccccatttaaaattgatttaactttcatttattatttttttaaataaaaacaaattggatgatgaccgttgctcctccacaacaattggaatggtcattttgattttttccaatgcaagattactcagtatagtagctatgctactgacaaaagtgatttgggctactccttataggtgagcatgggagaaaatcactttttttgttatatatttttttatctgttatgactttgattactttttgcattttttaaaggaaatgtaatattagaatctgattataattttatatttggaatcagtttcgtttaaattttatatttgattgttttatttaaatttttaattggttattttttctgttatatatttttttgtctgttatgactttgatttatttttttcttgttgtttattatatttattattctttatatcctatttcattaatattatttataatcggatttttaatactgtttaatatgaagtca

SEQ ID NO: 343559 - DNA, 797 bp, Cannabis indica
acaaaatacacacacacaaagatcaaaccaaaaatagtagagttagaaagaatcaaacaccagaaattatagaggttcgccctagaaattaggggtacgtcctctgatgagctcgccttgaagatcgacctcagatctgcactatacttgaagaaacatacatcaggtgagaaatccaagtcacaaagtcgactggtatttctgattgttgttctctctttttcttttctgtgtctatctctctttttgttttctttctcactcactaactctctttcttttctttgcatggacactggaacaccaacttctggagcttaactcccagatctggaatctggcttctggtatctctcgactgagagatttggtaaggttctggtctcctcttatagttgtagattaggtcaaaagtgtgtaactgaatttctgttgcaaaacagaaattcggttacacaacttgtcaagttgttgtgtctggtgagtgggtaaagccacgagccttttatttgtaattttcttctcttctttgtaaagctataataataagtattacaggggaggtctaatttaacaatttccaccttagatctctcctggaatacttattcttatagtgcatctttcttcaagtgtaacgccctaaataattaggcacgctacccatcactattatgaaaccctaatcccctaaccgggattctaattaaaaaaaatagcgcagaatttaaacttttatattaaacagattgaaaataaacttgtaatatatttaaacttttcaaacatagttggga

SEQ ID NO: 343560 - DNA, 759 bp, Cannabis indica
aaaataaaattagatgaaaagattgtagaccttgataacacttatattctatttcatctaccgcttagaagagataatagttgaaactgttgcagcaggttcattcaacatcatagcttgagtactcaactattgtgtaaggtatgtaactgcactaccttcagtcgcagagaaatgttattcctaactactaataacgatttgatagcgagccatcgaataataaaaaagaatcaacaatgaaacagaacaaaactatgtcatagagacaagactaaaacacttgaaattatgtcacaagattaaaacactcaaaaccatatcacaaaaacaaaactaattgcaatagcaaaaatcgaattagtagcaaaacacaatcccaaccaagccgcacctaagcccaaagaaggtggtaagcttgatcgaacaaaaaagacgacctctgatagctatagatttaagaacaagaaactctaattttctcccacaaaataagaaatattaatgattcctctttaaattaaacaattgttagaaaatgttatatgtaaaaataaatatttaattttaattttactatataaaaatatatacatttgttatattaaattttaaaatgtatttatattatatatattagatttttaaattattatttttttactttaaaattttaattataaatataatttcttaaatatatacataggtgttagttggatttttttttttttacgcggtgatccagatcacacatga

SEQ ID NO: 343561 - DNA, 604 bp, Cannabis indica
ataagtgacatatctataggcactccacataattagtatagcttataaacatccaatcttattatatattatgattataatattgataattagaaataaagtagcttggtaacaacatattaaaatgtgaaattaaaagggaattataatatttattgttgaatatttatgtcatctaaattctaacaactattaataatgaagaaaatgaagacattaatcgaaaacaatatagattttcatttttattcaaacaataatgacatgaacaaaataaaagtactaatccatcaacgtatgtatatattattgggaaattctatacatctttatctgttttagtatccgaaataattttttagtcaaattttttctcatggtcatgtaaattatacttatttaagacatcttgcaaaattttaagaaattcggaaaagtttaactacgccgaaaattagcgttcaagtagtgtgttgcactcgtgactattttattttattacgcgtgtaaaatagactatttgaacattgttttctatattgtaaattattccgaatttcttaaaattttgtaggatatctcaaatagttataacgtacatgaa

SEQ ID NO: 343562 - DNA, 735 bp, Cannabis indica
ggtgacaaccatcatcgttgggtaaagataagggggaagataagggatggggattagttttattatttgaggggtaaatttggtactaaaaaaagaggtagcatattttgttgaaagtttaatagaataacatataagaagaccatgcaacatatttaagcatggattgtcaaatttctcttttataaatctataataaattttaagagcaatgaaattgtatatcttattttgtaaaattatctttttatattccatatatgtaatcttgaaacaaagacaggtcagatgtcttcattttacttctttccttacactctatctaatttgtagttttttctatttttatttttatttttttaactatttaaactatttttatcaattaaactttatctctaatataattcaataagaaaatctaaaagacatgcaatttgatatttattatgttattaattgttaaaattatttgtattcttctaactatttgtattctttatatatctcttactcttttatgtatatataatgtctcaaaactcaaatctaagttaaagttttgtgtccactcatgtaacttctgaactagcataggcgtattacgtgatttttaaacgtaatgtgcagctcgttgctaatcaacgaggtttatggaaatcgtgattaattaaaatttttttgctttttaattaaactaatataatatttttaacaaaatactcgggatcccga

SEQ ID NO: 343563 - DNA, 572 bp, Cannabis indica
gtgtactgattacattggggagtatatcctcttttttggcgtttgtcctccgttcggttgctgccttttgaggacctcttgctcctggagccttgagaaagtccggttaggcttgcagtaggagcggagatagacgggatttgtccactcatccctgaggggttcccatagtgcaaagatgcgggagccaaggcttggctctgattgtctcctggggtagcggagaactgtatactgctcattggtggagtagcctgaggcagggttctcgagagctgaactccgggtacatatcctgccactccggtcgggtagtatccttcgtaagccactatttgggcttcttctaagttgatgcaattttggaccctcttctggaaatcttggagattcgcagctccctcttattgtaactcgttccagaacggggttcctgtacggatcttggcttgaagaagtgcaagctgttgtctgtcatcaactttcttagtctttgaggcttcttctttgaacctctttatgacatttttcaatgtctctatgggtagttgcttgatgttagtcagggcgct

SEQ ID NO: 343564 - DNA, 609 bp, Cannabis indica
ttacctcaattctgaattcaggtgtgccactcaacctgagtggaacgaactgctcggcgatttacaggctcctaaaccataataatcacaacacttgataagtgacacgctaaatcacttcccggggacttaaactagaaactaaaagtttccctatcgataaaaagcatggcaataccctaaacaacacaaaaatgggaagaactagggttcccaaaattgtcccaaccggtagactggttctacaaccggaattccagttctggaaagttcttggaagccccatcggtcgaccagttgctaatggcttccctgaaccggaattccggttcagtgcaggaattttcaaaaattcatatttcattcaattcaaacccaaactctttcaaaccttccagacctgttctaaataccccaaataacaattccaaagctcaagcttggtcaaatcttataaacatgcatcacaacctgctcaaatctacttaaatatgcataactaagcttctgcaaacaacagaaaacaaccacaacaaacacagcaacaaaattcctccttttaccataaaaaccatagtttttgagtcaaaactccaaacttgaacaaaa

SEQ ID NO: 343565 - DNA, 515 bp, Cannabis indica
gagtggaccctaaacaaaacagaacataatatatcaaattttttctaaattctaccaaaatttcagcagcataatggttgtaattgaatgcccccaaaaattcaaccgaaattttagaagcataacggttgttcatccatcccaccgtagcacatatattcgcagaacctacttcactatggttgaatattgaagatattcaaactccactaatcattaataattaatttataagagaagttacctcggatgttagaattaagtgtttaggccaaggaaggaacatctgagatacgtccctaacatatcttcacccttcaattgggattgggatttcagcatcctcttgcagcatttctgaaaccaaaatctgggcatgtgaatcatcgtagtccgtgtagtgaacaatgattttaccaacatgctcgtacaaatatgctcgggccacaatgttgtcgatgttgtcaaagcagagatatacttgttgattaagggccgcatggtcatcaaaattg

SEQ ID NO: 343566 - DNA, 544 bp, Cannabis indica
cggcgacgaactgtcttcggaagcgaacttgtaatttgtttcaacagtccacaaatcctggttccaactttctgaaccattcctccgcggaaccgcttaacgttagtggaaaacataagcacttagcatcattactgactctcatgaccatcattactcggttgaaccgggacaaatgatcgttggggtctgagtcctcggtgtaggctgccatttcgggcatctgaaagttttggggaactctacctctagaatgtgtcgggtgcacggctcccggtcctcacagtcagagtctgagtcatcccccttttgtctgcgggagactcgggcaatgtccttgcgcagtatggctagctcaaccataattccttcgttcagcgttcctgcagagaccgccggtgcgtgtttctttttgtccaagtgatcctgcaaatcaccgtgcttcttgttgatctcatgtcttagatcaatgggagggtatcttcggtttcctcttcctttttccccgggttcctggtgcatagaaacgctctttcagtcctct

SEQ ID NO: 343567 - DNA, 637 bp, Cannabis indica
taacagtaatgaccgttaccaatactcaccacttattatccacgagctgcgtatgtcactatcgttgcctggtaaagcaaacaataagtaagaaacctattcgcgatttcaagaataattactcataacggtaatgaccgttaccaatcctatccactcgttatccacgagctgcgtatgtcactatcgttgcccaataaagcaaatgataagtaggaaacctatccgcagtttcatgagtaattactcataacggtaatgaccgtatcataattcattcacaacaacggtggtaaccgtgttcttccctcattcatacataattcacaaacgacaataatcgtttctcatcattacctcgattgatatcgagtcacaacaaatacatattattaatctcaatcaagatcaagtcacaacaaatatatatcgggatctcgattatcgatcataatcgagaccataacaatcatatcattaaccataaacagtgcttagcagtgcaaataactttttttacctcaagttttggtttacgtaggttgacctacctgcttggagaacgatcgatcatcccaatcctcaagtttctttttccttgaacttacctatgctcacagtgttggaaattatttta

SEQ ID NO: 343568 - DNA, 527 bp, Cannabis indica
tcgaaaagaaaagactaaccctaataagctccttcaaaactccgcccaccaacacatccagagatgagtcgtcagcaccagccaattcctcaccaacctcaggaaccagccggttcatgtagtgagccatcacctccttgccctttttggcctcaggcagcacgggcatgggtggagttggtgcctgcacccgctcaggattcctcctcaccagctcggacccagatgttggtggcccagactccttagacttggcagatttgggagtagaaggatttgcagtagtcagctcctcagaaaggtcaatgacctctccagaaggcctcttcttagaagacccctctccgcctttagacttcttggccggaggggaggcgctagagcttctgctcatcctcttccttaaggcgtcgatcatctgccgagacatgtctgcacagaacaaaaacagcgtggttagcaaaaaccaacaaaaaatacaaagtatgaaagtcaagaagctgaaaaagaagtaaagcgcagagtga

SEQ ID NO: 343569 - DNA, 657 bp, Cannabis indica
attcttatattttcattcctcccaactaaattccacctaaatgcttatatctattgcccctttaattgtctcatattttaatttttaattagatttataaacattaattaattaattaatccatttattttataccgtcagttattagttttatataatactattactaatagtaataatagtaataaaaaaccaaaaatatcaactatataaatctttatcatattaataatcaaacaaaatagctatcacaaaataatacttcaatcgtaattaataaactttgtgtactattaatactaaatcacagtaacaagccttaactctatgtttactaataagtaatgagaatcaatagtaaggtaatcattcccttacatttgtttacttgaattattaaaattaggaaagggagaagttaattaaataagggagaaaagaaaaggagaacttcttccaccaattttataaagaatgccattaagggtaatgaatttttattatttttatttattttttaatattaaatatataatgacaattttgtcctttaaaatatgtcttgcaaaataactaccatataatatagtttaactcaaaaggacaatttagtcaatttaagcattccgattacgtttcctaataaagtaaacaaga

SEQ ID NO: 343570 - DNA, 1231 bp, Cannabis indica
tggttggtaacacttgctcaataggggcagcatgcagattagcattgccaacccctgcattatcccccgaattctgcggaggcgcaggcagtgtcggtggattggtttggtctacaccaggctctacttgctcgccctatggtctagatgattgcggagggtccatttttacaagtacccctgtaatcaacaaccccagcgagttaagcaccaataccacacttatgcacttattgcctcaaaccctaactgaactattccatttaacataaataaacatttatcatataacattctaagcatggcacatatatcacataaatagtgtagattctcacatactacctaaaatggaaagcggtaaataatcacataagcagtaaagcgtttactttcaacacttacttcaccacaagtcgagcttgtctctgacgatgattgtacatgttcggccgctctacaagaagtttaaaaaccttggcactctgataccactctgtaacgccttagcatttaggcacgtcacgacaaccaattataaaaccctaatcccctaaactgggattacaagaaacaaaagcgcgagaaatttaaacttaaaacaaaaacagaatgaaaataaaacttgtaataactttaactttacaatcaaaaattacatgtttggggatcccaaactattttacaaaatattataagtcttttcactagccgatctaagcggcaaaatcagagttacacaagtacatcactgatagaccccgaaagtacatcagagttacctgtcatatatggaattttataatttttcatgttttgtgctcgggaacattggaacgcggtgtttggctattagaatcacatcctattctttttagtatagtggggcaatatagtgagacattgggaatgtcaggaatagttggaaatttagagtagtgaaaaaaataacccctaacgtgatgtttatgacttttagtgtgggcaagggcattttgtccctatatttattttgttcctttagttgggaattgagttattttatttaaatactgattttattgtgttttaagtctgatattagttgagtaaaatcaagtttatttcatttaattttacaaaatatcaaaagataagcaaaaatcaacttttctctcaagttctctctctccttcgagcccacctagaaccagctagggtttgggttgttcttcagcatttcaagcttgtt

SEQ ID NO: 343571 - DNA, 526 bp, Cannabis indica
tgcccgataaagcaaacgataagtaagaaacctaactgcagtttcaggagtaattacttataacggtaatgactgtttccaaccctcgatcacaaccgaggcataacaaacacataaacaggaccttcattatattcaagtctataccaatcacaatcattaattatttaactatatatggtgtgtatcacttttcttacctcagtccaatagtcaagtatgcgggccaacctgagtggaactacgctcgacgatctcgggtcctatttcacgacaacaaagctcaataaataacttattccaaactttagaataaccctaacttcgtaaccggacatatctaactctccactggttaggaataactcaaacatcattaaaatatcctattctaagctctggaaaacaccctgaacaaaactagtttcgaagcctaaaactagggttacccttgctaccaaaactggttaactggttttccctgctgcagaaacaggaaaactctggtttgttgctccaaaaccca

SEQ ID NO: 343572 - DNA, 770 bp, Cannabis indica
ataaattgtgggatgttaatcaacttccatatcttctttgattctaattttttataataatttgagatgatagaatgaactctgaacgagtactcttctggctacacaaataacttgtagtggaattataattcacacaattcactaaattgtgaatagtagtattaataactatattcttatttgatgacacttgtcagtatttaatgatgaatttcctagtaacacacccacgtcgcagtacacaaaacatttatttaatttatttgtttagggtgcgtttggaagtaactgtgtaattactaggtagagtaattactagggtggtaattacacagtgtagtaattacactatattttaaaatgcaaggtgtgtttggatatgaggtggtaattacatatgaattcctaatatcttgtttggtaaaatagttagtaattacatgggaaaataatattttttagtagctaatgtttaatatggaaagtttttagcaattacacagtgtaattacattcaattctcatgggggccatgagaattggagagtgtaattggaacccctcaattacttccaattacacagttacagtgtaattacatggtcagacaaacatgccaaattatgtaattacctctaattacacaaatccaattacattgtggctttccaaacgcacccttattgaatatatatatgacacagaaaaacttaatgatcaagaaaattagctgtttttttaacgtacatattaatttattatttttt

SEQ ID NO: 343573 - DNA, 769 bp, Cannabis indica
tttttttaaatagttatttaaatggaccaataaaattatttcatgtgtacacagtgtccacgtagacaacacaatgtgtacacatggatagtccaacgtggcacttaacacctaaaaattgatgaaaatggctaagtgctaacaaaatataggtttaggaggttttaccactaaaattttagaattggggattagttgcaataaactaagcacttgtggaagttatgccgcaaattactctttttttaaaacgatattgataatatttggtcaattttgatacagtggtgataacagttgtaaatatagtagcgattactagtgatatagtgatgataacaattttaaatgtattaacgactataaatgagatacaatgatgataataactttgaatatagtagttgacatcgattttgaatatagtgacaactataaatgaaatacggtggtgacaacgactttaatatagcggcgactataagtgaaatacaatgatgataacgactttaaacttttttttttcctttcaatttacaagttaaaatatagttttcacctatgttacttacattatataggttttttggtttgtagtgttcaacacatttttaataaactatatcgaagaatcatattttttgcttctattagttagttaaaaatttattctactttatttaattagagatcattaattaattaaaattttcttttaaaaaacatctatctatgtttttttttttatcaagaagaatacttcattaat

SEQ ID NO: 343574 - DNA, 566 bp, Cannabis indica
gtgatcatcaaatcatgtttaatataggaattcaacccatccatgtatttttctttcttgtcaaaatcagttggcagaattcctaaggctaacctagccaatatatcaaactgtgtcgtatactctgtaactgacatattctccttttgagtcaactatgtgaactcttttgtttttacactataggcagcctcattatagtacttcgtattaaacaactcttaaaattcttcccaagtaattctggtgacgtcccgggtgagggataccataaaccactctattgttgccaatgactccaataaaattcaaaatccaaataataatagttagccattattcaactttcataatgtccgaacctcctaggaagactagaggtgcttgcttatggaacctttcataaagtggttccattcgtttagcaacgacaaccagtccccacttgcataataggggtaggagccatctattgttgggttttatgccctaaataaaactcatttcaatataatcagatttactcattaatatagatcagaaataacatttaatgttgcatggtt

SEQ ID NO: 343575 - DNA, 577 bp, Cannabis indica
ttaagcacaattcattcaagtcatacaaggtaaataacatattcctatgccatttacaaaccacatttttctaaagtggtattcatgcatcattcaagcaattccactaaccctattttttccaaaatcaagattagctactacttactaatggtgatcaagcaaaagtaagcaattgcacaataaacactcttgaatgaacaaaaccaattcactaaacatagcaacaaaatacgaaatcacaatttttagccaacaaaataattctagcaaaaaaagaaaattagctcatactaaattgtgcaaaaattacaaaattccaaataagagaaggatgaaaagaaaaacccatattagagttgtcattctttttgctgtaggtgacgtcccctggagtccaccaaccgccttcctcttcttcaagtcactctacgccttctttttttttttccttgacaaagcacacatataatgcatatatgatcttctaaccaccaacttagccctacgtggcccatgcttccttctcttttattttgggaaacttacaaaaatactgtttttttaccaaatgttt

SEQ ID NO: 343576 - DNA, 639 bp, Cannabis indica
gatttttattatgtttaaattctaaaaatagtgtagactattaaaatatctgatgtgtgtatatttgtgtgcacattagcagtatatattgacatttaacaataacattttaatggaaatataaatagcaaaacaaaagcgggcttgaagggtttaaccactaaaacatcaatttgtagtatattaaatagtgtttggtttacatgaatgagtgtaggaatggaattgttattcctatgatttgtttattgtcattggaaaataaaatgacttgaattataggaattacttttcctaaataaaatgacttgaaaagccattccataccaaccaaaaattatttttccttatctacccttctcataaatataaataaatgattaaagttataattatatgagtaacattttttattttaaaacatatatctacaatatttaatattacaataatatgtttattgtattttttttgtacataattataagaaagcaatattattattataattatataaaaaaacgatgtgcgatgattaaattatatgaataacatttatgttgatagttaaatatttaatataaaatagactattaaattagatatttatttatattttattatttgataattagatct

SEQ ID NO: 343577 - DNA, 605 bp, Cannabis indica
atctatagaagcttctcgacttctagacatagattttatttatctaaggaaaagttttaactatttgagaaaagatatatgccaatgaaagaattccttaggatcaaaagtgagaggtctctgatatgcttttgtatgcattagaccagacaccaactattgagtgggagtaatgagtagatatcagattaatctaggaaaggaacattggaagacaatcaagtgactcgtaagatcaagaagatgaactatatgttagtcgataagggtggtttttaatactcttaccaaattaggtttctagatttgcttagtgctagaaagtctactgatgagatggtgattactctgggggtggagtagtaatcttggagaagtgtaaaaacctatctagagctctaactctaccagtgagactgaatgttaaagttgcaggaaaaatacttattcagtctatggaaaattctatacatttttggcattgtaccaacaatttatcaactactagttttacatcctgactaacacaaaagatgttgctaaaaagtaaagaatcaagtatccctagaggagtagacatatagagaggaatttcacattagcaa

SEQ ID NO: 343578 - DNA, 693 bp, Cannabis indica
gctagcagacttcatcacggagttccaggaagcagaagctaacgctaacatacccacactgccagtcccaacaaggaaggtatttgtggatggcgcctccaacgagaatggtctggagcaggggttgcgatgatatcctcgaacggacttcgactcaaggcagccctacggtttgaattctcagcttctaacaatgtggctaaatacgaagccctgatagcaggactaagattggcaaaaaactgtgggggccaaaagggtagaagtctacaacgattcgcaacttgtagtaaaccaggtgttgggagaatatcaaacgcacagagaaaagattgttgcatatgtgggaatagtccgggaactgctccacgagttcactgactataaagtagaaagaatccctagggaaaggaacgctcttgcagactgtttcgctaagttagcttcagacagtgaaattgagaaattgggggtggtacctgtggaacgcctggcggagccaagcatcaaagtcaaacatatcatagcaacagttgagcaagagcccagttggatggtccccatcatcgaatacataaagaaaggcaagttgcccgaagagaaggctttatccagaaggatacaatatcaagcgcaccgttatgtgatgatggacaaaattctctatcgaagaggactcagcatgccttattt

SEQ ID NO: 343579 - DNA, 572 bp, Cannabis indica
cattcccacaaagattgctcccgatcaaaagaggtagtcagtatggtgacatcttagaggtattcaaacaagtaagtataaatatccctttcttagatgccattaagcaaatacctgcctactctaaattcttgaaagatttgtgtactgcaaaaagaaacacaaatgttccgaaaaaggcatttttaacggaacaagtcagctccataattcaatataaaagtcttgttaaacacaaagatccggggtgtcccaccattccttgtattattggtgatcatgtgattaacaaagctttacttgatttaggagctagtgtgaatttattgccttattctgtttataagcaacttggtctaggggaactgaaaccaacatctatgacacttcagttagctgatcgttctgtgaaaattcctagaggtgtcatagaagatgttttgattaaggtagataaattttattttcctgttgatttcattgttcttgatactcattttgttgaagacataagtgctcaaattccgatcattttgggtagaccatttttagccacatcaaatgcaatcatc

SEQ ID NO: 343580 - DNA, 1005 bp, Cannabis indica
aaaacaaaaattattttaaaagagttaaaggacattttggtcaaaatataaaaattccatttcattttatattataccaatcatcacaattcttattaaatattgattctataggctttaccaaacaaaataatagaaattctatttcattctattgctatttctattaccattaccattcccattcctattccattttaccaaacgccacctaagtgttatatagttcatataattttaccgttaatatatccctttatcctaatatatatacatatatatttcgatttaaatgaaataattactcaatggaagaaatttcattgatggtcagttggtcactaaaagagaaagaaatttaatgggttttgggataatcgcataagacttggtagactcgtataaaagggagttttatttgatgtgataatatatatcgtcacaaaagtgttgttgacccatctaaaataaagtctgtaccccaaaaattgggtttgtcagtgcaaaagaaaaatgataaaagaaaagttaaaataaaatataagaaatttgtatagtacattccctaaagaaatggatgttatggtagatctcactttttagttttttttaatgatctaatatgttgtagctatttaaaattatttgtaaatttttttaaaaaattataactaattatgggtcagtttggcataattgtgctgtgggaaaaaataactgtagttgtgatgtgagaaaaaataactgtagcagaactgtgagaaatagttgaactgagtattgttgttaagatctattataatgataatgttataatctagtttattataatcacaaattgttggaaaattgttgtgctccaatagaaatatcaaaccaacatgattacaactcaatgacaaataatacaaaggacaaaaatatagattaaataatgttacacatgaaccacaatatatatatatatattatatatacaaaaaagatgtgagagcaatctcaaca

SEQ ID NO: 343581 - DNA, 573 bp, Cannabis indica
acaaataaaacaaaaggtaggagttctcttatttgaaattaatccaaaaccaattcccatcttctttggtgatcttcatacgccttttaagtggctttgtaatgtccagagtaatttgcatccgaagataatcctgccatacgccaataaaattcttaggatcggactccaaatatttccccattgtgttccccactttttggattgttgattttgacatacaaccgggttcaacatcatgaagttgaacccaaatatcaagagtattcaacgctaacatcttcgggtcaccaccaacctttaacctctcaataatcaattgcattcgatcatatgtccaagggctaccattgatcacccgttggatatcgacttcatgataaaattgaaatagaaatcgattattatcaagttgtttaacaaacatccccatacctggctgccatagcgaagctaaaacattttgcatttttttgaagtcgatcactcggttggacaagaacctccctaccaggcaccggcgatcgtctatgccttcatcccgttcatccgctgtgactgtgacagcttcca

SEQ ID NO: 343582 - DNA, 762 bp, Cannabis indica
acgcgccccttccctattggttcgagaaggatgttggcgatgtctcggtggtgacccacctatgccaggttgagtctcaggatttccctcattctcacgggggatttcctgttccctggtcccgagtcgccttctgttctcatttctgtgagaaggctctggttggtcatttagttgtttattctcaaggggaccctcagtttctccaggttgttcttcctaagcgttctgaggattctcatgagccatctcctgcctcttggtttgtgaaccgcgaggtctaccttgtggtctcctcactccaagatcaggttgattttgtgcgttgttctcttgtgccgccctggccgtggctgcctcccattccaacttaccatttcgtcggtttgcctccttcaggcgatgcctgagacagagattttgaaactcgacaattggcatgtatcttgtgggatcataggcaccatcattatcatattccataggttgatcacctccaacattgggttcttcattccctgcttctgggttctgactattttcatgctgagtcctccttgaacgtgtggaccgtgtattttggccacgttcaggttgcgtccttctggagcgagtagtccgtgttgatcgtgaattgggaggcctccgtgagtccatcagctcttttctaggacggtgggtagtctcttcaggatgaatctcaatattttctccgttatcagccatggagaaagatttttcttttgatcaggagggtttttt

SEQ ID NO: 343583 - DNA, 599 bp, Cannabis indica
aatctttgttgccatgcaatcttctgtcaggtttcattttttactgttaaaaattagtttttaatatatttttacaaattaaattttaatatattttttaatatttaaacgaattttctaataaaatataaataattttttatatcgcgtaatttgttttaaaattttaatttacttttaattttcttaatcattcaaaatgatttttcttaagatataaattaattttttaagatttaactaaaaaaaaatctttcttatttttattttgaaagagcacgatttgatagttgtcaaaatttagggagcaaagttactaattgacaaagatatgtcatcatttaaacgaaataatgggactaggggtgttcattggatcacatccaatgtttttaggcccatccagatccgatccaattatatattggatgttagattttaccatccgatccgatccaattgatttcagtcatccaatcgatccaacatccattggatgttggattggatcagttctatccattggatgtattttatatatatttattggttcaatttgaatttatttaatattttagactagtatttttggatcggat

SEQ ID NO: 343584 - DNA, 2011 bp, Cannabis indica
gctttttcgagcttgatgaagccttgacggtcaagaaaatcactcattgggtctaccgggccgttcttcctgatgtccttccaaagttcaccgaggacttcaatgcccttagtatcgcggacaactttccatcttcagttaccctatgaaactttggtcgccttcgtcatgaatcggctgatgtatgctcggagaggtttgcctggtctttgcttgacttcgactagatctcccagatgcaacaaaagttggcgagaggaggagaattgtgcatggaattccgaaaagaaggctttccctgagttgaactttcgaggggccaacttgaaataccattgttgggcgccgtccgaaagggtagcaggaaagattctgcaacacacatcccctcgtatcccttaaaaatccatttgcatctcgaaatacttgagatgggaaagaggatattcttttcttgtgtacattttccacgttggccttttaaacttgtggggcaacgccaaaagattgatctcgggagagaagggagttccccgtgctcggcctagcttgagatcattgtttctctatccgacaatgccttggaacatatttttcagctcgtctagctgtgcagcacagctggactaacatgcttgccattttggtcgattagaatcacatcagtatctttctgagtgagaatttgagcacgggctctgggttgtacgatcgtcgtgacaatctgattgtctactcctctccttctgttcagattgctccttaggtcatgagtcgtccccaacctatcgaatacagaagcccctggttgtctcagcgatttatttacttggttgacaggtggaatggcaccattaacctagttagaactatcaagtatgacctctcctgatgaattactagacaaggtccgcccacctaccactaggcccacagaacttgtgaccgaggatttggcagctgaccatttatagtctgggaagtattcattgctggatcttcgtctgtctcgcccagggggatgacattcagaggttgctgtctgacagtttggtaggctttttgtatcagcacagtagcttgccgactatgattttcaatctctgtatgatgagccctaaacgcttccatctctttgtctctccactcggcacatgcgtctttgttcctcgaacgtgagatttatcgcagcacggagttcttcctgatcatgatgtagggtactggtatgaccttgcatgagtccaagagcagcacagaggtttcggatctcagtatcatctccaacagtcatttgagtgttggtagcaggcgaaacgtctgtgttatgaatgccctggttaggtgctgaactgttattcccagtctcttgcacaccaggcgcgatttcatctacaggagtcgtcacaccatgacctacgttcgctggctgttcaggattaatagctggcaaaacccttgcgcttccagggttctgcaatgcaagatccacagcctgtggatttgctggatcaaccaagcccctacgagtttgtagcaccatcatacttgtggttagatcttgaataaagagcgattcttgattctgctctcaatgaaagcaccaaaatattgacctcgcttttagccaacgacagtgagtcttatttagtaagcgataagtagtttataacgattgatatatagtaaagacatataatgacacaagaattttatagaggttcagccccgagcagttcagtaatagcctaatcctcgttatttgtattaacttaagagcaaggagaaaggttccttttcttatagctcttacaacagtatctctgaatatgaattcttagataatatctcttaagtaaaatctctcaaccctttgcccaatgagcatgcatcattatttatagggctatcatcttggagaagaagtatttcccttctcgttacaatggatatacgcataaagattgtataataaataaaaaatacattgatcgtgggatttggacagctt

SEQ ID NO: 343585 - DNA, 763 bp, Cannabis indica
actatataataatataatataaacacacaacaatattaaaattacagttttacccttctcatgtcaaaattatagaaatgcccttagctcaccaacggggtcttaacatatcatttatcagtaaaattcacatatatttaactatataataatataatatcatataaatacacatttaactagttagggttcgctaatccattttcttaatcttagggtattacaattatcccctccttatagaaatttcatctctaaatttacctgaacaactctagatatttctgctgcatatccatctcgagttcccaggttgcctcttctaccttactgtttctccataatacttttattagtgcaattttcttgtttctcaagattttttctcttttatcaagtacttgcactggttgttccttgtatgatagatctggctaatgttccaatgcttcataactcagaatatgggacggttcttagacatacttctgaagcatcaaaacgtgaaacacatcatgtacagctgccagtgctgggggcatagccaacttgtacgctactttccctatcctctcaaggattttaaaaggttcaatgaacctcgggctaagtttccctttcttaccaaagcgtttaatgaccttcataggtgatactcagagaaataccatatccccgatctgaaaatcaatatcccggcgctttggattggcataactcttctgtctactttgagtcgtgagcattcgcgctctgattttat

SEQ ID NO: 343586 - DNA, 812 bp, Cannabis indica
cctgtcgcgcagcctcctcctggaacgcccgcctttcagcagacaagtcctgcaagaccttcacgacctcgtctatgcccccaaattcggacaagacgaagccatgattaattatggtcttggaaaggcgaccggcctctgtagtaatctggaaaaggaagcaagggtgagtgaaggccttaagtaaagtaatgaaaaaagaagtaaatcacaaagtacttaccacggccaaggcatggctgagatcctgaatttggaagacggagttcaaggattcacaagcagcgtaccgtttgggtgcgcaccgagtcagctgggagacatactcgccggtcatctccgcggtaaaaggagccaaagtgggcccaaggaaacgattaaaccagtccgtcagggggtccaggtttagatcccacggattctggtagttctcatcgttaagagaattttgcacctcctctcgcaaaaccctcctcaaggcctccatctcagcatgcccccgggagtactcgtcaagggtataattatgcttggctatccgaagcttttgcctcgcctcatctccgggaactagagtcagcacaatgtcgtgaggcactgtaaactcctccgcctcgggagggatcccggaatcatgactcggggccggagtgtccacccttcgcagccgtttagaagactcctctgcaaccattttgcctttgcgcttgcgcattagagtaacctcttgctcctcttcactttcttcaacttccccaagaagagcccattgctcttcttgaccttctttagcttcctcaagaagtcctcct

SEQ ID NO: 343587 - DNA, 1235 bp, Cannabis indica
ccaatcgtcatccatctcctcgacctcgacgtcaggggcatgcctggagtggacgagataatcgcgtgctgacaccgtagattcgctgtctcgaatctcaatggctcctggttcagcgagctcctacaccattctctcgatgtctgcggaagacatcggacctaattctatacctccagcaggtgcgatctcctcttctgagatcgaggtcgggataaaactatcttccctttggtcctcgtcaccatcaaacgcgttgcctcctgagccaagcagctgactatccgacaggtcgctcatctgaaagatagaaatcttttcagcgtggtgaatgtgtgaaaaacaagataagtgatctcacccgcatataaactataaaatcgtctttggaagatggtttgaattctcacgaaaactaaccatcccaccaatacgcgaaaagataggtgtgcgaatagaaagacctctcaaaaaacggctgggtgtatcccagtgacctaagcgacatgcgtcttttagcatggccctgaagtaactgggagacacccaccgtttcgagaagtccaactaatcacaacctgcgagtgtgtcacacatctttagctaagcgatatacctcaaaaaacggctgggagaaactcagtgactcaaggggcatgcgttctcaagcataaccctgaagttactgaggtactcccaccgtttcgagaatatctaccagccaaagagtacgcttatcagaacattagcgcatgtcgcaaatggctgggtgtatctcagtatttcaaggaacatataaccgcatatatgaacattagaatactgtgatacacccaccatttgaaagacttaaccaatgttcccacaacaaaatttacagagtacaaaatcctaaagttctaagtaacagtcagaagtgattaagtctctgtgaagcctaagaagaacagacatgcgagtattcgaggtgttcatccgaatacccgcgtgtattcaaaatataaagtggcgtctgttcaagcattttttctaaagttcacggttatgccaattttaagtcattttccctgaaattacccagtttcttacctaaaaacatagcctcacacgtatttcttacaaacatatattcctaaaccccctcatagatgttaaaacccagaaaatagcgttttttctccaaacagaaaacaaaaatgcagtgaacttcgaaaactaacctttagttctgataa

SEQ ID NO: 343588 - DNA, 749 bp, Cannabis indica
atgagggatttctcattcatcagtttctggttgcctcctttctggctattcatcttgattctcagggggtgtctcattttccctaggtttttcttcctgggccttttcctgtctcctggctcgtgagccacgaggtctgcctcgtggtcttcttagtccaggttcaagttgattttgagcgttcgtcccctacgccgccctggctgaggctgcatctcgttctaactcagcgtttcgaccctgcgcctctttcagacggcgtctctcaagcggtggcttttcgtttcataagttctttctcccacagattgggcacctccacggttgagctcttcatccctcatcctgggattctgaccattcccacgctgagtcctcctcgagcgcattgtctacgtgctaggaccaacgtcacgttgagttctctggggacgtgtggtcctcctagactgcggattagtagatcttctagagcccatgggctctttttcagaacgatgattactttcctcatgtggggtgttaatattttctggattttcagctataaaggagaaggtttttcttttaaaagaaaggaaggctttctctgagctttttcacagaggctctcaatgaaagcaacaaactgttaatgcagattttcgttaaccaaatttgagcctcacgatggtaattcaacacagaaaaaacaaaagctatagaaaagtaaaaatatgaacaccgtgttttttacgtggttttgcagt

SEQ ID NO: 343589 - DNA, 593 bp, Cannabis indica
tctgaatagcttcggggcccaagaattttgtttcactcacttcatcccagtgaataggtgatttgaattttcttccatataaaagctcataaggggccatcccaattgttgcctaatatctgttattgtaacagaactcgatcaggggaaggtactttacccatgatccttcaaagttaagcacacatgcccgtagcatgtcttctaagatttgaatagtcctctcggattgaccatccgtctgaggaataaatatagtgctaaactttaactgagtacccatagctcaatgcacactctcccagagtcttgaagttattcgaatctctatctgaaacaattgactttgggacaccatgaagacgaaaaatttctctattatataactcagcataataatcaatggagaagttcgttcaagcaggcaaaaagtgcgctgactttgtaaatctgtccattatgacacacacagagccgtactgtctcgtggttctaggcaaacctaccacaaagtccataacaatgtcttctcatttccactcaggaatactcagtgggtgcagcaaccctgcaggcctatgatgttcagcctt

SEQ ID NO: 343590 - DNA, 800 bp, Cannabis indica
tccacttccattatagtattaaatttttcaagataatctataggattagaggtacctttttatattttagggattcgaataatcgaaatcccttgggaagttgagcttgtcgcacttccgtagtgaaaggagaggtcccatgcagcttatatatgggctttctctgctgctcgagcattttcaaagcttgcaaaagcatgctttgatcgatccctccagccacaggagtcgagactgctgcgactgcaggagtcgcgactactgcggcgaggttcgctgggatagtgaccccagtagtcgctatcggtgcgctaggcgggttgtgtgagtatttacaccttgatcacccgcaaggggatcacggggtgtttcgtcgttatggggggcgcgagagcgcgctctgaaaactgcgttgaggtgatcacgtagatcacctcgatgtacttgatagtgtcctccctgctgcgtctctacagagccggaccttgtgtatctgcttggtgtacgaccatgcgaagatgaagaggcagattctgcgtcattgtctctcgatggtcgactgcgaggattgcgtcgctcaggatcttcatcagcctgcgttccttggttaggatatctcacggattggtctctcgaggttggctgattcaggtccagaccctcagggttggctcttcgttccctgcgaacacggttattacgacgtctagaattcgttacctgagggttgtctgtgcgagtagtaggggctcgaggggggcgtcgggcccggttttgtccatccacttaggcctgtagtg

SEQ ID NO: 343591 - DNA, 598 bp, Cannabis indica
tatatatatatatatacgtggattctcttgatgtacacgtgggcaaatattaatcgatatatatatatacgctcaattaatcgattaattttaacctttataaaaaaaactaatttaaaatttaaaatattggctgcaactgaatatttttgtaaaaaatatttcaaaatttaaaacaaaatttaaaaatataaatatatcatatatcatgatatttacgttacgctgtagaccttatcatgatatatcgcaatcaactatatatatatatattagtttatatatattgctacggtatctatctctctcatatcactcttttcttttttcatcaacctagcaatttctccatcaaccaaattaagcgataaaataacaccaaaatatcttactattattaacaccatttgatttggatgtagaaaaaatacttttagattgaggcggcaataaaaataactgatactctccagaattttattacatgtcatgtgacgcatgtcataaaaaaataaatttatacaatcgcgatgaaaaaattcatatgtgacaagccaacatgcgaccaagaaggatttcctacaccacggtatattac

SEQ ID NO: 343592 - DNA, 529 bp, Cannabis indica
ttgcagatcctctaaccaaaggattaagtgccatattgtttgattacatgttgattcatatgagcattttataatcttttgttcctttgggttagtgggagtttcttgttttatcttttgagattatatttatatgtagtttttcctgaagcaagacttgtagaaatattctcccgaagataacgatgctttcctcctcttaaagcaagacttacatgaatcttgtctcgaaagttgttcttcacgttcttcactttgtagtttaatttacacaaaagtaatcttaaaggcacaaaaactctattagagttagtcctacattgttagtgtgtggaaataaattgtgatatataagatgaatgagctactcctcccattgccaattgattttgagatggaaccccattcatcttatcctcaaattctaaaatagtatcagagccacttgtgatccgttgtgagcccaaattaccactggtccaaaaagccgtttatgatctgttgtgagccaaagtgtcgctggtccaaa

SEQ ID NO: 343593 - DNA, 1128 bp, Cannabis indica
agtttattcatgttagatcactcgtttatatacaaagcaaatgtcattttagttacacagaactgatcggttatagaaccattttacattgaatatcaacattaaattatcataaaatgtaaaagaataaatgaagaatagtttaaatccgtttcaataagtatatcaacgtacgcgacctctagggtgcgagttgcctgttcatattctcgcacaagctcgcaggttttgggtgcgttctatctttctaaggaggactaacgagcctcacgttaaggtgtttgtattctgactgggtcacataaatggacacctcatatgcgtcgacaacataggacatgcgagtccctatcgagttatcgaatacgctttgtcattcggactaattcattatgtaaagaagagatctttacttggtcgcaggagaaggctatttagtcatcgcatatatctcgggatatgcgcgacttgtattatcccttcttagtcctgcttattttatattacgcgaagcgtagtaatgcgactagactctttcatggtcacatcatctcgcgagtttagttcaggcgaggttaattctctaggagttccttcttgtagctcatcaatcctctagggatatgagtcgacgtgtcaattttatcggagtttggtctcgagtttttaagcgaaaaaaaatacgcaatataacaaaaatctaaataaaattaactatacgtgcacgtgacttcttcctagtatatatagaacatttttggatactaattttatttaactatagatatcaattttagaaatagtaaaccacatcaataggtattattagtttatatatgttatatattaaatgtgtctatacaacacaacgcttttttttcttcaatattgcaattcaagtttaaattcattgcacatatttaaaaaaatatatatctctattattattaaaaaaaaaaactaaaaatatatataatatttcaaaaaaataaagtgttataaaattaaaaatattaaggtaattaaattaacattatgattaataacaaatttagaatattattttgttttctttttataaataactagtaaatatctcgcgcttcgcggcggatatataaaatattt

SEQ ID NO: 343594 - DNA, 1198 bp, Cannabis indica
tagctgaagaatgactgctagaatcagaagttggagctccaggaatctctcttttgctgggagaatcactctaatcaactctgttctcattgctatacaggcatactggagtcaaatcatgattcttccaaagaaagtattgagatctattgaagccatctgtcggcctttctttggaaagggcaagctatgtttcaaggtgcagggtctgttgcttggcatttcatttgtcaacctaaggcaggtggaggtctagggatcatgaacttggaagcatggaacaaggctgcaataagtacatatgggctatttcaaataaacaagagagcttatggctcaaatgggtacatagtgtctatataaagaatcagacatggggggactactctccttccatacattccagttggtattggaagaagatggtcgcattgaaagatcaaatccgagacatggtagactttgatgcttttcagaagcaaaaatatagtgttgcagctggatacaaattgttctctccaccagtaactcgtctgtattggagtaaagaagcttggtcaaggcttaacattccaaaacatagtgtcatagcttggttggcaatgctcaacaggttaaagacacaagatagactgatgcaatttggccttcatgttcagggaacctgttgcttatgtgagctacaattagagacttgtcaacacttattctttgagtgttctgttgctgagaaatgcttgcaggatttgaagaattggctgaactggcatgcccaaaccagtagccttcagcaacttctcaagtggattgggaagtccaaattgtcaaagtttaagaagggagtactcacggctgctgttgtagggctggtgtataatatttggaggacccgaaatgaagttgtttggcaaaaagcttgagttaacccgactcgaattgttgaagaaacaaaatggaacataaaggctcggattgatagggtgatgcctaaaaaggtcaagactaacgatagagattggtttattgctttgtaaatcataacacatactttgattctagattgatacaattgtatacatagaattcggcccttttcatgagtgcgtatagtttgtaaaaagcttgtttgtgcaatacaactcattgatttatcaaaaaaaaaaatctaaataagatcaaattacttgaaatagaatat

SEQ ID NO: 343595 - DNA, 773 bp, Cannabis indica
tctaaaatttaaagtcaaagacttaaatttattccaaatgtatatgagtattcttctagcttggattaccactactaacctaactctaattattatttgcctaaagtaagcatgatacgaaccacaccaacagttgtgatgaaacccgacaccaaatatggcagactctaagaattctcgaaatttggatgtggaaccgcgacccaatgcttagttaagcatgaccttggtatgaaggaagacgccacaaacggtggtggaaatccgtttgataagtcaggttgaacgccacaaggaatactccttgataagttcgaatagttctctcaagaactcaagaagaaaacctctcaaaattttattccaaaatattctgatttttcaaagtgtttacaaggctttatatagccaacttacaaccaagaaaaaggaaactaaaagaaagacaactttccaaataaaacaaagacaaaataaaggaaacaaaattaaaaaaggaaagctgccaattgccttggaaaacgtgataagctcaacttgggtctaaattgagtccactttgatgagaaacacaaatttttgctctccttcagtgttgactgcggtctcctcttgttttaaaattctgttgactaagttgttgagttcttctttgaatctcttggcttgcgcccttgtcaccgggccaactggaactttacttgtatctttagccttagtgttctcatcaaagcatatataagtaggagatttctaagattgaggatttatat

SEQ ID NO: 343596 - DNA, 721 bp, Cannabis indica
aatggcaattattcattaactaggcaaaaacattaaacaacaatcatcatcctccctaaatgggaaatttagttcataattaaatccatgaccattcctataacaatattcagcataaagaaattaaaaaggaatagagaaagaaactgttggtggaatgactctggatcttcactttgattttctctgctcttcttgccgctttctactgtgttttaggtctccaaatcgcttcccctgatttccaatcgcagttttctatttatatctgatttttagggttcgtcggacaaaaataaccccgatcgtacggactctcgctgcgaccacagtattcctcgccgcggccagatgaacctctaaaaaccactctctgtagtggaccttatggctgcggcgagggtgtatctcgtcgcggcgactggagcattaagaattgtgcattctgccttcgagttatagccgcgaccacaatgatctagccacggctagaagtgcgtcaagcttaaaattggcgtttttcttggctccgcttgtcttttactgcacttttacatcccgaggcctccattgctccgaagaacctgaaaacatagaaaacacgcataattctgtcctaaaacaacgtaaagcgaacataaagttgatccaaaacataagctaaaaatagcctaacaaattcccccaaacttaatctttactcgccctcgagtaaagctaa

SEQ ID NO: 343597 - DNA, 562 bp, Cannabis indica
tcatcgagaaactcatcagtgatattagcataaaattccttcacaattagatccacatagccatcaaaaccaatcaaagtatccacccattgtctttctttcaacatgttataaaccccaaatggcttatgagcaatgacattgaaatttttctcaacagtaaaattcctattctcataaaatttcatgtctctagcatgaccattataacaaaaataatgagaatgaggcttgaagttttcaagagtaataccagagggcctctttcttttgtgaggaagaataggacttggagagacaatgggtctttttcctttgtccttctttggaattgcagtagggacagcaacaggttttgtactgacaagatcagcttcaggttcttcacttccagacccataatcatcaccagagggttgttctttggacacaaactcttcacttgaatcggacaagccctctgattcgtgatcctcctcaattccttctttaggttcagaatctgaagatgagacagaagggggatactctttgagatttttggcctttgaagatgaaggca

SEQ ID NO: 343598 - DNA, 930 bp, Cannabis indica
ttctattaagcacgtaattaaattaattcatcattttacccttctcgggtcataatttccaaaatgcccctggctcacaaacagggtcttaacatattaaaattcatgtaatttcacatatattgaactatctaataatataattcctcaattaaacataattatctatttaggggtttgctaatctatttcttaattctgggtattacatatggagctattatagatcaagaaactcaagtgagtttcatcttaaatagtttgactccaacttttttgctctttacttcaaattatgtcatgaataagttgacttttgacttccacaagttaatcaacaacctttagacatttgaaaatttaatttgaggtccacagaaaggaggaaacaaagctcctagttctggtacagctactaatggtacggccaagcctgaggcaaacattgcctcttcttcaaaacccagaaagatgaacaaatggaaaaatatcaagaagtctcttaaagttgttaacacaactaacaagaataagaaaggatgataatccaaaaccaaggaaaaaggaaagtgcttctattacaatgaaaaagggccactagaaaccccaatgtcttaagtttttgtcaaaaaaacaaggtatctctaactttgatataagttcatgtattttagagaattattattcctttcggttattaattctggatctactaaccatatttattttcttcttatttcagctccaactgcttaaacttggattgctatcctagcgagttgagtcggatggttggacagaatggtggagattgtccaagttgaagatgaagctcgtcttttctttaaattttataattaattgttttagttattgaacaatttagttttaattcttagtttgggattttattccctatttcatattatt

SEQ ID NO: 343599 - DNA, 675 bp, Cannabis indica
tttaatatgaatgatcattcaccttttttcatatttattgtaaaacccactgtgtatttccaaacagctttgaatctttttaattaatgcatcaaaattagtattttgtaaaataaggcaaaatattggagcgttacagttgaaatcaaaagatgaactttcagtaatgtgagggtagaacaggctaaaccatcatgaattgtcttttcgagtcataaatcaaagtaacaaccaccataggaaaaatttacttcttaaaaaggaattgtattgaccgaaagatccctctaagtagctattggaattggcaaccaggggcggattcacatagaggccaggtggggcagtcgcccaccctgaaaaaaaaaatcagtaaaaaaatatatatgcattttagttagttacaacatatatttataaataaaagtgatatatatacacataaaataagttttggtataatggtaaagtcatttcatgcatctaaaggaggtcatgggttctaatcccaatacaagcatgtttactttggtattttattttactttttgaacctctaccaataatacttatatttaatgtcttaattatttaaccaaatatattttattgttactttttttttttactttatactatatttaatacaaaatataaatttgcattaatttttaa

SEQ ID NO: 343600 - DNA, 557 bp, Cannabis indica
aaaaaaaacaaaaaaagttaaattagattgagtattagatcactttttacttaataaccgaagttataagtgttagtaaattttattttcaatttttttatttaattaaagctgaatattatttttaattttattattattatatatatttactatgttattcaactgaatactcattcgttttcacattttcttacaaagcttgaagctcttgcctgaaatataaattttaatatattacctttgttagagtcacaaatgaaacatcaagaacattaaagcaacaaatattaacggctaaaatattgtaaaaaaaatgaagtatctatcaaactataagggtttttctttctttctaaattccttctatactctgatcactgagtaactaactctaaatttaaggctaaagaagcaaatttacagtgagctataaaaagacaacaacatttcacttatatgatatgaatgagagctactgctattggtaactagctatataaatgcaactccatacttgtcatcttctaaaagttaggcttggctttgtttcacag

SEQ ID NO: 343601 - DNA, 524 bp, Cannabis indica
gcataaaacccaacagaatatatgttgagctatgcatgttatccattaattcaaaaattggaaaaaacttagaaaaaattagaaaattcaagctcttttccctctctctctctctcggcttggtgtggattgctagggctgggagttcttcttaatttttcaagcattttcaaccaatctaggtgtagttcaagttgttggtaaggtccttaaacttgctcttggtattttcttggaattttgatgaaatgatgatgaattgcatgcttaacttgaagtgttgttgctgctgtgtttgtgagatgatttcagaggtttaatcttgtttaattgagtagaatagagctgcttgtgatgcatgttagttatgttgtttaaagttgtgaattttagctcaaatctatggtttttcaaagtgaaaatgtgaaattggttgctgtgtttgttgtttaagtttgagaatgatttctgcagtttttatatgcatgattatgtagtttaattctagttttgatgcttgtagg

SEQ ID NO: 343602 - DNA, 718 bp, Cannabis indica
acagatgacttgagtcaaaaacactaagtcctcactcgcggcgatagcccacctcttcagcctcaactaatttaaggaggtttcgctctgctcataaagatttgtaactgttgaccgaggttttcggcaaccaatataataataatagtttagaaagctataaggaattaagagagagatttttacgtggttggggcgttaatgagccttagtccacgagtttgtgtatttatgatagtatttattacagagaatgttcttggtagatttttcctcttctagttcttatgaaacccagaattctcgacccctctttaatgagtttgggggtatttatagtatttatgtggggtgatccttagaattaaggtacatgtatttttgtaactatcagtaaagccacacattcccaatgaatatatcataggtaatgcatggtctaatccctaggctttgtagggattttatggatgtagtcctttatcctttttgagtgatgtgattcctcatagagtagccttcactagactttattgatcatagcctagtaggtgggggttgtgccgtcagactttaatacatatggcagttccaatacgcctcctcccatgcggcattaaatgcgagatgactgttcagattgaatctgacacctcccggagaggctttgttatagccctgctctccgggagcatgtgaggcttacatgccttctccg

SEQ ID NO: 343603 - DNA, 471 bp, Cannabis indica
tattgttacgttttttttttttttttgagaaaagaaaaagtcatctattagtgataaataattttagtatctttgaattattattttctaattttgattctttttattttcttaacttaataattatataaagtagtttatgcctttttcttataacaatatatatagtttaaacttttaacatataaaattaattattttttgctaggtgaaatgtcggtgatttgaaagctctttaactatatgtggttttttcaaaaaaaaaataaataaatcaattaaatgaactaatttatacatttttcttgtataatttgtacatatagtttcaacttcaatatctaaaaattagtgatgagtgtgatacttcaaaattattattttgtaatgttgattctttttattttattgtttattttattgtttttttattttggtttaaaaaaatattctaataataatattaataat

SEQ ID NO: 343604 - DNA, 678 bp, Cannabis indica
acgatttttatcttttatttttataaatttaaaatagaaaaagataaaaatatcgaaagaataagataaaaaaaagaataaaaagatcacataaaaataactgtatcaaaatgggggttatgtctaggcatggaaaccttatgccacgacacgtgtcatggaagcctggagacgtgagaaatttcacacacgagctgcgacataggaagtgcatgtcgcagcccgcccatctaattcaaggcaaattaggaattttcagcgtggcattatcttttctatcttttttatcccttattggctataaaagaaatgaagttcagttatttttggaagcaattcagaagaaaattagaagcactcaagggagtacgaatttaagagatcaaattccatactagaggtgtttttaagagagttttcaacattcttttcttctctattctaaaattaatgactgagaatattgagaagttggcaatgattctttggagtgtttggggggcccgtaatgatctagtctggaatgataagaatggaggagcttcgtcttcttctagccagcttcgtgctggtgttgagcactggattaaaccatctttgggagagttaaaggttaattgtgatgctgctctgttttctggagaaaggagtcatggtttgggttggattgccagggat

SEQ ID NO: 343605 - DNA, 583 bp, Cannabis indica
aatgctatatatgtccacttacccattctcttcaccccaccattcccatgattacaattaacatcttctctcttttttttctttccaaagatttaatctttttcagtttgagaagatatttttctacagtttcaagaaaaaatggccaagaccaaaaatgctcaaccatccaagaggcctgctcaaggttctacatttgcctctccaccctcgccacctgtgccacctgttccagtgaccggagctcctggatgatcatgtgcttcgacgaaatctggcaagaagttgaaatcccaagctcaaaaattgacctacaatctcagttctcctccgatcattacttctctgattgttaccccaactcttgggtttggtgatcatgatgaatcatgttcatccgatcactcattgttgaagtcttcttcttcgaatggtgctccaaatgtcgagaaagctattgcgcctttgcctatggtgagttcttgtactaggtccaaggtgtccacaccaaagaaactagagttggttcagcccaaaggagtctccaaaggaaagaaagtggtgacttcatcctcaaagggaa

SEQ ID NO: 343606 - DNA, 741 bp, Cannabis indica
aattattggattatcaacttatcatattataataataaaaaatacattaattttattattcaattgtcacatattaatattaatattaattaaatgatatttaggctagtctttttattagtcattactattggggttacttttctttttattagttttcaactaaaaagtttagaaaaattccaaattagagaaattgtaagaatgaaaggagaagatgtcacctcacctcttcaaaagcttcctttatatatagatactagtaaacataaccgcgctttgcgcggttttgtaataaaataaatatagttttagagttttattttataaaagttatcggtgatcatctttattttgttaaatgttaattttaagttctttgttttacaaaataaacatgataacactttgagattgattttggtcaaataattttaattatggtcctaaaacttcctttcttagcctctctagctaactattgtgatccaaattttaatctgaatatatttatattgtataccattttataaaatatataggattaagttgtggttcagtagtggtcataggcatagaggaattcaagtttgaatccttctctctcaatgtcaggaaaattaaatttatcatttcacactataaaagggcatccacttttattagaatttaaaagtgcatattaatcatatgacatcaaaagaaaatctataaggtccaaaagaaaaaataataataaaa

SEQ ID NO: 343607 - DNA, 1791 bp, Cannabis indica
tatttgtattgtgtaattgaaatttaatttagttttctactgtgggtaatatgatacgtactgaagttttgatcacattttattatattttgaatgttgtttcctaaaagtttgtctgcatttgtttgctaatcaacttgcttcacatgggttatttgatgtgcatgttaacatatcaatttttttttcacagtttgacccgattgagtgaagtttggaaatcgctgcaaggttaatatctgataaccaaaatgaactgcattcaaaagtgattgaagattggaggactatacaaggcatctcatttgcatcatcttcaacccctttgcgtagtccgtccaagtctccatgtgatcctcagtttagaacgctgaagtttcgtcaagcaaacatgtttcctccctcaagagcctcccttgggtttcgatctagcaagaataagatttcatatggtgaatagtacttagaagacctatattattattagtttatgcagtttgccttttggaaaatttgtcaccatatggtgattctcatttagacttgtgttattgttagtttatgtagtgtgccttttggaacttttggtgattgccatttagtttgtgttattgttagtttatgtagtttggcttttgaaaaattcgtcaccataccactatagggtgcttatgatttagacttgtgtttttcttagtttatgtagtgagccttttagaacatttgtcaccatactactatatggtgattataatttagacttgggtgattgttagttaatgtactgggtcttttggaacaacttaattttgtagttatagtaatgatattatttttgtacttgactccaaatttaccatatcgtggatgatattaacaaaacataatatgaccttttgatgtgtaccataatattagaaaactaagatttcaaatcaacaacataattttagttagaatccataacaaaagattacttaaaaatattttaacaaaataaagttaaatcttagttttaacttggtacccattgctcgttgtaagcttttcaaaaatttggatgtaaactttggatttcaatctgaaactgtcgattttggggcaccatgaagccgaactatctccttaatgtataaatcagcatacggatccactgtatacgttgtccgcagtggtaaaaaaatgtggtgacttcgtatatcgatccacaatcacccaaatagagtcatagtaccccaccgttcttggcaatcccacaacaaaatccatggtgatgtcttcccacttccactcgggaatcttcaagggctgaagcaaaattgccggtctctgatgctctgtcttgatttgctaacaagttaagcatttcgacacgtactcaacaatatctctcttcataccttgcaaccaatacacgaccttcacatcaagatacattttagttgtccctggatgtaaagagtacagtgtagtattagactcatcaagaatctcctatctgatatttttatcggccggtacacaaatcctgttcttgcatcgtaataacccatcagatgaaagtgaaaagtcttttgtcgatctggcttctaatttctccttgttcccctgtaactataattctttccagtaaattagactgcagggtaatgttagcaagttttctgaccacaaactcaattcccgctctagtcatatctttagccaattttgctaaaatcttctttaattcataaacttgccctgggccttttcgacttagagcattcgctaccacatttgcttttccag

SEQ ID NO: 343608 - DNA, 1318 bp, Cannabis indica
aaccttcttgttgaatgccccagctacctgggcttggtaaatttcgagcttttgttgaatagcaagccgcttttcatctaatgcttcaagctcggctagacggacttgcacattttcatctgggtttgttagttgagtagcaattcttaatgaaggtatttgtacctccaaaggtaacactgcctcagacccaaacaccaagttataaggtgtgcaaccagtcgcagtcctcacagtggttctataagcccacaaagcttctaggaggcgttcatgccaatccctcttattctttgttgctgtcttcttcatgattttgcataacactttgttaaatgcttctgcttgaccatttgaagacgggttgtaactagccgagaaactgtgcttgaatttgtacttgttcatcaacttgaccattgccttacatttgaaataaagggcattgtcggagataatttttgaaggaaccccgtatcgataaattacgtgggtccttataaaatcagcgacatcttctgcccgtacttcttttagtggtacggcttcggcccatttagagaagtaatctgtgatggccaaaatatatttatgggctttggaagagggtggcgtaaaaggaccaatgacgtccattccccatgtttcgaaaggccatgacagtatagaaggatggagtggttgagggggttggtggatgaaatctccatgtaattggcatgacttacaacatttagcaaaattaattgcatcttgaaccatagtaggccaatagtaacccaaccgctttaattgagccgacaattttgggccggcttgatgggcgccacatgtaccggcatgagtctcttgaagtgcatgtgccgcttcttctatcgagaggcatctcaataatatcccatcgaatgaacgcttgtacaatgtgtcattaaagaccacaaatcaaggcactcttcttcttacatccactcttttcttcaagtcttctggcaagactcctttttggatgtagtctttgattggctgacgccagtcattttcatttgcactatccaggaaagttatcaagttgactgtattttcttcttcaactctttccgtagattgggataatacatggcgttcccctatggtaatttggatatccctttcttcaggaagtgttagtgatgcagctaaattagccaatgcatcagctttaccattttttgatctggggatgtgatttagagttatatcttgaaattggtcaagcaaatatttagcgttttcatgataagggactaaattctcatgcttgaccgcaaattcaccactc

SEQ ID NO: 343609 - DNA, 726 bp, Cannabis indica
atattctcccgagtttcattaagctcggtataaatagtgtataccaacacatacttatcatgcttcttctgtttctttttatccttcgacggttccttaactccgtcctttggttcaaaccagaagcccccgagttatcaattcttgtggaaacagttcttgttgaaacattgctgggtttgcctcctgagcttgttttcaacagattcatttcctttcacgcttcttctttccaaatgaacaactgagcccttttgttgaactcagtgatgcttctcagtggacgatcttgtaagtcatcccataactcgccccctacagttaatggatcagtagaaatccccgcttgaagggctgtaagttgcgtgctgtcatccaaattccaaaccctagccgcaggcgttctaaaatgacttaagtctaccttaaatggctcgctgggctgctggtcgcctatccctagcagcctagaattgtttcttgaaatctctagacagctgctcccaggaagttattgaatgatgagtaaacttgttaaactagctactcgctgccccaacaagcgaggtaaggaacaaaatgcatcgtaaatttttcgtcacattactcggttgcataattgtgttaaagtaattcaaatacgagaccaggtcagtggttttcgtcatatgacgagacatgcgggtttttgaatctcgaaggaaaagggtgttgggttttgtgccc

SEQ ID NO: 343610 - DNA, 740 bp, Cannabis indica
gtgttatttggcttattttagaggtaatggaagttaggttttgtctggttgcaggaattagggttaattcttagagtttcggtttaaggtatttattggtttttgttgtcatgacataaggctcgaggtcgtgaagctttgattccacttaggtcagcatgaacgctaaattctggactgaggtaagaaaagtattacgcattatttatggttaacaattatagttgtggtagtctcgattatgatcgagatcttagtatgtattattgtctctcgattatgatcgagagaaataataggaaacaattatcaacgttgtgactcgactatgatcgagggaaaataataggaaatgattatcattgttgtgactcgattatgattgaggaaagtaatttgaaacgattattatcgtactgagtcaattatgatcgagtaaaagaaacggtcattactgttatgagtaattactcttgaaactgcggataggtttcttacttatcgttcgctgtatcggttaaaaatagtgacatacgtatctcgtggttaacgagtggtaatggtactttatgaagtaacgagattgtgtggttatgatgttgtgaaatggatcaagtgtgttattatgtgatgagttgtaattgaataaatttttgttatagtatgatgaaatagatgttatattgcttatgaaattagtcacttttcttgcaatcacagtgacctagggatgtaagaat

SEQ ID NO: 343611 - DNA, 748 bp, Cannabis indica
accttccagacctgttctacacaacccctagaacatatctaaagcaacaataccgagcttcacacacagaaactcatttcaccattaaaagtcaaagattgagttctaaactcaaaacttgactaagcaacctatcatgcattaaaccttgattaaaatcacatatccaagcatataaaaactgcagaaatcaaaccctaactcatgcaacaactacagccactaaaaatccaatttctctttgaaaaccttaagcttttacactaaaaactccacaactctaacaacctaaccatcaagcattacaagcagcttaataacatcaattaatcaagcttaaacctctgcaaacaactataaaatcacagcaacaataacaacttaaactatgcatgcaaacatcatcatttcatcaaaattcttcaagaaactaaaagggagagctacaaggatcttaccaacaacttgaggtccaaatctatgctaaaatcagcttgaaatccaagagaaattcccccccaaacccagctgctcagaaccgaaaaggagagaaagaaagagagcctttgaataccaattttctaacttttgaaatttttgactaaatgaaataaatgccacttaacttattttacttcagccaacatatactctaataaaccacataattccaccaattaaaatccactaaaagacaaactaaccatggggcaaaatgaccattttgcccctccacactaaactaaca

SEQ ID NO: 343612 - DNA, 538 bp, Cannabis indica
ttttgtgtttatgggaacactagtgttgtatgggacactgtaagccgaatggttcagagagcataagccgatgggagatagcggattgggatgacttcaagtctgaagagtaagacttggtgttatcaagtttgttaaaagttagtgagtcatcggagaatgaaaggttgattttggaaaatggacttgtgacagttttgagagccgacacaagcaggagccacaaagcaaatttgtggttttgggtgattgatagatcattgaccacatgaaagtagctcagaggagcgagtatgcagttgttcaaaggggccttttgcatgaagccatgtgtgtgcggtaggagggccaatgttgagaacttcgcgaagagattttgtacaagagtgcacttggtgctgcattgggtgcagttggcttgcaagcctcacccaggtgggacacacaattttatcctgccatcagagtgtcttgctcaattgtcatcagaaggatggtgcgccatagagttggcgtgtgaaatttccgaagggacttg

SEQ ID NO: 343613 - DNA, 739 bp, Cannabis indica
atggacgtcaaaccttttgatccagttcatgatgtatttgacattacaatattttgttcggagacaaatgtatggagtgaaaaaaattctcaccttcctcgaacagtgaaaccctcatccctcgcactaactcatggatacattcagcagtttcaaggcatgtcctcgaccaagttgggaagtgtacattggatgagaggaataagagtgttaggtgtcaacccatattggaagcataataggcctgggatttgcttctttattaagttaccagaagactttatacgtaatgggctgctactcgatgaacatttttacgaggaaagagctcgcttaggtgtggtacaaggccagttaagacttttagaattgtgcaaaagtccttaaatccaacaatctcaatagttcagggggcatttttaacgatcttaaaagttcaaggggcatgatttggtatatgtcaaagttcagggggcaaaaatcctaactagccttctaataatagttattacgatagttttcgtctgatcatgtgaccaaaggctctattccttttagatcagtttggcacagttgtgttatgggaaaaaacaattatagctgtgctgtgagaaaaaacagctgctgcagaactgtgaaaaaagtaacttttaactttttctaaaactatgccaaactgacccttaatccaaattaattaagcacaagtactaaaaatgagaatataaaagcatgtttg

SEQ ID NO: 343614 - DNA, 1296 bp, Cannabis indica
attttcacatttagtatatcatatatttatgtagataaatgtgtaatatcttttctacaattacaaagcctactaaaacttatcttaataatcataaaagtaattttaaaattaaattttgcagaaacatcgtttgtttctccaaaaaagtacgaagagattattaatcattgaatggagaatccaattgtatgtagatccaaaaccacggatgagcccaaagtacaatcatttcactttttaaactgatgagctgatggatgattaagataacgtttcactatgcttacttttatttttcataaggtttttttatattgaaactttaactaatagtatttttcccctattttaagatgacatttttcatttatttttgttacataatatttcttttaaatttttcaaaatgcatatattgatccttttaattttctcgaaacaaaaaataaatgttaaaattatatgttgttatgacttattataaattatttcatcacattaaggataattactatatgagtataaacttaaacttacattaataataatttgtatatcatagatttatatacacaattatggcattcttaacaactttacttttataaaacaaatcgtttaaaaaataatttaaaattagttaccaaattcttgaaaaaaaccactagaacttaaataaaactaatatttatgtggctcgcccacgtaactttcatctagtataatatatatagtgtatatatattctatattatgtgttgtaacatttatttaatctctttgttggtccttgtattatattgcaatagagttgtaatatctttattatcttctattgttataaaatgtctaacaatcatatgtgatcatgagtttatatcatattattatatatatatagtgatatagaatatgatatttaaatttataacatgtttatatgtgtatatatatgagatatataatatataacatataaatattagttatgtgtattgtatatataatgagatataatataatatacatatatattatgagattaaacatgtagaaataattattttctatgttatttttatgagacatgcatatatagtatatattatatatcatgcatgtatattaaagtgtatataaatgttatacatgtgtgggtatgtaacatatataattgtgtaataaatatgtatattatgtgtatatgatatatgatatatatatgtatatatgttacatgtatatgagatatgtaacatatgaatttaatattgatattatgtgtatgttaca

SEQ ID NO: 343615 - DNA, 521 bp, Cannabis indica
attaaaacttaaagggaaccaaccttcaatctgttaagaaagtctagattccataattgtagaacatgttccaagctatccatataattagattcccaaaacagaagttttaagaatcatcttctctgagaaaatttaacaagtgaatcaaaaaaactaataatatgaacgggagttcatgattactcaagattcaagtcaatctaatatttgatcatctttatgatttgaattaggtcattatagtaaaggacatgtttgataaagacaacttagttacatatcggtccatgtcatatataatctctattatatacaacacctacacttagatgtcatactacatcagcaatccgaatcaatattgcttgcatcaattaacgggcatcagttcactgcactaaccgttgattaaagattctaaaactttaatatgtagctgactattttattctttgctaagtgaccttaattcttgttggaattttattttaccaagatcttagatctactcacaagta

SEQ ID NO: 343616 - DNA, 661 bp, Cannabis indica
aaatgacttgtattacaacaaatagtttctcatttctcatcaatggagaagttacgggccatttaatttcatcaagaggcttaagacaaggctgccccctttctccatatttgttcttgatctgttctgaaagactatcgagacttcttctacatgaagaaaatgtgggacagttggaaggctttaaacttaccagacgggctccgccaatatctcacctgctttttgctgacgatagccttcttttctgtcaagcaaatgagagtccgtgtcttgctatcaaaagagttttggatacttatcatcgtgcttcgggaaaagttctcaattcagacaattcggtgatgtcattctcccctaacacgagcttagctgctcaaatattcttccatagacaactttcgtgcctattagtgaatgccatgaaaaatatcttggcctcccatcatactccggaagagacaaaaagaagctctttagcaatatcaaggaaaaaatttggaaacttatgcatacatggagtgagaaaatcttctcagcggggggctagtaagttcttctcaaagctgtggtacaatcaatccctacatatgcaatgagttactttcgccttcccaactacttttgtaagcaactagaatcaatgatggccaatttttgg

SEQ ID NO: 343617 - DNA, 931 bp, Cannabis indica
actcaagaaatggatgcaagttaaaatgattggagatggataagattcaagttgacaataagatggaaatttctcaaacataagtgaacaaaattgacgaggaattattggaggataatgaaggaagtgatggaaattggatttaattaacgaaagaatgaaagtaagaaatagaattaggaacgacaaagaagcatctacctatgaataacccaccatgagcttaccttggagttaagaacacttaacttagggtaatctcaagatggggaattcttttggagagtcatctcagaaagtgtacgagtgaggacaaagtacgctagatagatttatataaggatgcagaatcaatagtcgttccagagattactaagaggaaggaatgtgttagtaaatagactaaatatctatcgaagacaaatgtgtaacttgttataaagttaacttactagatcagtttaggaggtcccgtaggaggaactgaaagatgcaattatgaactatgtactgtgggatcttatggtttcgaccgagtaataatagttggacataccgaatgaatatgaaatctatcaatgtagacaatttatacgataaatgagaatatggaattcatacaaaggaattgtctaatcttgtgaaatcccaaagttgatatctttggctatgatgttaagaattaattaaggttattgagtaccatggagatcagagtaaaaatagtataatgttttattcttgaaaggtagctaatattggaggatcaatggaatcttagaaatatgttgtgagtatatttgataatggttagattatcttagaataatctttttccctgatgaagtgtttatctaaaagttatgattatatgtaccattggttatgtacttaatgttgggttttacgccctaaataaactcatttcaat

SEQ ID NO: 343618 - DNA, 600 bp, Cannabis indica
ttcattggtaaaattcacaaataaggcatagtttttatttagaatcctaattgattaaataaatcaattgattgagactacaaaacaatattatcccaattcgtacggggatcatgagcctatgtatccaagctcccaataagtagttttagaatttattaagtaaattatctatcttattaattctcctgactctactatagatttggaattagactcctgattacatagaacgctctaaacaccaagaatagatatgctatgaataatctgttatttcaatccaaataatcaaagatcctctatagatgatttacatcgagtaagaataaatttaccgttttacctctcaatgtattttatccttaaaacacttaacttcttataaatgatattttaataaattaatataattactaaaataagagctcttccatttatgtctgttaagccaagctctaagaaaattattgtttcacttctaaatagttatagaagctatagattctatatctatgattagcgctcccacaaaattacaccaccatgttctcaagatgtaagtattgggtcaaattatttggttagctttaacgaaca

SEQ ID NO: 343619 - DNA, 588 bp, Cannabis indica
cacatcccttccatatttgattgttgctttaacttcttgatatgacattggtaatgatttgagcaatatgattgctcgactttcttcatctaccttacgattaatgttagctaaaccaataattatttcattaaatttatcaatattatcatctaaggatagagaaaagttcattctatacccgtataatctttcaagaagattaatcttgctcaatattgatggtgccattttcttgaattagctttcttctaactccattggacaggtacatgatgatggtgtagtatgccatctcctccatctctacaatttcctctgcttcttctcagccagcaatttttcatctccaagtacctttgccaccttttggcacacaagtataccgttcaaactctctcgccattgtgcgaaatcagttgatccatcgaacttttctagttcaaacctacccatcgacatcctccttcaatctgtgttcttgtagaattccttgatgaattcttgatgagttctttgtgcggaagcaattgatctttgaatttcccttgatgatcaaagaactaagctttgatttgtaggaaattt

SEQ ID NO: 343620 - DNA, 1148 bp, Cannabis indica
caattaagggccaggccttagcaaactttctagtagaatgcacatgcaaggaagaaagcatatcgaaaaacaaccccgagccagtacaaatacctcagccaagtaatagtgaagacaagcagacttgcaaactacatgtggacgggttggctacagatgaactatccggtgcaggaattgcccttgtcacacctgggggcaacaccttcaagctggagtcaagtttggatttaaagcatccaataatgaggccaaatatgaagctctgatcgctagtctaaaactagcctgggagatgaaggtcgaacatattgaaatctacagtgattcacagcttgtggtaaatcacgtatttagagaatagaagcctcgggagaaaagatgatagcatatttgagcaaaatacacgatttgttcgcacagttcaaaagttgtgctctcaggaaaattccaagggaagaaaacacgactgctgacgcattagctcgacttgcgagtagtaatgtaagtgatagtgcaaatctggttcctatttggtttctcaaagaacctagcatcacaggcacagaagagatcgaaatggttgatacatccccaaattggatgacgccaattgcaacctacctcaacactaggcaactcctagataatcaaaatgaagctcgaaaaattagaaggaaggctgcacgatatatcatagtagagggaattatgtacagaagaggattctccgtgccattgctcagatgtgttacccaagaagaagttgcgtgacttttgtctgaagtgcatgatggattttgtggaaaccacgctgccgcgcagagtgtatctaagaaaattctaagccaaggttaattttttgcaaacaatgattgaagattccaaggcctaccgtaaaaaatgtgataaaggctagagattttcaaagatacctcaagcaccgcccaactagttaactcagatgcaaagtccttggcctttcgtcatttggggtgttgacctgatcggacaattacccaagggcaaaggtgccgtgcagtatgcagtggtcgcagttgattactttaccaagtggacagaagtagaaccgctactgaccattacatccaaaaaaaagtgcaagacttcattgtgaagaacataat

SEQ ID NO: 343621 - DNA, 683 bp, Cannabis indica
gcgagaagatgcgaccgagacaaagcctagtcgcataccatgccccgcatagtcaaagaataaccaggaccaagagaagttaatactatcgcgcatatactgattatatgcaatgatcaaatatatatttcctgcaatgagtaaagatcatctctttacataggtttggttcgaatgactaatgtgtttgacaactcgtcagagactcgcatgtctcacgttgtcaacgcatagaatgtctgactatgcgatcaaaggtgaatgcatacattcaacaacgtaggcccaaaggcccatcctgtgagtacaacaccatagagctcacgagctcgtgtgttggaatatgaatagacgagttgcggattatcaagttgcatacattgttgcagccaaatcaagaacggacgaaatttttcttgatttattctttaaatgtttattttgatttaatacgttcatttattgtaaaaacggtctaaacttaccagttatataattttaaaggatacttgctctttatataaaagggtgatccaaatcaaataaattaagctaaattattaccaaaaatagactaagcaaatcaaactctaactgaaccactataattctcttgtcttcttttaatttttacttttattttttttgcctagtaacttatattttgagtactcactatttta

SEQ ID NO: 343622 - DNA, 601 bp, Cannabis indica
gcgttcaacgggcaccacccccactttctctacctcgctatctgatgctaacttagccaaacagtttgcgtgggtattcttttctctggggattctttccactttataatccgtgaactcatggagtagctcccggacaatttctacataagcagccatcttttctcaacacgtttgatattctcccgagacttggtttaccaccaattgtgaatcgctaaagacttctactctcgtggctccaacggtttttgctaatttcagccctgtaatcatggcttcatattcagcttcactgttggaagccgagaattcgaaacgtagagctgcctggagtcgaagtccattcggagatatcatagctatctcaaccccagatccgtttttgtttgcactccgtccacgaatactttccatgctggggtttgtggtactggtacgcttgcgctagcttctacttcgttacactctattatgaagtcagctagtgcttgtccttttatagaagtgtgcggtatgtagtgtatgttgaactggcttaactccatggcccatttgaggagtcttccagacgctttcggcttctgtaggacttgccgaa

SEQ ID NO: 343623 - DNA, 834 bp, Cannabis indica
aaattaacaaaagatgagaatggagtgaaagttgaaactactctttatcgtagtatgattggtagtctattgtatttgactgctagtcgtcctgatattagttatagtgtgggagtttgtgctagatatcaaagtaatcctatggaatctcatgtatctactgtaaaaaggattattcgatatgttaatagtactctcgattttggaatatggtattctaaagatactaattctaacttagcttgttttagtgatgcagattgggcaggcaatgctgatgatcgaaaaagtacaagtggaggttgtttctttctaggaaacaatttggtttcttggcacagtaagaaataaaattctatttccttgtccacggcgaggctgagtacattgctgctggtagttgttgtactcaactgttatggttgaaacaaatgttgattgactatggatttgaattgggtgttttaactattttttgtgataacactagtgccataaatatttccaaaaatcctgttcaacattctagaacaaaacacattgatataaggcatcactttatcagggaacttgttgaaaataaatctttgcaattagaatatgttgatactgagaaataattagctgatattttcaccaaggccctagactcaagtcgctttgactccctcagaaaatctttgggagtttgcattgtctaatctctcttgttcttgtttttgtacaatattgttgagttattctttgcttgcatctaatcttctttcattctaatttgacaaattatgtatatgattttggattataattagttaggatctcattcttatcata

SEQ ID NO: 343624 - DNA, 940 bp, Cannabis indica
attgggctgacccacatattgtacatatatatatatatcttttctctacaaactaaaacctaatcaatacaaagtcatttcagacttcattctccattttcgaacagagaggttttccctctcaaaccataataaacctgatagcagaaaggagttgggtgggatggaaaacttgggtaaagtaattacaagggccgccaattccccaagtggagagatctttcaagagcttttgtcctcgaacgaatgtcaagttttgtgcactgtagttgcacagaagagtgtttgtctttcgtggtgagtttggaaggagaagggtaggtccatgcccatggcagtggcagacaaggatccccgccatggaagaaagttcaactacagaagagcttccatcccattccaggtttctctataactatctttgtgaagtgtaactgccttttactctctttctctttacaactttcatatgaatcaatttttttttaataactatcatttttttttcttcttcaacaaagtatgggagcattactgttgggcacgtgtccagcacattttataagtgacgctccatgaattattagtgatattttttaaaattatctaagacctgatactaatggtaatatgataacaaaaaatgtactagacacaagtactacttattagcaatattccatattataatagcaactttttattttagaatttgaaattctatacataacaaaccctaatattatttctctaaacctaaatgttataccataggccatatatgactacttttcctttatccccataatacccctcacatttgaaccaaaccaaatctaaagcttgtctctctctctcgcccaaaagctcacctccaccacctccgacgaccaccgaggaccacccaaccccctctttcggacccagcccctctctctct

SEQ ID NO: 343625 - DNA, 475 bp, Cannabis indica
cagcatttttgtatggacggataagtgtgaatcaagttttaaggagctgaaggagaggttaattacagctccagtgttagctctgccttctgacatagagaagtttgtagtttactgtgatgcatccagacagggtcttgggtgcgttctgatgcaggccgatcgggttattgcttatgcctcccgtcagttgaaagattatgaacaccgatacccaattcatgacctagaacttgtcgcagtattgttagctttaaagatttggcggcattatctctatggagagaggtgtgaaatttacactaaccataaaagtctcaaatacttccttactcagaaagacttgaatataagacagaggcgttggttagagttagttaaggattacgattgtgagatcctttatcatcctgggaaagccaatgtagtggctgatgccctaagcagaaagggtcccgggcaagtagctagcatg

SEQ ID NO: 343626 - DNA, 1854 bp, Cannabis indica
tctcattgaactcaatgatgtttcttaccgaacatccttgaaaatcatcccacaactcgccctcggcggttaatggatcagtggagatccccgcctgaagggctataagttgcgtgctgtcatccaagtttctaaccctagcgacagccgtgctaaaacggcttaagtacgccttaagtgtttcgttaggctgctgctttatattggttagcgaggccgctttgggtcgcctatccctagcggcttgaaattgcttcttgaaatccctagacagctgctcccaggaaattattgaatgacgagtgaacttgttaaaccagctactcactgctccgacaagcgaggtggggagcaaaatacagcgtaaattgttcatcacgttactctctcgcattatcgtgttaaagttattcaaatgcgagatcggatctgtagttccgtcataggacgagacatgcgagtttttgaatcccgaaggaaaatgggtattcataatatctgggtgatatggctcaagctcctcgtcagagtcgtatccagatgatttgcctaattctcccatttgatatctcctgaacttgtcctccagctcgtttatctgcaattggattgaatcctctttctttggaccaagctattggcgaatgtcagatttctttcgattcaagtgctctcgcagatctggttgggagtaattgctggcagatctcgtcttactcatagactgcgtcctactcatagactatgtctttaagtggctcgcgaatttacttgttcctatactttcccaatcattagctcattgagtactttctcctcttcgagttgatcggctatgggttctagatcgcctcaaagtcacacttgcttcttcacgctctgttctttcctcccgagagcggtttgttgtattttcctcatcagggtatgtacgagtccttgctctatgggtttgggaagaacgttggtgattcctagcaggtgatctctgttctcctagcaaagttccaagatcctcctcattttcatgagggatttcttgttcatcagtctttggttgtctccattctggctattcatcctgattctcagggggtgtctcattttccctgggttgttcttcccgagccttttcctatctcttggttcgtgggccacgaggtctgtctcgtggtcttcttactccaggttcatgttgatttttagtgttcgtcccctgcaccgccctggccgaagctgcctctcgttctaacttagcatttcgacgttgcgcctcttccagactgcgtctcaggcggcggatttttgtttcataagttttttctcccacagactaggcaccttcacggttgagctcttcatccctcgtcccgagattctgaccattcccacgctgagttctcctcgagcgcattgtccacgtactaggactgttccttggcgcagattgcgccggggttcgttagcccgccgagatttctcccagcaggtgcgggcgggtccaaggagcaagctcctctcgcccgcccaagctgtttaaaacgtgttcacgggtcgttctgctgttgcaggtttcgacaatgatccttccgcaggttcacctacggaaaccttgttacgacttctccttcctctaaatgataaggttcagtggacttctcgctacgtcgcgggcagcgaaccgcccacgtcgcctcgatccgaacacttcaccggaccattcaatcggtaggagcgacgggcggtgtgtacaaagggcagggacgtagtcaacgcgagctgatgactcgcgcttactaggaattcctcgttgaagaccaacaattgcaatgatctatccccatcacgatgaaa

SEQ ID NO: 343627 - DNA, 595 bp, Cannabis indica
aacctagaagatctgaagagagctaggttactttataatctgtcattcacttcaagaataggatagcaattaggccttaatgatttgggtagacaacaacaggattctcctccctatcatctcatcttgcttaactttaactgtgttataagttttctaaattactttaattcttttaaatcataaatacctttgatttgccaaatagaattataggtatagtttagtagtaattaatccaattccttgtggttcgacctcacttgcgtgagctactacttgattgcgtatacttgcatagtaattaatatttttgcaacacccggacagactccccgtgatcacgccaaacacactgcattcactatcttaactgaagatatataaagtgtgtacatagcaactcagtcattaattccgtacaagaagcccgggcccatgaaaaaagataccaggaaaagggacatgacaattttttgtcggttccatggagactacggccacgacaccaacgaatgctacaacttgaagcgggaaatagaacttctgatcaagaagaacaaccctgtaacgccctaatgctaaggcacgctac

SEQ ID NO: 343628 - DNA, 711 bp, Cannabis indica
aaatggaactagaaccgaactaggactaggacaaggaccaggacctaaacccaaacccaaacccagatcaaaacccagacagagacctaaacccgaaccgagactaggactcaaaccaaaacctagaccgggacccgaacccacacaataaccgggacttggacccagaatcatgatagggacctgggaaacagaactaggactggaacctagtacctaacccagacccaaccttgaacctcggacccaactcgtaacccgacacaagaattggaaccaaactgtgacccgagatgggatctggatttgaacccagtgcttggacaaaacaagtagtcggtgttttaatttgggacccagccctggacccgaaccctgacaaggagtcgaacccacactcggaccagaactaagtcctaaacgcaaaagtggacccgaaccagtactttgtgacccaaaatttgaaccaaaactcgtagttgactgggactggaactaggactcggacttggaatcataactgaaagtggatctagatccgatccataacggtaatcggacgacgacccagactgcaaatcagacctagacccgaattgggagccggacccggatccctaactaaacctggactccggacccgaacccaaacctgaactcaaacccaaacatggaaacagactagggacacagaaccagggtcgggaccta

SEQ ID NO: 343629 - DNA, 535 bp, Cannabis indica
tttatttctgtagttgagtgtcaattatgaactgatgtatatggtgtaatttatttatattgcgtcagttcaaaactgatggtactatttaatatcatcagttacgaactgacataatagagtaactatttgcgtctcctgtatatacgtggattactcgaactaatgcaattgttatatatgtcatttaaaaaatgacgctaataagcctttttgtagtagtgtatacatatttatacacaaaaatatctacataaaaaattacacaaataaacaatttaaaaattagaggttactttgactaagtgagggggaggcgtgccattggaggcgacttgggaaaagggttgcaggaggtgcacgatggcaggcggtggaggattttttgggagattagatttttgagtttataataatagatttttaggggttttaagggtggtagaggcgggtaggaggagaacacctatttgctgactatgatgacgaaaaatgagagagagagagaggtaacgtaacgttaacgttaacgtta

SEQ ID NO: 343630 - DNA, 1228 bp, Cannabis indica
acctcggatatgctatattttttggtttgaacttgataacatggaagagtaagaagcagcagaccatctctcgatccagcatagaggctgaaaatcgaagtgtagcaactgtcactgcagagatcactttgctccactacctgttttctgagctgaacatccaacttcctcagtcacctgtcatctggtgtgacaatcttagcaccattatgctcactcagaaccctatgttgcatgctaggacgaagcacatagagttagacttgtattttgtgcgagagaaggtgttgaacaagcaggtgcaaatcaaacatgtagcagcatatgaccaacttgcagatgggctgaccaaggcaatttctagccaacggttctctactttcaggaacaaactcaaaattgaagacctttcaattctgagttcgaggggaggtgttaaggcagttagttgagtctgttagttgttagttctgttagcctttcagttggttgttacaactgatttctgttagttgttttccttgctgcttctacatgaatgttgtataaatatcttgtacattcatttcattcaatgagatactctttcttctccattgtctttctctctgttacctttctctctatctttctctgctcttccttcattcatgttcttgttcatggtgtgtaattgctcatggctcacaggtttaacaactaggttgttttaagtggtaatcttatcaactagcatgtctctcccggtcacaaaatttagaatttttactttatatgtgcttaatcttcttgtgatttttacgttctttactgtagctatcgtacatgttcattagcagtttattcatagttagaataatgccattaatatttatgtaaattttttaagtcaaactaattctttaacagcctcataaataagagcattgctattagatatcaatggtgcctagtactttctcgaatgtcgcattgcgattagctagcgatactccctaaaagttattatattaaactatatgagacatgatatttagttagaccaataatgatattaacacataagaggatgctagggaccactggtactaggggtgtacatcagtcggtttggtcgatttatattacattttattcaacccaatgtaaagatcgggttacaaaaatttaagtgcaacccgcccaattaaaaaaaaaaaagaaactagtaacccgcccaatgaaattg

SEQ ID NO: 343631 - DNA, 676 bp, Cannabis indica
ttaattatatttgcttataccaatttcatggaagcaatggattttgtattcaaaccataatttttgttgtattctcaattgtcgtttgtgtatctaggttctattctcaattgttgtgttgctggtttgtcttttggtgttatgttcactctctttttctcatcttcaaagtgataacttttgttttttggtttattgaattggatttttattggatagaatctcaacaaggtgtaataatatgtttaatatattatgatttaatatattgaaagacagagaaatatctttggtttatatcttctaagaaaatgggattgaattgaatgtattgttagtggttttgtttataataatgcaaatttagtggaggaaagaaatacccgtttgttttcatcttttgggaaaatgggatttacttgaaatgttaagctacaattcatggttttgtctgtattgcaattttgggagaatgggatttcattgaattgagaaagtgaagctcatgcatatgatttcaacttatattcatcaaaatctaatgaaacaccacactacgaaatcaagaatggtaacttaaaatcaaatgatcacctagtgagtgagtcttaccattagtaaggtaccgtacatatagcaaaagaagaaagttacaacgaatcttttcctttttttt

SEQ ID NO: 343632 - DNA, 549 bp, Cannabis indica
aattggtaattaattgaagtatataggctctcaagttacatttatggatatgctttgtttatgtatgtaatgaagtactagcagcactctactctcaccctattttatgtgccccttgctcgatgtatgaaatattattattattagaatattaactcttaagtctttattactcgtgtcaagtaatgagaggactgtaaattgtaaaagatagtgagaaagagagcattattctcatttctctatgatcatgttgaatccttttgcgaaaaatcataatctaatatatattaaagtactaaccttttttacctccatgctaagttatgggagagaaggagagtacttttataatacataaatatatatatgtatataagtacacatgcttaattatcatactggctttgtatagttcgtcaacgattctccgtcattagatatttcagttggccaaattaaggataatactggcttgttaaatgattttgctcctaacccttttttgctcttgaaaacacaattaaacatgatcgaataaatgaactg

SEQ ID NO: 343633 - DNA, 564 bp, Cannabis indica
ctaagtgcttaacttgtcagcaagtcaaaactgaacatcagaggccagcagggttgctgcagccattgtacattccagagtggaaatgggaagatattgctatggacttcgtggtaggtttgcccagaaccacaggacagagtgactctgtgagggtcatagtggataggttttcaaaggcagcgcacttattacctgttcagacgaacttctccattgaccagtatgctgagttttatgttagagaaattgttcgtcttcatgaagtcccaaagtccatttttcggatagagatctgaaatttacatcaacactctgggagagtctacatcaagctatgggtactaaattaaaatttagcacagcatctcatcctcagacggatggacaatccgagaggactatttagatcttagaagacatgctacgggcatgtgtgattgactttgaaggatcatgggaaagtaccttcccctgattgagttctcttaaagcatcagctattaggcatcaatcgggatggcctttatgttgggttttatgccctaaataaaactctgtttc

SEQ ID NO: 343634 - DNA, 969 bp, Cannabis indica
aaataaatattagatgaaaatacactttaaataatgagctttattattaggatattcgatctaccttattggttctacatagttcttgttttagcgagtaatcatccctaatggatgaacgttcattagcagtttaacgctgtagaatctcaaaagataagtattatttgtaagtattttattcctagtactgatcaccctaatggtggctgctaacagtaagactatacaaaagtatgaaataacggtggaagctcataagatagaatggccttgactctcgcctaaacaagacaacgttggaatctcatcttgatcgtataaaaggttgctagaatgtttgtcattttagatgagctgactactctattcaatggatggtatcttttactctcgactaaacgggacactggtgtcagtttgttggaaaccttggaaattatttaggattgtatgttttagtattttcacttgtcattcctacttcctaagtgctaataatttctgaatataattttgtgttaaaccttacttgacttctatttattgttatttgtagtatccaacatgactatgaacaatccgatggtgtcactggtgactgaaaacaagctcaatggagccaactttatcaaacggagagagaacattaatatttctctcattggtgaaaattccctgtttgtgttgactgaagaggctcctgagcaaccaggtgagaatgcgaccaaggcattgaaggaaagttcgagtgttggaagaatgctaacacaaagctcgatactttatgttgtccagcatggtggacaccttgaaaacaaggttttgccaatactctcacggctgcaaaaaatcatgaaccagttaactgaactgtttggatggcgtcaattcaagctcgctttgaggcgccaaagatttcatcaatgcacggataaaacctcatcagagcgtgcgtgatcaccttct

SEQ ID NO: 343635 - DNA, 759 bp, Cannabis indica
gagatactttttgatatttttttaattaagtaaataaactaaacatagaaattcatttttcttttattatttgtcatcggatcaaaatctaatggtttaatatttttaatattaatatttatagttaaatttatttagtacccatcaatggataatactcattaagaagtgttctatttatagttatattatagttgtcatgatgttatttttctagttgtttttggttattttatagttgatttaatttatagttgacctatagttgtcgtgagattgatttctcgttatttttagttttttttttattattattttttgttgagaaaagtatttttttttttaataattttaaaaacttttacaaacgtatttttgtaaataaaaattttaaattgtaaaattgtaaataaaacttaatatatatatatatataaatttatgattttttatatttttgtaaataaatatgactttttttcaaaaaggttattttataggattgaagaaaaagttaaaaaaataatggtaaccaaagggtaaccagtcactataaaggggtaattaggtaccttatgtttttttatatatatatatattttaactttttctaaattttcctataaagaattttttttaataaaaaaactatatttttgcaaacttatactttaaaaaccataaaaataaaacttccaaaaaaaacataaaaaaaaaaaaactaaatttttttcataaactctaaattaaaaaatttaa

SEQ ID NO: 343636 - DNA, 814 bp, Cannabis indica
ttgagcggggttatggattttgaccattttacccctagctttagaaaaaccttagtattgggttaaagggcattttagacatttggttaaatggtgggataggtggcagcctagttttgtgacacctagcactctaaatattcagcaaaggatagaaatcaatcctttatgcattttaggaaaaaagaaagaaaataaagaaaagtcaaaaaaatcaagaaactctcttttccttccctctctctcttcgaaaccagcagaagcaaagggattttgtggctggaattctgtgttttcatcaaggaattcaaagagaaatcaaaccaaggtaagctttagtcatatccctctttgtttcttgaaattcatggatgatggagtatgagatttttaggtttagtggctgttaggttttcatatgcttagggttcgaattttagggtccttttgagttgattttagttcctagatgctggtttggttgattggattaggttttatgcaactttgaatgttgagttcaaagctttgagctttaatggcaatttgagatttagtgatttgttctgtgaaatactggctgggttttattgtttatgcattgaataggagctctggaaggtttcattgcatttggaggaaaattgagcaagaaatgaaggttttgggaaacctggtgcaaaccggctagccggtttgcagtgccacaaaaaccggctagccggttttggcagggttccccgggcctttcattttctcaatttttaccatttcgatgcctcggttgggtgtttccccatttccagagttagaa

SEQ ID NO: 343637 - DNA, 846 bp, Cannabis indica
atacatcactatttaaagggctaggaggcttggagaggatgagtttcccctctcgttacaaagagtatatacagaaggatcgtgggatcaatgttgaatgcaaggatcgtgggattgaggctgaatacactgatagcgggatcgtgtgtatgccatatccacgtaaattgatccctgagttatagggattgtgctgatgactcacgatgcgaaagctgaattcgctaagtgttggttgctctgcacggattgctaaatatcttaatctgagcatgccagcgaggtatgctgctcagacaatacttctcgagaagatgttccaagtagactccacgtgtcaccattcacgtgatgccacgtcagagtgcaaaaattgggataacacaaggcatggctggacagagaaataatgatctcgagctagaccgagcacgtggaactcctttctctcccgagatcaatcttctggcgttgtcccacaagtttacaatgccaacatggagaatgacacaagaagagaagatcctctttcccacctcaagtatttcgcgatgcaaattgatttacctgggatacgaagggatgtgtgttgcagaatctttcctgctaccctttcggaagctgcccaacaatggtatttcaagttggccctaggaaagttcaaatcatggaaagccttctctttagaattccatgcacaattctcctcctctcgccaacttctgttgcatctgggagacctggtcgaagtcaagcaaagaccaggtgaacctctttgagcatacatgagcagattcatgatggaggcgaccaaagtttcacgggtaactgaagatggaaagttgt

SEQ ID NO: 343638 - DNA, 490 bp, Cannabis indica
tatgttggttttttttgttaatataatattataattattttaaaaaattaattaattatatttaattaattaatattataattaattaaatataattaattaatttttttaaaaaaataaaaattaatacttttgccggcgcattactgcgccggtaaaagtagccaaaaactattggcgccaaccgtcagattggcgccaatagttttgccggcgcactattgcgccggcaaaactttatcaaagcaggttcatagcggataagggcattttttaacaccggcgcttattttttaccggcgtgatttctcgccggtaaaaggaagttttaccggcgcatttactctacgcgccggtaaaaagtcttttaccgaccaagcttcccagataagctttgccggcgcacaactgcgccggcaaagctttgccggcgcagttagtgtacttttgccggcgcaaaaatgcgccggcaaaagttggttttcttgta

SEQ ID NO: 343639 - DNA, 640 bp, Cannabis indica
atatgcataaaattatatatttatcatacttataaaaataaaagaccaaaatgtaatattttatacttattaattaatttttttattgaattagcatattaggtaagatacaattttatttttttcatgtaaatttttttttatattatctttaaataaatactcaaagtacaatacatttttgtttaaataaaagagagaaggtagcaattatatctatatttcttttatattatttattttctttatttatatttaatattttttttagttttattattttatacttctaatctgtcattaaaatttcttataatatttatttttatcaaactgtaattttatataaaaaataaataaattcttcatttatttatatagaataaaattttttagttttttttttttgtagtcatctctcaactattttacgttaatttttttttggtaggtaaaagagaaaataatcttttaaaataaaaaaactacgtcattaatcacaagctcagtttattagatttataaacttataatttggtattttaaaattactaaattatgtttgtaataacttaaaaaaataattactttgtttagaaaacacacatcagaatattactatttttgtattatatcacaa

SEQ ID NO: 343640 - DNA, 583 bp, Cannabis indica
accataaaacaacaaaacagaattattaaaacaacatttgaacaactaaaagacaatcatgaaacaagagtgaaaacttaacacagtacacagttatacttgtacagtatttttgaaaaaaaaaaaaaattctgctccacagtaaaaaagttgaacatttcagtatgtggtgtaaaaactcctttaaattttgtttattggcttaataatattcattcagggctggttctaggctaaagcaagctagacctgcaattttaatttcaattactaaaaagttattttaaaacatgatttctaaaaactttaggggtcattaattatactaaaatataagatttaaaattgtataatttttactataattaactaaggtatacattttggtcaatattgaaaaatattatgatcttaagctcctaattgtaatctttttataaaataaagagttcaaaataaaactactaagaacataaaatctaaactgataatttgtcaaaattagtatcttttaaaaaaaaatttacttttaatatacactgagcatattacttttgatttgggtaagttgaaaatacacttt

SEQ ID NO: 343641 - DNA, 366 bp, Cannabis indica
tgcacccaatgtaaagtttcttaaactcttatgtgtttattacattattttagaattcatattagaatgttaatgaaacatacttgttagtaaatcatgcagctgctgccgcactatttatcgacaacctgtagttgtcattgcccatcacaaccacaaaaataataaatcttctaaaaaaaagtttctttcttgctttctgaataaataaacctaagcaatttcatgtaccgttcatcaccatttaaattatgctttttttttttattctttttcatatcagtagcgaaataaaaaaaagaaaaaaaagaaaaattaaattaggcctccatttttcaaagtcaatgttagatataagttagttat

SEQ ID NO: 343642 - DNA, 983 bp, Cannabis indica
tgctcggtcacttggggggcacctatacctgtacaaagcatttggtaaacataaaacaatcacaattgcacgacaattataaacagagaatgaaattcattaaggataacaagagcatatagtaccgggattaaaagctgcccggtcagcccgttgtccaaaaaatgaaaaataattccaagtttaaagaccgcttggtcggtcacgatgtcttaaaggccttaaggccacatataatatatatatataaacaggagataaaaagagaagtgtttaaacagctggagtcccaggctcttggtttggttcttctgagccaacgggagcaggaggatctgttgttcgagcaggagaagcatcagcagcctggtcagaagcttggccgaaagttgaagcagccacctctttcccaccataggcaacttgggtcgcgcagtactcaaggtacatgtccttagcgtcgcccaagtagtcgaagttggcctggggattagccttccagaaatcaaagaagagctcgaggtcggcagtctccaaagcattgaccttctccttcaaatggtccgcctcggtcacctgggcgtccctctcctcctttagccgaagaagaacttgccgcagagaactcctctcatcttgaagactgttaacttcagcagataagatctcgatggtttcctcaaagcgatcagcagcctcgaggtcctttgttagcaccaagatcttcttctcggcagcaaatagcttcttattggcctcacccaactcatgacgaacagctccagtctccgccatggcctcctcaccttccttcttggccaagtccgcctccgccctcaaggtgtcagacgaaaaccgcactcttgacagtagcacatttagcccgggagtaagtgtaagccaacttcaaaccggcctgcataaaggaaaaaagtcagcatatggagctaagtgtgaaaagttaaaagggaagtataaaaaaa

SEQ ID NO: 343643 - DNA, 520 bp, Cannabis indica
tttaaagaataattatacatcataagagcactcactctaacgactcttggactaagaagattgaaaggaagtactattttattattgaaatgaatgagaattattaaatttatatacaatgattcatcaagctaatcaagaatcaaaataaaataagtaaaagactcctaactaaccagaccatttaactaatttgacagtgttgcccctgatttcgcccaaactacgtggaccaaccggatggtgacacgtgggtagaaagggtttggcgtttatataattcagctaagtctccttaagcacagggattaaccttagacatgcctcccggagaaggcatgtaagtctcacatactcccggagagcaagattgcaacaaagcatctccgattggtgtcagatcctatctgaacagtcatctcgcatttaatgtcgcatgggaggaggcgtattgaaactgccatatgtaataaagtctgacggtacaacccccactctgcacctactaggctatgatcaa

SEQ ID NO: 343644 - DNA, 635 bp, Cannabis indica
aagtaatcgagatgaaggacccctggagcttgaaagtgattctcccagtgatggttcacaaaacaccagtccaaacgcgatttaatagtgctcacaccagaacgattcttaatccatgtaaaagggtccccttcaaacaccatctcatgtagcttacaatggtcaagagtcttacggaaagcttccatatgccgttcacttctgagacagccacccgatttattctcattagagagaatctcattgaaatcaccaatgactaaccaataaagagatggagaaacatcagcaagtcgttgcaaaagcatccaagaatcaggtttattttgggcatccagagcaccatagaaagctgtgagatggaagctagcctcattatcagccttgacatagcaatcgaaaaaagtttttccaaagttcaccaatgtaacatcaatattctggtaccacagctgtagcagcccaccactaaggccagatcgtggtgattccaatccatgagcaaaatttaaagtttgacgaaagcgagaaacagaattctgtgggagttttgtttccataagaacaaatatgggcgattgtgtttggcaagcaatcgtaaatgcctgaatgcagacgggttcccaaacccgcgc

SEQ ID NO: 343645 - DNA, 501 bp, Cannabis indica
aaaacaaaaaataaccatataaaatggtcaaacttaaaattgacatatttaacaaaagaacttttaaaatctaatagtaagtgtaattttcttttactttttcattaaaaatttatttcataaatttacatatatatataaataataaaataacaattttaatatgtgagaaacatatattttttttgtctctaaaaaaggaaggctaatatttaaaaaaaaacttttttgttttgttttgtttttttttatatatttttaggctatgttatgttattttattgtttaagataccttgaggttatttttttaatgtaactcatatgatgtttcagatactattaattttatttacaaattattttataaacttattaaaatagttttataaaaataagtttacttttatttaatcttatctaaatataaaaataaaaaatatattttttagtaattttttaagttgtttgatacattaaattttatttaaatttaaatatt

SEQ ID NO: 343646 - DNA, 780 bp, Cannabis indica
tccataacaaaataaataaatacaaataataacatacaataactcaaatataatataatgaaacaagttatatttatcaactagttgaaaatttaagacaaaaaactgattccgtaaagcaactaagataaaaactcacacacaaaaatcagttaaatgaaatagctcaaacaaaaatatccattcaacatgctccaacccacgaaataattacacccataccatagctacctcaaaagtactcattcattatgttatataaccggttctattttagttatatccggtatgaattatttcgtgttatttgtttttattcattataacattgttatagaacctgttctaatttaattataattagtttgagttattcattatgttacagaaccgattatattttaattataaccggtttgagttattttgtgttatttattttcattcattatattatagaaccagttctatttttgtttatatttgagacatctacttcttgtgacttttccagtgactttttccgtgacttttttcggcgacggtgatttttctagcgatactaactttttccggtgactttctcggcgccgatgacttttccggcgccgatgactttttcggtgattttttcgatgccgacaactttccgaaaaaacttattattgtttacaaatatgaaatttccatctttttttttttttacaaaaatatggcataaaaaaacccatataaatgtaaaaaaacaaaaaaaatccataaccccttaacattatttat

SEQ ID NO: 343647 - DNA, 493 bp, Cannabis indica
ctagagattggtccttcagtcggccggcactgtagtgattttcgccctaatatttttttttttttaatcctatataattcaaatctaaaccctagttgaaacactataaaagaaacatgatgctctcatctcatccaactgaactattgccttccatcaaatcaaatttagttttttctgtcaaacatacaactttcaagcctccttcattgttcttcatagtcggccaatagtgatagagtgtcatgcccacacatagcaagtcaagtactcaatcatagtgggtaagacggtagtaatctacccgaatgagagaaagagatctaggctcagatcttgataatactctacgacagaaaggaacaagggttagagatctgaacggaatgagtcattatatttcgctacaaatcaatgtaaggtttttataactcttatttgtgtaatttcattgttttatagatattcatatttaggatgttaattcaacata

SEQ ID NO: 343648 - DNA, 819 bp, Cannabis indica
cagccagtggagtgatatgagtgtttggattttaaaatgttgttaaccaaacatataatagagattgtgggattcatattaagatacattagtttctattaagagagcacattgttaaaaactctctttagattatttttataaatttatttttattactcttagctttttcttaagtgcttatagtgtaggagctaataattttttagataaagatgttaaacctagttcaagtttagtaattattatatatatatttatagtgcatgtggtgttgagattattataacatctcttgtatatatattatatatatatgttctattttgcattctgttataactttgagttgtaattctcctaacttcgtattctttatttaatgtatatttttattatagagttataatattatttaatttttcattttggtcttctattattttacattgagttttaatcttgtggtttgatatttgtattagttacaacacattttccaaagataactaacggtaagattaattttgatatatctataacatctatatataaatagaaaatagatgttataataaaacaaaaaaataataataattacttgtctttgtcgtttactttttttttttttttttttacttttttttgtttttattttcttatatactattttattggtaaataattttttgtacttgctatccgcaccttaaggtattcaatatcatatcgatgtacgtggtacttaatgattggttagtaattctttttctgtttttcttaatttttttatgaatgatttttgtactattttttttt

SEQ ID NO: 343649 - DNA, 1329 bp, Cannabis indica
tcctcttaagataatgcatcacttcaaacgccaccataacattatctgaaatgagacgtccaggaatgaaagcgctttgggtgtcagaaataacaaggtctataaggcttctcatacggttagcaagaacttttgaaagcaccttatgagcaacattacaaagagcaattggtcgtagatcacccatggaggtgaaattcttccaaatttgtttcattcaactcccgcggaaaacagccggtatcaaggaaatcagtaacaagcttaaccaaatctgctctcacaatgtcccaatgtttttgaaaaaatctcggacccatgctatcagggccaggtgctttgtctggatgcatctggaatagggcagttttaatttcttcttcggcaactggtttcaaaagttcttcgttttgagcattggttgcagagcatctgacatcagtggcaacattattttggaaggaacaattagcagtaaataaatctgaaaagtaataggtgataacctgatcaagaccgtttccccaatcggtccaagctcaatcagaattttttaagtgcaagatttgattgttcctttttctggcactagtagtggcatgaaagtatttggtgtttttgtccccgttgtgtgacaaaaattgcttcaacctttgtttccaatagatctcttcttgggctaaaagttcaaagtaattattttgttcataaacaaactcaacattcaggggaaaattatggtgctgcttcagttgtgccattttctttttactggtagaaatacgacccttgaaattaccagtgagatccgaaccccactttgtcaaattatcctctcaaatttttattttatcaaagagggataggtgcatgtgcatatcccaacaatcttttacaatctgtgcacaaatgggctctcgagaccacgcgttctcataacgaaaatgaggagcagtgatagtactatgatgggcatcaggttgtaaaaagatgggagtatgatcgaaactagaaatactaatattggtgagagtagcgtcagtaaaagtgtctaaccaactaagagagacatttgctttatcgagccgaatttctacacaatggtctgtacctcgtccacgatcccaggtgaaaggatagccacaaaggtccagatcaataaggttgcaatcatcaagaaccgactggaaaccatcaataagagatgttgggtacggacacccgcctctcttgtcagattgggttgaaatattgttaaaatccccgatgacacaccatgggagagacgacttgctgtgcaatgaacgaagaagagtccatgttcgatcc

SEQ ID NO: 343650 - DNA, 610 bp, Cannabis indica
tacatgggtaggtgacaagtcatttaagctacactataccataagcactattaaccaagcaagcacccacatttatcttctttcttttcttccctatatcccaaaggcaatagtaagagattgcgattttttctttatgtgcgtacctcatatttttcttagcttttcttttttcctcaagaagacattatcacatattttcttttcttatttttttccttttcttctatttttttctagaggcacaacacacaatattttttttcaatcactcactaatacactttgtttctccacttacaacaatttatccccccaaacttgcttaaaggctcatggcataataaggtatgttcagagtgaaaagagttaaagatactgagtttagcttaggtaagtggtgagaaatttttagaataagttaaggctcaactttgggtatactatggtaaaatttctaggtaggcttgaaaggctcaatcggtccaaagaaaacttgcctaaatcaacttccaaaaaaaaaatcatcaaggatttcacttcaagagagtatgtcaacaaaattctattccatgtacagtcaatcattccacaaaccaaatagaacaga

SEQ ID NO: 343651 - DNA, 1037 bp, Cannabis indica
tctgtttgcaaactagaatttccaccagaggcttgttgctggttaaactgttggttctgatttctttgctgatagaacccactatttcttcggttgttgtaaagaccgcctatgaataatactttgtattattaattatttaaggattaagtattaaaaattatggaatgcatattttataaatatattttatatatcatatatgtttttatgccattttctatttaattacctaatttctgtgattgtgttcggaagctgtggaagcgacgttgggcctagagagttgcattttataatttagattattatcggggtattatcgttaaatagtagaggcgttacccgattggtttttgaccattttgcccttgaggggttataactattttatttggttaaaggggcaattaggtctttttggcaagttatattttgtctcatttgggttattccttaggctgaatatataaaaaaaaaaaagaaaaggctaagattaggaagaagcttagtagtgaagttaccatcatctttctctcttttccctctctctttcgatccatcaaccagcaaggaaggaggttaattcttgctgaaatcttttgaattctagttgagtttgaagttccaattcaaggtatttttcctcttgctctcctctcttaagttttctttagtctaggttaggtttttacatgtgaatttaggttctaggtggctgtgtggattgaaatggtataactgggtattctggaaatggttttagattgtttgagctcatttgaagtgaaattgaaggttaattcaaggtttgagcaaggtttgagtttgtgaactcaaacttagctctctaatggtggattgaaaatctctgtgaattgctgagttttattgattgggattgatctagtatgatgtttacaggtgttctggaagttattgtgaagtttggggttgttttgaattaaggggagaaaattttgggttcccagctcagaaccggaattccggttcctggggccctgttgcaaccggtc

SEQ ID NO: 343652 - DNA, 571 bp, Cannabis indica
ccataattcttttggtgataatatatctcataagattattgttatcacttttaaaatatcaccatatacaatctttgatcatatattttctataactcttccagagtatgtatggacttctaaattatagatgaggggttcgtggaacattaatctttatccaactaattgtatcattcatgtgtgtatacaactttgttcatactaaaatttaacatttcaagtagatatgaacataacacattaatgataatataaattttcatttgtgacaatgatggtactccaagaccatatatttgttccatcttgttgtatgatcttaatttccatatcaaatgatcatatatctataattcttgatacatatgaagtacttcaggacttcaatactaatgaacaaactttatacatttaatatttctcgatatacaaaagaaataaaagtttgttcttcaattaatcaaaaactcttcaagagtctatcacaacgtataatttacgtatttatactgcatagacaaccatacgtatttttcaaataataatttacttacatgtctttatttca

SEQ ID NO: 343653 - DNA, 1484 bp, Cannabis indica
tctcatgtggtttcaattgtcgagaagcataggcaaccaccttgccattttgcatgaggacacctcctaatccagtacctgaagcatcagtgaataccacatatggttcctcactattaggaacagtgagaacaggcgccgaagttaatctttccttcaattctctaaaagcttcttcacaactatcatcccatataaactttacttcttttcttgttaactttgtcaaaggcatagcaattcgtgagaaattctctacaaagcgacggtagtagcctgccaacccaagaaaacttcgaacttcagtgacattctttagtcttccccactgtagaatagagtctatctttgtaggatcaacagtgataccatcttgagaaattacatggcccaagaatttgacttcagtcatccaaaattcacacttctctttcttagcgtataattgatgatctctcaatgtctgtaatactattgtcaagtattcagcatgatcctcacgtgtcttagaatacaccaagatatcatcgatgaataccaccacaaacttatccaagataggtttaaagactctgttcataagatccataaatgcagcaggtgcattcgttaacccaaatggcagtaccaaaaactcaaagtgtccataacgtgtcctaaaagcagtcttagggatatcttcttccctaatcctcaattgatgatagcctgacctcaaatcaatctttgaaaagaactttgagccaccaagttgatcaaataactcatcaatcctcggtagaggatatttgtttttaattgtcatctgattcagctttctatagtcgacacaaagtcgcaaagtcccatcaactttcttggcgaacaagaatggagctccccgtggagaagtactatgtctgatgtaacccttatccattaacattaactctcctaagtttttttttttcaattcagccaactctacaggtgccaagcgataaggcgcaagagaaactggttaagatccgggaatcaaatcaatacaaaactcgatctccaggtggtaaccctggtaaatcctctggaaacacatccagaaaaccactaaccactgatatccaagggaactggtctaaatttctagactcatcatcgatcgcaaaaaaattcccataacactctaagtttctctttccgcctaagcatgccctgaagataggattttgtctcactgcgctcatgttggctcgataaacaatgaaatcaccactaggggttaaaagagtcactctcttacgtgaacaatccacaatagcttggtatttagacaaccaatccatactgagaattacatcgaattgcccaataggcaacacaattaagtttccagataatttgcgtccctcgaacacaatacaaattgacctacatatggtggatacctcaccgtgtccccccataggtacactcaaatgcaacgcaggactaaagtttcccaactc

SEQ ID NO: 343654 - DNA, 1210 bp, Cannabis indica
ctctctctcttctttactccccttgattcattattaatcgatcacccttttccattctgcctatggtgtttacagtatttttcggggggatccctaaaaagggagcacttgtctttttgtgttagcctcttaatggcacaaattcctagcagatccaaaataagaaatacatgacctataccgtaggtatcttagcgattaggtggatataatcttttatcctcccttgattgatgtgagtcctcataatgtagccgttactagactcgtcgattgttgtgtaatcgctgtaaaaaggggcttacgccatctgtcaaatccttttatacgtttccccccatgcggcattaaatgcgaagtgactcttcgaacaatctctttccttcccggagatgccttgttacagttctagcctcctagagagtaaaggtgtgtcttatgctctcctccgagaggctcactccatgagatgtactttcctgcccaagacttaattgattttcgtgagtggatgctcttttaagtccacgtgtcaccctcggctgttgccatgtattttcagaaaaatccaaggtaacaacaattaactaagctaatttatctaaagatttagttttttttagcttatatattattttacatatgtgaattataatgtttggtaggtattccattcaaaataacaattaatatcaagacttctaaaatgagaagaattaattacaagcaccaacggataggtgtaattgatattaatgggaggaatatggggggataacgttggcgtgatggctgggagtaatgagggagttattttaggcaatttggagagtagacaggtggcggctaatttaaatgaggatgaggagggattactttttttagataataaaagaaagaggttgggtaaggaggtggttaatgggccgaatgggcctatggagggtttgggcgtagatcataggctgagtgggcctatggaggggttggttattaatatggggattgatacaagtgctcactcaacaaaagatttaatggcgtgctcgacggatcgggctcgctaatcattatgagtactttaagttggaattgccatgggcttgggaacccagggacggttcaattccttaaagatattatttatcaaaagaagcccacttttatttttttgtgtgaaactttgtgttctaaaccaagattggagctt

SEQ ID NO: 343655 - DNA, 846 bp, Cannabis indica
catatacatacactcagatattgatatcgcacattatatacagttcttacctttttttcgaattcaagtgtgctggccgacctgaacggaaagtctcgtgctagatgggtgtcctaatcacattatgaaaccgggtaagttataagatcaaaaccctaatcccgggaaacccataaccctaggttctgatatacccctagaggttactcaaactctagaattagggaaacacccaaccacggcactcaaatggacaaaaatcaagaaaacgaagcatttggggaccctgccaaaaccagctagagaggtctggtgaaaccgactagccggtttacaccagttcaccccaaaaattttcgtttcttgctcaatcttccactaaacgcaaccaaaccttccagagtaccgaattagggtatacacaacatattccagccagtaattcacagaaaaactcaatgaaacaaattatgccattagagatcaaagctttgaactcaaagcttaaacttgcacaaaactaattccaaacatcaaaaccagctgcttaaggctatttacaactcaaatgaacctagaaaatcaaaccctaaacaaacctaaccctaacagcccccattcacaaaattcataacatgaaccaaagtaaaagctttaaaacacacaaccttaggttctagggttaccttaactccaagaccacttgaatccgtagcttaattccaaaaaattggggagaaaaagctagcctttcccctgattttgtctcagccgaaagagagaggaagagagtttccaagagaaaagtctttctttctaattttccttctttccttaattttcctc

SEQ ID NO: 343656 - DNA, 636 bp, Cannabis indica
tatttaatttactttatttaaattatatattttaaatttttacagttatataaaaaaaaaattattaaaaaaaaaggctaaataatttataattttttgccaagaattatattgttgggtggctaattttaaatgtatgtcgtacttaaattagtgtcattgacacgacttgagccctaggccgtagcagatatgtaacttgggttgtcaaatatcagactttgacccttaaaggaagataacacttataaacgatcattgaattcattttacaaaatacatatttaaaaataatggaataactactatatctataagaaaatattagttgcaaaattaggatcacttatcagtataaaagaacaataataactccacagttatgtagtcactgaattgagagatttaataagtttataaaacaccaaaataatatttagcatccatcattcatcatttataactagagcataacaaacttaagtgatccagaccgtccattcaagttcaaatataaatttcaaagaaatgtttaataaatagtgtaaaccccaagttcttgtctaacttatctttttcatatttagattgattttatcttgatttatgcttaaatattgttacgaaaattattaa

SEQ ID NO: 343657 - DNA, 717 bp, Cannabis indica
gctaacagttattttgtctgatgtaacctttaaccaactacccaacaaccacccaaaaattttcgtctaattgaaactttcgtctgatgcaaccttcggccaaccacctagcaaccaccctacaactatcgtctgattgaaaccttcgtctgatgcaactactgcccaaccacgcagcaacgtgcaaccacgcagcaaccaccatgcaaccatcgtctgattgtgtaagtggtattttggtaattaaaatcacataaaagataaatgttgtcttttaccttatggaagtattttgtaaataaaatatcaattatattttctgtgtaataattttttataaatatatatagactagatgagagttacgtggcgagccacgtaaatattagttttatgtaagttctagtggtttttgtttaagaatttagtaactaagcaacgacaacaacaattgtagatagatctatttaaatttaaaatttcaaaattaaccataaggctccttttgtgagaaaacaaattttcaaaattcaaagcctactaatatctaaaactaattttaattaattaaaaaaattaataaaaattaatttttttctgataattaattagattcatatttgtaaagattataaatctaaacttttaattttcttgatttgagattttgaattgttctgattttatttgtttatgaattttattgaaatacttgaa

SEQ ID NO: 343658 - DNA, 574 bp, Cannabis indica
cccgcacgtatcatcctttgtgctttcggggctgtaactagcggtaggcttgacttgactttgactctttcaaatacgaatgcctctacagattaaggagtgaaagtcactgtcctctttcggtagtctattgttgctccatgtcgtaatagccaatccatacccaagataaggtcgtaatccctcatctctagctctattagatttccactaagttctttgtttgcaatccttattggcatttctcacactcctctagatgatatcataccctcgcccgagggcaactccatcatgaacttatatttaaagtttacatacggcagttctaaattatctatcatctttaaagcaataaatgagtgcgtagctccagaatcaaataaaacagtacataattttctagcgatagaaatttgacctgtaaccacggtgttactagtctcagcctcccctctggctagtgaaaatactcgacctaggacaagtttgtcatccttgagttgatcaccctattgcggaagtccttcttataatggcctggctgtccgcacttgtaacaagtcttgccttt

SEQ ID NO: 343659 - DNA, 598 bp, Cannabis indica
tttgtaaaaaaaaaaatagaaattctatatgtgtaaaacaacaataagttttgccgaaaaaattaccggcaccgaaaaagtcatcggaaaagtcaccgtcctcggaaaactcattggaaaaattattttcgctggaaaagtcaacactgctggaaaagtcaacgcccccggaaaagtcaacgtcgccgaaaaagtcactggaaaagtcactagaagtaaatgtctcagatataactaaaaatataactggttatatgaataaaaactataataactcaattataaccggttctataacataataaataaatataaatagcataaaataactcaaaccagttataattaaaatagaaccggttctataacagtgtcatgatgaataaaaataaataacacgaaagaactcaaactggttataactaaaatagaaccggttatataacataatgaatacaaacaagtaacatgcaataactcaaaccgattacaattaaaaacaaagaagaaatcagttcctaaaacattgaaatataaattaaaaacaaactagtttcacaataaaatacttcataacacataatacctcataaaaacc

SEQ ID NO: 343660 - DNA, 486 bp, Cannabis indica
atatgaaatttttactcaaaactatgtttttcaaagaaaatgaagaatctgttgatgcacttattgttgttgcttgctgttgttttctgagattattttatacatatctaggaagatttgagctggtttgaatgcatgttagtgttgtttaaccaagtttgagttttgaactcagcttcgagctttaatggtggattttgattttatgcatgaagctttgttttgttgctttaagaatgtttattagggtctaattagcaggtctagaaagtttggttgagtttagaaacgtttttgttggggatttgttgtttgttggttttctgggtaaaaccggctaaccgtttttacactgcctgtaaaaccagttacccgaattttgtagtagggtgtgaaaccggtttttctcaacttgtcatttcgtgctattttcgggttttcaggcagtgtgttctctgctagtttggggtatttttgtattaagtt

SEQ ID NO: 343661 - DNA, 1145 bp, Cannabis indica
attaccattagaaaaatactccagcatcttactaaagtccattacactagagtaagtaaattaccaggtataccataagacataggtttacataatctcaaacctataatactaggttcaggaagtttgtgaagtcgattgaatagacttattttcaaaaattcctttcttgtgcttgtaattaaaaacttttggttactccatatgaattcttttaaccataggttctattggttttgcttcttagttccttattctgactatccattacttgtttaaactaaaaatggattaaatctcgagtgtcttccaagtcataacaagataacttccttaaaccttcccacttcgacaaggtaccgtgactttctgtcaaagagcactaacggtattgacctcatcagttgtgtcaatacaacagagttagtggaaccatattatatatataaaaaaaattagatgttagaacacttttggaatcaagaaaatatatctcctcgacttttctactttcagatctagtcattttcttataaaagtactatttgttgaaacaaacactttcttatcttaatgaccataggattgtccacccctaatcactttagaatagctatcaaacagttctagcttttcttaagttcatgattaggatattcatgaatctagaaatggtttacactaagtacacaaccattcaatcattctaaaattttcctatcactagggtatttccttagaaggacatgacttaggcagatgctagtaactaatcatagatctattactttcatctgtatgcaatctgaatttctaggaaggtaagtttggatacaattcaaattccaacttaatgatctttgaactgcatatccactaaatattttttcaaccctatcactttgcaagatctttaaccacttaccataattttttaaacattgctagaaattcatgaaatttctcaaacatttcaaatttcttgcataaggtaaaatctattgtgattgtctaaagaattcaacgataactcatatccaccccttaatgtacatccatatgttctaatacaaatgatcctactttcaattagatattggcataatttttcatcacatagaatgatcttgtcaaaaccactatga

SEQ ID NO: 343662 - DNA, 501 bp, Cannabis indica
ttttacaaaaaaaattaaatttttgtatactatatttataataatacttactctattttaaagacgaagagtaacgaaatagaaattaaaaacgcaatagcaaactgcttgacatatgaatcttctccaaaatcttttgttggattacacgaaatagtgactaacatccaaatttcagagttgacgaaaaatctgcaactgaatgaggtaaaaactactataatatttactttataaaacttttgtttcaatatcttactattattaacaccatatgatttggatgtagaaaaaatatttttgtattgaggcggcaataaaaataactcataaataaaaataactgatactctccataatttttattacatgtcatgtgacgcatattataaaaaaaaaatggatttatacaattgcgatgaaaaaatcatatgtgacaagccaacatgcggccaagaaggatttcctacaccatggtatattacaaaaaacatatgatgt

SEQ ID NO: 343663 - DNA, 1108 bp, Cannabis indica
aatctttgagaaattagtcttggttgaagcttgattttgtgaagtgtggtgcttggagttttagaagagtttgaggtagctttcactaccatttaattttgaatttagttgctgtaactctgaagtaaaaatgtgtagaatgccatgaaatgtgttcttaagttggtgtgtgcatgttggtagaaatagagtagatagtggtgattttgtttgattgtgttattaggtttatgcttgttgcatctttattgttttgggaggttttggagtgagttattggtgtttatgacttaggtgaaaataggattgagtttgggtatttttgggccttaaaatgagatttttgggtgttctgaacccagttgccacgacgggattattggtcgccacgactgggtttggcagtgggaatgtctgttttttcccgattttgttttggccataacttttgactcgagactctgttttggacgttctttatatcgtcggaaagcttgttttaagctctttatgttaatttgtaaatggaatgctaattatgtgattattaaaattgaattttgggattaacctatttgtaaatcgcgagaattatgactaagattaccggtacttgttcaggagtatccggggattcggaatctccacgtttgcgggacatcaggtaagatagtagttagcatgtaaagttatgtgcggtggcacttatattaaatatgaaatttgtgagtaattagaaaccgtaattagagttattaccctaacatgagcggtttaatggcctagggttattaacctagtgattatcaatgtgtaaatgttatgccatgttatgtatgtgttgagattaaggattatgcatttaaggcataatcgggttagacccggtaactagaaccgagatgaaccattttaaggccttattgtaaatagacgtgtgagcgtaacacgtaggtttatgccatatagacataaataggcgtgtgagcgtagcatgcaagtctatgctaaatagacaactgtgaaatggcattgttgtatatgtgatatgatatttatgattattgatatttatactgtcttgctgggcttggctcacgggtgctct

SEQ ID NO: 343664 - DNA, 537 bp, Cannabis indica
catttggcagtggagacgcaagtgagtgacacaccaattgcacatcaagctaatacaggaggagggggagagcctcccattttaaatggatagaatattagcttggaatgtccgaggagctaataattcccataaacaaagtttaatcaagcaattgatttattcacataatgtgggtcttgttggtctcctcgagataagagtcaaggcgccaaaacttggaaccttgtactctaatatttttaatgtttggtgtttcactagtaatattgcatggcataaaggaggtagaatggtggttgcttggaacccgaatactttttgcatcaacatactcaaatgtacaagccaattgattcatcttcaagtgtctacttcagatggtatgaattgtcttgtcacatttgtttatgcttttaatgatgaggagggtagaaaggttttatggcaggacttaatggccattgctactcatgatccttgggtagtgttgggagatttcaatgatgtattggagcaagaagaaagagttggaag

SEQ ID NO: 343665 - DNA, 853 bp, Cannabis indica
tcgaaaactacgttcaaacagtgtattgcacgcgtgattattttattttatacgcgtggaaaagaagctatttgaacattgttttctatattgtaaattattcggaatttcttaaaattttgtaggttatcttaaatagttataacatacatgaatatgaaaaaaaattagactaaaatttttttttgggtatgccgaaacaagtgaagggtgtatcagtacatcccttttaagggagtgcattgtagaatcacccaatatcattttctctaacgtggtagggtcaactacagtacaaatcacaatttgaccttcatgtggacggtttttattagtccatctaattttaattatttaatatgattaaactatttaaaatcatttaaaaataataaaaaattgtaataaaatattaaaaaaataatacttttctttttctttttagtttctttttctttactttctaacccttaaacaaactcaatcggtctcttctttctccctttcagccatcggtgaccaactaaactcaatcaatctcttccctctccctttcagccattggtaacccaagataaaagttaggttttggggaggacaactaaatcgtatttttgcatatgccaagaagtttctttaataacagtaaaaaaatgcatctgtaaagatttgtagtaacagatcagaaacttgttactgcagaacactgatttgcagtaacaaaataaaaataacaatgcaaaatataaaaacttgacacaatataattatacgtggtatcagtgttcttcaaacactcttaatccacggggccacgctcagagaataaaatcaattagtaaagtctcaaaca

SEQ ID NO: 343666 - DNA, 1115 bp, Cannabis indica
taaggttagcctctcctccgtctgctctatcgcaagatctttaacaacttaccttaatgttttttaacattgcttagaaatttataaaatttctcaaatatttcaaatttccttacataaggtaaaatatagagtgatcgtcttaagaatttaacgataactcatatccacccctgaatgtagattcatatgttcaaatacagattatcctactttcaagtggatttaggcatgttttctctttgcagagaaatgatcttgtcaaaactactatgaacaagatgcaaatgccataaatatagtattgtggttgtggtcttttgatgacttaggtttacttacaacaaagagttcttagaatagtccaattgggttctggtcacagaatacaaaactcataatccgtacattaacatacagtttggatccattgttagaaaatagatattaacaacttgtgaaagttatactgtattgtccaatgtattcttggaagctgaaatttaaaaattttatttagaatctaaaatttaaagttaaaggcttaaatttataataaatatttcttttaagtaattattctttcttggaccaccactactaatctaactataagtctaagttgcttttagtaagcatatacaagtaagagattttataagatcgatgatttatatcatttcgggatagaatatttggaatatagtcatctgtgccacttaattttattgaagaaaatagaatgacatcataagcaaatgatttataatcttttttatccaatgatatactatttaagaaattttttaatgaaaaagctaagaggaaaaactaaaggataatttcgattaaaataagaatccaacgatgtcccagtaggcgagagtcaaagttatttttattttataaacttttttattgtttgtaaacactagtctaagttgtcatctttaaatgggtcaattagattttgtacttataaatatttatctatcgagatctaacactattatgttgtctaacggatgacaatcctttgggatttgtcccattaaaacaacaaattaagttagaccagcaatgaagactcaaaatttataacttcaataattaat

SEQ ID NO: 343667 - DNA, 542 bp, Cannabis indica
aatttttttctaaatgccgaaataagttaaggggtgcattgtagaatcacccaacactatatattttacaagtaaaaattctattatagtattttggtccctttgtattttgaataccatgtcataccatcattttcaaaataactgcaaatagaagcgtgttttataaattgaaaatgcaaaaaatggaactgtcattttttttgtcaacaatacactcaaagaagagaagaacaataccaaattgttgaaataatttataaattaaatatcgtatttgtaattgtttgcaattgatcggataacagattagacaatcaaagcccacaattattctcatatgatccctacaaaatatagtgctataaaagtgtttacctaaagaaaagaaaagaaaagagattttaggtttatttattgattgagagactttatatgtctaaattaataaatatattaaataccaatattatttaataattatttccaagttattaaataattagaattggcatttaaaaggttaaattgaaaaattggca

SEQ ID NO: 343668 - DNA, 1501 bp, Cannabis indica
cagtgatatgttttcaccggcgtggcttcactattgtacttaatttgttctttaatttttatgaagctcaaaatttaattagtcagtaatgttatataatatgaagatcgatcacataatgtgcttgttttttaggcttatttggatattttgatctgtagaattttatgaattagaaaaatactcaaacaaaacggatatataatcacccaataatccattataaatcatttttatttttccatacaaaatttgagattggcttaattgtaatcatttgaaacaatccagataaacaccctaaacacagccagtacttatttggtttaatccaagggactgagatttcaaatgattggttaaaaggcctaagtttgaaggttttgatcacttgattttgtacgtagttgaaggtgtgtctctgtacgtagttgcatattgtcctcaaatttttaaaatggaacgaaaatatattaaagttccacttcagaataaggaatcagttcatttaagatatatcattagatgactttttgttttttttcaattacaaattaagaaaacaagattcaagttcacacaaaaataactcatgtataaattttaaagatatccttattacttccagaaacattataggaaaagagtcttattgcattaaatctgacccgtaacgaatttaacggtccaattccttcaactatttctggttgttccagcctcactcatctatatttgtcatctaatctatttgtaggccacttgcctctttcaatttcaagtctcactggattagttgagctcgatgcctcagttaatgaaataaatgagcctattcccattgatattgggaaactaaagaacttgatttcacttgacttgtctcgtaacgccatccgaggaaacctcccacccactatatttcagttaaccagattgacttccctatcactttcctccaacgaaatcgatggttccatacctttggctttgagtaatcttaccaatttggtggagctggaccttagccaaaatcaatatagtggctccatccccttaaatatttggaatttaaagagcttaagatatctgaatctaagctccaacaaactcagctgtccaattatgccaattcttatggctttgaagtcaattgaagttctttctctaagctcaaatgaaatatatggttccctggattcaaatattgttaagctcacaaatctgacttccttggatttatcacataacaacatatcaggcatcataccttataaagatgtcagattcttagcaaaactagatcagaattatggagttccatctcaaaaccaattggcaatgagtctatgtgggacattcaattggcaatgagtctatgtgggacaatgtccacaacattcggtgcggatcggatatatgttgagaatcatggggttccatctcaaaaccaattagcaatgaatggagtagcccatgttcttatatatggctcaattct

SEQ ID NO: 343669 - DNA, 976 bp, Cannabis indica
caccagaggctcgtttggaatgccgtattaggtcgtattgtattgtattgtattatattgaattgtattttatgcaatatttttatgtaaaactatatgtgatattaacttttatggacacttaaatatataatgttttagtataaattaaagtttaacatagtattatataaaaatatgatatataatccaatttaatataatacaatacaatacaatacgacctaatacgacattccaaacgcgcccttaaagtttaggatcacttacattaatggtaacgaaatataatgatgtttattagacttttaaaaaccgacacaaagtcgtaacgattgagagattaaccaaaatcgtaataaatgataataaaggacaccaaaatttaaagagctttggccccagatgtcagtaatagcctaccccctttgtattttattaattggagttgcaaagtcaagaacaagctcttgaatgaggaataaaaatggaagagtttttgctctctaagtgttgatttttggatcccttcccaggtcatgtatggccccttatataaaaaaaagggatagtgcttctttcttcaggagacgcgaccgctgcagaaatatctcaattgtctccttgatattcggaggtggttgaagtctgattcttgtagtaatatcccgctattttcgtgagtttgttacaaccattgagcttattgctagatttaaatgttgaatgaggtgactacggtgagggtacctcttgggatatgacacaaccgtttaaccctctaagggaggtagcactcacctctgggtggtacccacgagacccttatcctttgcttctcatattgtgtttaatatgttagcccaagatatgtttccaataggggggtgaattggaaattaaaacttttaacacaaaattaagcaattagtcacttaatcaaataaaagcaagtaatatggcaagcaatatatta

SEQ ID NO: 343670 - DNA, 556 bp, Cannabis indica
tttaaatattatttattttctgggatattacatatatactgcataaaatcatcataaatgtgtgaaagagagtaatacatataattttatgtaataaaattatagattcaatgtaaaatatatattaatatatataaatatatatcgaaaagaaaaaatatatatatgtttatacaattatacatgattgtgtatatgatacatatatatatatatatgaataaaatattatgaatatgcagataaagttgttggatgtagagatacacatgcccacccgcatctcggtaatggctttgttatacaacttaatttaatttttctactacttaagtttggttggactattactagtttctgttagttgacaaaataaacaatgcatttgcagcaaaaaactctgggttcgtttaatgtgaagaggattgcaaaagaacaaaaatggtcaaaacagttttatgaagacaacttcaaaaaatgcgtgatggtacttcatcatatacacaggcttgttcttacttgttaattttgatttatgttaatgatgcatattggt

SEQ ID NO: 343671 - DNA, 1338 bp, Cannabis indica
atattatattattataaataatataacacttaggtatttacaccgcaaattactcaattaaatatgatattttatatgaatgagtatacagtgaaaatctgtttataaataggtcgaatttttgagtattttcaacttgcaattaataaataaattgagtttgggtttgacatttatttacttgtaatacttaataaatcttcacatatatagtacaaacattacttgtaaacacaacttctctaattcctaattataatattgttttggtttaactaaaacagtacttaattaaaagttatacatataatgtgccattaatataaaaccctatccccaccaaaaaaatggttttatatacttggtttttaaagccggtgatatacaatgaattgactatttctattaatagataataattaaaaggctaatgcttatttttaagtagtagtgcaattaagcatatcccaatagacaatagtatatatataaaaacaaatatggctcataaaaaaatgtaaaaagaatattcaaaatatgtttttaggcattaagaatatggatgtggaaacaaacgaatgaaacaaacactagtgccaagtgaatggtatattttttattaaaagctttcatcatcatcatcatcattattattattattattgttattgttactattattcttaatggtcaacgagttgaagcttgaaaaaggtctttgccatgttctaaatttctatagtgtcacattcaaattcttaattaatagtcaaagattaagttggaattgtctctcccgtgtcttaaagttctaactactttcctagctagacttcttttactaaccctaaccctaaccccatgcaaacgattaataatattcaaaccaacatataaatctatttatatatattcatgcataataggtcaatgatcaaattgttttatatattaatttgttaaaaaaaacttgttatatacataaacccaaaaataaataattataattattgtagaatatttataataaatacataatttattacaagattattcattatcaacgcgcgttgacattgttttttgtattgagtgatctgaatcacaaaactaacaagtttttgatttgttcaaaagatatagagttataagatatatgagtaaatacaaaaaagtcagcttttttaaaatctagggtatatttattttttttaaaaaaaaataatgttgagaaattgagagaaagatagatttttttgacagaattttttttttttcataatttttttttgttacagaaatcgatacaaactaaaataacaaaagtaacaaagttac

SEQ ID NO: 343672 - DNA, 797 bp, Cannabis indica
ttaatccaagaaaggaacattggaaggaaatcaaataaatcttgagatcaaaagaggaactatatgttagtcgatatggacggtattttaatactcttagactgcaccaaattagctttctagacttgcgttaaagctagaaagtatacttatgagatggcgattactctggggtggagcagggttttttggagaattttaaaaaccaatcccgactctctaactctaccagtgagactaaatgttaaagtggccaaaaaggctactagataattattcatcctatggaaagttttgtacagtttttagcgttattttggtcatagattaactactagtgttacttcctaattacacagatatagtttccaaacagtaaagaatccaataccctaagaggagtaaacatgtagaaatgaatttcacaatatcaaggattttgtgacttaaggagatgtaatggtggagaaagtttgtattgagtacaacatgtcaaatcctattacatagataatactacatactacacttgatttggacatcaaggtattgagattaattgaaatgcacttttagatttatataaatgcaagtgggagtttgttgggattttatgcccaaaataaaatttctaaaatttcaatataattagatttactaagggatattggcggctaaactacttgaactttacggttttgtaacacttaaccacaacaaccaaaattttggcggctaaactacctaaaccctgattccattttgctctgcacaccttcgtccaaaaatcacagtta

SEQ ID NO: 343673 - DNA, 1119 bp, Cannabis indica
ctacttgattgcgtgcacttgcgtagtaattaataattttcgcaacaagtttttgaaggcaaggtaccttgggtgccaggtgggtgagccctccgtccaaggttaccgaggcatgcttgcgggatcttgaccaggacagctacctgggcgaattggactgttacattccagcccgcaataatagagccacaaaccctgaaaggggaatgtgcacctggtcgggtgctcacgtcaagcaaggggcattgctgcctttgcacccgtactttaggaatgtagtagacctcttccgcctctgtcctacccaatttactccaaagggcgttaagtatctgtccaccctcttcgttctatatgcctcccagaggtgggatatgccctctccccatgaggtaagctggtttttttatttgaagtccaccgctaagcaaggcaggtcagggtacttctatttctctcaaccagacttcaagtggttgacgggcaccggggacaaggccgttagcaaaattgggcattttattgatgagtacttcatggtggacggcatgggcaccacccatactcggttccagcagatccccacatatcaccgccctcccttcactcttgttcttagagatagagctcaaaggcttgctcaaatgctgggggatgaccataatatcattcagttgacctccgaggacaaatttgtgaattaggggctctatcctaaggattttattcctaagcctgtgaaggagaggaagaggaaatttggtgctggccgggctgagggagctcataaggagaatgaactcatctaacttaagcatgaagctaagttgaaaggcggtacaaaggccaaacagtatgctcatgagcccttgaatcctgaagatgaggctgaggaagaacaggtgactccgctcaaaaggaggaagaaactttcggcccagcccaagcccgttgaacatgcaattcgaattagggagcccagttcacctgcccgaccatcctctcttgtgctaggaaaagggaaagtcgtcattgcggatataagagacttgtcaggtgataatggattcttgagtcttgctcgggcaatcgtttcgcaggatattccatcttgttttt

SEQ ID NO: 343674 - DNA, 307 bp, Cannabis indica
ttttattttaatatatataatattaataataagtgcacttttttacatcttttttttaatacttttcacgctctcacaaaaagtttattttattatttttttttaaaaaaaatacaaacatttattctatttctttttctcttttttacatttcttactagtcacacttaaactacttcatactatttttctttaattaatcacattttataaaaaaaaaaatcttaactagtttattttaaccattactaaaataaaattcttttactttcacatttttttcctcatatttttcttaacacacttt

SEQ ID NO: 343675 - DNA, 1190 bp, Cannabis indica
tgtaacacataatccaaaaaaaataataagtactactccccttttttgtctatcaaggagccaaagatagcaaaaaccaagaacaaagtcataatagtttaagcattcacaaataaaaagcaagagatagagaattgaaccacttattcatcatcattggatcggaagtatttcatgatgttgtccatcttcctgagaagcaaggcttgacttgtctccattctccccaaacacgaattcagccatttctgtagaagcagaagcagcagcaggttcaacagtaacaccaagggaagcaaggttgtaagtcgactttcaagctttggtcttcgactttctggcagttttcatcggagcagatgacgaaccaggaacttcggttgctggtgcaggcggcgcaggcgggctgatcggagatgcagaggcagagccacgagagggcttcttggacggttgggcattcttagttttggccatttctctttgaaaccctaaaacacaaacactcttacactttgaaaaatattagacctttgagagagaaaaaaacagaaagagatcagagagtggtgatcgtgggtgagagggtggttgagaatatatacacatgattttacttacccaatatataaaaaaaaaaaaaactgaaaaggaaattaacttccttacctttgactcacgtgtggagagaaaaaggaaaccaaaaaaggtttttcaaaaaatggtcaatgtttccttaaatggaaaaaggaaaccaaatatccccacaaaatctaagaatttaaataccctatcaaaaccgaaattgccaccaaaaaggaaaccaaaagtaattaattacttaagtacaagtttcctaaaaacaccaaaataagaccaaatctccacaaataaagaaaacattctataaaaaaatacaataaagcatgtttccataaaatgaaaaaataaaagaaaaaatatttacaaagaatcgaaaaaaatgccctcctttttctttaattttttcaaaaaatgccccccaaaaaaacttttgcaaataatgaacaagagaacacaaagagacacataaagcactaatcactacttaagagctaaaatagtatctaagaatataatgaaacataacaagaaaaataaaaagaattttaagaaagctcaattgacaaactcgatcacaattttttttt

SEQ ID NO: 343676 - DNA, 769 bp, Cannabis indica
ttctggagaggttattgacctttgtgaggagctgactgctccaaatccttctacgcccatatctgccaagtctaaggagtcaaggccaccaacaactgtgtccaaacttgtcaagagggtccctgagcgggtgtcggcaccaactcctcctttgcccgtgctgctagaggccaagaaggtcaaggagatgctggctcactacatgaaccggcttgttcctgaggtcagtgagcaactggctggcgctgataacgactcatctcttgatgtgttagtgggcggagtcttgaaggagctcgccagggttagtcttttttgatacttcccttttaacttttcacacttagctacatatgctgacttttttcctttatgcaggctggtttgaagttggcttacacttactcccgggctaaatctgctacttccaagagtgcggctctgtccgacaccttgagggcagaggcggacttggctaagaagaaagctgaggaggccagggcggagactagagctgctcgtcatgagttgggtgaggccaataagaagttgtttgctgccgggaagaagatctctgtgctaacaaaggacctcgagtctgctgatcgctttggggaaaccatcgagatcttatttgctgaagttaatagtcttcaggatgagaggagttctctgcggcaagttcttcttcggctaaaggaggagagggacgtctaggtgactgaggcggaccatttgaaggagaaggtcaatgctttggagactgccg

SEQ ID NO: 343677 - DNA, 1207 bp, Cannabis indica
cagtaggtatgtgtccatatccgctcttcaacctataaatacccttctattccatatgaagggaggatcgaattcaagatagctgaagctctattaaattactctaagttttttcttcttaaaaagaaactaagagtacagagttaggatttcatgcataagcactgtaaaaatatcatacaagcctattaagaccaatagactaacttgtggactaaggcacattgacgcctgaaccacgtaaaatttttatctcctctattattgtattttactatttctaagctcttattatattactttttgaaaaactcaataataaatttatttatacttaatattaaaaaattatttattatatataattcattataaattatttaataaatcaattcaactaaaatgcaactttatataaatatatttttactatattattcacatgagccaaataaattgatatatatatatatatatttatacatataaattaaatatgtgatcaaaatctaaatataatcgacacatgagcatgatatgtgttagtagtacggaaacacaataggtcggattaggattaagattctagacacaaaatttatatgagttgtattagggttgatcaattagatatgtaatataatacgacaacatgcaaaatatatactaccctactgcaaagttttaaaaattctgaatagtttacaataaattatacgtatgatttaatattctattttgcaagcatataaaataaaagaagcatgcgtacatcatatgtttcaattttaatattttgagcacgttaaattactctgaattttttaaaagtatacaaaatgttttaatacaatgtacactatcatatataaaaaaatagaaattaaaattatctaaatatataaaaagtacataagagatatatattattttttggattatttcacaaatacataaaaataataaaaaaattacaaaaatacggttgtacgcggaattttaaatattgtttataattttatttatatacggtctttttatgttgtactcttgttaatttgtttttgattttttcttatatatatatgctactttttgttgttgttttgattttgtttgtatgttattattaatttttctgtttactagaagttttcttattattttcgtgttgtttttatgaaaaatcgtaaaaaataagtaaaaa

SEQ ID NO: 343678 - DNA, 536 bp, Cannabis indica
tttttcttgaatccagaaaaaaatggttgaaaaaattgcaaaataggagaaaataacaagaaaaaatcatacctttaatcgttcaatagcacaggtcggctgtcgtttggttattttgggggatcgagtgcaacaatggggtttgggctagggtttctaggtattttggacagggtttttaggttggaggtctctttgtatcgtcgaggttaagagctttcggcgtagtgggtctccgcgagtgttttaagtgggacatttttaatcctggttttaagttaaaaatcgggataaaagggtttcaagtttcacactaaacccttttatcccaatttttaacttagaaccaggataaaaagtgtttcactaaaatattaatccctatttggctagcccataaaaatcgaatcttgaacttattttcttacctttgatattttttttaaagttctaccaaactgggtccttgtctaaaaagaattttgctgcatatttgaggcgccaaatctaaaagtgggataaaaagtctcaatata

SEQ ID NO: 343679 - DNA, 414 bp, Cannabis indica
tataggctgatactgtaacacatcggtaaggctagagtatgactagcagctggagtatgaccagtgtatcgagtataggctgttactttgttaaaagtaccgtcgtacgaatgttcgggactcaatatcgtttgggacaaggcagttagggttatggtcaggggtatgggcgtctgatcatagcccgggagttacgtatgattacgacttatgcttttcttactgagtctgtcgactcacagtgctatgtttatgtgtaggtaagggcaaggcccaggctgaggaaccatgaggacgggccgatgaagattgtacatgttggggcgtttaggcctatagcgtacgatcctcgggacaacagcgcttttgtagtcagtcgctgggcgacaagtattttgtattagacagtatttt

SEQ ID NO: 343680 - DNA, 1189 bp, Cannabis indica
gaatttatacattaaatataatcatgaaataaatcatgtgaatcatgcaacataaaatgcgatttctgatattttattaattagtaatcttattaagggcacaaaacccaacagggtgttacacttcgtttgctccaacaaaaactgataagaattcaaaatcccaagcttgaaagtcgacttacaatctcagttctcctccgatcattgcctctctgattgttaccccaactcctgagcttggtgatcatgatgaatctcattcttccaatcactcattgtcgaagtcttcctcttcgaatggtgctccaaatgtcgagaaagtaattgtgcccttgcctacggtgagttctcgaaccaggtctaaggtgtctacaccaaagaaacccgaagtagttctgcccaaagatgtttctaaagggaaaaaggtggtgtcttcatcttgaaaggccaaaagtctcaaagaaaatcccccttccgtttcatcatcgaattctaaacctaaagaagagaccgaagatgatcaagaattagagggtgtctctgattcaagtgaagagtttgtgcctaaagaacaaccctctgctgatgattttgagtctgaaagtgaagtgcttgaagctgaacttgttaatgcagaaccagttgctgtccctgctacaaagttggacaaagaaagaggccctctggtatactcttgaaaacttcaagccccattctcattatttttcttacaatgataatgctagagatatgaaattttatgagaatagaaatttttactgtggagaaaaatttcaatgtcattgctcataagccatttggggtctataacatgttaaaagaaagacaacgagtggatactttgatcgattttgatggctatgtggatcgaattgtgaaggatttcatgctaacatcactaatgagtgcctcgatgaggactcttttatgtttggcaaagtctttgtcaggagacactggtattcctttactataagggatgtggctgaagctttcaatctgcctatgggaattgagacgactgatgtggatttgatcgtcaaaaggtgttcgaatatctcactggtgataatgatgtggcactcttcgacacaatgcatatgtctcaactcacctatcaccatgttgttcttatgaggtttgcgctatccaattggtttccttg

SEQ ID NO: 343681 - DNA, 703 bp, Cannabis indica
tacatgtcgggacggttaggcctagagcattcgatcctcgggacaacagtgctttttgtaattagtcgctaggcgacaagtattttgtattagacagcaaagcaaaaattttaaataatcacgatttccataaacctcgttgattagcaacgagctgcacagtacgtttaaaagtcacgtaatacgcctctgctagttagggtgttacagtatgttatgttgaacttccccaattcaatcgaccattttatcaatcatccagaagcatttggttttgataaaacttgtctcaaggtttgatcggtgaacactttgatggggtgagccttcaaatatagtcgtagtttacgagacgcatggactaggcataacgctatttttttagaggggatacctggattctgcccctagtaaccttttacttacgtagtaaataggttgttggtgcttaccctcttctcgcactatagctgcactaattgcatcttccaagatggctaaataaagaaataatgtctctccagttattggcttcgccaaaactggaggctcctcttcgcactcttttgtccacttgaactgtttgttgcctcgcaatatgttgaagaacagtacacacttatcaattgacttcgaaatgaatctgttgagtgccgccattcttcctgtcagggcctgtacttccttaggctttgtcggggat

SEQ ID NO: 343682 - DNA, 1021 bp, Cannabis indica
ctctgtgttaatatactgctaaaaataaatattgactttatgccgcttacaaacttaaaattttacatgcttatatcacaatttacccaatatattaatatacaactgttggtttcatatatatatatagtagttaaatagaataaatttattaagattctttcatgtttcgaatccccttgtccttttttctctatgtttatctacattttattattaagaaaaatgtaggagcataagttcttaaagtttaaggtttgtaagtggcataaagctaatctttatttttagcagcataagtacccaatgtttataacactgtaattttttttctaatttcgttagtatagtctctgtgttaatatgccgctaaaaatacacattagctttatgctgtttacaaacttaaaactttagatacttatatcgctttttaccccatatatcaataaacaattgctgctttcatatatatatatatatagtagttaaatagaacaaatttgttaagatgctcatatttcaaatccctttgtcccccctttttttattctatgtgtatctatattttatttattaagaaaaatgtaacggcataagtaattaaagtttaaagtttaaagtttgtaaggagtataaacttaatgtttatttttgcggcataagtacccaatgtttgtataactgtaatttttctttaattttgtcagtacagactctgtattaatatactgctaaaaataaatattggctttatgccgcttaccaacataaatctttaggtacttataccgatatttacccaatacattaatatacaattattactttcatttatatttatataactagggaactaagccgcgcttcgcgcggtgttgtgcaatttttcctataatgtattatataaatatattatacttgttaagtgatatgatttaaaataaagtatttttataatatattagaaacatattatttttaaaatatataaagatgatactttgtgataaatattaaa

SEQ ID NO: 343683 - DNA, 883 bp, Cannabis indica
ttatacgaggaccaacctcatctctgtcccagtccgtcctcatcgagtgacaggctttctaattcaagtttcgaggactgggagataagcagtgaaggtacaccttccccaaaaactgaggtgcaacatcatttctatcccgaccagatcacgggtgaaggctacgaacgcttcatttgggaactcatgaaggggtggagacgatacttgccatccagctagacatacattgtccgtccaaacatagttgatactatccccgtgggctgaccaagtaccgttgcctttggcattcctatcgccacttttactgtaactgttgctaggcatactaaccaaacatcgcccagggataggatgatggcccacactaaataaacaatgtggagaattgcctctactgatcctcacgtggcacgccttgccacgatgtcgagcactgaacagacccagcctactactgaggaggaggataatgaagggacgttgaagtccaagagatggaggaccaaggcaaggtctatcctgatagtccatctaaagccgaggaagagggagctacttggccattgtgcttcggaggctaccatgaagtaggggaaccggtgttcgaggtcagtgatgtcttggtagagggtgatgactacgtcactgaggagtacgccgaagtggttcctcaaagaaggcaaggtaccttaggggctcgctgggtgtctcctccatctatagtaacccaagctaagatgaggagtttggagaaggatggatacctgggaggtgtggagtgctttttcccttctccaaataactgggcaaactcatccaagactgggatactgtgcttggtcgggtgcccatactaagcagggtgcaatgctgccct

SEQ ID NO: 343684 - DNA, 690 bp, Cannabis indica
tttttggcacaagattaattatcattgagttcagctccttaagtaaatggacagagtgaagaaatgaagttactgcttcaaagatatcttgtttgattaagttccaattatcctggtagaacgagctgttgtacccatctagccccggggcctttactgctggtatgccaaagataacatcttttaactcctccattgtgtaagcagcattaaggatccgactatgttgctcagtcacacacgctccttttctgattaagctgatgttaacaggcattttgttcaccattttggatcccaataattcttgataaaaagctaagaaagctttagtgatgctctccggatcttcatgccttgttccattcgcatatgctatagataagatattattttgctgccttctctctctgatgcttgaatgaaatattgctgagttttcatcaccctctttgagccaatgtaatctagacttctgttgcaaaaaggagcagtaatctttatggatcttgacaaaccgttctcttacttcttgttcttgaatttgtagctgctggttcaaaggctgctggtgtagaagactttgcacattttccagatcttgccttgcctttttctctgctacatggatgtctgagtagtgctctttattcagatttctaaagaaaccttcagagctttaagttttga

SEQ ID NO: 343685 - DNA, 603 bp, Cannabis indica
acttgttatagatgttatgttcttgctatttaatttttgttgatattttatgctaatttttaaattatataatgcaggtggggaaattgataaataattgcaattttctcactgccaataacattgtaccattattagaaattgacactaaaaattcaaaaaaaaaaaaaaaaaaaccaatgcaaaaagaaaaaaataccataactatttggtgtcattttataattgacactaaaaaacttttaagtttcggtaataaaatgacaccaaaacttagtggtgccggttttaaaccgatactaaagaaaaagtataaatgtattctttaagtgtcagttttaaaacgacaccaaaactcaatagtgtcggtttagaacggacaccaaaaatttgactttttgtgactgtagaataagtgtcggttttatgaacagacactaaaagtataagtgtcagtttaaaactgacacaaaaagtgtagttatgaaccgacacttgtactcaatctataggtatattttctttgaactttttttggtcttgattatacttttagggctcgtttggaacgtcgtattaggtcgtattaggtcgtattgtatt

SEQ ID NO: 343686 - DNA, 537 bp, Cannabis indica
ttaccaggcataccacaagccatatctttagataaattccaacctttaatactaggaacatgttgttttgttaagtctattgaatagacttactaaaaaaatttcctttcttgtccttgtaatagaaaaccgttggttgttccatacgaatggttttaaccatagttctcttagctttgcctcttagtttcttattcgaacaatccattacttatttaaactaaaaatggattttcatcacaagtgtcttccaagtcataatagggtgagttccttgaaaccctcccactacgacaaggtaccatgactttctgtctaagaacataagttgaattatcatcttcagttgtgtcaagacaacagaggcacttagaccatcttatacagaataagatggtagaacacttttggaatcaagaaaaaatatctcctctattttgctactttgtttttagacttaggcattttcttggaagagtagtatttgttgaaacaaacactttctaatctaatgactatgggatggtccacccctaa

SEQ ID NO: 343687 - DNA, 634 bp, Cannabis indica
atatatataaaaaaaaataaactgatcccctttgtcccctctctctctacctatctctcttcaaaatacaaaataaaaaccaacaaactccacaaccaccacacttcggcgacccacctctggccaccgaccagccccacgcgctggaccactcgaacctcctagtgccgacgacctcaccacccaagcggcgccgctcctttcgttgccgttagcttgggatcgcaagtcaaagttgtgtgattcaaactttgaacggattttccagtccattttggtgtccgtttggcgagatatttttaccaataaactcagctcgttgaggagaacaacctacactaaaccattttgcccaattcgctactttttctggtgacatttttgtagctccacccctttccggcgacatcgcgtaccgttttgacaaacgattggcatgggtgtgatctactcgtcgaggtggtcgttttgatatacactacccctatttttagtgacgttttcggtacaccgatttttaccgccactgattgttaatgtgcacctcttaggggaggttttgaaatcccaaattttaaatatagtcatattatatgtcgttggactcggttttgaatgtagaatgcgatgatga

SEQ ID NO: 343688 - DNA, 1059 bp, Cannabis indica
tcttctttatgaatttttactaagctagggctaaattgtgaagaaaagagattctaggtttatttgttaattaagaggctttattaagtctaattaataaatatattaaattgaaattttatttaataattaattttaattattaaataaatagtttttgcatttaagtggttgaattggaaaatatggaatttgtgaaataatgggataaatagttgaaaaatggcacaattgcaagtggtgagcccacatcccatggtcgaccacatgtttttaattttactatttattcatgaattttttaatgccatataattgaaacctaaacctagaaggattcctataaatagtttgtgatggactcaaattgaaagagatagtagttgatgcacttaagccttttagtcaaaaattgagccttcactcttctctctctattttgaatccttcctctctctttctctcttcaatttttgaaccctatagtgttagagtacatgcccacgcatagcaagttggtactcaatcatagtgtgtaagactatgaagaatccaatcaactgaaggagaatcgggctcagatcttagtgatactctactacagaaaggatacaagggttagagatctgagtggaaggagtcatttaattccactgcaaccaatgtaacgcttcttgaactttatatgtgtttaaattccattattttaaaaattcatatttaagatgttaaacaacatacatggtagtaaatctagatcttggaaaaataatccccaactgttatcccaatttttgcactctgacgtggcatcacacgatggtgacacgtgaaatcaactctatgtacctcctcgcaagaaatatgccaaacagggcaccacatacacttgctcagacgaagtgctctaaacctggcagtgaacaatccgtggaacacgccaacaacatacaacacctcgacgcaactcgcaaaacctcgcgtactctcgaaacccctggacgaagaagaacttgggatatacttggctgtcacggagtgataactctaagatttaga

SEQ ID NO: 343689 - DNA, 614 bp, Cannabis indica
tggtcaaagagcagttcttaagtttgctcaatacactggtgctcatgccatcgctggaatatgtatataccaagtcattcatctatgaacaaagtgagatgcctttagcgagacacttctagtgagatacttcaatcccgcatccgtatccattacgtcaaagataagagtaacaaacagttatgcaattttgtagctatacacgtgttaaaataaaacatggtcaaagcccacgtttcgaggaaatagttatatattttaaattcaaatgtaaaaaactgccaacctatatttctataaataggggcagattatacaaaaaaaaatgacaaaaaatatttgagagaagagagtttaatgattgtaaaacctgaattctgtatccagaaatatcataataagatagacttgtggactatgcagagttaactgcaaaaccatgtaaaaacctggtgtcattattgccattattattcttcccaaatttgttattgtttctgtgtccaatttatcacgaaaaaggcttattaattggatttaacaaaaatctacgttaacaataataaatgaaaataaataacacaaaataactcaaaccagttataattgaaata

SEQ ID NO: 343690 - DNA, 770 bp, Cannabis indica
aggagtttcactatgagactcctatattgtgttgggttgggaagaagctcccttgaatcactactgagtttggtattgggttcctggttttgagccaaggtaacctgaatcctataagaattgtatagtgaagggtctctgtgagactgatactcctttagaacaacgagctatctcgagtccaaaggaaaaaacgaaggggccaaggtcttttaattgaatcttgtatcgagtgtggtgatgaacttttgtagttcagttgtgttgttggtggcaacaacaatgtcatcaacgtatatgagtaaagccatgaagtgcctgattgatttttgatgaacagagagtgatcatttggggattgagtgaaattttgttgtatcagtgcagaactcaatgtagcatgccattgacgtgaggattgcttgagaccataaatgcttttctgcagtttgcagacaacattgtgtggtatggggttttttggtttgtaaccttggggaagtttcatgtaaacttcttcgttcaagtccccatgcagaaatgcattatttatatccatgtgatgtaggttccagtcatgggtggcagctagagcaaagatgagttttagagtattgaatttagccactggggcataggtgtcgaaatagtcgataccaggtaattgagtgtaacttttggcgactaaacgtgctttgcaacgttggatagagccatcggggttgagtttctttttgtacacccgtctattgccaatcacatgttggttt

SEQ ID NO: 343691 - DNA, 659 bp, Cannabis indica
aggggcatgtgttatagtgagatttctctcacctagaaactcgagaccagactcttatttagaggacacgtgtgctcagatttctaacgaaagttgagacgtccatgagagactcctcgaagtctaaacatcgcctgagatagagtcagtgagataatgcgagtatgaccaaagtctgatcgcataaccgtaactcgtattatgcgggattagataatggatccaactcgcatgtatcaggatatgtgcgagtatcctctctatactcctgtgaaagcatagagatcgactctctataatgcgagttggtcccaatgacctaacagccttgatagaccgatatagactcgcatgtctaggttctatcagcttgtcatacgatgtccacaaaggcgactacataagaacgcagacatcctaaaaggatttaagtgttaggaccgcgagcttaacattagaatatgaacagtcaactcgcatgttagagggcgcatacgttgctgaatttagtaactgctattcatttattgatgtttacgttatttagtttagttattgtaattcattgtgtaaacggattgacaatgaatgcaatctttgtataacaaattggacatctgctttgtatataaaggggtgatccaccgtgaaatgggacc

SEQ ID NO: 343692 - DNA, 620 bp, Cannabis indica
cgtacaaagaaaacaacgcgtctggctgacgcatctgaccctcaagtggctcgacacgccactttgcccagcgtcgaacaggatccagccgtctagatggaggggatcatgaaggggacgctgaggtccagcaaattaaagagcacgacgatgtacgtcctggaagttcttctgaggcggaggaagaggcagaggttgaacccccaatgaggctggggagccagccgatgctgacggagacgtcctggttgagggcatggatgacgtccttgttgagggctagactacgtcagtgaggaacttactactgcggttcctcatagaaggcagggtgccttgggcgccaggtgggtaagccctctgtccagggttaccgaggcgcgccttcggactctcgaccagggtgaatacctgggcgaactggattgctacattcctgcctacgacaatcgtgccacaaaccctgaaaaggggataagcaccaggtcgggtgcccatggtcagtaaggggcattgatgcctttgcatcaatactttaagaatgtggcggacatcttcggcctctgcccggcccagttcactcgtaagggcattaaatatctgtctgccctcttcgtcct

SEQ ID NO: 343693 - DNA, 857 bp, Cannabis indica
tcgatccagatatcccagccagaaagctgaaaatgggaaagggtttgttgctcgaagtaaaatcaaaattgataaattttctgagagcaaacctagacgttttcgcctggtcacatgcggatatggtcggaatcgatccttctattatttcgcacgtcctgaatatcgatcctaatattcggccaattcagtaaaaacgaagattgttggataaagaacgagcagtagccctgaaagacgaagttgaaaagctgcgcaacaccaacttcatcattgaagctttctacccagcttgggtcgcgaatcacgtactcgtgcctaagtcgaacaagaaatggcgagtctgtattgactttagaaacctcaacaaagcgtgccccaaagactgtttcccacttccaagaatcgatcagctcgtcgatgcaacagccgggcacgaaatattaagcttcatggatgcttattcgggctacagtgaaatcaagatgcatgcatccgccagacaaagaacatacaagtttccggacagatatgggtctctactgctacaaagtcatgccattcggtcttaaaaatgctggagctacataccaaagattagtcaacaaaatgtttaaagatcagatcggcagatatacggaagtgtacgtggatgatatgctcgtcaaatccaaaaaggctggggggcacatagacgacctggaagaatgtttcaaagtcctcagaaaatacaacatgaaacttaatcccctaaaatgatcctttggagtcagctcgggaaagtttctaggcttcatcgtcaacgctcgaggaattgaagccaatccgaaaaaaatccaagccctcctggatatgaa

SEQ ID NO: 343694 - DNA, 664 bp, Cannabis indica
cccagactttgatatctacaaatcatgcccctcgaactttgacatgtattgaattatggtccatgaactttcattcatgttagagttttttactaaaattggaaaaaagttcttaaatccaacaatctcaatagttcaggagacatttttaacgaccttaaaagttcaaggggcatgatttggtacatgtcaaagttcaggaggcaaaattcctaattagcctaaaataaattatatattttataaaatgataactaaacataaaaattgtatgaaattttaattttgctaatttttatataattttttttaaatattatgagaagttaagtgtagatagacttgacttgtatttacaaaattttattttataataaaagctcaacacgtcctatataataatatgtccagcatgacccatgttttcaagcccatcatggtctataagcacgaattgtttgtgcctagtccatgcccaagccagactttagtgtcctcacttgatccatttttgttatatgggtaggttgtttttgttattatatctcagacctacgtcgagggattgatggcgattctcaaatatcgctgaacactatgtgatacgatgagatagaatgtaatagaaacaaagacacagggaacgggttacctactctcttaa

SEQ ID NO: 343695 - DNA, 1141 bp, Cannabis indica
atatattttaaaaaaaataatatatagtaaatgtatttttataagttttattagctaatttattatatttttcttaatttttttttaaaaatgacataatctaacttagctaatttattatttgttgtatgcttttcctactgagtcttttggctcacaaattctactatcatgtgtaggtaaaggaaaggttgaagctgaacaggagtgagttctgagcttgggtgatgattgtacatgtcaagacggcacgacctggagtgttcgatctcgggacatcttgggctatattttgtgtgcgacaagttataaaaaatattttgctagtatttgtaaaactttaattatgggatcccggtttatataaataaattaatatatgtttataaagtttattaaaataaattaaaagttttaatttgacacgatttttgagaaaaaaaatctttagttagcaaaggaggcacatcaattagaaaatcactgtagcgcgcttaagtatcgaggcgttacattatacatcaagcaaggatactaggaggcctactacctcttatgtgtttcaaaataatggagattgtattagttagaaatcacagctccaatctgtagtagcactttcaactatagaggcaaaattcatggcgaccacagaggcattcaaagaagcaatatggctacaagaaattctgaaagagttgaagcttctagttggaaaggcaaggctatattctgacagccaatcctcgattcatttgtgcaagaatccaatttaccatgagaagacaaaacacattgatattcgattgttttggataagggaaaagataaaagaagaagtaatcgagttggagaaagtgaagtcagaaaagaatccgactgatattggcactaaggtgttactgttagactatatatatagtgtatgtaatatagcatatacaatgatatgaaatgcggaaaatagactgtaaccatatcaataatatatgcaatgaaaggatcgatgtacctccagccattgatctttgagcttcaatccctgcgatagcttcggtattggagttcgggcttcctcgctctctcaactctctttagatggaatttgctgaatgaattcagaatgagtcaggagctcggg

SEQ ID NO: 343696 - DNA, 1404 bp, Cannabis indica
tacaatttaaatttaaaagttattatttgtttatttaatattttatcatattattattgttatttttattatttttattattattcataaaactaagcctaatagagtcaggatagtacttttaccctaaaattatatggttctattattcccacatatgtgagcaagactaacactaaaagttttcaagttataatccaagcagcttgaagtatttgaggtaagaaactctacatttactcatttattgatcacaataggagattttcgcaggtctccttttcttattctttttcagaatgaaacatgtctcagtaaaactgtcgtatctctttaaatactcatctgattctcgcaatcttggtgcctatagaaagcttattgaatttcccataattcttatgaagagttttactgaatcagagtttatctacgtcaaaaattagtatttctatgctgtttgttgtaaattgttttctcatattttctataaaaattgtcacagtaaaccctgaatatctctctgaatactgatctgattctagcaattttggtaccattgaaaagataatttaattttctaaatgttttatgatgaaaccatttaccaaatatttatttttctaagtcgtaattatcattttattgctgtagtttgaaattcgtttgcttcaagattttaaaaaaccatttcagtaaaatatatatctcctacattatgagtctgattttaaagatttttgtttcattcgaaagggaattcaattttctaaaacttttatgaagagattattctttgatttagaatattttagggttaaaactttgtatttttctcctgtgatccgttactccatattttttctcagaaattatttcagtaaaactatgataactctcttactttttaatctatttttaataattagcatatcattagaaagataatttaattttctataattactatgaaggcaactttcattgaattcatttagttattggtcaaaaataatattcattctattgtattgaaagagttagaattttaatattagggccttgacttatgtgttaatttagggagtagtgacgggataacaaggtcttaaacatcagaatttaatgtaagaaaattaagtaattttgtatgtgtttatctgcataaatttggattctttgtgtattggaatatgagttatgatttgctattataagtttgtatatggtactgagaatgtgtagtacggacacaatatgagtttgtgaactgatacagattatggttgttatgatttgtatatgtcgtatgttgttgctaacatctcaggtaaagtgagggactatggtggggtatgatacggggtaaggtcgttgaatgtagagataccctaccctgcattt

SEQ ID NO: 343697 - DNA, 847 bp, Cannabis indica
tttggttcatgtgatcatttatttaattatttgattaataaattcatcaaaatccttatcacactgatattgttgtttattgtgttgtcaacacaatagaaagtaatcaagattgtgcaattaaatgtattcctagatttatcagtacacatggtttgactgatatgataatctacaacgtagtttacttgcaccttggataagtgctatgtcctttccagggcattggttaaagtaagcttgggttggatttatggagtatgcattggaagggaccgatattgaacttgaactagatataataatcttactgtaatatacattcaattcaatatcacctagttgatcctagatgaaatgatctcaatcctgagatggttagaatcgatctcaagagtgttatttgtgttctttgatttgttagttaagcctaccctttgttctgggtaatacctacattttgggaacatgatagtacaattgagtgggagtgcttaacatagatatggaatctatagcttctatccagacataaaagtgaaacgatcatttctttcgagcttggctcaatagagataaataatagagggctgattttagtgattatattagttcactaaaatatcatttataggtggctaagtgttttaaggataaaatacattgaaagggtgtaacggtaattttgtccctatgcaatgtaaatcatctatagaggattattgattatttggattataacaatggataattaatagcgtatctatatcgtgaaacatatggagcgttttgtgtaactgagagtgcaattccaagttctataatggttcaatgaggaattaataag

SEQ ID NO: 343698 - DNA, 683 bp, Cannabis indica
caatgacagagcatgctgcctaatttagtcattttctcaaaattaaaattagtgtatattggcaaactgatcagtactttcaatatatcttccataaatgagagatcatatatatatttgatcatgtcagaagttctttgaaactatacacaaagagttagtagttcaaatcttctttatttagttttgtattttaattacatatacttttaatataatgattaatgtttttttatcttttgttttacagttcaagttagacgctccctatagtaacgaggagatcaatgccgtacgggatgagtgggccgaatttgtgaagcctttgattatagattaagtacttaaggttactacacttttgttataatacatgagtaacaagttttatgattattgttatcttttgcatatgttattagtttatatttagtttacgatatacatggaatttaagttttagaatcgattttattaacaattttggtattgtgtgattagttaatagaatcgattactaattttatataagttttaaaaatgttattttaattttttttgtattatgtatttactattatatagagttattctaaaatttgataatgcaggtgggaaaattgcatgaaaaatttgcaattttcccttacttatatttgtgcttcattttataagtgacgcaa

SEQ ID NO: 343699 - DNA, 684 bp, Cannabis indica
tagtaagtagtacatagaaatgctaattcttgtaaaacaattcaattagtaggaattgtttttgagttattgttatcagttcgtggtgctgaatagattctcagattttatagttagagatttttgctataggttgtgctcttttttgaatgaataaactgaacttttatcttcttcaagtttgaaattttgggtatccatcgacatcccaaaacgccaagtagattatataaagtgggctccatgtttgacattacttgctattttgctcttttgttggtaaagtatgattttgagataattgagcttattggactacaatctgatttcaatttaatagtctacttatataaagttggaaacttggattgagaacagagtaatgagattaatttgtatagaatgattctacctcaatataattaattggcatccaatggagtaaacatgatattttaatgagtattagcaaagttttattttaaatcattataatacagatttttgttggacgaatataatataaaaccttttttattaaagtgttcattctcttccaactctattgtctctaatagggaaatagttgtgaagggagttgtaactttagggttgatgttgatgtcgggaaaatgataaaaaataattctgacatgagattagctgagagagatgaccctgatg

SEQ ID NO: 343700 - DNA, 592 bp, Cannabis indica
tactgagtcgtgtatgagattgttatggtggggtatgatacagtgatgttactcttgaatatagagataccctatcctataacaatggtagggctacataggcccaagttattatatgggcagattaggcttaagatattgtagggtcaggttacgcccgagttatgtaagtaatggcaatgatatgccaatattatggtaatgatattattattttatagtattgatatgattatgttatgagtatgagattagagttatgatctctgtatatatgtatggtgtgaacaattagtatggacctatatgataaaggtttctatgtatacagttatttggttatggttataaaataaggtgtatgatattgctaaaacttaataaatacattaatggtatgtgtgatattatatggtattgtatgataagcattttcttactgagcttttagttcaccccccttactttccccctattggtattagacaaggaagtatgtatagtgagcaggatgagttctgttacgtatactgtgagcggctacggacggacaaacgatctagaatgtcggtggtgccttagttttatttta

SEQ ID NO: 343701 - DNA, 774 bp, Cannabis indica
tcctattaaagaatgtaatttttagtttccaatcaaactatttatctcgtagataatgctaaatcagtcaattatcccaatctccctattgtatgtaatcaaggcaaagcactcaataattaactcttttacctaagcagtaaatccatgaagcatgcaatttatttaacttagataaagctttgagatttatggagatagactaataggcaacaaataaatgaagcatataattcatttaacctaggttctattcttcatcacaattaaaaattgtaatttttcacaaacacttagaatcctagactattaggtgaatagtaatcctaagataatggtagattaaagtaaaatttaatttagtggccatctaaacaagatcaaaacaataatcataacattgacaaagaagaatagaagcaatttgatataatggatactagaaattaatattcaataataaaattaagaattcatgtatcgggttttgaaataacccttaactaaaaaaaactactcagaactagtcattataaccaaaatcataatatatttagtaaacgtagaaggagaagaaaagaactagaatgaagaacaattcgaagccgatctttgtctattccttgctctctctctaatttgtagctttagaatgattaaattcgtagcctaagaggtcctatttatagtgcttgaaaagatagatgaatccccttagaattaggattctatttacagtattaggaaatatctcactaaaagaaaagataactc

SEQ ID NO: 343702 - DNA, 1289 bp, Cannabis indica
gaaatgtcacgacattaatgggaaaataattttgaggatattccggactagtttataattttagaatgtcagtttggtggattagtaaaattaccaaaatgtccctaggctatttttaaaatttaagtttctttgaagggtaatttagccattctttaaaataggtattttatactttaattgttatgggctgacttttaaaagaaaaaaataaataaaacaataataaaaataagaaaagaaaaccctatttaaaggattagcttgcaaggcaagaaacaaaacactccattctccttttcttcttctccttcgagcaagccaaagccagccaccctagagggatttttttcagcttcctaccctcatttcagagctggttcttgtcccaagttagcctagaagtgattgaggtaagtttacaccttataggttgtgaaatttttatgattttggctggtttaaggttagggttttgtgtttctgtggctgtagggattaaattgagtttgagttatgtttaggctaggtttttgagcatgttgagaatggttttgagaggtttatttggctgcttggattgaaatttgttggatgaagctaaaagttgaatttcttcacttgcacatgtgattttaaattaaagattgaatttttgtgttttgaagcttgagatatgttgtattatgattgttatactgttctggaaggtttgaacaggtttggagaagatttggtttggttttggagccaaaaacccgagtttccattttttgcagcaggggaaaccgattaaccggtttcacaggcatagtgaaatcggtcgaccggttttggcaacagtgggggaaaactctagtttctttgaaactgatttcgctcggggtgttttcagaacttagaataggttattttagtgatgtttaagctattttaaactagtggagagttagaaatttgtccgattatggagctagagcttgtttggaatatggataagttatttatcgaatttctttgtcgtgacataggacccgggatcgcttagcttgttttccactcaggtcggccgtacgtttgagttctgaactaaggtaagaaaagtggtaagcaccatatatggcaaagtgttatcggttgaatgattatatcttgattattatcaagattcttattaaaagtatgtggagcctaggttatgacctagggattgggagcggttattaccgttacgagtaattactcctgaaactgcggataggtttcttacttatcgtttgctttatcgg

SEQ ID NO: 343703 - DNA, 820 bp, Cannabis indica
aacattaaatgttatttctgatctatattaataagtaaatctgtttatattgaaatgagttttatttagggcataaaacccaacagatagatgtcaccacctttaggttgtacaaggctagttgacctatcatggcattgaaagctgagggtatgttgattaagatgaactggccatcaaagttctggttgttggattctctctaataatcagcagcaatcagatgtaccccatgagtacaataccttggtcaaagaagccatacattacttatgttttgggttccaaattggttagttggagcctcatgttttcatatgttgatctgaaaaggatgttggaggaggctccattgtccaccatgcatcttgccactatcatattcccgatttatgcagtaatgaccatggggtcatcgtgtgggaaattaacttgagcaacatctccttctgtgaaagagatagtgggttcttcaagctttggttgcttggagtccctttctttgacgactgggatgtcgcttttaggcttatgatgcagtgtctgaacatagcattccctagccttgttggtctctcctgcgatgtggggtttgctgataatgacccctaagtgacccactactggaggtggcatagggtctccaatttgggcagcttgtgcctgagattggtcgttctacacataacgatggaagtggggattgttcttccttataaggaatttgatctccatcgacaaattttgactctcattggtgtcatggccaaagtcattgtgaaactggcagaactttgacatgtccctcttgctcatctcc

SEQ ID NO: 343704 - DNA, 644 bp, Cannabis indica
ttctcgttagaaaggtttgatcaaggcgttataacgattcaatcccttttccgtctaaaaggtttggttagggagttagaacagttcgacccctcttccgtcaaaaaggtttggtcgaggcccttttagaaagttttcaaaattgtattttttgaaatgatgggtttgcatttgtgctatgtatttctaaattaattccggttaatgatacatatatgccccttaagtaatttcaaagggtttacgctttataattacttgtttgaaaaaaatgattattttattcacaaatgaagttcaaaatatttcattagccatgtgatttacaatcattaatctcatgagaacatccccagtttatctgtttcttttatcaatcttccaggagcacctggtttcgataaaatgggttttgatgtttagggtcaatccatcacatacaccctcaattgttttaatatcaagggtcaatccctgacatatcccaaggttctaggtgaagtagtcctggttcatgttgtttgtcttcgactgctattgtccagctttccacgtggcagctggatatggcaaccacagtgcgccgatatctactcacgtcgcaattcttttacaaaattgctttaccagagtaactgcccctt

SEQ ID NO: 343705 - DNA, 502 bp, Cannabis indica
ctgaacttttcatccaggttagacatttttttactaaaattggacaaaagtccttaaatcaaataatctcaatagttcatggggcatttttaacgaccttaaaagttcaggggcataatttggtacatgtcaaagtttgggggtaaaaatcttaattagccaatattaaataattaaatattaaaaagtaaccgatccaatatgcacttttgcggattggattggatttgagttactatgcggattagatccaaaatattaaattcacacctagtgcggatcggatgcactacgagcaaaatagtgtagattgaatcggatgaacacccttaactatatcagaaccccattgcactgtagagaactgtcaaatacaccctaaaatttatgatgtcgcagatggaatttttttttttgtgaaaactgtgttttttttcgctataagaagatagtatctttccatcagttcaatcgctattatatagatgaatggattgaaata

SEQ ID NO: 343706 - DNA, 844 bp, Cannabis indica
aatgaataaataaaataaaaacttttgccagtacgtttttatgttggcaaaagttagtattgcgctacatttttgtgctagcaaaagttactattgcgctggtaaaatagaatttacttgtcttctgttcgcaaaagggggttggctaatcaatgttggcattagaacttttgccaacacaaaatgaaaagtgctcgcaaaaatgatttttcccagcgcatttaagttagattttagctagtgcaaatgtacactggtaaaattttaacctctttgccagcgcaatttacgaaatgcgctggtaaaagttacttttaccagcgcaatagcgaactgtgcttgtaaaagtgacatttcttgtagtgataaaaccaaactgttagggttgagaaaattatacacgggtcgaaaacgaatcgatatgtttgacacgaaatataaaagtgagtcaattaaattatgacacgaacacgatacgatgtcacattttaatacccctaataaaaccagatttttgggcggagaaataggaagtaactctatttcatttagattacaaaactcagtggtaataacacaatcttgaaaatttgactagtcgctatcaatgattaataataattaatagcagcataccctacctctaatgtttaggaagttgagaaacattaatatatttaatttttaaaaaaataaaaagaaattaaagatagtaattaaataaattaaaaattaaaataataaattgtataaaattttaatttaatttaacatattaaaatatttattttaacaccaacataaatacaatattcattactaagtactataataatatttcaaa

SEQ ID NO: 343707 - DNA, 1246 bp, Cannabis indica
atactactagataaaagtaaaaaaaaatatggccgagatagccaaggatctttaaatgccaatatagagtctcgtgttcctactctttttcaaataccttttttaagtagagagcggcccaaaataaaattacgccatatataactaggggatcttccaactgcaacaaaatattcactactagaaaattgggttttagtgacactccacacgtgtcactgaacccttttagtgacacttcaacgcgtgtcactaatgaggctgactggaaagacagtttttagtgacactccacacgtgtcactgaaacctattgcactcgcgttttgcgcatcactatagggatatagtgtcaggttttgccagactaaaaagataacagccacacacaaagagtgtcactatatcctattttctttttttttttcttttttattaatatatttagagttatagtgacacacaaaaagtgccattatattaagtattttttgaaaaaaaaaataattaattattttaattcaaattttatatattataaataataatttatattaattatatacaaatacaattaaatataataataataattttaattaattcaaatataatatctcatatttttattccaatttaattatatgcattattaattgttttttaaaataaaaagaatttcattattgtttttatttcagggtagcctaaatcaaatgtttacaagtttttaaagcatttcttgaaaaaagaataagaatgaaccattttctataaaaacattaaaatgatttctctttgaaagaaccccagaactaaactatttgaataaactgaggagagtaaaattaggagagtaaaattaggtcttccaactctctttcaataaccaacattaacttttagatagtcaaatgatattactattttggtgcattctcaataacctgtttatgctcctctaaacactctcaaatgatcagtgtgcaataaatagtaaagttattcctgttaaacaaactagtcaggaaagaaaatcaacttaatgcaatcaacattactctaaggtgtattcaccatttactcaatgtgagtgttcatactggaaagaataaaaaaaatactgtaatggaagaaataataccacccatactaaaagcaaattgactatataattaactatccacgtattttttttcccaatcaaactaagaagcaaagagaaattagataaaaaaaaatagtg

SEQ ID NO: 343708 - DNA, 904 bp, Cannabis indica
aaatatgaagaacttgtacacaagttgaaacaagtactggaatgcaacaacagaaaaaaaaaaacactcaagtgcaactgaaatattaagtgaaagaaagataccaaccaagataaagcacaatccaagcctattcttctacatccaagcaataatatattaaaataaaatttatttgacttttttaattttttttcagaactcatacaaggggaaatgttttctttaattacattgcacgtattgattttttaaatagttgcataatagttaatttaaaattgtatgccatatcaatcctataagaatatttttatttaaggaaatatatttctatttaaagaaataaatttctatttaaggaaataaataaataattgattttctgataaatgaatattttatattcattgaatctggacaaaatcaattatgtaatattctatatatggtcagatttctatattcattacctgatttgatttcctgaattaattgtcaaaatattctgacaattaatgtggcgcagatactgatggagtatctcacctataaatatagggtctcggtccccgagctcctcactcattctgttcataacagcaaaattccatctaaagagagttgagagagcgaggaagcccgattacccacatcaaccagtttcctttgcagatcaaagcttatgtgggtttgaagctcaagaatcaatggctggaggtatttcgatccttattcatagtgtatatatgtttgtttattccgcatcttatatacatatacatatatttcagtttatacatataaatgtctaacagttggtatcagagcggattatatatctctgccttgatttatttttgagttttcatatatatatatatacattttacggggttcttct

SEQ ID NO: 343709 - DNA, 964 bp, Cannabis indica
tttaaacaacatacttgtgagtagatctaagatcctggtaaaataaattccaacacatagttgctgctaattctaccctggccgctccttaaaattaggagctctctgccacatacaaaaaaaattgaatgaagatttccccaatctaacttcgagatacaatgagaaaacttctggaaaatgatcaaaatatccttccaacataaaaaaaaacctttgtcgtttgaaatttcacatgccaactcggattatccataactcggccaatctttgaatagtttctatcttcactcccttgcttattattccatgtataaaatgatctagtgtatttgatatcttccatttgacacacttaaacacacttcttgaattcctcatttccactaacatttgctttcttgccaatcatttcctcatgataaataatgctagaccggtggaagaattagaaaaagttgaaattgatcccaccatgccgactagggttgtacataaatttttgtaaaccgcaaaatctgaataacccgcccaaaccaaaccgagataaccctacgaaaaatataaactgaaaaacctgacgaaaatataacacgcccaatcttatattgggcgggttgaaaataatattaacccgtccaattaactcgaactaacccaaccaacctgactaagagggtttttttttaatattatttatatgttcttattatatgtatttatatatcatataatttatatgactattttaaaaatataaatttcaaactaatatatattttttatggtggttgatttgaacattaaattcattctatatatatttgtctcattattacaattaactaaaatataataattgtatataaatataaaaaaatattagtggtcggtttggacaggttaacctgaccaaacccacaaatttaaattggccgggttactattttctttttcttaattg

SEQ ID NO: 343710 - DNA, 540 bp, Cannabis indica
aagaataaataacattttaatttgtgacatttttaaaaaaatgtgactataagtatatttagtagcatttgacaaaaaatgtcactattttgtaaatatttatctttttttaaacataataaatatttatatttagtatcattttaaaaatgtcactagaatattttaataataacattagtagaaatgacacaaaataataaatttagtggcattttaaaagtgttactataacacaacaacacgattttgaatgcattttttttttaataaattgttttttagtttataattatttaaaaattgcataaaattggtatttatttcaaacatttataataaaatttcaaatgttataaatgatataacctaatttatttgatgtagaaaaaactaagtaaatgagtaatagcataggatcataataaatttttttgaataaaaaagttgaaatctgtcaataattattaagaataaaaaaaaaaaaaaaaattataataataaatcactaaggttcttcttcttcacccatgtcatttg

SEQ ID NO: 343711 - DNA, 983 bp, Cannabis indica
atgattcagatttcacctcagttggcaaaagacatggtcaaatcgagcatcaagtttgttgtaggcaaacttcataacttgatgctacaatctaatctgttagaacgaattaaagctgctcagctaacagatccaaaattagtgaagatcagggaagaggttttagctggccaaactagagattttacagtgtatgatagtgggatgctgttgtttaagaccagagtttgtgttccaaatagtatgaaacttagaaacgagattcttatagaggctcataccactccatactccttacatcctggcaccaccaaaatgtaccaagatcttaaaccctacttctggtggagcaggatgaggaagaatatggtagaatttgtatcccggtgcttagcatgtcaatagatcaaggctgaacatcagagaccggcaggtttgttgcaaccttcgacacttcctgagtggaagtggcagaatatcaccatggactttttggttggattacctagaaccacaggtttatatgattcaatttggatggtggtagatcgattcacgaagtctacacattttctactagtaaaaaaaacctttacagtggatcaatatgtagaattatacgtcaaggagatagtgagattacatggtgttctaaagactataattttggatagggatctgaagtttacttctaagttctggcaaagtctacagtgcactactacaaaattgcctttttccaacggtttataactgtcttttatactatttcccaacggttcctaaaaccgttggctatgtgggtgtcataaaaatatggaactttaaatgacagtttataattgttgaaaaaaatcacattaaatgacagtttataactgtaaaagaacgattttaaatgacaatttataactgttggaaaaaatattataaaaaataaattattttttaatatatatttttaaatattaaatatatataat

SEQ ID NO: 343712 - DNA, 907 bp, Cannabis indica
  modified_base (882)..(882): a, c, t, g, unknown or other
ttttccaaattttccaatttttgaataaatgataaatgcataaatcttttctttatttcagctaacatatatcaaataaatcacataattacataacactaagtccactaaaggacaaaagcttatggggcaaaatgactattttgcccctcccacactaaaaggattaaaaagcacttaaggggtattttgggaaaactctaaattcccgactaatcctgacattcccaatgtctaaataaaccgtcccactatactaaaatattagattgtgattctactgagccatacaccgcgttccatgttgccgggcaccgaaaatgcaaaattatgaaatttcactatatgacataaaaatgcatttagaattcaaatataacaacataaataattatttaaatatctataaataattttcataattaaatcttaattatctgctaatttccaaatttaagctaagcggtcgttacatgaacctcctcagaatgaaaggaccatgaatgtgatctcaggaggatcagaagttagtggaattacgtattcagcagctaaacgccatgcatgagaaccaatcaacagtcaaggaaagccgagaaagcagagacaatcgttggacagaccatcagctttgtcaatgacgaagccacagatttccttcaccctcaccatgatgccttagccatttcattatatattgcaaactattttattaaacgtgtattgatcgataatgggaggtctgctaacattttatttatcaatgctcgtaaggatatgaaagttgacgagtcaacaatcacccacaaatccacagtcttagtcgggtttagtggtgagcaaaagcactcgattggagaggtcaacttgcagtgtttgagngaggagtaacctcaaccaagttcat

SEQ ID NO: 343713 - DNA, 703 bp, Cannabis indica
ttgtcgtatgaatgttctaaactcagtaccgtgttgcacacagggatagggttatggttgggtgtatgggtgcctcattatgttatcatttatgcttttcatattgagtctgtcaactcacatatattgtttgcatgtgtaggtatgggcagagctaagggtgagcagccgtgagagcgagcggatggagattgtacatgtcgtggcagttagacctagagcgtacaatctttgggacaactggttatattttgtctagtcgctaggcgacaacttttgtattacggactatgtaattttgtaaatattttgtaacgggatcccagttatatatatatatgctattttgggtatatataactatttaagtaaagttttaattaatcacgtgttttaataatgtcattaattagcacagacctacacagctagtataaaataacaataacacgcctaacctagtagggtgtgacaatttagtatcagagttgccaagttttcttctgaagatcgtcacgacatgtacaatcatcaacagcggtaaccttgactgacagtttagtaagcctttattactttagtagtttatttaattagtatgttagaagaaaagtttgataggaagcatgttagtagcctgatagttgaataggcgcatgttttaatttccaaaataagttgtaattagtaaattattcttgat

SEQ ID NO: 343714 - DNA, 557 bp, Cannabis indica
ttattaaaaagactcattgtcgttggctaaaagagaactcaacattttggtgctttcattgagaggaaaatcgcagatcgctcttttcgacattcaacacgatggtgcaaactcgtagagacctgtctaacacaacaagttcacagacgctggatctgacattgtaggacccagggagttcaagggttccacccactgtcaatcctggacatacgggaaacgtggtgaatggcgggagaactcctcttacagaaactgtgcctcgtgtgcaagagactgggaataacagttccgcacgcagccagggtcttcataacaagactattctgccaggaatgaatgcccaaacaaccatcagagacgcaaccgaatcgcaaaatcttcgtgctgcgctcggactcatgcagggtcatagaaacactctgcatcatgatcaggaggaactgcgtgctgcagtaaatctcgcgtttcatgaacagaggcgtatgttcgctaaatggagagacaaagagatggaggcattaagggctcaccatgtagaaatcgaagatcgtagt

SEQ ID NO: 343715 - DNA, 845 bp, Cannabis indica
tctattatggtctaacatgattcaattccttaccaaattctatgcaattacaggtttactcaagtaatttatagtcttttcaaatatataaatctcaattaatgtaaattttctactctcgtaataaattaaatatgtaaaaggcattatacaccgaaactctataagctatccaaactatataggtactctcgtcctatatcgaaatttgttttcatttagctatagcataattgatactcacttctcagatttcgcatcgaaatcataaatattcaattggtgataaggaaattaaaagtaattaagtacaaatgaaatgaaatacatagaaattgggagaaaattaaatcacattaaatccataaattaacgtcaaactatatccatctaacccctaataaattgcttagctactcatattcatcgtagcaaattaaaacgtattaattcagaatagaaaaagaaaatagagaagaaaagaatgttgaaaatcccgttaaaaacgaccttcgcgattgatttttcttctccaatttcgtgttgggttttatgccctaaataaaactcatttcaatataatcagatttacttattaatatagatcagaaataacatttaatgttgcatggttcacatgatttatttcatgattatatgtacataatgtatagattcatctgaaacccttttcacatacttgatcctgtttattgtgccgtcaacacattggaaagtaaacatgactatgtgaataaagtttcctagatttatcagacacagggttttactgatatgataatctacaacaagagtttacttgtatttggagaaatactatgttc

SEQ ID NO: 343716 - DNA, 1075 bp, Cannabis indica
aataaatagttttggtatttataggattgtgttatacccgaaattcggctaccatctcagtggaggacacatgtcaagataaagggaatatggatcgataaaatcacttttaatggaataactcattaattgcataagtaacagggcatacatgcaactcgctgactataaggtcttatgcgagggaaagatatgcaaactgttgtttggtatattaacgagaaaccatatgtcattgaaggcataaagcgaggcatcaactccgttacatctgggaagacaaaagcgacgtatatcgactgtgaaaacacttagcatataatgtacaaactaagtataacaatcgggttggctcgagacctaataagcgaggtgcctatctcgctataggaaggctcattctagtaacttccctcagtttacttcagacatcttctcagcgagacttactatcttgaggagtcagaagctgacattcgaatgagcctcaaaaaactatctattaataagaaccgcgagtgtcataaatgaaacgttaagctttcaaacaaagaagcaacaatgcgtacattttcgaacttggaaggataagaaaaaagggtccagctcgctatcatggtcactggaactaagatcctgttgagacatcccagagtgcaacaattaaagatgtgtttaaacacacaatcattttgacccagtaaaagcgtgaaaatcacagctatatgattgttaaataataatcgcatttacactacgtgatatgtcaactttgtaattaactgccacctatgtgattataaatagtggcaagtaagataaaaaagtggacaaaaaatcatacaaaaaaaggccttcaaaaactatcagaaatctaataagattgactcgtgaactatgcagaattttaactgccaaaccacgtaaaaaatcatttgtgttcatacctcttactttactgcttttattttttctgtgtgaaattatcactgtgaggctcaaattttggttaacaaaaatctgcgttaacattttggtactttcattgagagcctttgtgaaaaagctcagaaaa

SEQ ID NO: 343717 - DNA, 944 bp, Cannabis indica
atggtgtcaatgatgatgagcgaagcatataaaaaagtttcctgctcattaattcctttgtttttgagatcccataagaacttaacccaatcccacattcttataccagcgtcacagatagggaagataccccaaggagaagatcgccataggtgaaaggcaacattacaagagagaaataaatgctccatagtttcactttctgctccgcacagggggcaactctcatcctcaataggaaaccttctacctaacaccgatcgaactgggagagccttggacagaatacaccaccaaaggaccttgagtctctctgggattttactattccaaagcttgttccacatagagggagcaacctctggagggttcgaattatccacggtttgggccaaataggcagatttgcaggtgaacctaccattactttccaaggtccagacccagctatcctttccccgaccagtagggacaccttcgctgaggatagcagagatcgtttcttgattaaacaactggtggagcagctggaaattccatccaccattctgtaacaggagctcggctaccttagtctccctagtcatgacccgcccacttggttggggggtgaatccctttagatgcgcaatccaaggatccaaccaaatgttggtatcctggccatcacccacacgtttacaagcccccttacgaatgacgtctcttgacttagtaacattcttccaaaaccaggagtccgaggctttcggaacacaatctagaaaggactttcctttaagatatttggcctcaaggataaattaatgagataaatttggtagttgaacatcactacatatattcatgagataaattaatatacatatccaaaattatgttagttaagaactgatcatccacctgccataaacatgagaaaaatattgagattttagctataa

SEQ ID NO: 343718 - DNA, 576 bp, Cannabis indica
gggaaaaagataaaaatatcatgatatttaaaatagaaaaaattgtgcaagaaaataaagctgaaactttaagcctgaattcgataatgttttgattagattttgaaaaaagtcaaaacatgaaagttctatatctctcttttatcttttcggaacatcttaaatcgtccaatttcgagtaatatcgagagagttatggccaaattactatgagtcaacgcagcagaaaactcacctcctcttctaatcctaagcagaataggttttctaatcctaaggagaataggttttttcttcagcgaattttatcttattttatcattttttggctataaaagaaagggacttcaatagttttggccaagcaattgtagagggaaaaaggagtacgaatttcagagacagaagtcaatactagaggcattctgcagagggtttttagcattattttattctctatcttcttctctttcttaaagttaatatgtgtaattttgcttccatgaacatgtgtagctaaacacttgattagggttagatggatattgtttgacattgtttatggttttaatatga

SEQ ID NO: 343719 - DNA, 738 bp, Cannabis indica
aaacatgttgtgagtgttgtccttacaagataagaagatggtgcacaataccttctatactacatcagcaagagactaatcgaagctgaaagtcagtacccactcatagaaaagctgacctacagcttgctcttggcttccagaaagctaaggccctacttccaggcacaccctctgaaggtatacactaatcaaccattgcagcaggttttaaagaaacctgaagcatcaagccgactactcaagtgggtcattgagcttggccattccgacatcacatgtaattaagaatagccataaagggtcaggcccttacagacttcatggctgagtgcgaaaactcatctcttaaaatccctcaagatccaagagaaaagcaagagccagagaagaagaaagagtaagagcagtagcacaaacctgaagaaccaacatggaaacttcatgtttatggaagctacactgatcaatttttcgatgcaagcattgcccttataacacatgggggcagtaggtgcacggagcaatcaaatttggcttcaaagcctcaaataacgactctgaatatgaagccttaatagccagcctcaagctggcgtatgaagtacgggctgacaacttggacatattcagcgactctcaagtagttgtgaaccaagtcctaggtgaatacacaacttgaggtgaaaatatagtggcctgcttgagcaaaattaaagacttactaagttagctcaa

SEQ ID NO: 343720 - DNA, 745 bp, Cannabis indica
gtaaaaaatagttcgacagaggaatttgagagcattccatacatttgtacactgctaaactcattattatggactcactacggtttgaccaagccaagagaagtgtttttggccactgtcaaatggttttggcatttttattgagaccatttaggttttcttgtttcctctttatgctcacccaaagatgaggtctgagggtataaatgtaattaagcatatatataattaaaatgttattattagagtaatatagttaatttattaaattcagtatatatttataggcgaagataggcattttggtgggaatattggatgtggatttctttggaagagccattttagaaatttgattagctttgaaagttgatacacgtactaatgtaattggggttttgggtgttaggcatcaatcaaggttttattcactgagatgctcgaggaaaataatcacccaagaatcaatcatatctaacgtactggttgagtcattcaatattgtgcactacattatattatagtttataattttgaatttataattttttttaataatcattattctttgaggggaagctcagcacaccatctaacttccgtaataataataataaaattgtttaaaaaataattttaaataataattaacaatattttttcttcaattatttatcgtattaaataaaataaaaaatacgtgtaatttttttttcctagtatatatatacatatacatatacta

SEQ ID NO: 343721 - DNA, 502 bp, Cannabis indica
acatcgagcataaaatgttggatcttctatttgataatgtgaacgatgacaatatgaagaaatttagagagtggtggtgtgtagatttatggcatgttcgttttgtcatcaggcaattcccaatcattcccgtcaccaactggcataattgtaccttcatatgtgctcctctaatattctgttgtgtaatatggcgagcatagtgcgtacatgctaatacttcgttgatgagctgcagcacatgcatgaggacaaggaaactacatgcactagaacaaaccgcaagtgcaagtctgttcctgcaagtccactgttggactttggacctcaggaatgctacagtagtagtgatcgggaagcctcttgcgtccttagttttgctattgaagctccagcccagttgctcatcattacattgtaatgtacctttgaaaagtacaaccgaacctatttttcaaatccaatttcctcaagatatgtgcaaccgcaacattcattgccc

SEQ ID NO: 343722 - DNA, 798 bp, Cannabis indica
gacaggtgctgttccattacctgagagtggaagattcattgttctgacattgaaagatccagtgttgttatctccatttgtctggttttccagccattatgattttcctccaaaattaatgaaaaaaaattctttcccacagacggcgccaaataatattggtggaatttagacaacaccaaataaaataatatatttaaaatatgaacaggattatgcaagtactctacccaaaatggcgagtattcaaattatggatacacagacgtactggaaatataaataatacatagagaatatagtggttcagtcagatcaaggtctgcttagtccactgttgcaaggtttttctgtcttgtcatttcatgttggatcactcctttatatacaaaacaagtgtcctttgattacacaaagattgatttaattatcaatccttttgtacattgaatataacaattaatttaaataaaaatgtaaacataataaatgaagaacagtttcggcccaattcactaactacagcaacgtatgcgactttcatggtgcgagttgtctgttcatattctcgcataagctcgctggctaaagatgcgtacaagactaatcgagtttaagatgtctgcgtcctgtttgagttgcatatatgaatatcctgtaataggtcgataacttaggacacgtgaatccttatcgagttatctagaacgttgggtcatccagaccaactcgctgagtagagaatcgatctttactactttgcaagaagacctttatagtcctcgcatatatctcggt

SEQ ID NO: 343723 - DNA, 529 bp, Cannabis indica
gaaaatgaaaggcccggggaaccctgccaaaaccggctagccagttttacacgtacgtgtaaaaccggttacccagtttgcaccagttcaccaaagaaacttcatttcttgctcaatcctccaccaaatgcaaccaaaccttccagagtacctaattagggtatacacaatatattccagccagtatttcaagaaaaatccaatgaaactcaatttgccattaatcaaagctttgagttcaaagctcaaacttgcataaattcaacacaaaaccactaaatcagctattagaagttaaaatcaatccaaatgaaccctaaaattcgaaacctaaacatcccaagccctaacagccactaacccatgaaatcacaacataaaaccaattaaaaccttgagaaaacttagttaaaaatgtctaggattaccttagcttcaagggtgcttgatttcttagcttcaaaccagccaaacaacaagatttgagggtgattcgctctgggtttgtcccagccgaaagagagagaga

SEQ ID NO: 343724 - DNA, 1056 bp, Cannabis indica
aaaagatgatgaaattcaagccttcagtcaaattttctgagccatcacttctacctatttcgaaccactctcctctctttctctcttcatattttcataccctttagtgatagagtaagtgcccacacacatcaagtggtactcaatcatagtgtgtaaggctgtgaagaatccagtttcaagagaaggagattcggactcagatcttggtgatactctgctacagataggattcaagggttagagatctgagtggaatgagccactattattctgctgcacccactcttaggctattgaaactttatatgtgtttatttacattgttttagagattaatatttaggatgttaattaacatacatggtagtaaatctagatcttggtaaaacatattcaaacaataagcaagaataattaagatcatagtggatccaaatttgtgaaatgagccataaattggaagagcaattttggactcaaagtaagtgaatcaatttggattcaaaaattgtgaaaagataacaaaattggagaataaattttgaatatcttaaataatcaaagttgtgaacaaaattgattagaattttgttaactttggtataattttaggctaatctcaatgaggagataatcttaaaattatgggtaaaaataatcacattattttgtgagtagtaatgtgagttcggtattttagttttattgaaaaaactaaaaatgtcaaatggtacttttaaggtgaccttaaaaaatcatttcaagagaaaatacacaaaagtgatttatatacactttatgttagaaatgtgggggtgagccacaaatttaatcaaaatgtgttgagacattattgattaatttatttgattttgaattcaaattctaaattaaatttggctatgtgcatatgtaaaattttgacatattttagtgtcaaatcttggtgaaaataatttcaagaaagaaattaaatttaagaaaaattatagagaaaaatagtcttctatattttaaaatcaagattgttaattccatttttggcatatttaa

SEQ ID NO: 343725 - DNA, 598 bp, Cannabis indica
ccactgctcggctggacattatccgtgcaggtgtatgttgtgctctgttcggaatatctcttaagccaaatgtagggaattaggtccacatgtatccagcatgtgctgccacgtcatagtacaaaaaatgggataacatttgccccccaagtctgcacggggcttctgaagtcacgcgtagacttcactcgagccgaccttgcatctggatgggtgacatgtgttggatgcgtctgttcgtgatccgatgtgactctgaccaggagtcccttcagttttcagcataatgctctgattaaattgtacctcgagatgcgcctttcactcacatgcttttgacggttactcttctccaggtacttgattgcttttaatttcccaatatttactttgaggggaaaccaaggcgtttgagattttacaccctttcactgatttgcttataaatagggcaaaaaatcctcataaaccacttttactatttttcttgctaagtaatttcagagcaaaagtagtttttttctcttgaatctgtcgtgaagttgtagcagaaagaaccgatcagctgttgggttttatgccctaaataaaactcttt

SEQ ID NO: 343726 - DNA, 741 bp, Cannabis indica
gttcctagagtgtactcagacagccaaagttgtgaacacttgtataggaaccctgtgttccatgaccggactaaacacatagagattaagtatcactttataagggacaaagttactcaaggtgagatacaagtcgaaaaagttcctacagaggagaacccaacagatatgggaactaaggtggtgacgatctcaacaagttcaaacattgtatgaacctgttgggagttgacataggatagtaaatggaaacttaatcaagcaatgaccctcaaagacaacaaaaaataaatacaacaaaggcaaagacttttttggactgttagtatggaaatttaagtggaaattattgaataaattcccatactaattatctcataaataagttacaaggaaaaataaaataagaccttttacaaacctcaacagaccattataactcttggagtagtcgattctgttttcgtaggcttagatctttaatctctttacaataaagaagcaaataacaatatctcaagactctaactaactttcagcaagacaaggaaaaacaataacagttttctaactgtttctcagctaaaaaaaaacacaacacatcacagccaacaacaacaatataaaaggggtcaacctgcccttatttttcagtgtgttttcagctcaagcaaaggagatagcagcagccattctcttgtagagaatcacctcagaaataagagagaaaacagagagaga

SEQ ID NO: 343727 - DNA, 544 bp, Cannabis indica
aaatataattgagtaaatataaaacaattgaataaaataataaaacaaattaataatatggtatagattttaaatttcaatttcaatatctaaataaaatataaattattaactataaaatttaagttttaaattaaacattaaaatgtccaaacttaaatacaaaatagcttaactaataaatgtaatttatgtaatataatatatatacttttattataaaatatataaatcggttttattcggtttatttgaattatttgagcagtttagaataatttataaaccacctaatatatttattgggcagtttaaatttttattgtattattttgggttatattttttatcggtttattcggtttggtgtgggcggtttgtaaattttgttgaacacccctaataaaaactatgggtaattttttttttttttgtaaagaaaaacttatgggtatttttcaattgactagttttggaaaattaagaagtcattttattaggagtcgattacataatgaaaaaatacaatacaataaaccttttg

SEQ ID NO: 343728 - DNA, 1902 bp, Cannabis indica
tattcataatgtcaccatctgtgggattcttgcacccgacttttgccaaggaggaccttctaaggctttcttgttgacaactgtccagagggggcctctttccagcggttaggggacccccattcccttttttgacttagggtttggtttggggcctgactgcttgaattttcaatctttttcagaaccaagatgtctgcatccggttccaaatcttcacagaaaggagggaaacgtctggccaccttggaggaagtaatgaagggtccagtggtggcccaggaagggtataagccctgtgctaaggggtaggaagcggccgagcttcactctacccttacttgcccccaccagctggagcacattgtggtggtggcaggcaccaagcccgtgactgccgggacttaccacaggccgccccgggacgcgaagatgcctaatcacattacggaggcttcggagcttagagccaaacgcacttgatgaccggggccatgcttccccttcaggattactttattaattttcttgtatttgttggccttgcgccatacaaactcattcctcaagcttatcgcctactttcagacttatttattttttactctaccagcagagattctgtatttttatgaacttgtttccgtccctaaaaagggagaaaaacttaaggacgacttttacgtttttcgggcccatcctttgaatgagggccctgtccctttcaaccagcagaaacatgtgaaggagtaccgtcaccgcttcttcttctcctccgggttctaggctgtggaacatccggagcttctcatagagtgggttaggaaccttccttatgcgcggactgaacctactcaacttttcctccaacgggctaagaccttcgccacatatgacaagaaagccctcgacgtcggggagttggtcacgacggagaactgctggaaggccaagctgatccaggggcatcagtcggtggatgactccaacctttccaaagtcatctgcccaaacgtgagggttccggccgcaaataaggtactccgggaggacatcatcgccacggcggaagataagtaccagaagtacctcttccagaaggcctaggagcaagcttataataatgcctaggtggccgccggaaggccccttcgtatctggaggcctgcggagagaaggacccccaaaccaaggcctatggaccaggtgccgaatacggggcctcccgatgccagcacctctggttctggtaagtcccctttaatgatacattacgtcccttcttttgttgagtatactagccttaggcctatagggttcgatgaacgtctccataggtttaggatgccttccactcggtgggggaatcatgccaaagagcattacttctctcacttaggcgattatttaggctgtcttctagctggttccgtccctaggacaggtatctcagggatgatgcagccagtgttaagattcgggactttgctagggcctaattggagagtcagggtagggctagcttgattgcttttaagtgtacactgctttcatagatattctaacacttgactattttctcttgttacagcagtcgttcccatgtatgagatcttggccacccttactggagcccacagtcctgatgtttcccctcatcctacttcttcccagttggtcacccccgggaaagcttcttccagcgcccctctgaacactattgacttagtggacgaggaggaggtacttcttgaggaagctgaagaaggtgaagaagagcaaaggggtctcctgaggaagtagaagaaggtgaagaagagcaagaggttgctctcatgcgcaacgcgcaagggtaagattgtagaagaggagccttacgtaaacgcccccggagggtcggac

SEQ ID NO: 343729 - DNA, 597 bp, Cannabis indica
gtctggattcagttctgggtctaagtcgtttgttctgatcctggtctaggttcgagtttgggtccgggtccgggtctagctttgggtctgattctaggtgtgggttggagttcgggtttgagtctgagtctgcgtccgagtttgttccaggtttggaccccaacatgggtctaggttcgggtccaggtccaagttggcgtcccgagtgcgggtccaagttttggtcttagttaggatctcagtgcagatctaggtccagcatttcgatccaagtctgggtcttggtcagagtccaggttcgtatccagatctatatctagttccaagtctgtgtttgggatcgtgtcccagatttaggtcaaggtctgggtctcagttccgatcagggaacacgaccgtgtcggggctcgagttccagtctcagtttgagtctgaggctaggtctgtttttggttctaggtctgggtccaggacttggtcacggccctattattgttctagggtcctggttcggcgattcttgttcaggatctattttgggtcccaggtctaggtttgggttcgagttttgttcttcgtctgggttctggtcctagt

SEQ ID NO: 343730 - DNA, 484 bp, Cannabis indica
ccttaacctccatttgggacctttcgaccaatgtgtgtcagtttctagtgttgaggtttttgatctattttaaaatctaaaaattccccagcgtgtacacccacaaatttctcaatatttggccttgtgggattctttcaaatgtcacgttcgacccttggtctcttaaaggtcatttgttatacccacactaaggtgatgatactagagttagtcccacattgctaatgtgtagaaataaattacatatataaaatgaatgagctactcctttcattaccagttgattttgtaatgaaactcattcaccttatcccaaattaaataacttcactctattagaaaccattgcattggtgcatagtgtaaaatatctttcaacttgaattttaccttagtgtaattaccacgaagttgtcaaaaaatttagttgctgtagcattgaaccactattccttgataacaaaccggtgataacatacac

SEQ ID NO: 343731 - DNA, 1141 bp, Cannabis indica
aagacataactatggactttgtagtggggttgtctaggtcgactacttatatgactccatatgggtgatagtggatagatttaccaagtcagcgcactttttacctgtgcgagtgacttatactgtggaacagtatgctgaattgtacattaaggaaatagtgagactccatggtgccccaaagtcaattgtttcagatcgtgatcccaaatttacttccaagttctgggagagtttacagaaagctatgggaaccaagttgagattcagtacagcttttcaccctcagacagatggtcagtctgagagaaccattcagatattggaagacatgttgcgagcatgtgtaatagattttgaaggatcttggagcaagttcctacccttgattgagttttcatataataatagttatcagagtaccattggtatggcaccttacgagatgttgtatggtaggaaatgtcgatcgcctatccactgggatgaggctggagagagacgttatcttggacctgaattggtccaaaggaccagtgaagccattgaaaagattcgatctcgtatgcttgcttcgcaaagtagacagaaaagctacgctgatccaaagcgtagggatatcgaatttcaagtgggagactctgtatttcttcgaatatcacctataaaaggggtgcgtagatttggaaagaaaggaaagttgagccctagatacattggtccttttgagatactggagcggataggacaggtggcctatcgattagctttaccacccgcgttatccggggtgcataatgtcttccatatctctatgttgagaaagtacgtgtcagatccgacacatgttttgagttacgatgatattgagctccagacagacttatcttataatgaacaacctatccagattttagacagaaaggagaaagtacttcgaaataaaacgatccctctggttaaagtcctatggaggaatagtaaagttgaggaagcgacttgggaattagagtcacagatacgggagttgtatcccgagttattcaggtaaatttcgaggacgaaattcttataaggaggggatggttgtaatatcccaataagcctaatagttaataattagggtttatatttatattat

SEQ ID NO: 343732 - DNA, 806 bp, Cannabis indica
ggtgatcccggaggtcaccttggttcccgttaatctgatttcttagatcaatgggaggacattcctgccccttcttcttctccctccgggctcttggtgcacggaaacgctctttcggtcctctcgatcctgaggtccaagactccctttttggagtttgcccctctgcagatctttccctattctggaaatacgagcggacctttcgcggatcctacacatttttcttcttcccaggagtggaagtagggtttttcttttggttcccttcagcgggataccttataggtcttggttccctagatttttgcttttgggtacttggcgaggattcctctggttcctttccaagtccagcagagatggctttaggatgcacgtggattcctgctccctccatggctttttgcatgacctgcatcacctcttgcatcttttggttttcctctttttgggttgcgatttcagcttcatgatcgacatcctttggtcttaagagtaccaactttgagtagctgcctttgtcgtaggcgtgctcatcgaagttcccttcgtagtcgtcatcagggattccttcttcttcctcggaacccatagttgctcttgaggccacgtcctcatcattttgatcttgagcatcttgaagagggcgaggttgacgtgtgcttcgagtctccaccattgttgttttgttgtaatgcattgtctacttatagacgctttcttcagctctcaatgaaagcaccaaaatgttgaccgagatttttggcaacaaatagaataataataatttagagagctgtaag

SEQ ID NO: 343733 - DNA, 698 bp, Cannabis indica
ttttttctatttctttttgttcttttgactcatcctttctttttgtatttgatccatcaagattatttaattttgttatgattgtgctcgctgttgtcgtacttgtgctaagttttcttcctgagctagtctttaacagcttcatttcagtcctcgcttcctctttacgcacaaagacttgtgctctttcattaaactcgttaatattcctcacatggcgaccttgaagatcatcacataactctccccctgttgtagataagtcaattgtgattcctgcctgaagtgtagttgaatactatcattcatgtttctgacttctacatcagccgtactgaaccgactcaagtacgctttaagagatcctcggttgttattttatgttggtcaaagatgacgcttcgggtcgacggtctcttgcagcctaaaaataaaatacaacgcaagttatttgaaacattacttgctcgcataatagtattaaagttaattaaatgagcgactggatctatggttccatcattatccgagacatgcgggttcttaaatccctgaggaaattctgaatttaagatatctggatgaaatggctcgatttcttcgtctgaattgtatcccaacaacttgccatattctccatcttgatattttttgattttattttctaattgaattactcgtaattggatgggatccac

SEQ ID NO: 343734 - DNA, 615 bp, Cannabis indica
tttaatttttcattagatcattttaaaattaatttagaaaaatacacttagtttaaagaaaagattctagatagtgatttctaaattaggatatttttcttagaaattaaataagaatgaataattaagctgattttactcatcatactttattatttattcctattctcaagaaatttaattaattagaaaatatatatttaaattgaaaattaatttaattaattttagaccaacttaaattagaatattttcttagatattaaattagaattaataataaggtagattttattcaagatacttaattatttgtttttattttaataaatttaattaaatagaatattttatttaaggtggaaaatttttaatttcagataaacttaaattagaataattttagattatatattattttgataatcattttttacataaattttctaattatatttttttaaatgtaaataaacacatataaagtttgagaaaccttacattgggagccgcgaaattataatgactccttccgctcagatctctaacccttgtatcttgtctgtagcaaagtatcaccaagatcttagctcaaatctccttctcttgaatttg

SEQ ID NO: 343735 - DNA, 730 bp, Cannabis indica
ataattattaaaacttaaaacaagtatgaatagtaaaatttaaaaaaactttaaaatgaaagagtttataaacatatgttgtagtgtatttttagtacaattcttaaaaatttccaagtttctatattttaaagaagatggtgtaaatgctctaacaatagctaatgtaaaatagctacaaatgtaaaattatagctaagagtaagaaaaaagaaaaaagtgaaaaaaaatttattcaataaataagctaaaatcatttaaaaatttatctctgtttagctaaatgtagttaagaaattgaaaaatagtaagggacattttaaaagtatccactagtatgaagtgagatattattattagtttattttaatatcacgtcgaatttaatttaattgaatgaataatatcagtaactatcacctattacaacaatgtcatatatcattatggttttagttactttaaaatagttaatagtaatatttaataacaatcttctaaaaaaattatttgtcttagtgcttactaattttttttttattaaatatattatttaaatgaaataaaaaatataatatatgaagaaagaaattaaggtgtaacgtagatgtgtgtgataaaattgaaaaaaaataaaagtagatgagctgtttggagtgctttaaatgttgtatgaaggaataaataggacgagtgatgtcatacgcgccagcctcgttgagatcttttt

SEQ ID NO: 343736 - DNA, 635 bp, Cannabis indica
ttagttgtaaatattttgaacacaggatcttgaatatataaaagttagtatattttaatattattagtaaaattttaattactcatgattttcaatgaactcgttgattagaaatgagttgcacagttaatataaagcacgataacacggctaaactagtagggtgttacatattccttgactttatttcttttcatggaatccatttttgaatccatgccggctgaccattattttccttctggacttgccatttcctttttataggctaatgtattgtcattaataccgtcaccaatgaccatatttatttcaccatccaagccataacgagatgattttgtagaaaccctcccactaggatgaggagttgtgatcttttgaacaagaacattagtggtagttttctcaattgtatcaatttacattggttcaaccaagggaatgggatcatcctctctttgagtagaagataatggaacattatttggagttatatttgaaagtatttcctccaatactaccttgctttgcggcttgaagtttttaatatagtcatcttcaaggaatgtggcatttgtagaaacaaatactttattatccttgtgattataaaaagtccacccctagtctct

SEQ ID NO: 343737 - DNA, 983 bp, Cannabis indica
cctataaatagatagtgatggcctcaaatttaaagatgatgaacacacttgccttcagtaaaaaaatttgagccttcttttctaccttattcaaacccttcttctctctttctctcttcattatttcaaacctatagtgatagagtaagtgcccacacacatcaagtggcactcaatcatagtgtgtaagacgacgaagaatccaattcaagagaaggagaattgggattagatcttggtgatactctgctacagaaaggatacaagggttagagatctgagcagaaggacttatttaattccgttgcatccaatgtaaggtttcttaaactttatatgtgcttaaattatattgttttagaaattcatatttaggatgttaaataacatacatggtagtaaatctagatcctgataaaatatattccaaaaactggcctcagagccatagtaatgatttactttcatgaaatatggatttaaatcgatgtttgtgttgatttggatggtttcatgatggtttatgtgcatatttgatgattgtatggaaatcgcaatgtttgttttaaaatattttttgtttcattctcaaaatatttttacaagaaaataaacaaaaaattaatgaacttaggattttacagaactcaatttggatttttttatgaattagttatgtatttttttgaatttggataaaagtatttgaaatcggggttgcacatacacgcgagcgcatgggggacaatgtgcggctcgctcggacaaaacccccttcagattttaattcaaaaaagcatttttcattgaaacaaaattcaaattttggtagaattttgtgtacgaatctaaattttcaaattaaaaaatctaattatacaaaataaaattaatttttattaatgtttaattaattaaaattaagttttagacataagtagacctttgaatttgaaaatttgatatttaccacaaaaatagcc

SEQ ID NO: 343738 - DNA, 733 bp, Cannabis indica
aaaaaaaaagctgccaattgccttgggaaatgtaagctcaacttgggtctaaattacgtccactttaatgagaaacacaaatttttgctctccttcagtgttgactgcggtatcctcttgttttaaaattctgttgataagttgttgagttcttctttaaatctcttggcttgcacccttgtcaccaggccaactgaaactttacttgtatctttagccttagtgttctcatcaaaatataaaatattattttaccaaatagaaactagtaggtttattaacatatataatagtaggctatatgaaatgaaatgaattattgttctaatatacaaaaagaaaattaaaaacttgtttcaatatgacaaagtaaactaatatatttattaacatatactatagtatagactatacaaaaagactatattatgtaaacaaagaatgaacatttatttcaatgtggtaatataaactaattatcagtttattttgcatgtataagatgtttacaaataaggtagaggtaaccaaattgtatctcaaattataaactttaaaaataaagtttttttatgtgaaagcaactaatgagtttcttattagcattataggtaaccaaggttactcttgaaaacccaaaaaaataataaaaaatgaaatttgggattaattttatttcaggcatattatttgagaattaaggtattttttaatgatgtggcaaggtattatt

SEQ ID NO: 343739 - DNA, 1007 bp, Cannabis indica
aactattgagattgttggtatttaaggtacttttttctaattttagtaaaaaaatctaagatggatgaaagttcaggggacataatttcgtacatgtcaaagttcgaagggcatgatttggtcgatatcaaagtctggggaacatgatttagtacataaacaatcattgaaatagtaaaattgaataaaattagacaaaagtccttaaatctaacaatctcaatagttcaggggcattttcaatgaccttaaaagttcaggggcatgatttggtacatgtcaaagttcaggaggcaaaaatcctaattagcctatatgaaaattttattctattaaaaatttgggataattttaccttatatctttatctaaatttgtatttccatagttagaagaaagatcgaattgctcatccaacttatttgcttctaatattttcttttagaacataataatttttttttctatagtttttctccaatatttttaatatcaaatctaattttattcaaacatgacttctatgtgtgttggcatctccattttcctcacgactttttgcagcatagctagtggtcatcaagtttttctttttgaagttcttgatggaattttctaaatagttaatctttgctaaacgagtcattgcattaatattttctcaaaattaacaagctttgttaatcattacatttctttttaatgacttaggtagactttatctgactcaaataagatgcataaaagagtttatggagaaagttaacgttgcccaacacctataatatctattgtattataacatttgttttaatataatagtttttatcccaaaaaaaaaaatttgcctaacaccaattacaattggagcctatgcataactgataaatgtatcctttcaaattttcatcttcaacaaaataaaataaaatattgtcaatagtattattttatttttttaataaagtgttatttttttattatttgtattgggctacttttaaaat

SEQ ID NO: 343740 - DNA, 539 bp, Cannabis indica
gaaaatagcccagattgacattcttagtacaaagattcacttaataagtaattaacaataggatcatttttataattcgagttcttgataatgtaggtgggaaaaattacatgaaaatttgcaattttcccttacctatatttgtgcttcattttataagcgacgcaataggtaaaaagaaaaaaagattttgacaatcgatatgacatttttaaaccgacataataagtattttgtgatagttttaaaatgccataaacaattttgcgtcatttttaaattgacgcaaaagataaaatagaaaagtgtatattttgcgtcagtttgtaaatgtagataattgtttttcgcgttattttaaaaacgatgccaataaaaaattatttgcgactacggtatatacatcagtttttttaaccgacgtaaattctttaaatgacacttaaaaactgacgggaattatactttttgttgtagtgtcttcttggactaggcctgtgtctagcgcctcaggagttaaaaaaattatatatattttt

SEQ ID NO: 343741 - DNA, 737 bp, Cannabis indica
gcaataattagagtcataaacgttaaaacaacaatggttaaaaatagctagttatatgaatgaccatagtatgactcttgtgtggaggaaggtgattccgggaaatacacgttggagtggttattgaatgagtaggatgtcggttgactgtttggaggttgttgcccctgagatctagttttatgttaacgatttgggcaccatcaataatcatggtctgatgagcaacaaatgcgacaatgtcttgagtttcttgggatctgctccccgtttggtccttcccttggatttcccgtaccctttgttctcaaaacttcggggtctttaataatgttggggttgatacgatatcttccatgttgtggcgtctctcctttcggaatggaactcaactcaaattcttccttgaacattaaagttaggcgttcaatctcttcctttgcacggttatacaaatcctctgattttgctgcatagaaagtgaagttataagttactgaattgagagatccaaacctagccatctcataaatgtgttgttgtggttgtgttggcgggttaaaatgtaggtggagatttgtcttcgcggatttgctccatcgctttatgagaagagaattaggtattcttctcatgtttaatcttttccttgtagcccataaatgtctacaagggtacctgtgacagtcagtagtcccgtgatccgtaaggggaaacaccgggtaagctgtgcaatc

SEQ ID NO: 343742 - DNA, 592 bp, Cannabis indica
gtctctattacttagacacgctatagtaattttttttatttacagttcacgcttttgctaattaaaagatgtcccaaaaatcgtgtcaaatttaaacttttaattaaactttaaacttttataaatatataaccatacaaaagtcgaaatcccgacttaaaattttataatcatattcaaaatacactttataaacacgtcgcaccgtgactacaaaataaaggtccatgtcgtctcgagaccgaactctccaggtctaaccatcttgatgtgtacaaccatcctcgtgttggatttatggtactaaattaggtacgcaacggaagagttttatattatctgattatcattgtaccatattccgtagaatctccaaatgtgtgtactttaaatcaaaacaataaaattaataagtttagagtatatctcttgcagcctatcagagtatcctcaaaacttctcgtaagttgtatcccttaatcttgttgatgaggaattagcaatttggactcacaccagtgtcttccaaatctatccaccacacacaaggaatagtgtgagctattaggataaagtgtataaccttgttctt

SEQ ID NO: 343743 - DNA, 529 bp, Cannabis indica
gtttttcacagaattgtacacttttatttagtatactagtaaagttcatagaatgatgaccaaggcgaagatgccaggggtccttcaaagtacaagtagtgtttgcaaggatagaaatattagaagtgagaaaataccgctcttgttcaaacaaatacagttggccaactttcttagctatcccaatcgtagaattcaaggagggatcctgaattaaacattgattgaaagtaaaatgtgagtttattatgacaatgttcaaaaaaagcattaacaaaaaataaattgaacttgaattctggaatatataacacatcggtcaatattagtttgttagatatttttacggtgctagatttattgatgtgaatctgatggccattaggtaaagtaacaatattagcaacaagattagtgtttagagatgtaaaacaatgaagataatgacatatatgatgagagactccactaactacaatccataaaaaaaaaaattatcattaccaaagacgttagagaccacatgaag

SEQ ID NO: 343744 - DNA, 1256 bp, Cannabis indica
ggactgggatactcatcaatatgtgtatttgtaatatgtttattcggtagaataagaggtaaaaaaggatcaacattattactactaggattaagtttatgaaagggaaaaatatgttcatgaaaaactacatttcgagatataaaaatttgtttagaatttaaatcatataaacgatatcctttaactccccttggatatcccaaaaacacgcatgttcttgcccgaggttcaaactttgttcggtgggaagtaatggttgatgcaaaagcaaggcaaccgaaacatcttaagtcatcatattcgggttgtttcccaaacaaaatttcataaggcgttttgttcttgagatttggtgtaggagtgcggttgatcaaaaaaacagcagtaagaatacactctgtccaatattgtataggcactctagattgaaaaagtaaagctcttgcaacatttaggaggtgttgatgttttctttcagcgacggcattttgttcaggagtttcaatgcatgagaaatcatgtagaatgccatgtttagaaaacaaatctttaaaagtaagttcaggtgcgttgtcggatctgaaacgtttgaaaacacaattatattgagtttgcacataagaaataaattcaggtataataaaaagaacatacatccgatttttgtttaagaagataaatccaagtaaatcttgaatgatcatctactaaagtaaggaaatatttgtgattagagtgggaagtgacatgataaggaccccatatatcacaatgtataagatcaaaacaatgagaagtaaagcttttattatttggaaaaggaagctttctttgctttgctagaggacaaacgtaacaaggttcaatagcatgtaaatttttcattttacagtgtaaagaatcactaagcaaatcaagacatttattagacaaatggcccaatcttttatgccaaatttcagcggaagtgaaggcattgatagggacggtagtggtgtccaaaagatagagaccattagccgattcacctttgccaatcttcttcttggtgtgtatttcctgtatgtaaaactcattagcaagaaattttagatcatagttattgtcttgagttaagcagctaacagagacaatattatattggaaagtaggaacatagagtacatcttgtaaaactagatccttgctgatacgaacattgccacttttgtgaaccaagacatgattattgttagggagaatcaatctagtag

SEQ ID NO: 343745 - DNA, 590 bp, Cannabis indica
taaaataatttccaacaggacatagacacgctcttccctgaatacaatttcacttgacccttgacttgaaccaaattcatcctcaaaatagacagctcggtctgattccatcaccctggtggtgtgagagggacaataaaacctagaacctcttgaaccaatagtgtaccccacaaaactcccactaatagtcttcagatcaaacttcttagatttagggttataaggccttacctcagccttgcatccccaaacgtgaaaataatgcaaacttgatttctttcctgaccacagctcgtatggcgtctttggaaccgacttactaggcacttgattcaagatataagcagcagcccttaatgcctcaccccataaaaactttggtaagctagaatgaattaacgtacaatgtaccatatcaagaagtgtgtgatttcttctttcagcaattccattctactggggtgtacgtggcattatatatatcttgcatcaatgacacgtttctgcaagtatctggaaaacgaccgggggttccttccagtttcatcataatgcccataataatctccacctctatcagaattgac

SEQ ID NO: 343746 - DNA, 544 bp, Cannabis indica
acttttgccagcacaaaattgtgcaggaaaaagtaacatttcttgtagtgactagtttatgataataaactagcaatttagatgaaaatgtgatttaacaaattatttttaaagaaacctgtcaaacaatcgactgaccaccccagctagaggactagttgagaacgatcctccacagtcgtgataatttgaaaaatgatctggtcgttaatcacactctaatcgaacggtcatgattcatccaccaagtttggtttcttgtctccttaaaactcaagaaaacaaaggtacttgaacagatcatttgtaacgttcccgcttcaagcctctatcgggccttcccccacgaatttatggttcttatacacgagtacgtcactctggcagcaacctggactgacgactggccttacaaatcaatacgaatattttcagcgtgctttgtcttcactcgcacgctttttgaaaaaactttctagaggtcacccatcttgaaattacctcgagtgaagcacacttaactgtggagttctttcgtgatggg

SEQ ID NO: 343747 - DNA, 624 bp, Cannabis indica
gcatcggccactacattggccttcccagggtggtaagggatctcatagtcgtaatctttaactaattccaaccaatgcctctgtctcatattcaaatctttttgggtaaagaaatatttgagacttttatggtcggtataaatttcacatctctctccgtagagataatgctgccaaattttcaaagcaaatactactgcggcaagtttcaggtcatgagtcaagtaccgctgttcataatctttcaactgacgagaagcacagctaataacccgatcgacttgcatcagtacgcaccctagaccctatctgaatgcatcacaatacaccacgaatttctccttatcagagggtagggctaacactggagctgtaattaatctctgcttcagctcttggaagctagcctcacaattatctgaccacacaaaacgctgattcttcttagtaagctcggttaagggtattgaaattttagagaacccttccacaaaccgacgataataaccagccagacccaagaagcttctaacttctgtcactatttttagtctcggccaatccctgacagattctatttttctcgggtccaccttcgatcccatctttgctaacaatgagccc

SEQ ID NO: 343748 - DNA, 391 bp, Cannabis indica
aagtttcttacaacttgtttattaggaaatattttttaatttttagaatagataaatcatggatgaatgatagaagagaaacaccacgattttaagaagaatacaacaatcttttagagttttgcctaaagaagccacccccatttatcaatattggaagggtaagtttagagctttagattactatgtactaacttacattcgtcttgttaaatgctattatgattattttgtcttgtttcccaattcgttgtgttatttttgttgtattgttaggtacttatgaaattggaaaatgtcatagaaagagggtaaactctacctatttttttttaggatttgataaatgaacatattttttatatttaattaaaatgcatgcctaggaatg

SEQ ID NO: 343749 - DNA, 751 bp, Cannabis indica
aaattcaattattattattattgaagttgaagtattatccaagtaattacaaagtattatcctttaaaattacttgaggggcatatatatgtgtatgattaacgtaatttatccggaaatacatgatatattgcaagcccactccactttaattttttttcaaataattgattaaagttgtctatggacaatataaagtcaaaaggaaaatcaaaaagtaatagttgtaaatgagatttaactcataaaaacaacattaagctacatgcgaggctaaatatctaacggcttgcattttatagaaatgtattaaactgtaataatcaaaaatgtttttactacgttattctaattatctcaatgtgtagtgatttcaaagaatatgatactaatacattaggaaacatcttggggagtgtaagatgaaggcaggggtgtgctacaattgcgggcagccaggccatctgaagaaaattgcccaaagggacaaaagaaggagaaccaagctgctcctgctcgagtgtttgctctcaccagaggagaagcggccagaagcaacactgttgtctcaggtcagatttctatttacggattgccttgtaatgttctctttgattctggagctactcattcttatacagctactagggtaattaatagtatagacaagccatgtgacttacttagatgtggtattgtgatggaattaccctcgggagaaaccatgttgtcaacaagaagaatgtgagat

SEQ ID NO: 343750 - DNA, 747 bp, Cannabis indica
ctagcccctttctttggcatcattatcatgggtgctcttattgttactgtcttcagattcgtgtaactcaaggaaatatccattttttaatttaatatatatatattttttggtatataatcttgatcaagaaaagggtaaaagaagagaaaaggattaggagaagaatatggtatgtagtgatgatcagagggtttgggtcctatttatacataaaaggggttcgtgtggatgattaatattaaaaaatgatttacaggtacgcggtatcgattagattagaataatttatcttttagacctgagacaccgttgaataaaaactttatatcaagtcttaatttgacttagtaattatatattttgcccgatcgctaatggcagctacttttcaaaaatatataatacattatttaaaaatgtagttttttctccacttgtggacatattcttattaattatatctcacacactaactttaaactttccttttatttacttattgggtaggtggtacttactgagaaatctcccggtattttacatttttattgtttttatttttaagcttttttattccctattgttttcttctttttttaatcgtgtggaaatgatacattttatggacttttatacatgcaaaatatgcatggttcttttcttgaaaaaaaaaattatttaatgaccaaaattaaaaaatataaaaatagtataagttaattgattactttttttttttttttt

SEQ ID NO: 343751 - DNA, 689 bp, Cannabis indica
taattatgataacaaggtattttctcaaaaaaaaaaaacttaatattttaaaaattaattttatttggctaattaggatttttaccatgtactaaatcatactctcttaacttttttagttgttaaaatttttctctgaactattgagatttttagatttaatctaatttcattctattttactatttcagtgattgtttatatgctaaattatgttccccaaactttgatctctaccaaatatgtccatgtactaaatcatgtcccttttcatccatgttaaaacttttttttactaaaattggacaaaagtccttaaatccaacaatctcaatagttcaggagtatttttaacgacattaaaagttcatgggacataattttgtatatgtctaagttcggggtgcaaaaatcttaattagcctttttattttcttacttaaattaaaatttatcacaaaaataataattaatttaaaatactaacataaaaaatacaaaataacaaaaacaaaaacactaatattaaatagaaaaaaatataacactaagttataaaataaaaaagaacaacataaataaaaataaacattaagtaaaataataatttaaaacattaagtgtgattttatttaagtttttttagggggatagttttaaaaaaaataacaaaaaaaattaaaaaaaaa

SEQ ID NO: 343752 - DNA, 503 bp, Cannabis indica
taagaaagattgattaacctaattctaatactaaattaaaataattttaaaacaaataaccattaaccattagttacctttgctgagagatgaactttgtgggtaagcgaagaggcggccactttacccattattttgattcgaaaggagaacctaaaataacaaaggcggatcgtaccatgaccatatagattatattataacatttatattatatactcagagagatagagagaagaggaggaactctcgccttccatctgaccaaaagaaacactgatattcgatgaccgacaaatgatgactagatattagattttatcatctgatccaacccaatcgaattgagtcatccgatccaatccgatctaatagatatattgaatcgggtcgattctaaccattagatgcattaactggttttttattggattggatccatccaatccattttagctaccatttaagttgatttcagtaaatagaaaaatattttaaaaaaa

SEQ ID NO: 343753 - DNA, 581 bp, Cannabis indica
cataatcccgatactataagtgtccataaatcttaccccactaataccgtatctaagtgactttaatggccaaatcgtcgagttcgactgtcaccaaacataaaacatgaaaaatatcgtaattcataaataacatgcatgacacacttagaattcaataaaatctatatcacaaatacttatttctgacaatagggattatttctactaatgcacatataattataaataataattaaattaatatcaaaatgctaattttcatgtttaaatatgtagtcattacacacacggtcggccagatggcggggtagctggggcctaggctcaggccttaggaggtgccctaaaatattaaaatttatattatatatatagaaataaaatataatatatatatataaaaaaatatatttattaagtactatatgtcttcttaaatttatataattgttaacatagattaaaaaaaaaagaattgatgaaatttttgacatagtattatttttttttctttctatttttataaaagtgttaaaatatataacacttcaatagaatattactttgaattagcttac

SEQ ID NO: 343754 - DNA, 544 bp, Cannabis indica
ttttgcattgaattcctgctaaacttcttcgtcgtcgttttcctttttttattaccatatctatgtttctttgtgggagtaacatcaatcctagaaataggaaatacgtacttatctacaactcccattgtgaataatttagagtatacccgcagtaagcatatatattttactttttcttttagttcaagataattgaaagaaatagaaaaaaatatgtggaaggtccactttattaaggagtgtttctcttttatctttgataataaacattttgtagcagctttaaattttcctaatttaattttattctgttgttttcacgtaccaataaattaatactacagctaatattttataactggattaagctagttactttcattatttacaaagtgcaatgcaattaaataaatttcacttattcattttcctagattaatttgctttacttgtatttattttttatttattttaaaatgtatataggtgccgtttggtaacacttttattttctaatttttaatcacaaaatgaaattaaa

SEQ ID NO: 343755 - DNA, 941 bp, Cannabis indica
taaaaggttactgggggcagagttgaggtatcaccctcttcaaaaacttgccttatgcctcatccatgtgtctcgcaagttacaaccttactttcaggcacacccaataaaagtgttacctgatcaacccttgagacaagttttatcaaaaccagacgcttctggaagattgataaaatggtcaattgaatttgggcagtttgacataacttatcaccctcgaacatccatcaaggcccaagctttagcaaacttcttaatagaaggaataactccagaggaaaatccgcttgttcactgagacacggacacctggaagttattcatggatggtgcatccaatgagcagggctcgggtgtaggggtaatatgaatttcactagaaggctttaagtttcattatgctttgagatgtcaatttgatgcatcaaacaacaaggctaaatatgaagccttgatcgctggcttgaggatagtcgaggtgttgaaggttaagaatcttatgtgtcatagtaatttgcaatgattgtaaattaggttctcggggaataccaggctaagggcttgaaaatggctaggtacctagagaaggttctgaagaacttggaaaattttgattactttaaaatcaagcaaatcccaagagaacaaaactctaatgccgatgccttagcaaaactggcctcgcagagcaatttggatgaattaaacttggttctagtagaggtgctaaacgagccaagtatatgtgaaaaagaagatgtcaagatgatagatagcacacctacttggatgactcctataaccaactatctactcgacgaataacttccaactgacaaaaaagaggcaccaaaactcctatatgcaatatctcgctacacgataaccgaaggcaaactatccaaaagaggttattccatgcctctacttcggtgtgt

SEQ ID NO: 343756 - DNA, 860 bp, Cannabis indica
aggctcccgagtcttcgctgttttgatgtataacaggtgtcctgccaagaaccaatttttggaaggagttacaggcccggagaccagaatcgctagtcgagttctttgccatggccgaactgcataagaggatcaaaaattctctggcagaattggagaaaggtaaagacaagcgtaagtcaccagtgtcgcggtcacaatctcgcaatcccgaggaaagaattccagaggtcgaagcctaagaagacgcggtccacggagacagcgaagcctgaaattggcgaagtcccctccaaagaaggagtcctcgccgaaaagaaaaggcgaaccgcgcttcgtaaattatactgaactcgcggtgccacaagagcacatctacgcaatcaaggagaagaacggggtcttaaggaagccgcccccgatcaggggaaaccgcgataagagggaccccaaaaaattatgtaagtaccataaagatattggtcacactactctggaatgttgggtcttgcaggatgaaatcgaagagctgatccggagaggaaaattcgacaaatataaaaggaacgaggaaggtcatccccgagcggatgacaaagaggaaaatcaaaacgcgagtggctcgagaatgcctcgcaatatattgaccatcataggtggaccccatatcacaggagactcccagaagtcctaggagcgatatgcaaaggaagctaaagagaagccgctcaccaacgtgaacaatcttagtgagcgacaagaaaagttattcaagagagaatgcgacgacatcacgttcatggagagtgatgcgagatgggtccatcacccgcattctgacgcactggtcattatcgcca

SEQ ID NO: 343757 - DNA, 1095 bp, Cannabis indica
tttattttgtttacataatcagaaaaggtaatcgaaatgacttaatttgactaaattactattgttagaatatgtaattatcttttatttatatatttttaaagggcatatttatttttttttatttttaattaataaaaatataattaatataaagtaagttaaggaaagggaaaggtattccttataaaaaaataggagagaacctttccctttgttttctccttaatttgtgtgggccctactagtttctcccattccaaaatttagtaaacaaatgaatgagaatcaattcatacaattgatacaattgattctcattcccctttagtaaacatgccataaaggtactgtctatgaaagatgagagagaaatcgtccaaaattaaagaaaaatagaagtgaaatgattgtgactcatcagtaagctatgagagagagagagagagagaataggctatgatatagttataattttataatcgtgtaatacacacaaaatatatcatagaggcaaaagccttttatatcggtatacgtggtacaaattcttttaaaatataaatggtataaaaccacattaaaacacacaaggccatatctgtaagtaaatttaatttgacgtcgcctgtctagaattcaactttaaataaataattgttattaattgagtaagcccaatactaattggcctaaataaaactatcgaggtgatattttattggtaaattttcataaatatgagaattgagccattgaggatataatttactttttctggcataaataaataatgcaaaaaaatatggaattaaataataattaaagtttaaaatatgggaaaaaacaataaataaatttaataaaatttgtaataataagtttcgctaaaaaagtcacaagtgctagaaaagttgctggaaaagttagtgtcatcggaaaagtcatcgtccccggaaaagtcactaaaaaagtcattgtctccagaaaagtcactggaaaagtcacatgaagtagatgtctcagatataactaaaaataaaatcgattctataacataatgaataaaaacaaataacttaaaccgattataat

SEQ ID NO: 343758 - DNA, 504 bp, Cannabis indica
ttaataaggacacccatgagtttctcaaaaaatatgataagtttcggagattctcacatatacctcacgtaccaccaacagaactaaggatgatgacctctccttacccatttgctatatgggggattgatcggattggggcacttcccataggaccgaggcggagcctcttatctccataacctgtaagaaagtccttgactttgttgtcaaaaacattgtctgtaggtttagaattcccatgaaaatagtatttgataacggaactcagttcgatggtgacttgttcactgagttctgcgagaggaataaaataattaagagcttctcatcagtatccaggcctcaagcgaatggacaattggaagttgttaacaaaacctcgaaggatactatcataaagaagttagatgttgccaaaggtagatggtgttgggttttgtgctctaaataaaacccatttcaatataatcagatttacttattaacaaagatcagaaataa

SEQ ID NO: 343759 - DNA, 903 bp, Cannabis indica
ttttattgtatttggatattaaatgtgttaaaatctatacaatattattattttatatttactccattatatatcttatattaaagttcttaaaattaatttaaattatagtattttttagcttgaaatataaataatatatttaattttttgaattagaaactaacaataataattaaaaggaagtgaagaacggtttggacggtttaacccgaccaaaccgataaaattattgggcgggttggacttctaatttttaattaagtgggttacaattaaatatttgcgacccgatatttatattaggttggtaaaaaatatgttataacccgaccaaaccgacctacgtacactactactaaactctatactgcagggtcttatgcaaagcccctatgaggagggatgttttataatagctaataccataggggagtttatgccttcggttgttacaactcatttagcgatccctacactccataattgcctctaaaaggtcgaacaagccaccagtaaaagattttttttttatagtagtgatatctagactatattgtaataaaaattctaatatatttgaatatgacgccgtaatcaatcaataatagtcattgcatatgcgccacggaaaattggtagaacacgaaaggcaaccctgctgcttcgtgatcaaaatatgtcccagctagatcaccattttacatttaattaatcatataaatatatatatatatatatatatatatatttgtctgaagcttagttgatgataaatggttttctatggattaatatatgctagttgtactatcttaattaatatgttgtccagctgtggttgactctatattaattatggtgtggaggagtaatatatattacttatttttcattctattt

SEQ ID NO: 343760 - DNA, 555 bp, Cannabis indica
gaattaaaacgatgtttgtgttgatttggatggtttcatgttggtttatgtgattgtttgatgaatgtatgtgttttacgaaattttccatgaaaataattttatttggattccttgtgaaaaattaagcaattttgatttttacggaactcgattgtgataaaaattgaaaaagttatgagagtttgaaaatcgaggtgcatatgcctcaatcgcatgcaccaggcttcggacaaggaagcctaacacacgcggacaaggggacaaagccctgtctgaagcttccctcacctcgcaccagacggagccttcacacacgacccgcgcctattgatggtgcacctgaccgaggtttctcggtcaaggaggctgcagctccttcattgcgcgcgcatatggggctgcttgcagacttcctgagctgcaggcgcagcctcctgggcagccacctcaaaacacccgaattttgtgggattttttcccagtttcggatttttgcaattttcaaaccctaattttaaaataaaatatatttttaatatatttaaacttaaa

SEQ ID NO: 343761 - DNA, 526 bp, Cannabis indica
tgtttggactataggtccaaattctttgtgtttagtaagtgaatttaattctacttgaattgtttctttccattttggccaatcttttctattttgacaatctttgatagatttaggttgtagatcctcattttcatttacaatttccagtactacattataagaaaaaatattgtcgtcaattacttcaagtcggtcccattcttttcctgtattgacataatttattgagatctcattatttctaatatttttaagtacctgaatctcttcaagagatttgtttatgccaacatcttccttgaaatttttagcctcttcattaggaccatcttgattatttgtccttttctttttcgagaattttatctttgcaaatggttggtctaccaagtttcatgcatgctttagaatcattagctaattgtccttcagggacttcaatttaaactggagcattttcagctggaatatgtgattttataattttctttgggtcaatgaatgcatctggtaattgatttgc

SEQ ID NO: 343762 - DNA, 558 bp, Cannabis indica
aaaaggactttacaataactttattgataatgagcataatgtcatacaatttaaatatcctaataaaataagagatattatcaaaccaaacaagttgtatcaaaccaaacaagttgtctattaaactaaaaacttaccacagataaattaggaatactattaaaaattcggataacaataactcaaaaaaatgtctgttttaaatttttttaaagatatttgtactacacaaaataacatttttcgaacatttttgacaccttatgaaattaaaaccctttcgaaattttttcactcatccgaatagaattcatcttataaatattatcaaaagaaagctattttgtaaagtaatatacgagtggacaaggtttagaagtcccattttgcaaccccatcaaagcttaatgtgcatacttgaggaagtgtaataagacattagtaagtactctagtttgcaagtaaaacatgagttgcattctcctttcaagaattatggacattttcactatgttaggtataggggaaaaatgtggaagggatagaaaataagtttaa

SEQ ID NO: 343763 - DNA, 519 bp, Cannabis indica
aagggtggtattttaatactcttagactacaccaaatcaggtttctagacttgcctttatgctagaaagtctactgatgagatggtgattactgtgggggtggagtagtgattttagataagtgtaaaaacctatctaaagtctctaactctaccagtgagactgaatgttaaagttgcaggaaaaaaacttattgagtttatggaaagttctatacagtttttgtcattgtaccaataattcattaactactagtgttacttcctgactaacacaaaagtagttgccataaagtaaagaatccagtatccctagaagagtaaacaaatagagaggaatttcataatatcaaggattttgtgaataaggaaatgtaatggcggaggaaagttcatattgaatataacctgtcaaatcctattacggagagaatactgttgggttttgtgccctaaataaaacccatttcaatataatcaaatttattattaataaagattagaaataacattttatgtt

SEQ ID NO: 343764 - DNA, 1443 bp, Cannabis indica
gacatgtctcggcagatgatcgatgctctgaggaagagaatgggcggaagctctagcgcctctcctccggccaagaagtccaagggcggtgaggggtcctcttttacggaaaagagaccttctggagaggtcattgatctttctgaggagctgactgctgcaaacccctctacccccaagtttgctaggtctaaggagtcttgaccaccaacggtcgggtctgaactggtcaggagtaatcctgagcgggtgcaggcaccaactccacctttgcccgtgcttccagaggccaaaagggcaaggagatgctggcccactatatgaaccggctagttcccgaggtcagtgagaaactggttggtgctgatagtgactcatctctggatgtgttggtgggcggagtcctaaaggagttcaccagggtaagtcttttttgatacttccctttaactttccacacttagctccatacactgaagtttttcctttgtgtaggccggtctaaagttagtctacacttactgccgggctaaatcagttgcttccaagagcgcgaatctattccacactttggaggcggaggcagaataggccaagaaggaagctgaggaagccagggtagaagctagagctattcggttggagttgggcgaggccaacaagaaactgttcgctgccgagaagaagatctccgtgctgataaagtatctcgaggcagctaatcgctttgaggagaccatcgagatcttatctgctgaggtaaacagtcttcaggatgagaggaattctctacgagcagttcttcttcggatgaaggaggagaaggatgccaaggtgggggagcttacgaccgaagtggacaggttgaaggagaaggtcaatgccttggagacagccggtctcgagctcttctttgatttctggaaggctaatccccgggaatattttgactacttgggcgaggctaaggacatgtaccttgagtactaggcgacccaaatggcttatggtgggaacgaggcggctgcttcaacctccggccaagctgcttcaacctccgatcaggctgctgatgcttctcctattcaaacaacagatgctcctgctccagttggcccagaagaaccgaaccaagagcctgtgactctagctatgtaaacatttctgtttatctcttttttatatatatcttattcagccttcgggccttttctaagacatcttgaccggccaagcggtctttaaacttggaattatttttcattttttggacaacgagctaactgggccgcttttaatcccggtactacgtgcttttgtcatccttaatgaatttcattctctgttaaaaattttcgtgcaattgcgattgttttattttttaccaaatgctttgtacaggtataggtgccccccaagtgaccgagcagacgtatgactctt

SEQ ID NO: 343765 - DNA, 616 bp, Cannabis indica
ttgttcttacttaccagttttcttaaccattgttgttgtaattatgctaacttagtgcttggttgaacaggtctctcgtgttgtgcccctatcgtcacttccgagaacagcaactaataaagtgatgcgaagaattttacgccagcagtttactcagcttgataaatcttctaagatttgatttcgagcaattattctattctgtacaaaagtgactcattcctctctcacaatcacagaatgtataatggtaacaaatcattactttaagtaatgtagtatttatttttattcgggtaaatagcggcataagtacttaaagttttaagtttgtaagtagcataatttcaatgtttatttttagcggcataaatacccaatgtttgtaaaactgtaatttttctttaatttcatccgcacaaaccctgttattttcttaaacaggctacatataaagtctagattctcgatcattggatctagacagaaacatgtagtattagttgcttctaaatgttcttttaataaatttaaaacggagtctgtactgacaaaattgaagaaaaattacagttttacaaacattaggtacttatgccgactaaaaataaacatt

SEQ ID NO: 343766 - DNA, 1299 bp, Cannabis indica
tttgagaaaagaaaagaaaagaaaaaagaaaaatgttaaaaatgtggtccaaaatatagaaaaatggaattttggaatgcattcagcccaacaaaggagcccaccccgcagcccagccggcccactttctcttcaccaagagacagcctcaccacatggcgggctgtggttcgccttccagaaggaaaacaggagcagcagctccctttgtcccctcacacgcctcacgcacgagtggcacgcacggcccctcctgggacttttgtttgctccactcaccagccacgcaagtggctcttctcttggtccgagtcccttcagcccacgtggcattctctcatctcgccacatgtctacatgcaaccaatgagaggatgatacgtggcaggttcgattcaactatagggtacttgcatttttacccacatgcaatttgtaataagtttaattacacattagtccttttacccttctataaatagacgcttaggattttagaagggaaattttactctttatgattaataaaacacctcatatcaattttaactccccttactaatttgtaccaattaattcctttgattacatgaactttccatattacccttctgtttttaatataattttctttaaaattgcgagatctcattttttagagtattctgtgtgttcgtatttttctcgacagtttcttgatacgttcttgatgggttctcgatgtgaatgtctcaaggtcagggaagatctttctcgacgagttatcgataagttcttgaaaggttcttgactcgaatgtcccaaggtcagggaagacctttctcgaaggcttttcgataagttatcgaaaggttctccacttgaatgtcccaaggttagggaagacctttctcgaaggctttttgataggttgtcaacagtttgtcgaaatggcaaatgattttgtatttccaatcacgattgagatgtgttttaacaaaaaaaaaaagccattcttggcatgttatcttaagaaaattcaacaaccagtcaataatagattaatttaatgactatcaccttatcgacaacccgtcgataatcaatcgatattcaagtgagaataaagaaaaataaaattacaaatttttttttcaatgcttcaactattgagaacatatcgataacccatcaataatagctaaacttaatgaccatcatcaaaagctaaatcttatcgataacctatcgagaatccgttgataaatggtcgagaacatatatcgttttcattttttccaaccaccaccacaccggatc

SEQ ID NO: 343767 - DNA, 506 bp, Cannabis indica
aaagttttggagcatgatttaatacataaacaatctttgaaatagtaaaattaaataaaatttgacaaaagtttttaaatccaataatttcaataattcaggggacattttcaacgaccttaaaagttcaagagacataatttggtacatgcaaagttcagggggcaaaaatcctaattagccataatgtaatgcttattgcattgaatattgcaatgatgattacatactaaaaccaatgtaatcctcattacattacactctattagaaagaaaaaaataatattttaataaaaatatagtaaaataagtccgtctatattatccttttttttaaatatttaataattttataataaaagcaatagggttattttagtcaatacatattttattctattacattcacatactaaatcaaacacaataattttttaactacaatgttcattctaattacaaaccaaacattgtaatcaattcttattaccattcttattccatta

SEQ ID NO: 343768 - DNA, 729 bp, Cannabis indica
tacttttttcacccagaaggatttgaatatgagccaaagaagatggctggaattggtaaaagattatgattgtgagattttgtatcatccggggaaggccaatgttgtggccgatgctttgagtaggaagggtcccgggcaaatttgcaccacggttctgatagcccctcaactagcctctgagatggttagtgcagggattgagtttgtagttgggaaattgcacaatttgacacttcaatctgatctattagaaagaatcagaaaagctcaactagaagatcctgagctagttaaggtttgagatgaagtaatggctgatcggcctaaggactttttagtctcaaacagtggaatgttgttatacaaagctcgagattttgttcctagcgttgatgagcttaagaaagaagtactttatgaagctcataccacaccttattcactgcatccgggaaccaccaaaatgtaccaggatttgaaaccctacttttggtggtatgggatgaaaagagatgtggtagactacgtgtccaagtgtttaacctgccaccaaattaaggctgaacatcagaggtcgacagggttactgcaacctttggttcttcctgaatggaagtgggaggacattgcaatggattttgtaactggattgccaagaactacaggaatgtatgattcggtatgggtcataatggacagattcacaaaatcagctcactttctacc

SEQ ID NO: 343769 - DNA, 773 bp, Cannabis indica
gtaaatctttgaactcaaaacttcgatttttaatggtgaaatggggatttagctgttgtggttgctgtttgagtttgggtttgttttctgatgttatattatgtttatttaaggtgatttaagcaggttttggtggcttgtttgtgggatgagaaagctttgagttttgaactcaagcttgactcatcaatggtggtttttgtaattatgcatgaagctttgttttattgctttagaaatgatctttggggtctaattagcaagtctaaaacgttttatttgggtttgggttggattggccgagttatgattttttgaaaaattgctgcactgaaccggaattccggttcagggaggcctgtaggaacccgtctaccggttggcttcaaggaattttgcccagaaccgaaattcttattggggaaccagtctaccggttggggcaaatttgggaaccctagtttttcccatttttttgttatttagggtattgtcatgttttttatcgatagggaaacttttagtttcaagtttaagtccccgggaagctatttagcgtatcgcttatcagtgttgtgattaatgtgatttaggaccctgtaattcaccgagcagattgttccactcaggttgaccggcacacctgaattcataatcgaggtaagattagtataacagtatgcatatgtatttacatgtttagcgtgcatgttaggaagcctgctagattacattatatatgtatgttggcttcgtaccatccgacagtatca

SEQ ID NO: 343770 - DNA, 1378 bp, Cannabis indica
accaatgcttagacaattaggatgacactgagattcaaaacctctgtaatgcccttggactcatgcaaggtcacaataacaccttgcatcatgatcacgagaattccgtgctgcaatgaaccttacgttcgaagagcagagatgttagttcattgagtggagggatagggagatggaaacattgaaggctcagtaagcgaccatcgatgaccaaacaaggtaggatactgtactgatatggagagcctatcaagttgctaatcagcaacaagctgctatgtccagtatcccactgggtggcacagaagaaattctttctgggaatactgcccagactcataatggtcagccgtccaatcctcgatcatatttcccacctgtgggccaagcggtagacagccacaccctatcaaacagctctttaggtggagctatacctaataattctatccaaactgacagttctggccaacccaccggccaaacaagtcaatcactaatgccacatggtgtttcagtattcaatagattgggtaaagcttatgatctcagaaatgatttgaaaagaagaagaggtatggacaaacaatacgttcaaccggccactcagccaggtatccacatccaggacccagcttaaagagatcctgacgtgacacaagttggttaagaggcggaacaagttcacccatttctgcaagcattgttggatgaactaaaaaatatgttccaatgccttgtcggccaataactcactgatcttgagttggaccaagcacactaatcaccctttactcctgagatcaacgtcctagagctaccctttaagttcaaaatgtcgacctggaagatgtacacaaggaaggaggatcccttgtcacatcttaaatattttgaaatgcaaatggattcgcaagggatacgagatgatatgcggtgtagggtattccctgccaccctttcagaagtcgcacaacagtggtattttaaattaccactaggtaggtttaattcatggaaagctttctcctcagagttccatgcacaattctcttcttctcgccaactcccattacatttagaagacatggtcacagtaaaacaaagaccaaagaagcccctcagagcctacataagcacgttggcaagattaactaaagaggggaggttagctgccatattgggaggcattgaagtacttggagaactatggaaggacattaagaaaagtagccctttgggatgtatggcagagttttttgaccgatcagatgtgtttatcaagctcaggtaggccatttagggagcagatgtcaaacctaggtcgggccaaccacaggttccctcagtaggagcacctactcagagcccacaatat

SEQ ID NO: 343771 - DNA, 619 bp, Cannabis indica
tatgcgagcaattttaatctaccatgtaatatgcaagcagttttaacatatttctctagagaaaacttaaaataatactttgagttattcacctctggaactattttatatatcttttgattgctcatatgaatactaagatctttttgtttatattttagctttaatattatttttcaaggtattcttgtgcctcgtttataatacatgccagaacaacgtgagccattaaaatattcaactcgcatagggctattcatataaaccgggaaaccgcaatttaaatccggaccactacaatctaaaccattgtaaaccgtaaccggggaaaccgtttttggtggtttggtcaatccggagcgtttacgtcgtaatggttcggttaaagttcgtaatatatgattaacggttaaaccggaccggaccgtttataataaataattaatttatatatttttttatatatgactatatgtataatttagaacttttttgtgtgtcaagttttttattgcataaattttagatttttatgttatgtttgacttttgagaatgtttttatatcattatttatatcttatagacctattacttatcatgttaaatatatattttga

SEQ ID NO: 343772 - DNA, 567 bp, Cannabis indica
atttagcatatcatgttaaatttgtttttagtggaacccatttcactgattttaagatgaagacttctactgttcaaactgaattcagtgcatctaatgtaagtatattgtttgatgtaaatttttaggaaaatttcattttgtagattctgtatgtaattatattgtttgatgaaatgtctaattcagtttagaatttgtgtatgtatgtataatatttgatgaaatgtctgattcagtttggagattgtgtatgtatgtataatgtttgatgaaatgtctgattgaatttatcataaataattcacaaattatgttaagaatttctcttattattatggttcataaaagaaattcagttctggatagttcattggccatatttttttattagtcctgcacacatttgtttattttattctgttgtgtgtgtatgtgtttgtagaaaacaagcaaaattttcttaaaacttgattttctttagtgcagatgagagaaactgaaattctagctgttctgagattatttatatttgtttgatgtttatcatgtacacagtgctcttat

SEQ ID NO: 343773 - DNA, 872 bp, Cannabis indica
agttttttttttttttttgcctatagtccatttcaacttagggccggccttgggcgtccctatagattaggacattatgacttggtatcagagcggccatggttttaaaggtcctaaagactggtcgaaatatgtacatttgttgcgaggacaggtcgactaatagtatagtaagtatttatattattttctatatgattacctaactaggctattataaagtatgttagaaaaagtagcatagtgataattttgataagaatatgtgtatggtatgtgtacattgatatttgtttgagttttaactgtttggaagatgtggattaaatgtgtgacaagttatacagtaagaacaatttaattgcctgattagcgagctatctgggctcggggaaaacggtaaggaaaagaatcctttattgtcataatgttgaaaacatgtaaattctgctatgcaagatgtgattagacaataaggggaagcatatccaagatttgagagaacaacaggcttgtcttgtgtctattcttctactactgacacttcctgttgtatcactagatgtggtgaaatatatgaacccaacttacgagcagatcagtaggtggaaactaaatgaaccaccaattatggcatagaaagaaaggttctagggtgatcaatatggttggagccaagataagaagtttagggggaccaaagtatataataaagaaatttacaagatacacttaagggcatattttttttaatatttttttaacgattttttttattgacattttacaatttttttattttagggtttttctagaaaaaatgttatttttacgttatttttccatgaaagtaacgtcaaaataacattttt

SEQ ID NO: 343774 - DNA, 984 bp, Cannabis indica
aattataattaattaatttaaaaaaggaatgtctacctattaataagctgctattacaggttaaaaaaaatgtaaccatatggttacaataaaaatgtaaccattgaatagtcacacatatatatataaagagaaaaaatgagaaaatacaatgaaagatttatagcatgtcacctcaactttatttaggctctcctttatatatatacaagattaagttcatcaattgctaacatagaaaataaataatactaactttaggacaaactaaactaaaaaatagtaatctatataatataaaagtatataatctatacaatgggttctaaactaattaaatttttttgaaaataactctcatattactaaaagtataaaaaataaataaaaaatgagaaaacaaagaaaataaaagaaaactcatatataagatatcacatcattctctttgtgtttttatttttaaatataaatagaaaattttgagtttttatgcttaatttttctatctaattaaaaaaatctctcatttttatatcatatgggctgagattgttccatcggtaaaaaaaaataaaaaaaaaaagttttttagcaagaaaaataagaaaagaaaaagttgagtttgagttaaatatttttgtatgaacatatttttgatatagtgtaaaaagagatattttttgatattttttttaattaagtagttaaattaagcatagaaattcaaatttgtgatttcattattcgttattagatcaaaattcgatggtttgatatttttaaaattaatatttatagttaaatttgtttagtaaccattcatgggtaatacccattaaaaagtgttccatatatatattgatattgatacattgatatgaaattaaaaaaaaatagaaagaaaaaaatatagaaacattttttatttcctttattaaggtaaaaaatgaaaaatactgatttttatctctaatttgacca

SEQ ID NO: 343775 - DNA, 649 bp, Cannabis indica
gacactaccatcggacaaaattgtgcccgatcccaaaaattaaacaaaaaaccaatttttggagtcccattggacccaacatcgggcacacattgagaccatcggacccgatcctgaaaaacgaaaaaaatgaaatttttttggggtaccatcgggccccccatcgggcccatcggaactaaccccgaaatctgagaaaatgaatttttttgggtaccatcgggcccgaccccaaaaaaccaaaaaatcaaattttatgtgtaccatcgggccccccatcaggcccagaccccaaaaaacaaaaaaaaaatgaaatttttatgggtaccattgggcctcccatcgggcccatcagaccccggcacaaaaatgaaaaattttagggtaccatcgggcctatatcgggcccatcgggccttcacccctttcaactatattgacagggcattgggccccccatcgggccagatgaaaaaaattctagaaactaggaaaaatccagttttcacaggcagcaaacattttaacacaaaaaacagcaacaatctacagatcaagcatcaaaacaacattctaaactaagtataacaacaacaaacaagattacacaaacaaaaaaaaaaattacccattgcttgtagaatgttgc

SEQ ID NO: 343776 - DNA, 1068 bp, Cannabis indica
gtgaattggttgagaccggaggtggtcggggtggtagaaatccccaaaacccctgtggaagcggtggaggccgcggttctgctccgagaggtggccaagaggatccacctcaggctctagctgattgggagcaaaggtttgctgagatgcaagccagaattgtgcagcaagaagatgagatccggagactcaggcaacgggatgctcctgttgaacttccctcgccaccgccttctgcggttcctgcagctcctgcggtgccagcagaacagtattttgctggtaaccgtatggagcctttatatgagagattcaggaagcaagcacctctagtgtttctgggaggccctgttgtgcttaaggctgagcagtggttgactgttattgaaagaatattgaatttcatgggagggatcggaaatgacagggtggcatgtgccacgtttcaatttcaagaggatgccttggtgtggtgggagatggtatccctcaccaaggatgttactagaatgacctgggaggaattccgagatttgtttaatgctaaatattacaatgaggtggtccgcagtgcaaagcgaaaagagtttgttgagttggtaccaggcaagggtatgtcagtgactgaatacacaaccaagtttaatcgcttggctaagttagcctttgggaccgtaccaacggacttcagtaaaaaggagaagtacttggtgggggttgaatgccaagattaagcacgatctagttatcacaacaaatgataccacaacctatgccgaaatggttgataaggctcttcgagctgaaggagcagtcaagttcttgaaagaaacccgagagactcctcgtgctggtaggacgactactcttcctatttctggccctggaaaggagattggtgattccactcttaagcagaagaagagaactttcccatctttggggagttcagggcaaggtaaaaggttttggggaaaccagggtaaagggggacgtcagacttacacctatcctgagtgcccgcggtgcaagaaactgttgggttttatgccctaaataaaactcttt

SEQ ID NO: 343777 - DNA, 643 bp, Cannabis indica
agcactcaccattcgaaccatctttgttcacaccaagcactaaccagaaattcccattcgaaccaccattcaccagcccgagccatctccttcaaaacctcattccaagcacacaatcccatctccattttttttcctgtaccagtttcgaagccaccacaacaacccagccgttcccttcatctattccaccgtgaacccaactttcgagctacaccacgaaccttcaacctaacccgcatcaccacagtcaacaacccaacaacatcacggcctcaccagcaacacagcaaccgagaatcctctgtcaagccgagtttctcagccaatctaagctaagttctgatttggtgatttcatttgaaatttattttggattacagtgcttaattagtggctgtggttgaactgctaatgttatattcaatggtgcttgagattgtccttatgatttaaatgtggtagcagtagtgtgataatgctgggttggacgatttgaattggaatttggtgggatttttgaatattgggctgagaaagattggtaaatctgagaacagtattgattgtgaaattggggttgtcatttggaatttttgtttttcagtgtggttttgaattctttactgttctctaccgtgtt

SEQ ID NO: 343778 - DNA, 1069 bp, Cannabis indica
aacattaaatgttatttctgatctatagtaataagtaaatctgattatattgaaatgagttttatttagggcataaaactcaacaactagaaagtcactggtgagaggcgtccaatgtgaggtgccttcaaaggatcagcgattgcaccaactggccttcaattggatggcatggtcggagcgctacatccagtagggggtagtgctgccgttgcacccatatttcaaagacatagccgcttactttaggatttgtccaacataaatcaccccaaaaagtattaaatacttctcgataatgtttttttctctatgagaagctaggatggccttagcctactctgtatgagattgggtattactttgattttaagtctgctccaaacaaaaccggacagggtacttctacttcagctaagttggctaccagtggttgggtgacaccaatagtacgcctctgtctaaagttgggggatatgcttagaattacttcatttcccaagacatctaggagccaatgatagttgccctccattgaggagggatcagcctttgggaaagggcacccaatgatagttgaccctccattgaggagagatcagcctttgggaaagggcacccaaaagcctagtcgaggagtaggttcagccatgggggtagagagccatggaggcaattcacaggcatgtggacaaagcctttcctattgtggataatgagctttaagagcttggtgacagcaagccggagaggctctcttttgtcagccttcaagagttggcctcagtaagttgcacatttaactttgctcacttttttgtgttattatgggctggttggtcataggagctgttgtatggagctagttggccattgtagtgtctttgagaggctggccgaccttggtagcaccatagaggagctggcccgctgtgacagtcagtagtcccgtgatctgtagggggaaacaccgggtaagttgtgcaatcccacatcgcctgggaaggtcaagtgtgatgattctgaggctgtgtaggtatgggactgcacagttgaagagagcttaaat

SEQ ID NO: 343779 - DNA, 981 bp, Cannabis indica
caggaagatatttctagtcgctacaagcgcttcttgcaagaaatatccgaaggcagacaccgattcttgcgagaaacagcctggccagaaccacccaacgtgtcctttattcctgtggcaaagcctttatttttacccaacgtcacaattgcttttaaaccaggtgacttagattttgaaattatgcctcccaaaccacgcacgtctaaaactccttaggatcccagcgtcaccttcgaggctgagttgatagaatcgaaggtgcaatctatctcaggctatacgggcgagatgttgaagacctatggaattacaattaggcaatcatgtcgggttaggtcagtacgagagggtgaattcagttgctaccccctgtacgctttgccagcagtaacccaggaaccagtggtgagactagtactagtagttcaactagtatgggcgcctagagccttgagcatatttgtgttggggccatcctccctctccgggactacttcaaagactacataaatcacattggggttgccccattccaactgactgccatctcctacaggattctcactagtttgaaagtcttgtacaaaattatgaattggggttgtcctacacccgtagagatcgagtatatttactcagttaaggccattccatcgaggaagaatgccgcagtgggctttttctatcttggtactcacgctagcgagccaaaaattattgtagacttgccaaataaagtgtctttcaaggaaaacttcttctggacgtctggtctctcccccattggcacaaccacgtttcgcaaacttcgtaagtgattgttctcttcttacttatttacatcagtcttcctttttcaagtacttgactaatgtttggttgttttgacagctcttctcacgagacctactcctacctccgagtatggttagtaggcacaggcgcctgatgactctccctttcggtctccgatcatgc

SEQ ID NO: 343780 - DNA, 1454 bp, Cannabis indica
aatttcgggtataacaattaccccttaaaaagttcttttctaattaaaaagagctttctaataattacaaagggtatttttgtcatgttcttcttttttgaaaagacgcattccctctaattttggcagttgtgcggtttcaaggtacatcaaaattaaatgaccatcttttccacttccgcttcaaatcatgtccattggatcaaatctttctttgatctaatgaaaccattatcatgggtataaaataaggaaaaagggaccacctttgcaccatttcagaaagtttgagaagaacccttaaactcttttggcaaggatcaccattaaatccgtccaaagacttgcatgccatccttgtctttgacctttttcctgcgagtttccttcgacttcattttctcaaagagatccttgcttcgttcaaaggtttgcagatggaattacgaggcattgccctaagccctaacttcaaacggtaagttactttcttctttctcttgtttgttacatagtgttgatcagttacttgacttgtttgtatcgttatcatctcatcttgttttggtagttttttagggttaaaactgttcatactaggattcaggtaatatgtaggttgttttaagatctccaactcattaccttctggtttgataaaattctctccaaggattgggactgcttcttgacggcagcaatgtcccactctggttcagcaatttatcttccagaagttttagagtttgagtttcctacagaatcgaccatcctatataaacccaacctctcaaaacccacctccaaattagagctaaacaatgctaggtctagggaacacacagtgagaaccaaacatgaagatatttctagtcgctacaggcacttcctggaagaaatatccgaaaagagacgccgattcttgcgagaagcagcctggccagaacaacgcatcgtggcctttattcctgtggcaaagcctttgtttttacccaacgtcacaattgcttttaacccaggtgacttggattttgagattatgcctcccaagccacgtacgtctaaaacgcctcaggatcccagaatcaccttggaggctgagttgataaaatcgatggtccgatctgtctcaggctatacgggcaacatgctgaagacctttggaattgcacttgggcaatcgtgccacgttagttcagtacgagagggtgaattcagttgctaccccctgcacgctttgctagcagtaacccatgaaccagtggtgagactactactagtggttcaactagtatgggcacctagagccttgagcatatttgtgtaggggccatcctccctcttcgggactacttcaaagactacatacatgacattggggttgccccattccagctgactcccatctcctacaggattctcagtagtctgaaagtcttgtacaaaattatgaa

SEQ ID NO: 343781 - DNA, 580 bp, Cannabis indica
tggttatgcagatgtaggatacttatgtgatccacatatagccagatctcaaactggctatttgttcaattgcggtgacactgttatatcctggcggtcaataaagcaaattctggtggctacttccttaaatcatgctgagatacttataattcacgaggcaagccgagaatgtgtttggttaagatcaatggcacaacatattcgaggaacatgtggattaacatctaataaggaagtaccaacaattctctatgaaaataatgttgcttccatcgctcaatttaaaggagggtacattaaaggagatagaactaaacatattttaccaaaattcttctttacacacaatctttaagaaaatggtattatcgatgttcaacaaattcgatcaagtgataatcttgcagactcattcacaaagtcataccaacatcaacttttgagaagatggttcacaagattagaatgcgtcgattaaaggatctcaatgaatgcaaaaataagggggagtagtttcattctgcactctttttttcttgatcgagttttttcctattggattttctcggcgaggttt

SEQ ID NO: 343782 - DNA, 603 bp, Cannabis indica
gaaagagaaaaatagagaataacatcatgtggtttaggtttggtaccatggcgctctttattcctctccgtccaaatgctccgaagaactgttgcgaactgttcaaatctaattgaaggccatgatgaggacatatgaagtaaaaattctttgagagttatggtatccgtgagaagatcttgaacaccaaagtcagaggcatcccacacttttttagctcttttacaaaaaaaaaaagagcatgactaactgtttcaggctttctgctacataaggaacaggtagccgagtttgcaatatgccgagtatggagggtgtttgccactgggagacaatcatggatagcacgccacaagaagatacgaaccttggaagggatttccaaagaccaaaatgttttccaccacaattgcgattgcatgtcactggctgtgggctgtttttcttcaagagcagtagctaaattataaccgaattttactaagtagaggccattcgattcatgatgccatatcaatttgtcttgttgatcaaagatagttaaaggaagactttgaatcttaatgacatctgatgtcgcccaattagttacactgcggtcgc

SEQ ID NO: 343783 - DNA, 1117 bp, Cannabis indica
ctacattaatcatccaatttctatccctatatatcaaacatcaatttctctattttattaattaaataatatatattttttaataggcacataatacatataatttacaataaaatataatttaaatactattcaaatattttaataggaataatgtttctctacatgtgaaaaagagtttggataaaatagaaaactcatttacattatttgtacactactataaaaaaaggatattcgcgacggtcctaaaaatacattttttttagagaaccgtttaaaaaaattaagctagtgtttaaaactatcaggaaaaataagatattctagacgattttaaattgtcaagaggtataggcgacggtttttaaatttgcctaaaaaatcccgtgtatttttaaatgagaattgttaacggtttaaaaccgtcggcaattcccatgcttaaatttaacgcatttcagatttaaaatttcataactccgcatctttaactttaaattttatttcctgccttttaagatataacccccctaaaaaaaattaaatctcatttttccaaagttatttgtaaatttagtttcattttctgctctttatcctccgcgaccacgagtcgtgccatccctctcctccactctctttcgctgtgtccctttctttcactctcttgtggtagcacaaaggtaagcacaacattctcttatttgttgtttaaatttctattaaccatgatttgatttgttgatcttaatctgtatgcgtgcaaaagaaagttgaagcttgcaattcgaaaaaattttgaggatcgtcaagtgaaaaataatttgaagcttgtaaaagaaaattttgaggaggatgaaagcgagtgcaacaacagtagatgatgatgaagcttgtaaaggttttggagcggctgcaacatatgcgagaagtcgtttcgaggaggatgaagatgatgattttttggggcaatccactatagcgacggtttgaaatcgtcagctatactatatataagccacgatttaaaactactgtagcctatagtatctgttgaccgaagttttcggcaaccaataaatattataagtttatagagctgtaagaaaattag

SEQ ID NO: 343784 - DNA, 831 bp, Cannabis indica
taggacataaaacccaacatgatcaacccttgagacaagttttatcaaaaccagccgcttctggaagattgataaaatagtcaatggaactgcggcagtttgacataaattatcaccctcgaacatcctacaagggccaagctttttcagacttcttaatagaagaaataactccagaggaaaatctgcttgttcaccgagatgcagacacttggaagttattcgtggatggtgcatccaacgagcagggctcgggtgcaagggtaatattattttgccagaaggctttaagtttcattatgctttgagatttcaatttgatgcatcaaacaacgaggctgaatatgaagccttgatcgcttgcttgaaaatagccaaggcgttgaaggtcaagaatctcatatgtcatagtgattcgcaactaattataaataagattctcggacaataccaggctcagggcctaaaaatggctaagtacttagagaaggttctcaaaaaacttagaaaagtttgattactttaaaatcgagcaaatcccgagagaacaaaactctaacgttgatgccttagtaaaactggcctcgcagagggatctggatgaattaaacttgaatcggtagagatgctaaacaaaccaagtatatgtgaaaaagaagatgtcaagatgatagatagctcacctacttggatgactcctataatcaactatctactcaacagacaacttccaactaacaagaacgaggcacaaaaactcctatatatagtacctcgctacacgatagtcgaaggtaaattgtacaaaagaggttattccatgcctctact

SEQ ID NO: 343785 - DNA, 721 bp, Cannabis indica
attagttattctcttttgaaagcataacatgtatttttgtcacttgtaatgatttttgattaaatgcttggtttagaattccttatatttattgtacatattttattttattttcggttctttaaaaataatataaaaaaataaaaaaagggaggcgttggtgacttgattcatgggctaaggaaattttgtgcttaattggtaagtatcaatattcattcttccttgatttattttgatatgtttccatttaaagattgatcttttatatggtaatgtatttttaatcttgaaagattgtcttaaatgggctatttttggaaaatatattggttattctagtttccttttatttattttttaaaaaaacaaaataattttagaaacgagtgggcggtttccttttgtggtcgtgggctgatggttactcaaattttttgaaattggtttcctttttgctcaactctcccatgtttatttaaaccaatttttgtcatttattctcaccacctacccgattctatctctttgtctctcttgtttgtttgctgttcattgtgtctgtcaaatcaccatggttagaacaaagaacctagggcatcccaaaaaggtggttgaaaccgatgcaaccccctcgaatcctcctcctgctgcttcaaccgtgcctcctgctgctgcaaaaataggagattcatcgcttcctcagcatgaatctcagccc

SEQ ID NO: 343786 - DNA, 976 bp, Cannabis indica
caaggccatcagcaaaataaggcattttcctgatgagtacttcatggtgaaggatgcgagcattacgcggactcggtttaagaagattccgatatatcacaatcctcccctcactcttgctcttagggatagagctcaaaaacttgctcggtagctgggggaagccggaatattacccagttgacctctgatgataaccttgtgaggtatgggctctatcccaaggactttactcctaagtccgtgtcggggaagaagaggaaatctgatgatggccggactgaacgagctcataaggaggatgaactcattcaacttaagcgcgaggctaagttgaagggaggtgcaagggccaagcaatatgcatcctgaagatgaagctgaggagagcaggtgactctactaaagaggaagaagaaactcccagcctcgcccaggcctgcagaacatgcaattcgcataagggagcccatttcacctgcttggccatctcctcccgtgttcgaaaaagggaaagctgttatgtttgagataagatcgatgtcaggtcatgatggacttctgagtcttatgcgggcggtcaccttgcattttactttatcttgttcttgagcttcttgattttcatgccttgtgtttctgatggatgtcttctaacaatactgtttctgttctatgcagacatgtctcgggagatgattgaggctctgagtaagagaatgggcggaagctctagcgcctctcctctagccaagaagtctaagggtggtgaggggtcctcttcaatggaaaagaggccttctggggaggttattgattttttcgaggagctgattgctgcgaacccctctacccccaaagcttctaagcccaaggagtctggaccaccaacggctgggtctgaactggtcaggagtgatcctgaacgggtgcaggcaccaactccacctttgccagtgcttccagaggccaaaaa

SEQ ID NO: 343787 - DNA, 534 bp, Cannabis indica
tggccttggccagctagggttcctaagccttagaggccagccaggtcccatgactcagcctagggccggccaggaacctcacttctaggcatagaaacagcccgcctataaggtaccacccttggccgatcgaaccccatggtggccactcttggccgaccaggtcttgaacaagacctccttggccggctagaaggtgtacgagatccgagcatgtgttttttcaagaactcaatcacgttcttcgtgctcttcgtgttcttcgtgactcaaagagctaagaatcacaacgaatgtcaaaattggatctttttcatctaaaaactacaccttacaaatcctaagactaccaagcggatcaaaatacaaaaaggattacactctaacgtgggaatcaaaagacattcaaagcaaagaaaaaaggttcatgcattcatagaaaaattaactaaatcaaatggatagcaggaatggaaagcttacccacaacaagaaatcgttgatgaagaagatgggaagcttgaatcgtcaaaa

SEQ ID NO: 343788 - DNA, 780 bp, Cannabis indica
acacccatgccaactatttgttaaaacggtacacgatattgctggaaaggggcggagctaatgtcactgggaaaagtagcgaactgggaaaatggtttagtgtaggttgttttcccgacgagctgagtttagtggtgaagacgtctcatcaaacggacaccgctggtgaccagaaaattcgttcaaagtttgaacccccaaactttgacttgggatcccgagctaatggtagcgaaagaagtggcaccgcttgggggtgaggtcgccggcaccaaggggttcatttttccggcgcgtggggctagtcagtggctagaggtgggtcgccagagagtggtggtcatggtggtttggggggtttctcttttgtgtttgaagagagagaaagagagagggagagtgaggaagaggacgaaatggggggggggggttaatatgattcatttttttgaatgtacatatatatatatatatattatttatttatttattattattgtatatatacttttttttctttgactcggtcaaccgagttcttacattctcccctccttaaaggaaatttcaatcccgaaatttcaaagtacaatctcaagttgaaaattaaacaagtgaggatacttcatatacatcttggactctaactcccaatttagcctcgtcttctctgtggttcttccataagaccttgactactggaatctctctgttccttaacacttttagctctctcgccaagattttgacaggttgttcttcataagtcacatcttcctg

SEQ ID NO: 343789 - DNA, 683 bp, Cannabis indica
tatatatatttgtaatatatattttttattattattatatgtagttaattttggtgaatattatatgtagttattgttataaggtatatctatttttttaaaataatatgtaagttctaatttattgtacttttattgacatgaaatataattatattagcatcccatataattttatatttacttgctgttgttatatatatttctattgtaagatatatattttttgttatatatatgttttattgtatagtatatcattttcttttagagcatgtgttattctgttttttgcaccatgacatggcaataggaatggatgacacatgtcccatattttagatatctagacggaggaaaatatccctagcagcccataaatgactacttagcatctgtaatattcagatatctgaacaagatggttgaagacatgtccgaccaagatgcaaatgtgctaaggtctagtggagcatgagagatggcaattccagagatcaatctcgttgtgtccaaatgcaagggaaattcttgtaattactagattgagtcagagaataacgtcaacacattctagtttcttatttcttgtattgtaattatgtaattaatgtattttcttattttactcattataagcaaaaaagaaactatccctcatgtatgaaatccctataaatagt

SEQ ID NO: 343790 - DNA, 966 bp, Cannabis indica
tattgttatataatgaaaagactgatgggttgagtattgataatgtgatgttattatgcatgtgatatatgggctcaccagattaggtgatgcgattttcttggcgacgtactaggcgtaagtacaggcgtcagtgatatatgataagtaccgagtgtaagtacggggtcacctgattaggtgatgaaattttcttggcaatgtattgggtgtaagtacgggcgtcagtgatatatgatgagtaccgagcgtagatacgggctcacctgattacgtgatgcgattttcctggtgacatactgggtgtaagtacgggcatcagtgatatatgatgagtattgagcataggtacgggctcacctaattaggtgatgcaattttcctggtgacgtactgggcataagtacggggcgccagtgacatatgataagtaccgggcataagtacgggctcgtctgattagacaatgcaatatattggtgccagattatggcacgggctcacctgattaggtggtacatttatatgatatatgggtgtaggtttttggcataggctcacctgattaggtgatgcagttctgcgatatatgggtgccaggctatggcacgggcttgcctgattaggcaatgcaatacaagatgatcagattaacgcatcgacttgcctgattagacaacgtgatgttatgaaaatggttactttatgaggtaacatatatatataatttatatgattaaatgaatatgaattctattattggtataatgattttgtattaccaaatattagtatacttatgtttcttcgtgacaaatgccagtactaatttggatttcaacttatgaacaatgtgtgatggtttgattcttattgtgtataaatgataatattcgaataatagactatatgattgttatttattacttttttcgcttgagtccttgtgactcacaggtgctatgt

SEQ ID NO: 343791 - DNA, 745 bp, Cannabis indica
ctcgaatttggtttgtgaaggaggctataagaattcgaaattagaagaagaaagtaagaagatgaagtctcataaacctagttgtcaaagagaaggaaactaggtttttagctttagaagcattaggtggataatgagaccatagctttccttttatgctaatttcacctagggttagggttgatttatttggaataaaaaaatgataaaaatagagcaaaaattcccttaagtggccggccatgaagtggaccctacactagttaaagttttgccactttatctatttttcacaaataccattttttgcactttctaccctataaatgccacaactatttatttaataattaaataattatcaaataaaattgtcatttataatatttattaattagactccacaaagtctcttaattgataaattaattctaaaatcctatttcttcacaatcaagccatatcttagtgaaaattcataaactagacatagtctaattttagaattataattgattaactaaaataaattaactgagtcttacaagcagtttgtctcaactagtatggggaccatgagcctatataaccaagctccaaataaggagatctagaatttaccaagtaaattctctaacttattaattcttcattgcaccactatagaacttgaaattgtactctcagttgtttagaacgttctatatgctccacgatatagatatgctataagattatccatttg

SEQ ID NO: 343792 - DNA, 1012 bp, Cannabis indica
ccatacccccaatcataatcctatccccgtgtcccacacggtgctgagtctagaacgttcgtacgacaatactattgaccataatatcagcctatactcagtacgctagtcatactctagccgtattgatgtgaaattgtcaagtagtacggtactatcgaccataatatcagcctatactcggtacgctagtcatactctaagcgtactgatgtgatactgtcggatagtacaaaagccaacatacatttctaatgtaatctaataggcttagctaacatgtaaactaaacatgtaaatacatatgcatatcattatactaatcttacctcgtttccgaattcaggtgtgccggccaacatgagtgtaacaactgctcggcaaattataggcccttaaatcatatcattcaaaacatagataagtgacacgctaatcactttccggggacttaaacttgaaactagaagttttcctatcgataaataacatgaccatatcctaaatatcgcaaaaataggaaaaaccagagttcctaaaattgctccacccagtagaccggttccccaaccggaattccggctttgtggggtttcctggggaccaccaaccagaatttcggttcctacagctcccactgaaccggtcgaccggattagtgcaggaaaacttcaaaatttcatatctcactcaaatcaaccccaaatcaaaccaaaccttccagacctgttttatacatcccaaaaaacatattcaaggcaacaaaacactacagcatgcacagaaacaaaatccaccgttaaagagccaagcttgagttctaaaactcaaagcttgctcaaccaacaaaatagctctcaaaactagcttaaatcaacatatctaaccatgattaaacctcagaaatataattcaaacaacagcagcaactatagtagcaaaactcataagtcatgcaaaattccaaccataaacattaaaaaaaaaactaaagagaagggtatccaagcta

SEQ ID NO: 343793 - DNA, 1111 bp, Cannabis indica
tccgatgggcccgatgccccgtcgatgggatggcccatcggacccgaccttaaaacctaaaaaaaattggtctttgtgctcgtcgtgcgtggccggtaccgtgcgagtctcgatcgaagtggttctatgggtccttgtgtcatacgcagtggtgacggggttgggtcgggttgtacgatgtggtgaggggggctgggtccttgtgtcgtacgcggtggagaggggcctgggtcgggtcgtacgcggtggtgagggggtgacggcgcggtggtgtgttggggtttgaatggtgaggctgggttcggattgatttttgggttttaatggctcggcttggattgatttttgggttggttttgggtttgatttgagagagaaagaaggaagagagagagatggttgagaataatgagaagggtattttagggtttagggaaaagtaatcctattttttcaatagttataagtatatgtttagagaattaatttgggtataaaatatggatagaaatttaaatttcctttttagaattgaggtatttttttaatgacatgacaggacattattgtaattgagatttgttaagttattttttgtaattattctatgttttacgtatatttgtgaaaaattccctttaatgtttttaaaattaatatttgtagttaaatttgtttagtaaccatcaatagataatacccattaaaaagtgttccatatatatatatatgattatgtaggttaagcttagaataaaaatattatatataatttaattaaataaataatattattttaataagaaaaatatttattttaaggatctataaaaagaaatgtaatagtatatttttgaaataaataaatataagaaaaatttacaatacaaaaagcaatttttattacaattttatttgttggacaatttttatacccctttagttatcttatttaccaaaatacttcttgcacacataaatcatgtaatgttgatgtcattgtttttcaataacacgcaattatttttcctctctattctataacattttttcatgctattttagcttctttctttattttttttttcttgttttttcgtttttttttttt

SEQ ID NO: 343794 - DNA, 574 bp, Cannabis indica
aagtaaataaatgatcacatgaaccaaataacacattaaacaagtaatgaaattaactgtttcttatattgataattgaatagtaaagattacattgaaatagagttttatttagagcacaaagcccaacaaactcccacttgcactaacataaaacaatcagtatatttcaattaatcctaaattcaggataaacaactaaaagaacgtaatgtatggattacgtaaatatatatgaatagggttattcgagcaagccataaccaggttagactgggtaattataaaggagataaattttactaaggccttattgtaaatagacgtgtgagcgtaacacgtagtctatgccacatagacatatgtagacgtgtgagcgtaacacgcaggtctatagaaaatagacaaatagtgcagtggcaccattaattatgtgataaatatatatgttgagattaagggattatgcgttcaaggcataatcaggttggactcggtaacaagaaccgagatgaactgttctaaggccttattgtatttagacgtgtgatcgcaacacgtaggtctacgccac

SEQ ID NO: 343795 - DNA, 510 bp, Cannabis indica
taatcagtacatatcaattaatccaaaattcagtctatgcttttcaaatgtagttctagccaaaactttggtgaatgattcagctaaattgtcttcattgtcaactttctccaccagtacatcccctcttgccacatattctatgatgatgtgatatttcctctctatgtgttcgcttctcttgtggcttcaagcctctttactgttggctatggctccagtgttatcacaaagtaaaactagtggtttttccattccaagaacaacaccaagtcctatgaagaacattctaagccagacaagttctttagcaatctccgcggcagctatgtactcggcctccatggtagagtctgaggttgcagtttgtttagcacttctccaaacaatttctccaccccgaagagtaaacaccatccaagatgtagagtttctgtcatcaagacaagcttgaaaatctgaatcggtgtagcctatgggattcaaagcaccacccttgtagactaacac

SEQ ID NO: 343796 - DNA, 438 bp, Cannabis indica
ttttgttaaaatcttttttatttgaaagttatgttgatttttttttttaatttttatgaattattattggttgttggtatatagattttattgtacattatattttgttttgttgtatagtatattattattcttagatgatatttattttttattttgttatgtataatagtagtatataattttgttagcataatacaaatattttaatatatgtatagaatttattggcatgctacgtttagttattatttttatatatttaattgtatgatatatatttattttaaatagtatttaattagtttatattttcttatatacaatggtgatatataatttgttatcatggtatatatatattttaattgtggtatataatttggttagtgtatatatatatactaggtgaatgtacgtgccgagccacgtattgct

SEQ ID NO: 343797 - DNA, 848 bp, Cannabis indica
tcaatccatttaagccctcttcaactatgtagtcccatacctatacagtctcaaaacgatcacacttgaccattcccaagcgatgagggattgcacagctcccagtccttccctttcagatcacgaagctctgattgtcacaattgcccccgctttgggggtctgatgtcttgattgaccataatcttactataggtcaaggctctgatactattttgtaacgtccctgcttaaaccctctgttgggcatttacacccacaaaatgatggcttttatacatgagtacgtcactctggctgcttcttggaatgatgactgaccctacaaaccaacacgagtatttcaaccatgctttttcctaactcccacacttcttagaaaaacttcctaggaggtcacccatcctaaaattaccctaggtcaagcatgcttaaccgtaaagttcttttctgatgggctaccaaaacacaagatgcgccttcttgatataggcagtaccattcaatcaatttaagccatattcagctatatagtccatatctatacagtctcagaattatcacacttgaccatccccaaacaatgtggcattgcacagctcccggtctttctttccccatgtagatcacagggctctgactttcacaatcagccccctttgagggtctgatgtcctcttcgaccatacttctaactgaatcaaagctttgataccattttgtaacatcctcgctccaaccctctattgggtctttacataccgcgaaatgagggctcttatacacgagtaagtcactctggctgcttcttggaatgacgtcttgttggaagttattttaccaggatc

SEQ ID NO: 343798 - DNA, 537 bp, Cannabis indica
tcctaaatcacatcgattccaaaacaaataagtgattcgctaaatcacaaccgggacaaaggtttaaaaccaaaacttaacctactgtaacttaataaaaaaatatcccaaactagcagggaataaactgcctgaaaacctgaaactaacacgaaacgacaagctgaaaaaactggttttcaccccctgctgcaaaattcgggtaaccggttttacccagaaaaccaacaaagctcaaacccttaaccaaaacgtttccaaacccaaccaaactttccagacctgcataatacaccccaataaacattttccaggtgacaaaacaaccatcaaagctcaaaattcaaaatcaccatcaaagcttcaagcttgagttctaaaactcaaagcttgcaaaaaccttcaaacaactactaaatcatgcttaaatcaacataataaatcataactaaacctctgaaaacaacatccaacaactacagcaactacaacagcaaatcaacaatcatgcaaaaatctcaaacttaaatctcaaga

SEQ ID NO: 343799 - DNA, 583 bp, Cannabis indica
aataaggacctaaagtatttttttcttatgactcactaaattcaaaatcgaccttgatagagactacatcacttttaattgtatgattaaaattacttacacatctgtaaaaattgtatgtgatttaagagtctctcaatcatttaaaatcgggtagaattgcatattatagattgaaaaaactactatattgcatattatagattgaaaaaactactataatagattttgtaaagaaggaaagaaaacagaaatataatatagacttaatatttacaagtaattattttttattttttaacaaagataaaaggggctcatttatattaattttttatattggagaacattgtcccacatgaattaaatgtaaaagtattgagtcatatataagaacatgggctactctactcatcaccaattggttttgagatggaacccatgattctcaacatggtatcaaagccatgtccctagtagactttcgatccacacttgtccagatagttagccagccgcataaaatccagagcgtacaaagacgcttgagatctgaacaaaataagcgagcaaatggcatggc

SEQ ID NO: 343800 - DNA, 1229 bp, Cannabis indica
agcaatacgtggctcggcacgtacattcacctagtatataaatatatatattaattatgactcttataaactttactccgaaacttgtttttttttttgctaaaaattctttcttaaaatacattttttttagaagaaaatctatctttagttactttatgttcattaatttaaataaattgttgatataactaacgtggtatcacaagtactaagataaagaactatacttaatagatatttaataatgaattacaagaatatatatatatatatatacgcatttttaaaattaatatttatgtatttaatattaataatttaaattttaaataacttaaaattgtcaaatagatcaccggtgacctacgattatatacgcaaattgattttaaaaaaactaattaggatttttatgctccgaactttaacatgtaccaaataatgctttttgaatttttttagcagttaaaaatttcccccaaattattgagatagttaaatttaaggacttttgtataatttcattcaattttactattttagtgattatttatgtactaaaccatgctccttagactatgatatctaccaaatcatatttctcgaaactttgacatgtactaaatcatgctctctgaactttcatccatgttaggctttattttactaaaattagataaaaattcttaaattcaacaatttcaataattcaaagggcctttttaacggcattaaaagtgcaggggatataatttagtacatgtcaaagttcagggagtaaaaatcttaattagccaaaaaaaagcaagggaacatttataatttattttaattattaaattaaaatatatataaaaaaaatatatgctatttaattacactaataacatagattaatatgaacaacaccaatatataacactacaattattattttggggaatttataattttatgtatattatagtacttaattacattatatgtgcataaaaaattatttataatttatcatacattttattaactatgaaaaatatattcttaattttgatgtacaaactatatatgataaaaataaataataaacatacatgtttaatttataaatttgtatttaaattttaataaacacattatatcaacaaatcatcacacacttggtaaaaaaaaaatatcagcacaaatattatcataacaaatatattagattaataattaataaa

SEQ ID NO: 343801 - DNA, 486 bp, Cannabis indica
aataggtttgttaaaaaaagttttgaataaataattaaataatacaaataatatccatgtaaaaatatgttgaatgagatatttattacttatataattaaattattatttaactaaccaactaaattttgaaaatttaggattgctgaaacaaccttaaatatctatttaaaatttaaaaattcaaacaaattttaaaatgtttaggtttatttgaattatttcatcaaattaaattaaatgtctaataagataaatgatttgaaaataatcaaatagatattttcaatatcattttcgaatcttataatttaataagattaaaataataaaataaactaattttaaaataggtatggttagagaattattattttaagattaaaataataaacaaataataattatccaaattatatgtcaaaatatttcaaattaagcctttttaaattttctaaaaaatatctaagttatttaaatatttaa

SEQ ID NO: 343802 - DNA, 366 bp, Cannabis indica
caccaggcggacttggagtccagggctaacctggccgtggagctgaaggagcttaaggattttaaagaccaagccttgaagaaggctaagaaagatgagctcctttctcccatctcctgcagccgatgcattaagcactttgacgatggcgtttatatggcctggtcaacaaatggccaaagcatcaagctcgacttctacccaaaacccgcggagatgattgctaaatcctaggagaagaagaagaagcttgacgccatgctggaggcgcgcattggtcctcgcctttctcctcgaattgactaagccattctgaatacaacccagattttcttatctttttttttatttacagccaattatctt

SEQ ID NO: 343803 - DNA, 700 bp, Cannabis indica
gtttttttgtacgtgctgcatggcaagtgagagggatcccacaaagctatataagctcaatcgggggaacttacttctcatttcccacatttccatctctctctacataaagaaacttttgaaagctccttgttctctctagaggctgacaccccattgtcctccatcactcgagatttttgcatcattttgacgattcaagtttcccatcatcttcatcaatagtttctagtagtaggtaagctttaaaattctattattcactggtttatttgatttttcaacggttgttttgaagtttttcttcgttttgaatatttcttgattctcacgttagattgtaatctttttggtaatttaatccacatggtatttttgggatgtataatgtgtgatttcttgtcaaaaaatcttcaattttgacctttgttgtgattcttgactctttgagtcacgaagaacatgtttgagttcttgaaaaaacacacactatgatccataacacaccctggtcgaccataggggtcttgttcaagacctggccaaccatggggtcttctcatgggagctggccgactataagggtttaccctaaagtctaactggcccatgcctgggtttagtgtaataccctaggattaagagaatggattagcaaaaccctaactagttaattttgtattattgtggaattatatta

SEQ ID NO: 343804 - DNA, 559 bp, Cannabis indica
caaaagagggaatagcttggaccaccgctttaataagagtttccttaccagccctagagaaaaatttttcattccatgagttaagtttggatgagactttttgaagcagataatggaacatggaattagagaccctgccaacacaatggggagcaccgaggtacttactaatgaaaccttctcccacaaggtgaagatcttgacgaaatcgaaactgggcctcagcagaggtattgggggagaaaagaatggatgatttatctctattcaccaattggcctgtagctttattgtagagatcaagaataacatttagggaagcactggcctgagaatggacaggagagaaaaccatgctatcatcagcaaacaagagatgagacaagggtaaggcacccctgcaaatctgaatgccagaaaactgagcctgagcttcttgcaatcgaattgctgcagaaagaccctcagcaattagaaggaaaagatagggagataggggatccccttgcctaataccacgcgttgaatggaaagtgtcagtaagagagccatttatgga

SEQ ID NO: 343805 - DNA, 673 bp, Cannabis indica
tgaatttgccagagtaggctatgtgatatgtggatacctatattcaggttgtgcctgtgaggcaactgttattaagtcatgactataaactaaaattattgttaggtttcttcctgtcggcgatcctgattagccacgggtagcagtgacatgtgagttccaggctatggcacagactgaaaccgttgttaggttttttactgttggtgatccatattaggtacaagcgacattgacatataggtgccaggctatggcacagactgaaaccgttgttaggtttcttcctgttgacaatcttgattaggcacgggcgacagtgacatataggtgcctggataaggaacgagctcacttggttaggcgatgtgatatattggtgacaggttgtggcacaggctcgtctggttagacgaagcgatacattggtgtcagattgtggcacgagctcatctaattagttaatgcagcgacatcatatatgatgccagattatgatatggaatttcctgattagacaatgtaatatatgattgcttttatttccatacgtgtggctggttatgttatccacttttgaatgttattattcaataattccataatagtgaaatgaataattggttattccatgtattattttttattacctttcttgctaagtcattgtgac

SEQ ID NO: 343806 - DNA, 1215 bp, Cannabis indica
cgaactttgatatgtaacaaatcatgttctttaaactttttaagctattaaaaattctctccggactattaagattgttagatttaagaacttttgtccaattttactaatagaatcctaacgttgatgaaaaattatgagagatgattttgtacatgtcaaaattcgggaggcacgatttagtatatggaaaatcaccgcattagtaaaattgagtgggaatgggacagaagtccttaaatctaacaatttctatagttcaagaaaaatttttatagcctgaaaaattcaagcgacatatataatttgatacatgtcaaaattaagggggcaaaagtcctagttcactatttttttaacctccaaataaacagttgagaatttagaaatcttgtttatgttactgctagaaaaacataaagatatgagtgtcaatccacttataagaccctaatttactttcattagcaacttattttgagttagaatcccaaatattattttggactttgtgttttataaaaattataaactagaccatctattttgttaaataacaaaatggaccttgtattttttaaaatggtacaaataggatcctaaactcaatttttgataattcattttttttttaatataaccgatttaaagacaattcctaacacgaaaagatgcaaaaaatttaactaattttatcataccacctctaggtcgattattattaaattttattttgataaaaaatcagttcagaatcttatttgtaccattttggtaaatacatggtccattttattatttaacaaaacagatcgacgatccattctgtaactttttcaaaatacagagtccaaaatagtatttatacaaatttttaatatattactataatcattttgtttcacatacattttatctaataattttccaagtataaatttatagaatatcagcttatttgatgggtgctgttaagaagaaatcaaacttttttagacatgtaactttataatgaagttcatctgaaaaaaaaaaaaactttataaatgcagttagatatatattaaaaacgaaaagaaaaaaaaaagtaggcaacttttgaagataatatacacaatacattttttactagaagggtcatgtgatctacatttttttttaggtccattcatgtgcttacaaattttaaaattaaattataatgttgcaacttgc

SEQ ID NO: 343807 - DNA, 899 bp, Cannabis indica
gcatagctttaaatggctctaccatcccttcaacatttctcttcttcatgaaaatccatttacacccaataggtgtaatatcctcaggtggagtttcacatttcctgacttttttggtgcgaatagaatctatttctcgatccatgacattggtccacttgtttgagtcagggtcatccattgcttctttgtaagtcaatggataattcttgtctatgttagagacaagaacatgtgctttatgattatagcagacatgctaactcagaatcctcccactatgactatgtactgggatttcctttttaggaataatggtgatcgttgttggtcgttcacttaaaggtactgaagttgatggttcagaaatttgctcatttctgatttccacaataaccattggactgcgtggtttgtgacttttcatatagtcatgttcaagaaaaagagcatttgttgatacgaatactttattgtcatgatgactatagaagtatacacctcgagtttcctctgaatatcccacaaacatacatacttcagttctaggagaaagttttccaggacttaagaacatgagcaagataacaccaaatacgaaaatatttcaaactgagtttgtaacaccctaactagcataggcgtgttagggtgattttaaacgtactgtgcagctcgttgctaatcaacgaggttattgaaaatagtgaataattaaaattttcttatttaattaaaaatataaagtaatacatttataatatttcgggatctcgttacaaaatgtatttataaaagtttgctagtttaatacaaaagttttgtcgcctagcgactttcagcaaaagccttgatgtcccctaagatcatacgcttcaggcctaactgcgccgacatgt

SEQ ID NO: 343808 - DNA, 1015 bp, Cannabis indica
tttgaaaagaaaaataaaaaaaaataaagaaaaagacttttcctcttgaagctctctccctctctctttcggctgggacaaaaccagagggaatcaccctcaaagcttagtgtttttctagtttgaagctaaggaaacaagcactcttgaagctaaggtaaccctagacactcttagctaagttttcttaatgttttagttggtttcatgttgtgattttaagaattagtggctgttagggtttgggatgtttaggatttgaattttagggttcatttgagttggtttcaagttcttccagctgtttttagtgtgttgtgttagatttatgcaagtttgagctttgagctcaaagctttgatctctaatggcataatttgattcattgagtttttctgtgaaatactggttggaaaatattgtttatgcattgtttaggtactttggaaagttgggtggcatttggtggaaaatttagcaacaggtgaagggtttggggagaattggtgcaaaccggttagccggttttgccagacctctaaaaccggctaggcggttttggcaagatcccccaaacacttcatttcctctattttgtccatttcagtgccgtggttgggtgtttccctaattccagagtatgagtaacctatagagagtataatagaacctagggttatgggttcgggtttctcgagattagtgttttgatcatgtaacttacccagtttcgtaatgtgaatagggcatccatctagcacgaggcttccgttcaggtcggccagtgcacttgaatctggaaagaaggtaagaactgaatataatgtgtgatatcaatatctgaatgtatgtatatgttatgtgtatatgcatccttgatgtgttagttgcactaccaacacttatgcagttaaggtatagagtgcattggtatagtgaatgttatctgagagtatattttcagtgataccagcacaagtacgggagaggggactgagtgtgtgtggtatatcac

SEQ ID NO: 343809 - DNA, 686 bp, Cannabis indica
tgataaccgtgtttttccctaaatcataaacaattcacaaacaacaataattgtttctcatcattacctcgagtactatcaagtcacaacaaatacatatcgttaacctcaattaagatcaagtcacaataaatacataccgagatcttgatcataaccgagactgtaacaatcataacattaccatatacggtgcttaatacttttcttacctcaattccaaagtcaagcatgtcagtcaacctaagtggaatgatgctcgacgatctcgggtcttatgtcatgacaaaagtaaatctataacggtctattccaaaacactgtctaaaacccgcataaaataacttaggattttctacaaaatcttatggtgaaaacaccctagaataaaaatacatatttaggctctaatctatgtctcatactgtagagctcttcataagcttcaaaacagtatatagaatgtctaaaacggacacccgagtgaacagttatggctaaaatatgaaaatcagcgattcctgaaaattgaccatccggaattccggttggtgcagccttgtacaatccggaattccggttcactacagcaggaactcgaaaatttcagctcttaaaagtcccaaaacttgccccaaacctaaccaattgttcccaaacttgacagaacagtataataaccataa

SEQ ID NO: 343810 - DNA, 603 bp, Cannabis indica
actacttgaaacgatacgtacacttgcgtgtgcaaaatatcgcaacagcaggttcgcgttttgcctctaagttctgctcttctttctttgcctgagggcaatctttcttgaaatgcctcaccatgacgcactgaaagcatgtctttcggtttcactctcctggatgatgtttcttataacgtgggcactcaaggtaagagtaaccttggcgtccacctctgccttggttcccacggaaccgcttgctttgccttcagccaccagatgccgaagtaactttccttttctggttagtggtggaatcaccaccatccctaccataaataggagtagaaagggtgggggtccacttcaggctacatatatctattacgtggtggagctatatcatggaagagtgcaaaacaaacactcatagcttcatccaccatggcagcagaatttattgcgtgttatgaggcatccaaccatggcatatgggtgagaaactttgtcactgagctgcacattgtggatggaattgaaagaccacttaagttgtattgtgacaataagtcagctgtattgtattccaacaacaacaagagctcgacgaagtcaaaa

SEQ ID NO: 343811 - DNA, 1587 bp, Cannabis indica
tattgtgtagcgaggcactgaatacaaaagttttcgcgcctcttctttgttagtttgaagttgtacgttgagtagataattgattataggagtcatccatgtaggagagttatctatcatctttatgtcttccgtttaacatatgcttgctcgcttagcatctctaccggaaccaagtttaattcatccaagtcgttctgtgaggccagttttgccaaggtgttagcgttagagttttgttctcttggaatttgctcaattttaaagtaatcgaatctttccaagttcttccgaaccttctttaaatatttttccatttttaagcctttgtcctggtattccccgagaacctagttcacaatcaactgcgaatcactatggcaaatgagatttttgaccttcaacgcctcgactatcttcaagccagcgatcaaggcttcatactcagcctcgttattcgtcaaattgaaatctcaaagcataatgaaacttaaagccttctggtgaaattaagattacccctgcacccgagccctgctcgttagatgcaccatccatgtataacctccaagtttccgcgtctcagtgaacaggcgaaatttcttctggagttataccttctattaagaagtctgccaaggcttggccctttatgaatgttcgagggtggtatgttatgtcaaactgccccagttggattgaccattttatcaatcttctagaagcatctggttttgataaaacttgtctcaagggctgatcagttaacacttttataaggtgtgcctgaaagtatggtcgaagcttgcgagacatgtggactaggcacaaagaaagttttttcgagagagggatatctagactctgcccctagtaaccttttacttacatggtaaataggttgctggtgcttaccctcttctcgcactatagccacactaatcgcatctttcgagatagccagatagaggagtaatgtttctctagttattggtttcgccaaaactggaggtgtcgctagatgcctttttatgttttgaaaggcttctttgcactcttctatccactcaaatttcttgttgcctcgcaatatattgaagaatggcaaacacttatcagttgacttcgagatgatggcaaccattcttcttgtcaaggcttgtacttccttaggctttgttggtgatggcatgtctatcaatgccttaattttttcagggttttcttcgatacccctcgcgttgactatgaatcccaaaaatttccctgaggacactccaaaggaacattttttcaggttcaacttcatattatacttctttaatattttgaagcattccgcgaggtatgtggtatgatttgcgcttcttattgactttactaacatatcatcgacgtaaacctccatgttctgccctacctaatttgcaaacatctcgttcaccaatctctgatatgttgcctcagtattcttcaacccaaacgacatgactttgtagcagtagagtcctatgttggttacgaagctcgtatgttcctaatctgggacatgcatttttatctggttatatccagaataggcatcca

SEQ ID NO: 343812 - DNA, 1532 bp, Cannabis indica
cctggaggaggtcatgcagggtcctgtggcccaggagaattacaagtcccatgccaacggatgggaggcggctgagctccactccacgctgacttgcgctcaccagctggagaagattgtggtggtggcaggcatcaaaccttcggtctctgggaccttccaccggctgcctcgggacgaggagacgcccaaccataactacgggggctttggagcttggagtcagacccacttgatgtctggggccatgctccctctctaggattattttataaagtttcttgtttttgttggcctcgcgccgtaccaactaattccccaagcttaccacctgctttcaggcttgtttattttttatgccgcccggagctggggttcgcctagcccgactaaaatattgtatttttatgaacttgtttctattcccaagaagggggataaatttaaagatggattttatggcctccgagctcatcgtttgaatgagggcccggtccctttcaaccaccaaaaacatgtgaaggagtatcgccaccgcttcttcttctcctccggtttccaggccatgggctgcccggagcttctcacggagtgggttaggatccctccttacatgcgaactgcgcctacccaagtatttcttcagcgagccaagaccttctccacatatgacaagaaggccctcgatgttggggagttggtcacgacagcgaactgtcggaaggccaagctgattttggggaaccagtcggtggatgacttcaatctcccctaagtcatctgcccgaacgtgagggctccggccgcaggaaaggcgttccgggaggacattattgccatggcggaggaccggtaccagaagtagggaacaagagctggcctacatcaaggaccaggcggctaccgggaggactctttgcctggaaactccgccggagcgaaggacccctaggcccaagcctgtggtcccggtccccaatactggtgctcccgatgccaacacttcgggttctggtaagtctcctttaataatacattatgttcctcccgtccgagagtatgcccaccttagacctatagggttcgatgagcgccttcgtaggtttagaatgccttctacccggtgggggaatcatgccaaagagtactacttctcccacttaggccatttttaaggtcgatcccagatgggttctggacctccggctcctattcccatggatcactcagcccacttatcttccagcgggtttcttccctcagacagctttctcggggatgatgaagctagcgttatgattcgagactttgctagggccgaattagagagtcagggtaggactagttttattgcttttttgctgagtgcatgcctttctcatgaatatcctaacacttagcatatttctttgttgcagcagtcaggcctatggaggatgtcttggccactcttggtgaggcctacagtcccgatgcctctcttcctttggctccctcccagtcggtgacccccgggaggtcctcctccaatg

SEQ ID NO: 343813 - DNA, 1085 bp, Cannabis indica
cttgccactgcagcaaatgttccaagaaatgtaaggtatcatactttgtccggaaggagagttgcgtagattaaggcaaccagctgcccctgttgatcaagtgttaccatcaacacctgtgccagtggtgggtaaccaggggtatgtaatgtcgcactgagattttgtatttgaggggtttgtgaagctgcaacctccgacgtttctgggaggtactgatataataaaggctgagtagtggatgagtactattacccgtatcctggataatatgggggtgacaagaacagaaaaagtgaactgtgcagccttcctattgcaagaccatgcccgtgtctagtgggatattgtggcacagactcgggatgtcaatgtaatgacttaggaagaatttaaaaattattttgaagagaagttctacaacattgctgtgaggacttcacatatggaaaactttgtgaagcttactcaggggaaaatttcagtggtcgaatacactctagagtttgatctgctgtctaagtttgctggtgatatggtgcccacagatttcaccatgaaacagaaatatgtgagaggactgaatgccacaatcagtcgggacttgaagattaccgcttcacatgacactttgtacaagaaagtggtagagctatccttgattgctgaggaggttgagcagtatgtagctaaagagcatactgcaaaggataccatcacagaatcgaaccctcctactagtggtaatgttagtaaggggaccgacagtggtaaccctgatcacaaacggaaggttaaggctttcaaagcatcagggggtaatagaaagttctggggaaataatggtggctgtcaggggcgtggtcctcatttagatgttatcccgagtgtcctaaatgcaagaaacaccatccgggtgagtgtcgagccaagacatgttttcagtgtggcatggtgggccactttatccgggattgtcctcaggctaagaaagaggaatccaagaagaatactactcagaacccggggcgactttttacctatgactcaggctgacgctgatgctagtctgtcagtagtgacag

SEQ ID NO: 343814 - DNA, 970 bp, Cannabis indica
aaaatagaaaactttattataaaattctccaaaataaaaggaatagttagcaacaatatgaaaaatagggaataaaaatcccaaactaataattgaaatccaaattgttctgaaactaaaacaattaattcaaaaataataaaagaagatttcgagcttcatcttcatcttggactatctccacccatctgtccaaccatccgattcaactcgctaagatagcatccgagttcaagcagctggagctgaaataagaagaaaaacaaaaacaaacatggttagtaggtccagaattaataatccaagtggataataattctctaaaacacatgagtttataacataaaaagaaataccttgtttctttgctagaaatttagggcattggggttttagtggcccttttcattgcaatagaagcattttccttttggtatatcaccagtagtagcagcctttttctttttaactattttcacagcttgaacaggcttcttgctattcttccacttcttcttgttcttgggtttggaagtagaggcaaagtttgcctcagccttagccgccccattagcattcccagaattatgagctttagatccctttttctgtggtcctccaatcaaattttcaaatgtctgaaggtcgttaaccaactcgtgaaagtcttgttccttcttattcatgacataatttgaagtgtaaggtagaaaggctggagtcagactgttcaagattagactcacttgagttgtctgatccataacagctccatgattctgagcttctgggaaataacttgccatttggagaaggtgatcacgcacgttctgatgagggttcatccgtgcattgatgaaattccttgtcgcttcaaagcgagattggattgatgccatcccgaatagttcagttaactggttcatgacttatgcagccgtgttagtgtttgcaaaccttgttttcaagg

SEQ ID NO: 343815 - DNA, 639 bp, Cannabis indica
tagtaaaaatatctgctattttcttgctagttttaacatattctaggacaagtgtttaattttccacaagctctctaataaagtgatgacggatgtctatgtgctttgtgcgagagtgtttaacaagattttttgaaacatgtatagcactagtattatcaatggcagaatgacaagtagtataagtagtgagtgtaacaattgtcactagatctgagcccttgcaagacacaatttccaccttggtcacgcacataacaattattatgagaaaaatttactgtgaaaccttgaccacaaatttgacttatgctaattagattagctttcagtccttcaacaagcaaaacattttccaattttggtaatccaacaacattgagagtaccttttccaagaacagtgccgatcataccattaccaaaggttacaacaccacatttcaaagatttgaaactagtgagtaaactagcatcacctgtcatatgctttgaacatccactatcaaaataccacaaattagcagtatgagatttatgacaagcaaaagaaactagacatttagaattatttttctttacccaaacctttttggaagaacttctttttctcatactattttgtttaaaataatttgat

SEQ ID NO: 343816 - DNA, 642 bp, Cannabis indica
ctttattgatgttagaataaaatagattacattgaaatggagttttatttagggcataaaacctaacatatacatcctccaagatttctaagttttttttttttatttttttctttcgatttcgtaatacaagaatgcatgatgcattctaatttttattatttttgtgtttcctttttttgtttactccattatgttgcgggaatgcatcattctatttttatttttatttttattattattattattaaaatatataatggttttaattataataataataatatagtaacaaataaattcaaattttggctttacaatttattaaagatatctaacatttaattaaattaattgaaacaaaatatcaccaaagtgatctcttttgtgtagattaaattaataaaaatattaagataattgtatatatggaattcatgtatttattaacagacccaaaggtaagttaatatttgaccgagtttcatatatacatgtggtgataaatgtgttacaattataaggtattttgtgtgaacaatatgttagtccaaagattgcatattgtttgtacattatttattgtcactgtttgatcactacaacaagagtaccgcttacaattaatattactgtccaaag

SEQ ID NO: 343817 - DNA, 824 bp, Cannabis indica
tgcaaaccccaataataaactttcaattgagattgggccttagcccattagtcgtacaccaaatttataatttctaaaaaaacagatttatattggtcatttttttgatattaatattatacagcaaactttatatatgctatacatatgggaaatttacaccctcccatgtttttttttttgtcattggttgaggaaattatattatatatttgttttattttatttattttaacttttactttagattaatgtaaagtatatacttaacttaagtagaaagtgaaaatatattgggcaacccacttaaaaagatgagtatatttgaataaaatataatattaaatatttttcaacttatcccttagttatttttatcctaaaattatattgattcatctaatttacatatgtaaattttcacatttattttttttctttttctttttttagacaggtcttactcaaattttatatatataaatatatatatactagtcgaggggtacgtaccaaaggcaagtaccactccttaaaatttgtggattataattaggggtggcaaaacgtgtcatcgtgtcgtattcgtgtcatattttatgtgacccgctttatatttcgtgtcaagcgtgtcgacccgttttttgactcgtgtctaattatcttaaccctaacccgatccgtaaaaaatacgtgtcatgttcgtgtcgacccactatgacccgtttttctattattaaagctaaaattgtagagaaaattaataaatttaagctccattaaaaaacttatatacattttgttataaatattaataattatgt

SEQ ID NO: 343818 - DNA, 740 bp, Cannabis indica
cggggttatggaatttgaccattttacccctagctttagaaacacctaagttataacctaaagggcaaattagtaattttaaataggggttgggtggttgcctaggtgtgtggcacgtggccaattacttcagccaagggaaattgattttccctaatttgctatatctcattttgtaaaacttaagagaaaataccaaaaaagaagaaaaactctctccttccttctttctctcttcgaaaccagcaagaacaagggggtttgctgctcaactttggagttttcagctaaggattcaagcaaggttcaagtggaggtaaaccctagaccattagtttcatgtttttaagctttttccttagtttgattatgggattcttgattttgggggctgttaggtttagaaatgtttagggctcaatttttatgctcaatatattgttgattagaggttctggtagttgattttggtgcatggagttagttttaagcaagcttgagtttgaaaaccaaaccttgaacctttaatggcaacttcagttttattggtttgttctgtgaaatactggctggaatttattgtgtatgcccttattaggtactctggaaggtttcattgcatttggtggagaattgagcaacaaatgaaagactttgggaaacctggtgcaaatcggctagccggtttgcagtgccacaaaaaccggctagccggttttggcagggttccccaggccttt

SEQ ID NO: 343819 - DNA, 953 bp, Cannabis indica
tgtgacgtcgagcatctacggctttactggcgacgtcatagcattaaaaggaatgatcaaactcccaatcaccttgggaactgccccggtaacagccaagtcaatggctgacttcgcagtaatcgaccagtattctgcatacaatgccgtgattggttgaccgatcctgaaaacctcgatctatcatctcacaatgaaattccctactctcgctggagtaggttctgtacgaggagtccaagcagattcgcgagaatgctataacacagcagtcaagcttgcggagaaaagaacagtaaatgttatctacctgttggaggcaccacctccaccgctttatatcgcgatcttctgataagtgcaaggagtattttcagattctaaaaggcaacaaaaagttccactggactgaaaaatgcgaggaggcttttcaagccttaaaaacgcatttgggacaacctccgatcttatcaaagcccacgaccggcgaagtcctgtccatctatttaggagtgtcggaatatgcaattagttcggtactaatacgcgaggatcaaggacgccaatacccggtatattatgtaagtaagcgattactggatgccgagacaggctacccccaaaatggaaaagttggcatttgccttgataacatcgtcaaggaaattgcgaccatatttccaggctcatagtatcgaggttttgacaaactaccccttaaggcaagttttggcaaaaccagaagcatcagggaggttattgaaatgggcaatggagttgagtcaattcgacatcaagtataaaccaagaactgcgatcaaggggcaagccttggcagattttatccttgaattccccatcaccgaggtagcactcatagaagacaaaagcgacactgttatagcgaatagagagatgtggacattgtacgtcgacggagcctcaaataacga

SEQ ID NO: 343820 - DNA, 1134 bp, Cannabis indica
ccagagtttaacctcttcagtctacgtgtctcaatccggttggtccacgtattttggacaaaatcaggggcaacatttacccccaagccttgtttggtaaaaaagtaaacaaggcttacttagatgcctccagttgccttattagcttccttgtacgtgccctgggcgcatggggatgtatttatgaccatcattactgcagttatttgctttttgtagacaacgattcattttctgtccatttattgatacggcgcattaaatgggtgtcagtcgagtactcaaacgttttctaccgccttgatgagcgcttattccaaccgttggatctgtagaacgctaatcaattgctatcctgaccgtacgatgatggttggtcacagctatctcacacctgtctggcctataaaagccaaccttcttacttcatttggttattttcagcattttaccaaattttcttagagttttctcagagagaaaagaaacttcaaacaccatagatcacttgcttctactcattcgtcgttgctagtcttcattctaccggcgattaacaccaacccccacgccttcaaacttcatgtaagttcttcgtataccttatacttgcttactgttcgtttatatagcatgttttatgatttctgggttgaatgtcgaacttctaggaatgagtttgcctgagtttactgtatgatgcgttaaattcctcttttttacgtcttgattgctcattttcactacgtttctgttgaggaatcatccttatcttacgtaataacgtctttaggacttagagtagatcttgctttcttggctttgcccttttttccctttctcgttttttttttttttgcaatgtcactgcctttgggatttttgcacccgattcttgccaacgaaaatctcttggggttttcttatttggcaagtgtccggagggggcctctttccagcggttaggggacccccattccttttttttcgaacattagggtttggtttggggcctaactgggtggattttctcacttttttcagaaccaaaatgtctgctttcgcgtctggttctaagtcttccaagaagggagaggttcaactagccaccctggaggaggtcatgtagggtcc

SEQ ID NO: 343821 - DNA, 598 bp, Cannabis indica
aatctcgaaagataagtagtattgtaagtcttttattcttagtaaagatcacctcaatagtgactacctagagtagggcctacaaagtatgaaacaatggtagaaactcattaaataaaatgaccttgactctcgcctaaataggacaacgttggattcttatttccatcaaataaaaggttgctaaaagggtgtccattttagatgagctgacaactctattcaatgaattatatctttaactctctcctaaacgggacactgtatcaatttgttgaaaaccttaaaaattatttaagatatgattattttttattttcacatgtctttattacttgctaaatgcttaataatttctaaatagtgtatgaatttatattgaacattcatgttattttttgtaattaattattgtagtaccaattttgaatcttcattgttggtctaacttagtttgttatttttaatgggatattccaaagattgtcacctataagacaaacataacaatgtatagataaatatttgtaaatgtgacatctagttgactcatccaaatatgacagcttagactaagtgtttacaatataaaacaatg

SEQ ID NO: 343822 - DNA, 876 bp, Cannabis indica
cttacttagagtaagtttctctttttttttttctattttttttttcacttgaaattctaattaataaggcaaaactatttgatttatagtgaacacttggaagtgatcagacaaaaatacccaaatggagatcataacgttctacacaagaaatattttcagtcgtggtttcacaagaaggtgaatatagatgtagtaaaagtttattattttaagtggtgttatgagatattatttttatagatatatgacttgcacaagtttggatcattagagaatggagaagagttgctagctttagcatccgggtctgatcacttaggtacttactatgaaggttgtattgtgaatgaagttcgatttatgggtagaaagcgagatgagaagaggagcacacaaaatagtggagtgtttgtggctggaacagaaggtttattatggcacacttaaagaagtactaaagttaaccttcactggtgtttactccgtcacattatttaagtgcaagtggtttaatacagatccaagacgaaagaaaataatcgttgagaaccatatcactagtatcaatgttaatggtgaatggtataaagatgacccacacatacttactaatcaagcaaagcaagtattcgatgatttattgagagggaaaaattaaaaaatagttaagaatgtaaaccatcaacaaatataggacatcgtggatgatgatgctaatttccaagttgatttggtacacgacacagtctcatcaaattttgtattaactgttgatcttggagagttaattatgcaacctaatcattggacctgaacaaagtttgcatgttaacgaagatgatcacaacatggacgaagaagaagctactgaag

SEQ ID NO: 343823 - DNA, 928 bp, Cannabis indica
aaagagttttatttagggcataaaacccaacaaatcaaaaatatgattttcatgtgagccattttagttgaaattctctcttcctgcaaggtgcagtttgtttaattttgtctaaaatatgctatgatatttagctggtctaagttgagtagacttgaattgaatgcaaaaatatctcgtatgagaacactagatttgagcccttgtaagacaattttatcaagaatattatacacataacaataattactataaaagttcacagtataaccctgatcacaaatttgactaatgctaagaagattagcttttagtccatcaaccaacatgacattcttcagtctaggaagcccttcaaaattgagagttcctatccctgtgacttttccaacaagaccattatcaaacgtaacttctccacactgcattggtctaatgttcacaagatattcttttttcacctgtcacgtgtctagaacaaccactatcaaagtatcacatgttagtagcaatagttttaaaacaagaagaacctaccaagcatttattttcgacaacccatttttatttttgtaaaacatgtttatttccaaggtaattagatttaaacatgttttgtatagtgatgcacttaagtcgaatgtgaccttttatcccataaaaatggcaaatatggatgaaacgtcttccattctctttggaattgtcaaacttgccgtgttgtttcttttctgtaacaacagagtgttttactgaagtgacaaaatactgcgaggtagaaacaattcttccagaaacaaaaatatcaaatttaacaaatgtggtgttgaaatcagattgattagaaacataacctagaccagcatgattagtttggcctgattttttaatttttttcaaaaatgttggaacctggatttaacatttt

SEQ ID NO: 343824 - DNA, 573 bp, Cannabis indica
aaaaaaaaaaccttaaacaagaaaaatcataaaagaagaaaccagtttaatttgataggaaaaattaccaagggagtagaagacacggctgcatcaacaggagtctcactcttcttcttgccaagtgatttcaaaataggtttctttttatctttgttaatgacattaactagtttctcatcatcagcaagttttgattcacacattttttcctaacaataaaaaacacaattcattaaaaggcaaaattcaaaaaaaaaaaaaaactatgaaaacaaacatagagtttaaaatttgtacaaaaagaacaaaatttaatcaaacaagacaagacacatatcaaccaaaaaatataaaaaaacaacaagacataccaaattagaatccttaacaggagccttagttttagccctctttgacacactggcatcatcactaacagtcttcctttttttggttgaacaacttctgagacaaccttctcagtctgaaactcatcatcatcatcatcatctgcttgatggacattagaagccttcttgctcaccttcttactatgatgtttctcagtaa

SEQ ID NO: 343825 - DNA, 1025 bp, Cannabis indica
gctttaaatcccgtaggctataccgactcagattttcaggcttgtcttgatgacagaaagtctacatctgagatggtttttactcttgggggtggagcagttttttggagaagcgctaagaaaaccgcaatatcaaactctaccatggaggccgagtacatagctgccgctgaggctgctaaggaacttatttggctaagaaagttcttctcaggaattggtgttgttcctggaatggaaaaactactgctttactttgtgacaacactggtgctagggctgcacacaagtcgagtttttggatggtcgggttcgggtaatcgggcctcgggttttggaaatgtgtaaccgaacccagttttcgtgtgctcgggtacgtcgggtatcgggtcgggtgtagtcgggttgggtgtagtcgggttcggatcttattgggctgagcccgaatatttaatttatgggctgaaataaaattttatttttaaaaatatcttttttttttttaatttttaacattgtttgggccttttaaataatattatgataatatgatattatgattatcttaataaaattatataataataatttattatacaaaatttaataaaatgatgtatatataaaacaaaagttataaaatcatataattgtatcctatgagataatcgatatgttcatattacataaaaaaaaaaaaagaaaagaaataaacagcccagtaacacctaacaagtgcccagcccaatcaatctattaagtcacggtggtcaccaatgttacgagttacaacccgatcaaaaaatacaatatttcccatacccgaacccgaaacccgtgtggggtattttcgggttaaacccgaccaaaccacatgggttttcaagttttcggtttttttggcggcgggtcggggacatactagtggagaaagtggacactgaagacaacttagttgatcaattcaccaaagttttgactgcaactacatttgaaaagcattgattgaatttaggattaattga

SEQ ID NO: 343826 - DNA, 819 bp, Cannabis indica
actcttatgtgtttatttcattgttttagaattcatattaggattttaatcaaacatacttgttagtaaatctagatcctggtaaaatatttccaacagtttttaggtttaatttaagtttgtttaagtgtggatttgattattctttggctgctaggtcttgatttgagtgaattgagttcaaaaactcaaatttcactcaactatggtgaatttgttatcttgatgtattactgagttttaaaggcttgaatatgttatttttatattgttggtatgttctggaaagtttcattaggactggaggagatttggaaaaattggagttttccatttctggagcaagaaccggttaaccagttctacagggcactgtggaaccggtcaacaggttgaccaacgggggaaaacctaattttttgtaatcaatttcctgtttggggtgtttctccagaacctagattagggtgttttatcgatgtttaggatgtttctaaacccgtattgattatggtttttccggttttgagttttgggcctattttgggatttggttaagttgtcgtggcataggatccgagatcaacaagcatcattccattcaagtcagcccgcacaactgactattggattaagataagaaaagtcaattgcattgcttagcatgtcaaataagatacgattattatcgtttgtgatccgattataattgaggtaaagatacggtaattatcgttgtttggaatgagttattactcacttttggaagtcgtaaataggtttcttacttgtcggttacttaattaagtaatgatagtg

SEQ ID NO: 343827 - DNA, 653 bp, Cannabis indica
aaattggcctggggattagccttccaaaaatcaaagaagagctcgaggctggctgtctccaaggcattgaccttctccttcaacttgtctgcctcggccaccttggcgtccttctcctccttcatccgaagaagaacttgccgcagagaagtcctctcatcctgaagactgttaacttcagcagataagatctcgatggtctctttaaagcaatcagcagcttcgagatcctttgtcagcagggagatctgcttcttagcagtaaacagcttcttgttggcttcacccaactccaacagaacagctccagtttctgccctggcctccacgacttcctttttggccaagtctgcctccgccctcaaggtgtcggacagagccgcactcttgaaagtaacagatttggcccgggagtaagtgtaagcaaacttcaaatcggcctgcacaaaggaaaaaagtcagcatatggagctaagtgtagaaagttaaagggaagtatcaaaaaagacttaccctagtgatctccttcagaactaggcatggcaaaaagatccattcattcggatcggatcagtgatccgatccgacggatcattactgatccgaaacattcggaatgttaattggatcttggatcagatccgacccgcccc

SEQ ID NO: 343828 - DNA, 541 bp, Cannabis indica
taattttttttttcaaatttacggttttggtttttaaagtggtcgcaacgctagttgcaatagggatttctatatgattttctgttgcaattttatttacaacgctagttgcacttagaatttacaatgtaagaattaccaataaaaatagcaaaaaaaaaaaaaaaaaaaaaaaaattgttttgaagtgtaaaaatgaaaaagcccctaaaataaaatagtcacgcgtgcaacatactgtttgaacgtagtttttggcgtgttgaattttttcaaattttttaaaattttgaaggatgtcttaaataactataatttacatgactattagaaaaaatttgattaaaaaattatttcggatagtaaaacagataaaaatatatcggtgtatcctttttatggggggtgcattatagaattttcctatattatttaacttattactaaaaccttatcataagatagaaaaatataatgcacccttttaaaagggatgcactgatacatcactatctgttttagtatctaaaataatttttta

SEQ ID NO: 343829 - DNA, 519 bp, Cannabis indica
ttacttatgttagacttttttttttgaatgcggtacaagggtactcgcgctttgtactttgaacaaatttatgtttaagtttcctttgaacaactttatatcctctcggggatatctatctataacattctcgcagtacacaggtactcgcgtttgttgctatttataatatcttgattgccactttaattacagttttgtgtaataagtattaaggtcgaaacttgaaaaatttcataactttcacaactttactaatcaatagtacatagtggtatataccccctatacttaggatttttttataaaaaatgactaagtataaatacatagcgagtacaaactatacgatgcgagtcggtacgttgcgttaccaatcttttctgcgataaaatatggtccttcctaattctccccgaagaccccatgcactgggttcttcgtgtttggcattactcttcgaaggactaagtctcctactcgtaggaatctttccttgaccttggagttgaaatatct

SEQ ID NO: 343830 - DNA, 549 bp, Cannabis indica
aaaataaaataaataaataattcttcttttacttcttctttttcaactaccactatctatccatctatttatatttatatcttctataaataaataaatagaaaaattaattggtaccacaacatctatatatatatatatactacatatatttatatatatcttttatttttattttggaagttttatagacaatattattacttatgtttgaataaagttacacaattatgatcacgagatgaatagtgagcttatattaaacttttgatccttttttaaaaatatatatattaatttttattttatttatttttgatcaaattcattcatgattcatgaatcacacttgaatagtaagaacttaaatttagaatcatggatccacattgtgaatataatatgtattcaagcaatttaattgatacttaaattaatgaatttttttccattgaaaagttttatagtatctatgatacaatccaatataaaaaaaaaattgtctatgataataatatataagtttatcaattgacaaaatatttaata

SEQ ID NO: 343831 - DNA, 553 bp, Cannabis indica
tttattattttattgactacttcggtttgtccgttgctttacggataagagactgcagagaacgctttttaattcccaagtcatcgcatagttgccgcatctttcttacaatcaaactgctttccattatctgaaatgagcttgtaagggatgccaaatcgacagattatggagttgtagacaaactcgtgtaacttaatcgctgtgatggtcgctagtgctttgacctcagcccattttgtgaagtagtcgactgcgactacaacatacttgactccgccttttcctctaggtagttcacccatcaaatcgatcccccatagtgcaaagggccaaggacttgtgatggaatgcaagttgcttggaggttgatgggtatatgtggctattcgctgacatttgtcgcatttctttgtgaaagtgaaggtgtcttgtcgcaaggtaggccagtaatatctcttgttgggttttacgccctaaataaaaatctttacaatctaattagtaatcaatataagaaatttgaagtgattaatgtttgcatgaattttac

SEQ ID NO: 343832 - DNA, 1016 bp, Cannabis indica
catgaaatatggatttaaaatgatgaatattgtttttatgttgatttggatgtgttcatgttggtttatgtgttatttgatgaatgtatgtgaatttcgaaatttttccatgaaaataattttatttttgctctgaaatttttttattttgattccttgtgaaaaattaagcaattttttattttgatggaactcaattcagattgaaaatgaggaagttatggttgtttgaaaattgggtgccaggctgtcgaagcccgtgcacaaatgcaccaggagctttagacaagaagcccgtgcgtgcgcacaagtcgtgtctgaagacacgggattgcacctgttcagacacgcacaaggctgcaatctgcccatgtcagatgctgcaaacgccgagtttgctcggcggatgaggctgcaattcccagtcttccgcatgcgtaaggggtgcgtgcaaccatcctaggctgcacgtgcatcgagcctccaaaccctatttttgtgggattttttctttttttctgatttttctcaatttcaaaccctaaaaatcaaaataaaatattatttttaatatttttaaacttaaatatcaattttaaattactaatatttaatttttcatagattattattaattttatgatcttttgatgtttaaatttaaatattgattattttattttaaattatggttagattttaaaaattttttaatttctttaatatttatatattatttaattataagatgacatattttaatattagccatattttaaattaaaagataatttatccttttaatttgaaatattatattaaaattatcttataagataaattaaataattaataaatttaaaattaacctagatatttttatagatattctaaccataatattttcaaattaaaaaattagttattttgttaaatattttattcttcataaattataagttagaaaaacgatattttatatcattttacttatcagaaatttataaatagtattt

SEQ ID NO: 343833 - DNA, 800 bp, Cannabis indica
gtatattgctggagtatggatagaagtataactggaatcatcaattttatttatatgacaacttttacaagagtttgctgcagtagcagtgttacaattggaaaaagaatgagtgtcattacaagctgaaatagtagaagtggctaaatgacattccaagctatgatgagacaaatcagagtcttcatctccaagaaggtataggccatccttaagcttccctttgagaagaacagcccccgtttgcttgtccttgacaaaacaacaagacttgtgaaattcaagaaaaacattgttatcatttgttagtttggatacactaacaagattcttggtcatagcagggacttgcaagacagattttaattttaaaggaggtaaagaattggaagaaagagtagctttaccgatgtgagaaattacaagtctcttaccatcgccaacagccacggtttcttggccagaataggtggtggcagaatcaagaacatccatgttgcaagtaacatggttggtggctcctgtgtcaacaaaccaaccagcatcgtcaccaaaatcaggaagcgactgagaaacatgcacctgagggtcatattcaaaggtttgctcagtgagatgagcttgaggctgataggaaggtggctttggggtaacccagtttttgtcaaaacggtagtgacagacaggggcggtatgaccatatctcagacaaagttggcatagtgggcgattgttttgtggaggacgagaggggtgacgaggctgtgttttggatgggtgatctgtattggagtttctgg

SEQ ID NO: 343834 - DNA, 565 bp, Cannabis indica
ccaactgcagagactcattgctcccgcgccggggccgcgaagcagcacccgccgatggatcatcttcagacattgaaggaacaacagcatcctccaaggcagtggctcttgcacgcttgagcatggagcgcatagagcctccaatatgagcatcctgacgcacgaaagtaggtctgacagcagagggggtagtggcattaccaagggggcaagaaacattgataactaggccagaatcctttcgagtggttcgggtggagggagcaatcataggagctttacctttgcttttgtcaatatgggttgagactgagatagaatcagagatgatgggggcagagggtcggacagggaccgaaggagtagcatgggtggtagcagtatttggtggtattccaaaggatgaggatgaaacagggcttgaatgaggagagtcaacgtgaaggaattggtcaacagcttgttgcaggtcttgagcatctggagtagggtgaagccgaggaaaaaattcctcaaaaggtgtcgaattggagagttggaaagggtttttcttgtgtggggatga

SEQ ID NO: 343835 - DNA, 802 bp, Cannabis indica
gtgctctcattgagagcctctgtgaaaaaatctcagaaaaatcctcctgacataaaaagtgatggatgacaccaaagataataatcctcgagaaggaatcaatcatcgtcccagaaaagaaccattgagtcctcagggatctattaagtcatcgcatgaacatgctgcaagtcccaggaagacccagtattggggcccctggcttgacgaaccttggatgagcaacgatcagtcactccctaaccaggttgatgaagatggcgcttacgacccaaccagatacataccaatcgtggaattagaaaatcgccatctcaggagtcgattggaggaagtaaaccggcaaaatgccgagttgcagcgtgaaatagctgccgtaaaggcagcgctaggagatggtacccaaaattaacctgaccttgggaaaagagattcatagggaaaacctcacggctcgcagatcaagcggcagaggataacatcaagagatgctacttgagggaactgaggaaaacatggaggcacaacctgagatacgtggagcatcgacacaaatcgccaacccacaagtcaggcttatgagaatgaaactcgtgcaaacccttgtaggaagaaaaaagtgagtcaaaccttgaaaggaagggcaaggtccgaccatgatcatgacaagagtgatctacgagaacatctgaacctaaaaaagcctgacctccgtcaacgactcggttcaagaaaaaggattcattccatttgcgaatgagcgagttggagataagtcaagagtgcatcaaatcacgaaacc

SEQ ID NO: 343836 - DNA, 501 bp, Cannabis indica
ttttttttttcatttttgaaaatattttatttggattccatgtgaaaaattaagcaattttattttttctggaactcaattccgataaaaattgagcaagttatgatttttggaaaaatcggatttcccggtgttcatgggtgctcaatcccacgcatcaggtgcttcgaacaagctcctcatccgcgcgcgtgagtcatgcatctcgccccgtgtccccccctgcacctgcccgccttacacactgcatctgccgaggttcctcggctgggtgccctgtgtccgcgtgcgcatgaggctgtgtgcacgtgcagcctccccaactcccaaaattgcgattttgtgggttttttccccaagaaatccatttttttatgggattttttcccagaatccaatttttccaattttcgatttttccaatttgaaatatttccgattttaaatatttcaaaatttgaaatatttcttttttttttaaatatttccaatttagaatat

SEQ ID NO: 343837 - DNA, 950 bp, Cannabis indica
cagttgaaagttaccattttccatttgcaatcaatcctagcagagtatttagatagaaaatccattccaagtatagtatcaaactcggccaaaggtaactctgctaagtcagcacttagttctctgccctcaattctgattagcacatatctaacccattttctagagataatcaactcaacattaggtagcagggttccaaaccccatttcaaagacatcactaggcctacccaactgactaagtacccttgatgcaacataagagcatgtagctccagaatcaaataaaacagtataagtgaagccattgagaagaagctgacctgtaactaccaaaggactggttgcgacgtcaacttgggtgatagtaaagacccgtgctggggtaggcttggcttctagcttaggttcccccttcttcaattgaggacaatctttcttgaggtgtccaactgatccacactgaaaacaagcacttcgattacacaccccagggtgatgcttcttgcagcacggacactcagggtaggagtaagtttgacgtcctcctttttcctgatttccacaaaacttcttactttgacctgaacttccggtagctagaaaagttctcttcctttgcttaatgatagaatgaccactctccttacctggaccaaaaatagggagagaagtggttagggatgcacacggggcggggaattggcggggagtgctccccccgtccccatccccacttattctccaccggggatgggacggggaatcccctaatggggcggggacggggcggggaatcctctaataataaaataaagtttataatgaaatttttaatatactattaaactacataaaattaaaatattacacattaattattactcaataaactaattattatccaaaacataacttaaaattcataaaaaagatactaatatacta

SEQ ID NO: 343838 - DNA, 665 bp, Cannabis indica
tgtattctatatttaatgtgtaatcttaccaattatagacattgtaaacagaaggaaaattttccctcaagctcataatcctataaagagtgatctattctcactgggcaaggggtagagcgaattatctaagagagtatactcagagatatcattgtaagagctctaagagaagaatcactgtattctttgttcttaagtcaatacaaatcaaggagagtaggctattaccgaactgcttggggtcgaacctctttaaaaactgtgttctttatttatcatattatatatattatattacttatcgcttacaattaagactcattatcgttggctaaaagtgaggtcaacattttagtgctttcattgagagcgagaatcttaaattcgctcttctcctcaaatttaatcataaacacgatggtggtacacactcatagaggcgtgatcgatccagcaaatccactggcagtggatcccgcactgcagaatccaggaaatgcaggggttccaccagccatgaatcatgaacaacctccgaccgtaggtcatggtgtgacgtctcctctgaatggaatcgcacccggtgtgcaagttacttgaaatatcagttcagcagtcaatctgggtattcccaatactggagttccgccagcaacaaatgt

SEQ ID NO: 343839 - DNA, 405 bp, Cannabis indica
taaaacgatgtttgtgttgatttggatggtttcatgatagtttatgtgcatatttgatgattgtgtggaaatcgcagtgtatgttgtaaaatattttttgtttcgttctaatatttttactggaaaggagacgaaaaattaatgcattgaggcttttacaaattttttatgaattagttatgattttttgaatttggatgaaaatatctgaaaccgagaaacacgtgcgcgcgcagatagggtctgacgcgaattcactcagacaagggctgtcctaagcccctcttgaccgagttttgtcccccatgaggctgctagcagcccttccgtcgcccatttgcagcctattgtgcgcatggggagtatgcattgcatcctcccctagtgcaatcttgttttggtgat

SEQ ID NO: 343840 - DNA, 700 bp, Cannabis indica
aaatcgaattttgggaaaaaatcccaaaaataaaatttttggggaaaaatcccacaaaattgcaattgtggttggctgccaggaggctgcacctgcagcctaggagaggctgctagcagacccaaacgtgcgcggaagggaggtcgagcagggtctggcgtgcggcaaaactcgacacttgtaggatttttgtgggcgagggacgtgactaaagggagtgtcccgtgtctgagcttctgcgcgcgtgagcttggttgtccgagtgcctggtgtgattgatgcacccactcgacagccatggcacccaaatttctaaaaatcataacttcttcatttgttatcagaattaagttccataaaaacaaaaatttcttaatttatcacaaggaatccaaataaaatattttaaaaaataaaaaagaaatatttttcatggaaaaaggttctgtacaacacatacattcatcaactaacacataaaccacatgaaaccatccaaatcaacacaaatcgtcattttaattcatatttcatgaaagtaaatcattaccatggctctagtgctagttgttggaaatatttaccaggatctaaatttactaccatgtatgtttcattagcatcctaatatgaattctaaaatctttctctccttcctttgatgctgattctccttcttgttgtttggattcttcacagt

SEQ ID NO: 343841 - DNA, 1032 bp, Cannabis indica
tgtcccgagaccgaacactccaggtcacgccgtcccgacatgtacaatcaccatccaagctcacagctcactctggttcagccttcgccattcctttacctacacatgagagtagaaactgtgagtcaacagactcagtaagaaaagcatataacacctaatatattaccgacttgtatttaggcgcccatacacctatccacaaggcttatcagataagtaagaatgttcttaacacttggtactattgaccatgatatcagccactaccaacactatgattgcactgcgggcctagtactatgttcgtaccgctatgatagcgtcaataataccataaagtataattggccataatatcactcttaactagtactatgcccgtactgtcgacctggtaccatgctcataccactatgatagcgccaattaatactttctagaattgaatatcagtcaaacccattattatgctcatactactgacccgatacaatggttgtgtcgctatgatattaactcaatacattcacaaatttgacacacaacatgcatatattatacatgcccataatcacttatataacatgttttatgccattcttacctcgtttctaaattcaagtgagttggccgacctgaatagaaaatctcgtgctagatggataccctaagtcacatttacttaaacgggtaaataacataccaaaaacctaatctgaatccaaactcactactaagggttttgctatcagtaattcttataacaataccctaattattaaggaaataaccaactaaggctctaaaaataacacaaaccaacaaatcgaacatttcaggaaacctgcccctgatccggttaactggttttacaggaactgtaaaactggttaactgatttgcactaggtaaccaaaacaagttcaaaactttcccaattcgtgtctaaactataccaaaccctccagaacacctgtatttgttgggttttgtgccctaaataaaaccctttacaatctgattagttat

SEQ ID NO: 343842 - DNA, 701 bp, Cannabis indica
gaaatgaaagtgtgtttttcaagttcagaaacaatgactaaggaagataatatttaagctaactctgtataaaactcatacagtaacttatataaagaaagaacaccaaatggaaatgtatatacataaatgagctacgtctgttataaagggcagcaagattccatatatggaatataaattaagaccttcaatccagtcaaatacataaaccctaatcttccactttgagtattatttacattcatccattatatctttaaaaaaaaaaaagaaaacataaaaacaagggtaaatcaaccccacattagaaatagaagaaatttcactacacaaacacaaaaagaaagaaacatagcataaatgaaagaaagaaagaaacctgaatttgaggggaaacagggtacagacatatgagggggaaaatggtattaaaaattagaataagttgcgttaactaaagaaaagaaaatgtatgagtgtgttcccttcccccattaattaatacaatagaaaaacaaaagacacaggaaaaccttaatagatggttcgtaccggagtcgaagaagaagaagcagcgaacaacggaagaggagggttttggctgatcggctaaatgattaacatgaattttaaagaataatattttatattttccaattttatttattttattttatatttttctttgtcaaaataac

SEQ ID NO: 343843 - DNA, 614 bp, Cannabis indica
aaaaatggtgaaatgggggtgattttatgcggtggttggcggagagggtttggggtttctctgatttgggggtttctgggtggctgatcgaatgaggaagacgaaggggtgggctagggttataaacccaattttagcgtcggttatttggaaataaacgacgccataagtggcgtaaaattctcttctaaaaatttccagccctatgccgtcgcttatttattgttatgttgacaaaaacgcctctaaaggcttgttttgtagtagtgggttttgatgtaaaacgagagtattcacatagcttatgtgacttttagattatttcttaatgcgaattgtatgttattctatctcagagatacagtagttggcatgcaatttaggacctttatgatctaaaaagagtctaggttaatttataatctgtcatcatatataggaagaagaagaagaatgattaattagtattaacaattgggtaatcaaaacaattgaaatattcctaatttcacatccactgttaaactttttatttgtttgttttatttaattttgcttagtttatttattttcaaattttttttatttgaatgccaaatagaaataagaattca

SEQ ID NO: 343844 - DNA, 650 bp, Cannabis indica
caataatttaaaccaattacaattaaaaataaagtggaaattagttcctaaaacactgaaacataaattaaaacaaaactagttcaacaataaaaaaacctcttaacacataatacctcataaaaccgattataatttttttcaaaaggtgaggatcaatttaaaaaaatattgaggcataaatatgaaaagaaccagctccataactaaataaataacacaaataataatacacaataactaaaaatataatataaaaaaccgattatatttatcaactagttaaaaatttgaggaaaaaaaactagtttcatatagcaactaagaaaaaaatcagttaaataaaacaaatcaataaaaaactggtcttgaattaactaaataaaaaattagttcccgaaataactaaattaaaaactagtttctaaaataaataattcaagaattaatttttgaattgattataaaaaacctgttgagtaaattccactcataatcagtccctttacacacaaatatccacatcagcattttacaacagaaataaacaacaaaggactcaatcctaggtggcttcgcctctactggatcaagaaataggagttagttacaactgttattgtaactaactcctagatctttgatcaacc

SEQ ID NO: 343845 - DNA, 548 bp, Cannabis indica
gttgctacccacctacccgtcctgttggtccaagaaattattgagctagaaatggaggaagaggatgagttggatccccgcgtgggatccgaaaaaaatttagaaccaatgaaggacgtcgaggaagtgtcagtgtgcgacctcgactccgccaaagtcctccagctaggaaagattctagaaccagaggaaaaagaaaaaataataaagacactgaggggcgccatggacattttcgcgtggtgccaagaagacatgaccggcataagtccccatgtcataacccacgtccttaatgtcaatccggacatgccaccagtccagcagaagcgacatcctctcgattcagtgaaggttgaagccttagaaaaagaggtggacaaactactaatgagtggcacgattcgagatgtgtactacccagaatggctagccaattcggtactggtgccaaagcccaatggagcatggagggtttgtatagacttcaccaatttaaacaaagtctgcccacaagattgtttccctttgccaaggatcgaccagat

SEQ ID NO: 343846 - DNA, 704 bp, Cannabis indica
tattgatccactgaatatgtaactttcactagtagaaagtgagctgattttgtaaatctatccactatgacccatactgaatcatacattcccgtggttctagggaaaccagttacaaaatccattgcaatgtcctcccacttccactcagaaaagactaaaagttgcaataaccctaccgacctttgatgttcaaccttaatttgttggcaggttaagcatttggacacgtagtccaccacatgtcttttcatcccataacaccagaagtacggttttaaatcctgatatatcttggtggctcccggatgcagtgaataaggtgcggtgtgagcttcattaaggatctctttcttaggctcatcaatattaggaacccacacttgagctttatacaacagcattccattatttgagactgaaaagtctttaggccgaccagccattaactcatctcgaaccttgaccagctcgggatcttctaactgtgcctttctgattctttttagcaaatcagataggagtgtcaagttgtgcaactttccaactacaaattcgattctcgcactgaccatctcagaagcctattgaggagctatgaaattagtggtgaaaatctgcccgggccctcttctacttagtgcatcagccacaacattgactttcccggggtgatacagaatctcacaatcgtagtctttaac

SEQ ID NO: 343847 - DNA, 1059 bp, Cannabis indica
gtgggttcgtgctcgtgaggagaacagagagagagagagagagaggggaagtctggtttgtgggttcgtgagtgtgggagcgggttgtgggttcgtgagggcttgtgggttgtggttcgtgctcgtgaggaaaacagagagaatgagagagagagggaacgtctgagagagggaaatgtgggggggggttcgtgatcgtgaagagcgagagagagagggagcgtcagaaagagagagggaacgtctgagagagggaatttttaatttagggggtattttaggaaacttttaaaattataggaataaatttgtacaaattataaaggggtataaattttgatataggttatattattaagggcaaaaattgaaatttccctaacagaatacacacaatacacatgcattcctcttgaacatatataatgaattagcataaatattgaacaattaaattatatatatacatgataattataaatcttaactgaacatatataaattatatatattttttcactctaaattatttattttagataattcagaaggagtaaatcattaacaaatttaattctaaacaaaaacatatatatatacaaatgtataattttttttttatggaagacaaataatatcataaatactcaaaaattaatttagggatattctgataccacatgttagaacactgtaaattctgaatttaaccctaattaattaatgagaattaaacaatagaattatagattaggggaagcgtaccagagtccatagaatcgaatttgaatgatatgatcttccaatttttacatcaaattttttctctagaacttgaatttcttgatgatggggattcgagaatacgatatgtgaagcgatgcgaaaaatggagactaatacctgtttattaataactgaaaaacagtaaattaaacttttttgactaattttagtttagtccctcatcaaattagaaattatctaattggtgtccacatattaaaatcatgacaatcatgtctttaagtcataactttattccaaaatagaccacat

SEQ ID NO: 343848 - DNA, 890 bp, Cannabis indica
gatgttaatgaaacatacttgttagtaaatatagatcatggtaaaacatattccaacaaaagagaatcttgtgtgcaaacttagaaaaagcttatatggactcaaacaggcatctagacagtggtacaagaagtttgattccttcatgtcaagccatggatataccagaactacttctgattattgtgtgtttacaaagaagttttttgatgatgatttcattattctcctactgtatgttgatgatatgttgattgttggccatgatgttagaaagattaagaagctaaaggaagagttgggcaagtcttttactatgaaagacttaggatcggcgaaacagatacttggaatgaggatttcccgtgacaggatgaatgagcagctttggttatctcaagaagcctatgttgaaaaagttcttgaaagatttaacatgagcaaagataaagcagttagttctccacttgcaggccatttaaagctaagcttcaaacaatgtcttacaagtgagaaggataaacaagaaatgacttcaataccttactcatatgcagttggcagttcgatgtatgctatggtttgtatgaggccaaatattgctcatgcagttggagttgttagtcgacccctctctaatcttggcaaggatcaatgggaagcagtgaaatggatattgagatatctataaggtacttctaggttatgcttatgctttggcagtggtgaacatatgcttgatgagtacacagatgcaaacatggatggtgattgtgattccaagaaacccacttaaggattcttgatgacatttgcatggaaagctgtttcatggcaatctaggttaaaaaagcgtgttgctttgtctactacagaagctgaatacatag

SEQ ID NO: 343849 - DNA, 771 bp, Cannabis indica
gttaatcaaacatacttggtagtaaatctagatcctggtaaaataatctccaacaatgacctgggaagaattcaaggagttgtttaactctaaatactataatgaagctgtctacagtgcaaagctgaaagagtttactgagttggtgcaaactgaggggatgtcggttactgagtatactacaaagtttgactgtctggccaagcttgccgtgggtatcgtgccacttgactttagcaagaaagagaagtatttggcttgtttaaatgtgaagatcagacatgatctagtgatcaccaccaatgaagcaaccacatatgttgaaatagttgaaaaagctttgagagccgagggtgctgtgaaattccttcaggagtcccgagtgactccgagtgttggtgtaacccccacttttcctactcctgtttatggtagggatggtggtgactccaccactgatctatcaaggaaggttacctcggaatgtggtggttcagggcaaagcaagcggttccatgggaaccaaggtagaggtggacgtcaaggttactctaaccctgagtgccctcgtagcaagaaacatcatccggaagagtgcaactgaaagacatgatttctgtgtggcatggtggggcattttaagaaagatttccctcaggcaaagaaggaagaaccgaaagcagaggcaaaacctgttcctgctcgagtgtttactatcacccaagctaatgctgcagccagtccttctgtggtgacaggtcagcttcctgt

SEQ ID NO: 343850 - DNA, 594 bp, Cannabis indica
ttgcccttcgagttgatgtgtgatgcaagtgactatgcaatcagagcagtcttgggtcaaagggttgacagggtgtttcatacaatctactatgctagtgaaaccctgaatgatgctcgactgaattatgccacgacggagaaagagatgctggcaattgtgtttacttgtgataagttccccctatctaattgggaataaggtgatagtctacacggaccattcaacaattaaataccttatgaccaagaaggatgcaaagccaagattgattcggtgggtacttctactccaagagtttgacatagagataaaggacaagaagggcactgaaaatctggtagcagctcatctttcaatactagaattagaagagagccagaatacaaaagaggtacaaataaatgaacaatttcctgatgaacaactctttagtgtgagggaaaaccttatggtaccttggtatgctgattatgtcaacttcttggctgccaaaataactcctcctgagctatctcggtaacaattaaagaaattcttttctgaggtaaagcatttctattgggaagagccaattctctacaagcactgtgc

SEQ ID NO: 343851 - DNA, 760 bp, Cannabis indica
atgataatcatttctgtgttgtcaactttttttttcttctttctagttgttttcaagttgttgtaccatttctgcagcaacaagctttgcgtagtcgatgaagtcaaaatattcatcttttgcaggtgtttttttgttgttgtttttagttgatgtatggttgactctgatgttaaagttatagtagtgtcgaccaaaatagcatcatcttgaactgatgcaattgttgctgcagatagttattgtttgtttgttgttgttgttgggttgttacaaggatgctgcatattttcttgtgctgagtgatgtcatatgttgtcatcattatattgttgcatatcattgattggttagttgccaaaaaagtttgtgtctttgtgttgatgattgggttcacacacaatgggtaccatgtgaaatcattttctttgcttaatagctttatgcagaacaacagatttttatcatccttgatttgtagtggttgacatctttctttcagttggtatttcagttgtatttgtattgtatcagagctacattgtagttcgtccatcattattttagttgattaaaagtacaatctcttgatagtaattctccatttgactcgtaatcaacatagcgcttcttgtcattctaatgaccattaattgctctataccaaaatttgcagaggtcccatatcctaaaatttgtatattcattatgagcttttttttttgaataaaagctgaaactttatttataacgattcttg

SEQ ID NO: 343852 - DNA, 921 bp, Cannabis indica
aaagttatggccaaaatacgaatagggattctcccaaaaataacaaaaacagttaaccgtttccttgcggggacgaaaaaatcgaatttcatcttctcgaaattctaccaaaatctaaccaattgattttaaacttcacagaacacttatataatacccatacaatattctctacatagcagaaatcaaaatcatgctcccaaataaaaagtgacattaaagctcaagctcaaagctccataactgaaaaaataaccttaactgtctccactcaacaattaactacatgattaaactctaaatcattttagaaatctactccccactcactcaacatttatttgtatagtctaactattacaacaccttaaatccaaaataatttcaaagataaaactgtacacttacttaccaaaaattcctagcttaactttcaaagtaatagcttcttttcaaattccaagctcaaagtatgaatattggtgaagaaaaggaaagaaaagatgattatggtgattgattggtcttggccgagcaagtagaagaaaaaagagaaatgaagtagctacttcatatatggcttatgctattaggctttctcgtatttagcctcggaaaataaatacaattatttcaagtgatgatgaggaggatacaagcatcaggtgtcacatagataataataataataacaataataataataataaatttatttataaaaagattattttggtcaaatttcgaatactcctaattaccccaatacttacactatcaacttattataatattcccatcaaatctattaattaaatatgttttcacatttctggcccccgattgagtctccaaggtcgccaaacctgaaaataattttatgccatagatagttcatattacattcacacatgctatata

SEQ ID NO: 343853 - DNA, 732 bp, Cannabis indica
tactgacaaatcatgagacttagaactttaaaacatataatcatgattattttccactgtgtaaaaaatattataatcatgaataactatatgttctggatttaataaaatttatacatcaaacatataatcatgaaagtaatcagtgaaccatgcaacataaaatgatttttgatattttattaattagtaaatttgattctattgaaatggattttatttagggcataaaatcccaacaaactcccacttgcactaatataaaactaaaagtgcatttaaattaaactcaacaccttgatgtccaaatcaagggtaatatgtagtattatctttgtaataagatctgataggttgtattcaatatcaatcttctccaccattacatctctttaggcacaaaatcctagatattgtgaaatttctttatacatgtttactcctcttagggtattggatctttactgtttggcaactatgtctgtgttattaagaagtaacactagtagttaatctatgagtggaataacgctaaagaactctccataggctgaataattatctagtagccttttgagccactataacattccgtctcactggtagagttagagacttcggattactttttacacttctccaaaagtcattgctccacccccagagtaatctgttggattttatgccctaaataaaaatccatttcaatgtaatccattttattcaacatca

SEQ ID NO: 343854 - DNA, 1434 bp, Cannabis indica
atttacttcaatttcttcttgaaacttgttatcatagacaagaccaatgtccatagacccttttagatatctgagtatccatttcacagcagaccaatgttcctttccagggtctgctatgaatctactaaccatgctgagtgcataggctagatcaggtctagtgcacaccatgcagtacatcaaacttccaacacaagatgcatagggcatggaatccatgtacatcttgtcctcctctgtttttggtgactgattttgagtcagtttgaaatgctgagccagaggagtgctaacagatttagcctcattcatacagaacttgtctatcagtttctgaatgtaactcttttgagacaatgaaagtctttcaggtctgtttcttttgatgtcaatcccaagtattctcttggcttcaccaaggtccttcatttcgaattcatcactcagattttgtttcagtttgtcaatggcctgtcttttcttaccaattatcagtatgtcatccacatacaacaataaccagattggttcattgttgaaatagacacatggatcatagttgcttctggtaaacccaatgctcatcatgaattcatgaaatctcaagttccattgccttggagcttgcttgagaccataaagagatttctgtagtagacaaacctgatttggtttgttacttttgaatccatctggttcttccatgtagatttgttcttcaagtttgccatgtaagaatgctgtcttcacatccatttggtccatttctaggttaaacttggctactttggtcatcattatccttattgatgtctgtctaaccacaggagagaatatgtcattgaaatcaataccctctctttgattgaatccctttgcaactaacctagctttaaatctgacttcttcacctggtagaccttccttttctctgaaaatccacttgcagcctatcaatttctgccctggtggtcttgttacagttttccaggtcttgttcttgagtagagaattcatttcttcattgattgcagcaagccatttccttttatttcttgagttaatagcttccaggtatgaactaggtgtagtagtatcaatttcttctgctgatgcaagagcaaaagctgtgcaatcagcaaagccaaatctttctggtggtttgatttgtcttctttctctgtctctaactagtaggtattcttgtgaatcatctggtaggttctcttcctcagttgcatgctcttcagtctctgaatgtgaatgttcttgagtatccacctgatctgtagtgtctgcattttccctgctgctttgaatttctaaacttgctatgtctctgtcagtttgcttgtgatttgcagcaccagttttcatggccatttcatgttctttgaaaactacatccctgctgataatgcattttctgtg

SEQ ID NO: 343855 - DNA, 1067 bp, Cannabis indica
gtattgagcgccaaggtttttaaactttttgtagaccggccgatcatgtacattcatcgtcagagacaagctcgactcatggtgcattaagtattgagagtaaatactttactgtttgtgtgataatctatttaccgctttccattttaggcagtatgcaagcatctagagtgtttatgtgttatgtgatgccatactttaaatgctatttaattaagtgaatatttatgaggtaaatagatgagttagggtttaatgcaataagtacgtaagtgtggtattggtgcttaactcgttggggttgttgattacagaggtactagtaatggaccctccgcaatcatctagaccacagggtgaacaagtagagcctgaggctgcccaaaccgatccatcgacaccgcctccacctccgcagaatctggggcataatgcaggggttgatagtgctaatcctcctaccgactggtaacaaatatttcaagaaatgcgaagtgtcatactttgtcaagaagaagagttgtgacgtttaaggcaaccggctgcccctgttgatcaagtgttaccaccagcacctatgccagtggtgggtaaccaagagattgttatgccgcatcgagattctgtttttgagcgatttgtgaagcttcagcctccgacctttctgggaggtattgatataattaaggccgaggagcggatgagcactattacccgtatccttgataatatgggagtgacaggaacagagagagtgaacggtgcagccttcatgttacaagatcatgcccgcgtttggtgggatatcgtgggccaaacccgggctgttaatgtaatgacctgggaggaatttaaaaatctgtttaaagaaaagttttacaatatcgctgtgagaacttcacatatggaagactttgtgaagcttactctgggaaagatgtctgtggccgagtatactctagaatttgatcggttgttgaaatttgctggtgatctggtgcccacagatttcaccaggaaacagaagtatgtgagagggttgaatgccacaatcagtcgggacttga

SEQ ID NO: 343856 - DNA, 777 bp, Cannabis indica
attttgagattctgtatcatcccaggaaagctaatgttgtggcagatgccttgagcagaaaaggtcgtgggcaagtttttaacactgtaatgatagctcctcagctagcttcagaaatggttaaggcttaaattgaatttgtggttgggaaattgcacaacttaagacttcaatcagatttgttggaaaggattagaagggcgcaattggaagatcctaaactagttaaaatttgggatgaggtattggccggtcgacctagggactttttgatctcgaataacgaaatgttactataaaaatctcaggtttgcattccaaataatggtgagcttaaaaaggaaattcttgatgaagctcacactacaccttattcgttgcacccggaaaccactaaaatgtatcaggatttgaaaccctattattgatggagtggaatgaagaaaaatttggtgggttatgtgacaaaatatttaacctgttagcaaatcaaatctaaacatcagaggtcgggagggttactacaaccattagcccttcctaaatggaagtgagaggatattgcaatggacttcgtggttggtttgcctagaatcacgggactgtacgattcggtatgggtcatagtggaccgtttcatgaagtcaactcattttttaccagtaaagactacctatacagtggattagtatgtagaactgtatgtgaaggagatagttcatctccatggagctcctaaattcattgtttcagacagagatccaaagtttacatcaa

SEQ ID NO: 343857 - DNA, 719 bp, Cannabis indica
aatgtgtggaaataaattgtgatcatatataagatgaatgggctactcctcctattgccaattggttttgagatagaacctcatgattctcaatatggtattagagccacttgtgatccgttgtgagcccaaattgccaccgattcaaaaagccatttgtgatccgttgtgagctaaagtgctgccaatctaaacagatacttccgatgtctccccgttagcctccatttgggacctttcagccaatgtgccagtttcaagtgttgggtcttttacctgttttaaaatctataaatttcccgacgtgtacacccacaaatttcccgatatttggccttatgggattctttcaaatgttacgttcggtcatgtggtctcttaaaaggtctcttaagagatagtctcacattgttaatgtgtggaaataaattgtgagatataagaatgggctactcctcccattgtcaattggttttgaaatagaacctcatgattctcaacaataatcaacaatgttgtttacttacacttgtaaaagtggaatatcttttccatggcgttagataagtaaacttgtatcagatgtatcagctatacatcggactgaatcgatattgacagtggaaaagatatcataaacttattattatgtcttttttaagggcccgtttggtacagcttttgaaaaagttgtgataaaaatatgtttggtaagcagt

SEQ ID NO: 343858 - DNA, 582 bp, Cannabis indica
tactcgcactgtccataggttctcattacgataaggcaaatcccaacactgacgctcaccttgtcactcctgaccaaggtagcatgtgtggcaagatgccaaaaccaagccaacgtgccaacgcttctgtcatgccccattcgatattgtctgaatagtctccctcattgcctgaggactcctatatgtccatggagtaatcctcaaggtgccatgcctccacgaatgttggcaggccttcgagacaagccaccaaactagtagcatacactagacctctctctttccaacatggtgcatctgtcccatgcgcgtatgcaaactagcccacgaatgactacccatgtcatctcgtgttgagactcatggccaagacgcaccacaacctttcttggaggtgtaggccacgtcccgtgcaagcgacatatgatcaagctaatggaaatgtacccgttaacctctaacagcttcttagaagcactaccgggtactccaactcatggagacatatgagtcccctcgtggtcctcatatgcccgccctactagtcttgctgactagtagtagctcacttagcaccaa

SEQ ID NO: 343859 - DNA, 1464 bp, Cannabis indica
aaagttcttatttaggatgttaataaacatacttgtgagtagatcaaagatcctggtaaaataatttccaacaagtatgagatcatgtttcagcctcgaacagcgactaaagggcaggccttagcagattttgtagttgagtgtacgggtaaagaagagaacacttcaaaaaaacaacctaaagccagtataagaacctcagctgagcaacaacaaagatgaaccaacctggaagttacatgtagatgggtcaaccatagatcaactatctggtgcagggattgccctcgtcacacctaggggcaatgtctacacgaggtagtaaaattcgtgtttagagcatccaacaatgaagtagatgaagcccttattgctggcctaaaacttgctcaggaattgcatgacaaacacattaagatttatagtgactcacacttagttaaataatgtatctggggatacaaatcggggagaaaagatgatagcctatctaagtaaaatacatgaccgtctcaaacaattcaaaagctatgccctcaagcaaactctaagagaagaaaacacaactgtcgatgcactagcccgactcacgagcagcaacataaatgtgaaggctaatttaatccccatcaaattccttgaaaaaccaagtatcactggcatggaggagattgaaatgattaacacatctccaagctggatgacatccatagcagcctacctcaacactcgggaactcccaaataacaggaatgaagctcaaaaaatgaggagaaaggttgtatggtccatcatcgtagatggaatcatgtatagaagaggattctccatgccattactcatgtgtgttacacaagaagaagctgcacgactcttgtcggaagtacatgatggattctccggcaaccatgcagctgggcagagtttatccaagaaaattctaaggcaaggttatttctggccgaccatgattgaagattccaaggcctatgttaagtaatgtaattagtgtcgatgattttcaaagatacctcgtgcaccgccctacaaactaactcatatgcaaagtccttggccttttgccatttggggaattgacctaatcggacaattacccaaaggcaaaggtggagtacagtacacggtggttgcagttgattatttcactaaatggacagaagccgagccattggcaaccatcacatccaagaaagtgcaagacttcgcggtgaaaaatataatttgtcggtttggactaccatacaagatagtctcggacaatggaaacaatttgacagtcaatccttcactgatttctgtgcaaaccatgggatcataaaaagtttctccgcatgggcacatcctttaagaaacggtcaagtcgaagcagtcaacaagcactcaagaatctctaaagaacgactgaagatgctaaaggaaactggccagagaactccctgaagt

SEQ ID NO: 343860 - DNA, 679 bp, Cannabis indica
ttaattacaaagttgaccaaatatgattacagtcattattcctaaaatcgtgggttctgattacatatcacaaaatgtaaatgcggtgtataattttgaaaatcatgtagctgtgattttcttgcttttaatgagtcaaaaatattgtgtattaaacacgcctttaattgttgaatctggagatgtctcaatagaatcttgattgtagtgatcccaatggcgagcggaaccattcttctttccgaggtcgacaagatatgtcttacgtcgatcgtgggtatacataaatcttctgactttctagggttacgagcctcgctcctgttagttggatgaaactataggaagtttcctcgtagcgagatgctcatctcgcattcttgttcttcgagttgatccgacttttacagttagtttgcttattgcaagctagggtatgtgttacttttcttcggtgcctcgctattctccttcaacgacatatggtttttcgttaatacacttcgtacattgatttctcgcgtaagaccttacagtcagcggtttacacatatactctgatacttacgcaattaatgagttattccataaaagatattgcaccgattaacattttccttaccttgacacgtgtcctccaaccgaattttgggtataacaaaacttaagtaaacttctc

SEQ ID NO: 343861 - DNA, 587 bp, Cannabis indica
tttttaattttttttatattatttaattataaggttagatattttaatcgtgggtatattttaaattaaaagatagtattattcttttaatttgaaatattatattaaaataatcttataggataaattaaataattgtaaatttaaaattaagcaacgtatttttgtagacattctaaccataatattttcaaattcaaaaatagattattttgtggaatattttattttttataaattatatgttagaaaaataaaattttatatcattttacttatcagacatttataaataatatttaaaatatttaaataacctagatattttgtagaactttaaaaaatgctcaatttaagatattttaacatataatttagaaaattgtcatttaaaataaaataataattgactaaccgtatgtattttaaaattggcttattttactattttaattttattaaattataaaattagaaaataatattaaaaatatatatttggttattgtcaaataatttatcttattagatatttaatttaatttgataaaaataattcaaatgaacctacatattttaaaattagt

SEQ ID NO: 343862 - DNA, 557 bp, Cannabis indica
atttgtttttgtttgataattaaggggacatcgaagtgcaagcggtggaggatcagggcgaagcccatcctgacagtccatctgaagccgaggaggaggaagttgctcggggattgcccttcagtggttacaatgaggaaggggaacccgtgtccgatgccggtgaagtcttggtagatggtgatgactacatcactgaagaataccctgaagttgttcctcaaagaaggcaaggtgccttaggagctcggtgggtttctcatccatctatagtaacccaagccaagatgaggaatttggaaagggacaaatacctggaagatgtcgaatgctttttcccatctccaaatcaccaggcaactagtccaagacagggatattatgcttggtcgggtgctcatactaagcagggtgcaatactgcttttgcttccgtacttcaagaggattgcggattattatcatctctgcccgacccaatttactccaaaaggcatcaaatatttatccgctctgttcatcctctattgtaaagcccgcttagctaatttggaaatt

SEQ ID NO: 343863 - DNA, 1243 bp, Cannabis indica
atggccagaatcttaagctcgacgtctaccccaagcctgaagaggtccttgttcgcttctgggaaaagaagaagaggctcgacgcagtgttggaggagcgcatgggccctcgtgttccaccccgtattgattaaaccagtcgttcaccaccattatcatcattatcttctctttttttgtcacatattcaatccttctcccttcttcaagataatttacattctttttcttaaggggagacacttatggcccgtccccaggcccttatttatctttttaaagcttttcttcgggatccaaacagtttatatctatgtttgaatatatatagcttttaactttattaaatttgatctgtttacatttgtccgtgtgatatgccttactaccccctgagtgacatgaaaatcaattgtttaggtcactcagttttacaaaaataagttagaggttgcatatatttgttcggtacaaattttctttacaaaagataaactttatttttcaactattggtaatactttcggaggtgatcgacattccaagccctaggcaccatggttccgtccattcttttttgcttgtaggtcctagagccaattttgtcctcaatttcgtacggtccttccaaatttagcccaagtacccccactccgggttcctgagtcgctgggaagacccttcttaggactagatcaccaatattgaatttcctatttttcacttttgtgttgaagtgtttagccaccttcttttaataagctgccattcgtatttgagactcatcccgcagttcgtcgatttgatccagtgcttcttgtaataaagccttgtttgctgtcggatcgaaagttgtcctcctatgggttgggaacaatgtttccaccgggaccatggcctcacaaccgtatgccattgagaatggcgagtggccacttgtggttcttggggtggtccgctaggcccataacactcttggcaattctttaggccaagtatttttgcaggcaagtagcttcttctttagggtgacctttaggattttattgacggctttggcttgtccatttgtttgtgttcttgccaccgcggagaagcttttgatgactccgtgttggttgcagaagtcggtgaattcttcgcagtcaaacttcttcgtgttgtctgagactatcttatgaggaaagccatatcgacacagtatgtttttgataacaaaatctagtacttttttagcagttat

SEQ ID NO: 343864 - DNA, 1042 bp, Cannabis indica
aagtccaatcatggccgcactacggacatcaatgttttgatttttattttgtttgtgaaaatcattaatgaagagaatgttatacttcaaaaaagtgaggaccacagataaccctgtagatatgcttacaaaagtggtatagggatcaagctcaagcaggagcaagtttcaacactgcttgaacttgatcaacatctatcaagcttagaatgcctaagatgcatgtggaggcagcacttatggtttttttcaccaagatggagattgttgaatttggctcaaaaagtcaaattgtcttgaagtagcaaatatataaattgttggaattattttaccaggatcttaaatttactaacaagtatgttgtttaacatcttaaatatgaacttctaaaacgatattaaataaacacatataaagtatgagaaacctgacagtggttgtagcaaaaatttattgtctccttccactcagatctctaacccttgtatcctttctggcgcagagtatcaccaagatctgagcccgcatgtccgtctcttgaatctgaattcttcacaatcttcgacactatatatgattgagataccacttgatgtgtgtgggcactcactctatcactcaagggttccagtggtgaagaagaggaagagagggtggcggctaggttaaggaagaaggcactcagttttctctgaaggaataagatgcatcatctttttctgaagccatcactacatatttatagtcaaccttctagggttaggtttgaattatttgtcattaaaataatgaaaaaaataaataataaatacctatataagtggtcggccatagtataggataatgtgccccacttttgtaattttgctattttatcatttctatatctcattttatcagaaacgccaattttccattttaaccatttaaatgccaatttcaactatttaataactaaaattaattattaaataactaggtaatatagccgctctttgcgcggctattataatatgtttttagtataataatgaaaaat

SEQ ID NO: 343865 - DNA, 587 bp, Cannabis indica
agaagagttgcaacgtttaaggcaaccggatgccccagttgatcaagggttacaactagcacttgtgctagtggtgggtaaccagggatttattatgccgcaccgggactctgtgttcgagtagcttgtgaagcagcaacctctaactttttgggaggtattgatattattaaggctgaccagtggatgagcactgttacccgtatcctcgacaaatgggggtgatgggaactgagagggtgaattgtgcggccttcatgtttcaagaccatgcccacatttggtgggacatagtggctcagactggggatgtcactgtaatgacatgggaagaattcaagaaactttttgaagaaaagttttataatgttgctgtgaggacttcacatcagaaagattttgtgaagctgactaagggaaagatgtctgtggccgagtatactctggaatttgatcggttatctaaatttgatgatgatctgctgcccacagatttcactaggaaacagaagtacgttcgaggaatgaatgctacaataagtcaggacttgaaaattaccatatcacatgacactctgtataagaga

SEQ ID NO: 343866 - DNA, 725 bp, Cannabis indica
gcaattagaggaaaagatagggagataggggatccccttgcctaataccacgcgttgagtggaaagtgtcagtaagagagccatttatggaaagacgaaattggaccgtggaaagacaacgcattataagagatgaaaactgggaagggaaaccaacatgattaagcagataatttaaaaaaaggccattcaactctgtcaaaagccttctccatatcaagcttaatagcagcccatccaatcttccccgatcgtctagaatgaatggcatgaataatttcattcacaaggagaatgttatcagtaatttggcgtccttggagaaaagcactttgattgatactaatcggtcgaaaatcacgaacattcttagggtttttctttttggggatgaggacaataatagtttgattgatggaagagatatccccctgatgatttaggatgtgaagcatagccttagtgaattcggtgcctagagtggaccagttacgcttgtaaaaaagcgagttgagtccatcaggccctggagctttgtccacagagaggctaaataacgcatttttaacttccacttctgtgtaaggctccgcaagataatcaacttgatgagtggatagcctattagggatcccttggagaagagaattgacagcaacctcacaaacaccttgagaggtgaagagagaattaaaaaaattaagaaattgggaagttatagtggc

SEQ ID NO: 343867 - DNA, 1235 bp, Cannabis indica
ttatatttgtgatagatgcaatgaataatattaaaaaaatagtcttttcttgtttaccttcataaatatacacaattgagggaagatttgtcaacattcaattcaataaaattaaattaagccaatttaatttaattcatcaattacaaaaaaattagatattgaatgataaaagttcaattttaattagattagatcagttattaaatatcaatctcaaaatataattaaaaatcgatccaattcaattacatttataaaattatttattgatttatataataaaaatgattatttttctataatttttctacaattttttaatgtaattaactagaagataattcttaatacgaataaatacaaaaaatttaaccagttttatcataaaacatctaggtcagattattattaagttttattttgacaaaaaataagttcgttctatttgtgccattttagaacatagagggtgtccattttatcatttaataaaatagattgtctaatatataatttttgcaaaacacataatctaaaatgatatttaatcttttaaatatgtttatatgtagtttggagtgtagttattataagtttgtgggggtataaatatagagaaatgctaaaaagtatatctgatgcctaatacattccttagtattatactgctattggtataataattaaatatcatatcttatataacttgataaaataatctttatagaatatcgataactaatcataggacgtcaataataatgctcataaatataataaataaatagggttatgcatgattcttatgaaaaatagtaaatagttggacaaggaggggacagtaaattgggaagagtacaaattttttttccaacctacaccaaataaatagggttataattctaatgaaaaatatattccaaatgcagcacatgtgtcaaattatatccatttcggttgtaaaaaatttaacatgcaatataaattttacattttttatttatcacagtacatactaatttttatgattgattaattattattataatatttactctttaaatttaccgtattagaaagaaaaatagttgcactcgtcacatctttaaaaaagatatattgatgcactctttatctcttttagtatttagaataactttttagtctaattttatagtcgtgtacgttataattatttaggacatcttgcaaaatattaaaaaaattgaaat

SEQ ID NO: 343868 - DNA, 543 bp, Cannabis indica
agttctttccacaaagtctactaagctgcgaggagaaatcagcaatttttgccagctagataatgaatctctccatgagtcttgggagaggttcaaggatctcatcagaaagtgtcctcatcatggcattgagaagtggatgctggttcacaatttttacaacgggctggtgagtaacactagaacacttatagatgttgcagctggtggggcatttatgaggaaaagtgcaaatgaggcttatgatttattggaggagatgaccctgaataatcaacagtggccaactaaaagaagccaaacaaagaaggtggctagtatgcatgaagtagatgccattactaaattgacagcccaggtagagggtctaactaaactgatggttgttcaagcaaaacaagctcaggtggtctgtgagctatgtgaatgccctcatccctatgcagaatgcccggtggatgtgaatagtttgccaatggatgaagctaaagccattgggaattactctcaaaacaacagcaactatgggtttaattaaggatg

SEQ ID NO: 343869 - DNA, 1050 bp, Cannabis indica
gcgcatatcgcccttttctccatgtttgtgtgataaatttatactcacatatgaacaatgtaatatttgaaacacaagattgagtttgtatcatacaaattctaaatattgcatacttatgcaacaaatatttctaaagtttatgaaggtggtgaaagatcaccctcaaaacactgtcgttacaaatgtagtgatattcaagaacacacaattaagcaagaatcaacttagctcgagaatgaatgaatcatgaatctttattgattaagaatggtcagtagtacacaatcagatatgtccaagattacaactcaacacagtgaacaattgtaaaaaaaaaataatctcacattgagataaatcacttcaagagtgatactacaattacatctctccatatatacactcactgtgattttggactctcaaactaaacttgactctgaattctggagtatgagccttgagttgatatgagagagttaagacacgtgtatttgtaggtgttggtggggctctttttaagttagtgtcaaagctaactattataactaattgcagctttcttcagtttgataagtgtcaagatagaactactgacttgacagattaagtgagtttaatctcaacaattccacctaattagactcacttgatccttccagaaatgattgaggacattaactatcctaaatgcttagcaagtttaggcagtgcctaaacttgtctctatacagtcttaaatatcagcagggttatcatgtgtgcttattttcttcacttgtacctgcttagatgacacaatgtcccttatgaagtgttacttgatatcaatgtgctttgacctctcatgaaatattggttttttcatgagatgcaaaacactctgattgccatagtaaactgtgatatcctcaaattaaaaacctaatacctttattaacccctttagccatataacttctttgatggcttaacaaccatgtattcaacttctgttgatgacaaggctactacttttgtaggttagatttccagctgatgcagccc

SEQ ID NO: 343870 - DNA, 629 bp, Cannabis indica
gggagggaagtatttcccttctggttacaattgatataagtagaaagattgcatagtaaatacagaatacactaatcgtgggatttggacagcttgccatatctctgtaatctgatcccaaagttatagggatttctttggtgactcacgatgcgaaagctagatttgctaagtgttggtgtgttgcacgaattgctcactgctcggctaagaggacttcgtcttagcagatgtatgtggtgttctgtccggcatatatcttgcgagcaggtatatagagttgatcccacgtgtcaccatcgtgtgatgccacgtcagagtgcaaaaattgggataacatttgccccccaagtctgtacgggacttccgaagttgcgtgtaggcttcatccgagctgtctttgcgtttggatgggtgacacgtgtcattgcatctattcgcgattcgatgtgaggctgactaggcgtctcttcgatttttggctaataaatgctctgacgcaattaatgcttcgaaatccaattttctctcaccacatttgacggttacacttgattacttttgatttccaatattcgcttttggggggaaccgaggcatctgagacatttgaaatgattacccttttt

SEQ ID NO: 343871 - DNA, 701 bp, Cannabis indica
ttgctgtgttttctagcaattcttggtgaatccaagccaaggtaagcttctagcacttccctctctagttttcttgaattttaagaaatggattttgcatgaaatggagtttttattggttgtttttgctgtagttgtttgatgttgttttctagagttagattatagttttatatgttgaattaagcatgatttaattgttgttattaggtttaaacaagttttgagttttagaactcaaatttggagctttaatggtgaaatttgattctgagctttgattgttgttttgttgcttggaaatggtttatttgggtataatatgcaggtctggaaagtttggttgggtttggaaacgatttggttagggtttggagctttttggtttttctgggtaaaaccggttacctagattttgcagcaggtaaacctaaaaatttcgcttgtcgtttcgcgtcagtttcaggtttctagttggttcattccctgctagtttagggtattgccatattaagttgcagtagataggtttttggtttaaaacataagtcccggttgtgatttagcgagtcacttatgcgtgttgttatcgatgtgatttaggagcctataactcaccgagcagttgttccactcaggttgaccagcacacctgaattcgaaattgaggtaagattagtataatgtcatgcatatgttat

SEQ ID NO: 343872 - DNA, 552 bp, Cannabis indica
ggtaaaaataaaacaatcacaattatacgatgattataaacatagaatgaaattccttaaggataacaaaagcacgtaatagtgggattaaaagctgcccggtcagcctattgtccgaaaaatgaaaaataattccatgtttaaagacggcttggtcggtcatgatgtcttagaaatggcactgaggccgaataagatatataaaaataaaaagataaaagaagaagtgtttaagcagctggagtcccaagctcttggttcgggtcttctgggcccgcaggagctggaggatctgttgtttgaacgagcggtacatcagcagtctggtcggaggtagaaggagccacctcagtttcaccataggcaacttgggaagcgcagaactcgagatacatgtgcttagcatcacccatgtaaacaccgcttagtttaatttggaaaattagcaattaattatgtttagttatgaaaattatttatagatatttaagtaattgtttatgctgttattatcgaattctgaaatgcattttatgtcatatagtgaatttc

SEQ ID NO: 343873 - DNA, 624 bp, Cannabis indica
gtaaggctgtgaagaatctagactcaagagaaagagattcggactcaaatcttggtgatactctgctacagacaggatacaagggttagagatctgagtggaaggaaccattattatttcgctgcacccactgtaaggtttctaaaactttatatgtgtttatttacattgttttagatattcatatttaggatgttaaataacatacatggtagtaaatctagatcttggtaaaacatattccaacagcctcatcacgtaccggccttctcctttgggaacgggttgatacatgcccactgctgggatttgtatgtgccccttccctatcacctcgagaaggacgttgacagtgtctcagtggcaacccacctatcttaggtggagtcctaggatctctctcattaccacgagggatttcctgttccctagttcgggattgccttctgcttgcattactgggagatgattctagtaaatcacggtttccattcccttgggttgtaaatccccagggtctacgtggcacttcttgacgaggtgcttggtcatctggttattcatcttcaggtgcatcctgttgggttttatgccctaaataaactcatttcatataatcaaatt

SEQ ID NO: 343874 - DNA, 600 bp, Cannabis indica
atattcataatataaatatactaatatattaccttaaaaattttgatgatacgactaagtagtgcgtgcattgcacgcaccttctacctagtattaaataaagtggctggagagaaattgcacgtgtagtcgtttcagaaaatacccaacataatttggaatccaataactaattgtaattcttaatgaattgtacaaaccaatatgtacattgattagctaattatataagtaattaggtgatatatatagccgccgcgccgctagttgttgtggtaatttgcaacacgcaagtatacgtatcgttataaaaaataatactcacaaagagtaaggtcaatcctacgagaattgtagttaagtacgttaaaattaaattcttacttctatttggctaaataaaacttgagagaaaattaaaatgaggaaacaattaaaaaaagtgaaagtaagaaacatgtacattagcaaaggaattaacaatgaataaaagttagggctttcgatttcaattgcatctattaattatggtttaatattattatcttcttattacaaatttttatgtagtagcaggtttactaaggtaatttatagtct

SEQ ID NO: 343875 - DNA, 902 bp, Cannabis indica
gcacaaacatccaaagttggagaacaatgaaaagaatctcaatatgagggatctcaatatcaaggatcacaatatgagggatcacagtatcgatcatctcaatatttgggacatggcgttgtagatgaaggccaacaatctcaagatcaaggcgaaagagctaaaaatgactcacaagtttatagtccatattatgactatctcggcggatcaagaaatagtcttctgcattattgaattgttgtatcacattttatcagtgaaagttcatatatatgttattacttttccatttaatgtgtttggtgtgttaaatttaaatgtatgtttaagtttgtgatacttttattatgtactattaactgtactttaattttttaatattttgttgtgtaatataaagtatgtgtactcttaattaataagaatatgatgtctagtgtgtctaattttaattttaatgtgtttaaatttgtaatatttttattgtgtaatcttttaaaaaaataaaaatatacaataaatttttacttaaatcatgattgaaaataaaaaataatttatggtattcatatttaaatttacacaaaaaaaatattataagttgcttttacaatgcacccctctaataaaatagtcacgcgacagaaagtttgaattttatttcggtgtgttaattttttttttaatttttaaaattttgcaggatgtcttaaataactataatgtacacgaccatgaaataaaaagactaagcaagtctctcgaatgccgaaattggtaggagtatattagtgtgccacttttaaagaagtgcattgttttcgcgtgtgttaaatttttctgaatttctcaaaattttgcagcatgttttaaattactataatatacacgactatata

SEQ ID NO: 343876 - DNA, 672 bp, Cannabis indica
atttgatataaaggttttttattcttaaactttacgaaaaatatggtgtgtgaatcaatttaccataactaaactagaaaacaatcaatttcttattacaatcattttaatttaaaatataaaataaataataatgaagttaaaaatattgtaaagaccgcttagctttaatttggaaattagcatataattagggtttaattatgaaacttgtttattagctttgaattatttatttacaatgatttatttgaattcagaatgcattttatatgtcatatatatataatttcataattttgtatgttttgtacccggtaatattggaacgtgatgtttggctattagaatcacatcctagtatttttagtatagcggagcaatatagttagacattggaaatgtcgggaatagtcgagattttagagttgaccaaaatacccctaagtgatcttttatgatttttagacagggaagagcaaaatagtcattttgcctataggagttttgtcttttgtgggtttaaattaagttttataaatctcatttatttgttaagttcagctgagaattaattaaataaaactaattttttttatctcattttttacaaaattaagaaaactcatgaaaatcacgttttctctctctctttcaactctctctctctct

SEQ ID NO: 343877 - DNA, 677 bp, Cannabis indica
atattttttattactatattaattttctaaaaaaaaaaaattaatatcatataaattaacaaaaatcaccacaattgttatatttaactaataattttcgacaagttaaatttttctaaattttttaaagttttgcaggatatcttaaataactatactgtacacgaccatgaaaaaaagaccaaaaagtttctcgaatgcggaaacaggtaggagtatatcagttcgccacttttaaagatgattgttttcggcgtcttaaatttttttaaatttctcaaaattttatataatatacactatttatatataaaaaaaaagactaaaaaaatatgttaggtgccgaaacaaaagtttctcttttgatgaggaatccccttgtagacgtaattgactcaacttgattgatagaatttttttttgagaaaaaaaattaacaaattattttaaataaaagtattaatacataattttataataatattaaagcaaattaatttaaaagataattatagtaaaactatgtatgtaaataaattggtggtaaaagtgcttaagtaattaattttgttatagttaactattagtataaaaataattgatatcaaggtttgtaagtaaaattattttttgtaaataaatacctatataaaacaattcaaattaactttataaaa

SEQ ID NO: 343878 - DNA, 895 bp, Cannabis indica
gtgaaaaaacgtgaaaaaaaaagtttattttttgggccaggagcccagtgctcgcgaccaccaggttcctggatcgcgaccctttttggtagtcgcgaccctggtcgcgacctgggttttaacagagcctcgacaaaatttttggttccagaagtcgcgactagcacaactggaagtcgcgacttattttccaagtcgcgaccccagtcgcaacttccctattttccagagaagcctaaaatacgattgtaagctagtcacgactagctaacgaaaaattctataaatatcctattttccccctcattcaaccctaaacccaattcaaattttttcaaattcctctcagccgaccctaaccctttttctctcaaaattcaaaattttcatcaccaatcttcaatcttttcatcttttctttaatttctcaaacccaatccattcaaaaacccaatttcactcatcaatctacacctaccatcaaaaaccataccaaaaatcacccataataccccaaatccaaaaattaccattgtcttcatcttcaacctcaagttttcaagaacattcaacaatggaggtggagtaaagcttctttgggtttgtaagtatcacttccttcaatctttaaggattttgatgcacttgttatagattttgggtggtgataattgtgtgttttggaaaaatattgttgatattgggattgttaatattgtattgtggtttggaaatagtagggattgattttgaaattttgggaagtagaaaaattaaggggaggtgctgcccaattttttagcattattagaaaaaaaatctgaaaaaaaaaataaaaagaaaattcgaaaaaaaaaaagagaaaaaaaaaaatattctatttttgctagaaaaa

SEQ ID NO: 343879 - DNA, 935 bp, Cannabis indica
ctttccaagagctaaaggcacaactttgctaaacctcccgtacttttcaaaacctgtggacggtgaggaactgggaatatacttaggtgtcacggaacatgccgtgagtgccgtgctgatcagagaagagaacaacgtacagcaccgagtctattatataagtaaaagactcattgaggtcgagagccgatatccgttgatagaaaaactcgcctactgcctcattctagcaacaaggaagttgaggctttatttccaagctcatcctatttgggtaaataccgaccagccactacgataaatactgcaaaagccatatgcttctagacggttactaaagtgggcggtagagttgggttagtatgaaatcacttttcgacctagaacagcaatcaaaggccaagccttcgcagacgttttggtagaatgcacaggcaaaaaataaagcatactaaaaagcaaccctgagccggtacaagcacctcagccaagtaacaatgaagaaaaaccgacctggaaactacatgaggatgggtcggctacagatcaactatctggtgcagggattgcccttgttacgcctgggggggcaacacctgcacgcagcagtcaagttcggagtcaaagcatctaacaatgaagccgagtgcgaagctctaatagcttggctaagactagcccaggagatgaaggccgaacacattgaaatttgcagtgattcacaactggtggtaaatcatgtatccggagaatatgaagctcggggagaaaagatgatagcatatctgagcaaaatacacgatctgcagacgcgttatctcgattggcaagcagtaatgtaagtgataaggcaaacctggttcctatccagttcctcgaagagcctagcatcactggcatggaagaaatcgaaatgattgatacatccccaaatt

SEQ ID NO: 343880 - DNA, 455 bp, Cannabis indica
aataataatatctctatttcctattagtattataaattaatattttttgacataatataaattaataataattaacacttttacgggttattatatagtttgtgacaaaatttcttccactgtaaaagaaaaagaaaaaaatacagaaagagataaagattattaaagtaattaatatttatttattagtgtgggaatacaataatccgaacactatatcatgttaattatctccttcagttattttttttttttttttgaataaatcagggaatttattaaataaactcattcaaaataatagaacgcacttcaggggaacaatcctctaagtgaagcacacaacctgtagagaaacaagagtctcttgccaagcaatgagccaacttatttgcagatcgtttaacaaaacataactcaacaaaagataacgccaaaagtaaattcctaacatc

SEQ ID NO: 343881 - DNA, 1773 bp, Cannabis indica
tcgtgttgtgctgttcgggcatagctatcccgagcttttcccaaatctctagcaatatgcgggcctccaatgatgacttgcagatgtccatctaccggtggaggtaggaaatcatggttattgtcattcctctgaccctgatcggtcttcacatacttctgcaagtgtgggttgtttttacttatcaagaattcaatttcctacttcaggtttttgtattcattagtctcatggccatagtctccgtgaaattgacaaaactttgtcatgtccctcttgctaacatctttcttcatgggcctgagcttcttatatggggccagtgactgagttgccatgtaaacactttctacgtcttcagtaaagatagtgaatgcggtgtactttgcttgactctcacggagagtttgtttggatttgccagtgaactttcccttcttcccattcccttgcctgtggctattgttggaacgtttaccacttgagtttgaattatttgggttctgggggagttgggcagacgttccagttgaaggggcttttgacttgctaggcttttgctcaccttctgctcgttgaatggcttcttcgagcttgatgaagccttcagcacaaagccttcagcacagtcaagaaaatcactcattgagtctaccagcccattcttccttatatccttccaaagttcaccgaggacttcaatgccccccagtatcacagataactttccatctttagttacccatgaaagtttagtcgcctccgtcatgaatctgctgatgtatgctcggagaggttcacctagtctttgcttgacttcaaccatgtctcctagatgcaacgcaagttggcaagaggaggagaactgtgcatggaattccgaacagaaggctttccatgaactgaactttctaagggccaacttgaaataccattactgggtggcttccgacaaggtagtaggaaagattctgcaacacacatcccctcgtaccccttgcaaattcatttgcatttcgaaatacttgaggtgggaaagagggtcttctcttcctgtgtaccttttccatgttggaattttaaacttgtggagcaacgccagaagattgatctaaggagaaaaaggcgttccacgtgctcggtccagccatgccttggaaaatatttttcagttcgtctagttgtgcctgtatggctaggctaacctgcttggcattctggtcaatttgaatcacatcagtatctttctgagacaaaatttgagcacgggctccgggttgtacgatcgtcgtgacaatctgatcgtctactcctctccttttgttcaggtcactccttaggtcatgatttgtccccaacctttcgaatacagaagcacttggctgtcttaatgattgatttgcttggttgacaggtggaatgacaccgttaacctggttggaactatcaggtatgacctctcctgatgaattactagacaaggtctgcccagctaccgctaggcccacaagtggaactcgtgaccggggatttggcggctgaccattcgcagtctaggaagtaatcatcgttggatctttgtctgtctcgcccaaggggatgacacttcgaggttgctgacctacagtttggtaggcttttcgtatcagcgtggtagcttgacgactacaattttcaatctctatatgatgagcccttaacgcttccatctctttgtctctccactcagtaaacatacgtctttgtcctcgaaggcgaggtttaccgcagcgc

SEQ ID NO: 343882 - DNA, 710 bp, Cannabis indica
aggtccaagtttgggtttgggatggggtccaagatttaggtccaagtccgcgtctcagatctagtctgggtacacgatcgtgtctgggcacgagttcaagtctcaggttgggtcagaggctaggtctgtgctcgattctaggtctgggttcgggtcctggtcacggtcctagccttgttctggggccctggttctaatcttgtgtcccacgtgtaggtctgcattcaggtttggttcttcgtcttggttctagtcctgttctgagtcccaaatctagacaccgactactggtctgttccaggccccgttacccgaataccgagtcattatctggatcactgtcacgggtctcggtctagttctagttcaggtcccaagtcccatttttgaggttgggttcgggagcgagactgtggtgcggttctaggtccggacctttgttctgtgtccctagtcttgttccatgttttggtatgagttcaggtttaggttcgggtcctgagtccaggtttgggttgggttctgggttcggctccgaaatcaggtctaggtctgatttggagtccgggtcctggtcttgttacggtgctggatcttagtccaacttcaattatgatttcaagtccaagtccttgttccagtcccggtcaacttccagttttggttccaattttgggacacaaggtacgggttcgggtccacttttgggt

SEQ ID NO: 343883 - DNA, 886 bp, Cannabis indica
agactataaattaccttagtaaacatgctattgtatagaaatcggtaataggaagataatcacattaggccatagtcaatagatacgaaaccctagcttttattcatttttaatttcctttattagtttaattgcttcttctttcactgtttttattattttctagttttaattttctcttaaattttattaaaccaaatagaagtaaaagtttaattttaaagtacttaactataatccctgtgtgatcgacctcactcttggtgagtctactacttgttacgcgatacgtacacttgcgtgtgtagattaccacaacagtgataaaagttatattagttttaacgggtcatcaataaattattataatagtacttttatttttgtcatttattaatatattttattttattttattgtcaaatattaattaaaattaaatataattataattattaattaattttgtaaaatattttattattttattattttaattatataaataattataattaactacattttataataataatcttattatagaaggttttaataaatgtaaacactgtagctattttattaatgtaatcattgaatagtcactagtattattattaatcactcatgaacaaccccccattcgagatagataatgggaatgtagctcattcacccaagttttcgactcttgccaaagaccgattagcttaaatttgaaaattagcagataattaggggtttaattataaaattctttattaattctaaattattaatttatgatgatttatttgaattcataatgcattttatatgtcgtatatagaaatttcgtaattttgcatgttcagtgcccgacaacattggaacgcggtgtttg

SEQ ID NO: 343884 - DNA, 607 bp, Cannabis indica
aattattatatttaaatctgaaaatatatattattattttaattaatattttttttatgaaaattaatactattatgtatatttgatatttaaaaatatatattaaaatgtaattcaatttaatctacataatacttttgccaacagttataaacagtcatttaaagtaatttttcccaacagttgtaaaccatcattaaaggtgacttttcccaacagttataaaccgtcttttaaacttccgtatttttatgacacccacatagccaacggttttaggaaccgatggaaaatagtataaaagacatttaaaaaccgttggtaaatgccaattttgtagtagtgataaaccagcatgacaccatccaaatcaacacaaaaaactataaaacattgttttaattcatatttcatgaaagtaaatcattaccatggctctggtgccagttgttggaattattttaccaggatctatttactatcatgtatgtttgattaacatcctaatatgaattctaaaacaataaaaataaacacatataaagtttagaaaactttacagtgggtgcagcgaaatattatgactccttccattcaaatctctagc

SEQ ID NO: 343885 - DNA, 489 bp, Cannabis indica
aatcaagccaaggtaagctctagaaactccttgccttagttcttgaatttaagtttaggttgagtttgtgattttgtgatttagtggctgttagggttaggttgagttatgattcacattctaggcttaatttgagttggtattagcctcttgttactggttttgatgattggattgggtgttgtgcaagtttgagctttgagttccaagctttgatctctaatgaaatatttgtttacactgagtttttcagtgaaatacaagttggattatattatgtataccctgattaggtactttggaaggtttcattgcgtttggtggagaattgagtaatgaatgaaggtttttgggaactctggtgcaaaccggcggtttgcagagcctcaaaaaccggttagcaggttttggcagggttccccaggcctttcattttctcaatttttgtctttgcggtgccttggttgggtgtttctgttggaaattatt

SEQ ID NO: 343886 - DNA, 822 bp, Cannabis indica
ttttgggatctcgaaacatataacttttgtttgtaaggttagaattattacaagtttatgctcattccgttttcatttaaagtttaattttcacgcttattttattagtaatcccctttaggggattaggatttcttaatcatcttgggtagcgtgcctaaatgttagggcgttacagttttttatcagagcgccacagtttttaaacttcctatagaccggccgaacatgtacaatcatcgtcagagacaacctcgactcatggtgcagtaagtgttgagagtaaatactttactgcttatgtgatcaattacttaccgctttccattttagacagtatgtaagcatctacaatatttatgtgatatatgatgcgatgcttataatgttatatgttaagtgtttaattatatgaagtaaatagttgagttagggtttaaggtaataagtgcataagggctgtattggtgcttaactcgctggggttgttgattacaggggtacttgtaaaaatggaccatccgcaatcatctagaccacagggccagcaagtagagcatggtggagaccaaaccaatcaaccggcactgcctgcacctccgtagaatccgagggataatgcaggggttgggaatgttgattggcagcaaatgttccatgaaatgcgaggtatcatacttcgtcaagaggaagagttgcgtcgattaaggcaactggcaccggctgcccctgttgagcaagtgtttgttggaaattattttaccaggatcttagatatactcacaagtatgttgattaacacccgaaatatgaactttctaa

SEQ ID NO: 343887 - DNA, 587 bp, Cannabis indica
tcagattataaatgtgaggaccatttctttgatggaaacaaatcttaaggtcagtccagattgcggttgcagattaatcatacaacaaactagaggaaatttctttagacaaaaagttaaggatccaagatataacaatgttattattcctaatttaagcattataaagattgaattcagtaggaggaggtttaggaatggaaccgtctaagaatcctagcttgttcttgactaaaaaggctagttgcatcgcacggctccatgaaatataattgtcttttcccgtaagtggctgagaaacaagaatgtttccaggattatcaccatgatggaggtagtatggatccgaggggtcttcaagtggatttctcgatccttgcaactgaatattctggccactttgatcaatgatttgctgtgggtttctagtaattataggagtaggaactcctgtttcagtccctgcttcttgatcattgttagacatcgcagatacaggggagaagaacgaaagatcttggaaggagaagagaagacgaagggagaatcgtcggaaaaagagaactagatcatgttgggttttatgc

SEQ ID NO: 343888 - DNA, 500 bp, Cannabis indica
aggcctagttctgctccgcaggctaacctgacagaagagctgccttttacagctatgatttcagagatcaaccttattggtggatctgaagggtggtgggtagatactggcgcttctcgccatgtctgctatgatagaaatatgtttaaaacatatgttgctgctactgaggatcagaaagtgttgttgggtgactcccacaccactatagttgctggtactggaaatgtggaattgaacttcacctctggaagaactgtgattctaaaagatgtgatgcacactccagagatgaggaagaatttggtctcgggctaccttctcaacaaggcggggttcactcagactataggagctgatttactttaactaagaatgggatatttgtggggaaggggtatgcaactgagggaatgtttaaattgaatgttcaagtcaataaagttaatgcttctgcttatatgttgtgttcttttaatacttggcatgctagactttgt

SEQ ID NO: 343889 - DNA, 622 bp, Cannabis indica
ctgaaagtatttttgtaatattgctactttttttttattaaataagaaattgtatgatgatttttattttattttttatatttttgaattaaaaaattagtaaaatagttactcattaaaaaaatatcaaaatttaaactttgtatatatcattaaacaaaatataactgtacgcgaagcgcggattatttcttagtttaaaataaaatctagaaacacaaaaaaaaaaaaatctcatttaacattttcacattcccaaaaattgcagtcaaccctacatatgtcattttcaatgttattctctattcctttgtgtatcttcaaaatattggtaattaaatttaaggtaaatactattttgaatcttgtattttgtaaaaattatcaattagaccttctattttgttaaattacaaaatggaccttatattttccaaaatggtaaaaataagaccttgagctcaatttttaacaattttactttttaatataaccaactttaagataatttctaacacgaacagatacagaaaaatataaccagttttgtcattacatttctagattggattattattaagtttcattttgataaataaatcaattcagggtcctatttgta

SEQ ID NO: 343890 - DNA, 786 bp, Cannabis indica
gtataaaaaaagactaaccctggtaagctccttcaagactccacccaccaacacatctagagatgagtcgttatcagcaccagccagttgctcactgacctcaggaactagccggttcatgtagtgggccaacatctccttgcccttcttggcctctggcagcacgggcacgggtggagttggtgcctgcacccgctcaaggatcctccttactagttcaaacccagttgttggtggtccagactccttagacttggcagatttgggagtagaaggatttgcaacagtcagctccttagaaaggtcattaacctctctagaaggtctcttctccgaggacccctctacgcccttaagcttcttggccggaggggaggcactagagcttccacccatcctcttccttagagcatcaagcatctaccgagacatgtctgcaaagaacaaaaacagcgtggttagaagaaaccagcagaaaatataaagcatgaaagtcaagaaactgaaaaagaagtaaaatgcagaatgactgcccgcccagaaagtcagaagtccatcatcacctgacatcgagtttatctcagacatgactagccttcccttttccagcaaagggataagatggccgaacaggtgaaatgggctcccttatgcgaattgcatgttcaacaggcctgggcatggccgggagtttcttcttcctcttcaacggggtctgctgctctgcctcagcctcacgcctcggcttcatcttcaggattcattggctcctgagcatctgcttgg

SEQ ID NO: 343891 - DNA, 762 bp, Cannabis indica
aatgtaaaatcataacactgttgttgttaaaacataaaaaaatgaacatattataatggttcatttcaaatatcctataagcttataactagttgcaaaatataaacgcataaaaaacctacaaacatataaaaactaaaaattgtctgaaatgaaaaacaactaagaacaacatagtttctctaaaaatgaccctactttttaaatttagaagcattgaaagacttgctttgcttctagtcctcctatcaaactttcatcatttttcctttgactgtaagagaacaaagggcagcaagtcgagtacgataaacttcaatgtcaaaatcactaggaacatctttcccatggatgtagaactccaccaatgcagccacaaatgctctacaattactattaccaaaaaaaggaaaacaaaacagttaaacaactactatacaacataaaataaacttaaaaacaacaactcactttttctactgaaatggaagaccaacaatctccacaactcttagaggagctttagggtcagaacctaaatcaggaacatgggacctattcttccaaaatccaagcagatcaaaaaataaagggagtaaaacagaataagccttcattgcattccttgctgcagaattcatttttgtagtccacaaagaattataaagaaatataatcccctcattcaaatcaagacgaccaaaaacccaatggctttctttcctaagatttatgatgaataggacatgatcagcttcatac

SEQ ID NO: 343892 - DNA, 1222 bp, Cannabis indica
gaaagaatgtcattaaattaaagcaaatcagctgttacaggaggaccaataaatctaggacaagcatctgtcctcaaatgaacccctgaaggactagtaacagacttagctagtgcatgggccacaccattcgcattacgcgaaatgacacaacaagaaccaccgccaacaaccgctaaaagagaaataatctcctgaacaattggcttaaacataagaatattatccggacaattaatccaagaactaacaactgaagaatccgtctccacacgcaccaaattgaaccccaacctgttagcccacacaagacccgctcggagagccagaagctaggccaccgccacttggaaatcccccacggcacccatagcccaaaccgcccacaccaccccctcaccacctcgaacaactcccccaaaccccacaaaccccctccccagggtgaccgccgcatccacagacaacacaaactcccctctcccgggcgggcaccaatggagccgcctctcctcaccacacccgacccccatcaagaccccacacgccatagaagctcccaacaaccggcctccagcccccacacccaccccctgaaattcctccaaagcttcctgagctaattcatcaagcacatccaatctagattgctttttcccaaacaacaccgagttcctatcaaacaataaccaccaccaaaccatagacaacaaagtaaaagtattcgaatcaagtacctcaaatagaaacaccagcaattccgctaaagacccagtgctaccacgagttagcctattccaaatccgaagcttagaccacaaaggtcgcaatgaagggcaaaagactaaagcatgctccgaagtctccgcttcctcaccacacctttgacaaatcggctgaataggaagcttacgcttgataagctgggaattagtcggaagagcgcgatgatacattctccaaagaaaaatctttactttctgtggcaccctcaaattccacatcccattccaccaatgcgcttgattcacagaagaactaccattcctttcacccgccatcttaagagcaacatcataaccactcttgacagtataacaaccattagaagtataatgccaacaccatagatcctgacagagaccactccgcaacgggatactaagtataatatcgatatccatccccaaaaagtattgagacaaagagtggacatcccacg

SEQ ID NO: 343893 - DNA, 1300 bp, Cannabis indica
ccttaaattgattcttataagaaccatgcacatgacaaaaaaaaaaaaaaaaaaaaaaaaaggaagattggacagtaaccaaaagcaacaagacttggttgtttgtggcccttaaagcatctccttcaacttacttggagaaagatcttttccactagagctagggtaattgctctccatttaatccttgtaatattgttataaagtttattggtgtttagtaaggtagcgccttataaataattagcgatattttataatagttattaaacgtgtttgaaagtaactgtataattactagacaatgtaattatacagtttagtaattatactatattttaaaatacaatgtgtatttggatatgaggtggtaattatatatgaatttctaatattttgtttgacaaaacagatagtaattacacagtaaaataatattttttttagtcgttaatttttgaaatagaaagtttttagtaattacacccaattttcatggggccatgagaattagaaagtgtaattgtaacccctcaattacctttaattacacagttacattataattacatggtgagataatattaaattgtgtaattacctttagttatacgcaaattcaattacactgtgactttctaaacatattctaaattaaattatatgtaatccaatttttaattattctaataacattataactgtaagattttttattcatctcttttctctctgtttttctctctgagattgatactgacagtagctttttttcttctttgttgcatgaacaattctcccctgagttggatatccgaaccctagtccaagggttccaaggtttactcctccaaactcaatctctgtccattttctctctgggaactgatttaatttttgtattgtgctgctatgagtctgatctttctgtgttgttgtattgatatgattctgatattcagccttttgttttgttgctactgctggtttatatatgttgtagaagagagcagtgaatcagagagttagttataaagttcgttagaactttataactaacttaatgacctatctaggtaaatagaggcctaaggccacataagctttatttactgccttgttaatcattttgtaactgttctgatttttttttttacagtgaatgtggggatttactttcaataattttcacctaaatccccatatgcactgtgttgatgttttttaagtgtaactgagagtcttagctcgaacccattaagggttttaccaacttgtgtgtaataccctggaattaaga

SEQ ID NO: 343894 - DNA, 562 bp, Cannabis indica
aattaatcctacagccacgaaattccaaaaccaacctaaaataatgaaatttataatcctcaaagaaataaacttacctccaaagcttctaggatgatcttgggtatcaaatctgctcaaaagctgaaagaaattaagaagagccccctggttttggctagctctaggtcacgaaggagagagaggaagtgagattgatttctcttcaaagcttctcctttaatagcttctaacaccaaaagaatcctctttttttccattttaattaattattattattacataataatcagccaagaaaaacacataaagacaaaatcaaatgccaaccctcaaaatgacacttttacccctccgtaaatggtaaaattcaaattaaaaccctagggacatttggtcattttaactaatcccgcctaaccaacaacttaaagattaaactaggctagaatatttccaaaaataatccatcctttattttcgtgacattctaaccactccgtcgagcttccatggtcaccaggcccaaaaacattttttttcaaaaatggtatccataaca

SEQ ID NO: 343895 - DNA, 524 bp, Cannabis indica
catatatggttaattaagttttttattctttaattttgttcaaattatatttcttttttgaatttttcaaacttttaaaaattgtctaatttctttcaattttattaatatggtcattgtccatgtattaaatcctacttttaaattttgataactactaaatcatgccccttaattttgaaaagtataaaattgtgccccctaattattttcattcatgtcagattttgtttaataaaataaaataaaaatccttaaattcaataattttaataattttaatagtttgaagaaaattttaacaatataaaaaagaaatttttacattaaaaatacaaaatattaattttattaccaaaaaaccactacacggttacccaaacatttatacccttttcttttaattttttacatttgtaccacatgcacacacaataaatgctttcttgattgacacgtgagattgatgtaccacatcaatctttctatatatcatttctctcttttttttttctcttcttttt

SEQ ID NO: 343896 - DNA, 629 bp, Cannabis indica
tgacgtagtccatgccctcaaccaggacgtctccgtcagcatcgactggctccccagcctcgttgtactccccataatttgggggttcaacctctgcctcttcctcggcctcggaaggactggcaggacatacatcgtctagctcctcgatctcctggaccttagcattcccttcatgatcctcctccatctggacggccagatcctgttcggtgctgggcaaagtggcgtgccgagcccgtgaggatcagatgcatcagccagacgcatggtttactttgtacgagccatcattttacggatgggtacatggttataagagtgtccttcgctagaggaaggaggactagaacgaagacgaggatgatcctcgtgcagaagttgaactggtcgatccgatgtctgagttcccaagactcacctgagttcatctacaaaatacaacacacgagatgagtgtttggtcggaatatcgaacaataaacaagcaaatatactgaccaggaatactcatcagattaaagaacgactatgtttaaagaaaagtgagaactcaagaagtcaaaaaatttcttgagttagggcaaaaaagttcatgaagcttagaataagcaagatgaaagacgaac

SEQ ID NO: 343897 - DNA, 931 bp, Cannabis indica
ctcccggtctttccccttcggatcacggggctctgaatgtcacaatcaccccctttaggggtctgacgacctcgtcgaccacacttctggctaggtcaaggctttgatactattttgtgacaccatactagtttaggcatgttatcgtgatttacattaactgtgcagttcgttgctaatcaacaagtttattgaaaatcgcgagtaattaaaatttttcttaattactatcaatattaaaaataactaacttttatatataaccaggatcccgagtttgcaatatttataattggttcaaatacttgatacaaaagttatcgcctaccagctatataaaatacagcctgctgtcccaaagatcgtacgctccaggcctaaccgccccgacatgtacaacctccattcgctcgaactcactgctggtcagccttagctttgcccttacctacacatgcaaataatatttgtgagtcgacatactcaataagaaaagtataatcatgaatataactcggattacaattaggcaccaatacactcaactgtaatcaaatccccgcactgtaggcggtactgagtctacaacatttgtacgacaatactattgaccataatattagcctatacttggtactctagtcgtactgaggtgatagtgtcgattagtatttgagccaaacatacatctattggtatccaatacaactctacgtatattgataccgctattgatgtaatccagcaggcttaataaacatgtacactaaacaagtaaacacatgcatatcattatattaatcttacctcatttttgaattcaggtgtgtcgatcaatctaagtggaacagctgcttggcaatttacaggcccctaaatcacaatattcgtaaaactgatgagtggcgcgctaaatcactttcggggactt

SEQ ID NO: 343898 - DNA, 548 bp, Cannabis indica
tataaatatgtactattctatgaaataaaaagataattcgattcactattttctacaataataatacttatctttcaagattctacggtgttaaattgctaatgcgtaaacatctattagggatgaattttattaaaacaagaaccatgaagaaacaacaatagagatcgaatatccttaactaaagctcattattttaaagatatgtcttttcatttaatatttattttagtctatttcttttcttttaatgtatatttattttattaaaataactaattaataatatatttaaatttatttatttaactttaaattaaaataaaaagaaaaattatgttgatattttatataaaaaaaattaaatttaaaatattataaagatttcaaccatatttttaactttattattatttattttatattttaaatagaaatggttgtaataagaaattgattgctttttgttttagtatggtaaaccgattcacacaccatatttttcgtaaaatttgaaaataaaaaacatttatatcaaatttacgaat

SEQ ID NO: 343899 - DNA, 1187 bp, Cannabis indica
cttatcttgcagtttacattttgaatgctccttctactgtgctgtagaaaaatgttaaggaaaccctaagtttaggaacctctgcgattcttctttatcatgccttcatgcagttttacagtcataatgcttgtttctaaattgcataacgttcgtctttcatcttgcttattctaagcttcatgaaattttttgccctacctcaagaaaatttttaacttcttgagttctgacttttctttgaacataatcgttctttaatctgttgagtacttctggtcggcatatttgcttgtttatagttcgatattccgaccaaacactcatctcgtgtgttgtcttttgtagatgaactcaggtgagtcttggaaactcggacatcagatcgaccaagatttgcttcaacttctgcacgaggatcatcctcgtcttcgttctagtcatccttcctctagcgaaggacactcttctaaccctatacccagccatagaatgatggctcgtacaaataaaaccacgcgtttggctgatgcaactgatccttaagtggctcggctcgccactttgcccagtgccgaacaggatccggccctccagatggaggaggatcatgaaggggatgttgaggtccaggagatcgaggagctagacgatgtacgtcccggcagtccctccaaggcggaggaagaggcggatgttgaacctcccaattacggggagtacaacgaggctggggagccagtcgatgctgacggagacgtcctggttgagggcgtggactacgtcagcgaggagcttgctgcggcagttcctcatagaaggcagggtgccttgggcgccaggtgggtacgtcctttgtctaagattacggaggcgcgccttcaaaccctagaccagggcagatacctgggcgagctggactgctacattcccgctcacaacaatcgtgccacaaaccctgacaaggggatgtgcgcctggccaggtgcccatggtcagcaaggagcattgatgcccttgcataaatacttcaagcatgtggcggatttcttcggtctctacctggccaagttcactcctaaaagcattaagtatttatctgccctcttcgtcctctacgcttcccaggggtggggtactccttctcctcacaaagttgcctggttctttgatttgaactccacccc

SEQ ID NO: 343900 - DNA, 1116 bp, Cannabis indica
tttttttttgagtacagctcacacaattctatgactctgtaatattaaatcatttattttattattttttctttttacagaaaacaattttaaataaatattaataatcatttttaaaaaataaaaacaaaaatcaaacattctcgtacgcaaatattaattacttaatcttacttagggtaggatatataagatctttctgttatattatttaataattatggattaaaatgtgataaatatatgattacgtgaataatatatattaagtgtggtatataaatgtgtaactagggctgaacatcggggtgtgggttagctgggtttcgggttcaaaaaattgtacccggacccgactcgtaaaatggtttgggttcgtgagtttcgggttcgcgagttcacgggttcggattgaccgggttggccaactaacatacatttaataatgtgggtattaattttttattttattactaactatttttatttttattttaaaatagcagccttaagtagtggaggtctaaactgatcgcatatagtaatactaaattagaaaacaatatttaacgcttatggcttctttgttggtttttaatatattaactttataatatataacacaaaatgttatccatttattttttaaaatttatttctttatttatttttaatatattatatatgtaagaaaaatataaaaaaaaaaataaataaatttggcccggttggcaaacgggttcgggttcaacccgaaacccggtggtcataaaaaaccaacccgcgaacccgcccaatagggtaccgggttgaacccgacccgtctgaacagaacgggtttttaaacttttcgggttgagcgggtcgagtccaagtaggttggtcgggttcgagtcaaaccccgtcaaaatgttcagtcttatgtaacttatgattttaacttacacttttgtaacctacatgttgtaactcgtaaaggagttataatttgttatcacttgtaactcatgtattgatcacacattattagtataataaaagggttgttacacaatttgatgataggattcaaatggtatgaaatatagttgttacaaattatattaaaactcattt

SEQ ID NO: 343901 - DNA, 632 bp, Cannabis indica
ttggcataggaatatgtttgaacaggtccaaggattgattgcataaaatttggaagagttttgtgcattttatttgagttcttgttaacctgagatttttgctaaagatttgctaacattttgctgcagcaaaacgcacagtttttgctaaacatagggggattcaatagttcaaacctctcacatttcaaaagcttgcaactcatttttatttccatcttgcatccacttttgagttaatttacttatcttcttgttcatttagttgattaattaatcattttattttggttcttaggtattttacttggtaattgatttttgcactagaaattttatttttacagtccttgtggagacgatactcgttacatcattatattacttgtttgtgactacgtgcacttgcgtatatctaatttttagcacaacaagtttttggcgccgttgccggggactgtaaatatattttgttgtaattgtcaattagcttgcaatttagtctattattttgtactcatttttggtgactcttgtgcattggcaggtgaaaattttatatgaacgagtaccaagaatttgttaatattgatctatatcctattgatcccgaaattgagcgcacattcaga

SEQ ID NO: 343902 - DNA, 543 bp, Cannabis indica
cctaggcacaggcctagcccgccgatgcccagggtcgggcctgtctcaacctaaactaccatggagtgctttatttcgctcaatacaaatcacccacatgatgtagattattaattccatcactgcctgagtgtggacagtggagagataaaataaacaattattgtttaccatttgtcgagctttcccaaaatcttgatgaaaatgaaaatacttccacacctatttagcataccgacaattgaacaatgtgtgtccaattgattctcaagcatggacacatttggagcaagtagtcaaatcaataattttcttcttctataagttcgtaggcactagaagggctccttggatggctttccacgcaaatattttgattttaaaaggtaagtttagattccaacaaaacttctaccaattgctatacgaatttgaggtcacttcttggtcagattcttccaaggtggtggccaaatggaaccttgactttgttggaatttattttaccaggatcttagatctactcacaagtatgttgattaa

SEQ ID NO: 343903 - DNA, 568 bp, Cannabis indica
ttatgtttatttttctctgcgaatttgacaactcaattaaatattaccgttaaatatcaactggataaccactgtatacaattgtgtatatgtaacagtaaaacctcgaagtcgatacattagtaatccaattagtatttaacggtaatatctaactaaaactttaaatttgtaaagaaaagtaaatttaagggagttttgccacaaaaataaaaggaggttaactgtataaaaattaatatattttgctaccaaaaataaattaaaagggttaagtatataaaaattaaaacataagaggatttcgccgtaaattgctcttattttttttttttaaatatatgtttggacataatatataaaaatattttgccaaaatattttctaatataatccttatatatagagatcaacataaaatatgtataacaatgaaatttatttctttattgtacacataaaatacatatatacatataattacatttaaaaaatacatcaatgtagcctcaataattaaaaaaaaattctcaaagatcaaaatctcaaagggaaatttgatttttta

SEQ ID NO: 343904 - DNA, 1418 bp, Cannabis indica
attatgttagaattatttatttgtggactaatataataccataatcacaatcattaactatgtgcccaatatttattcactaccataatgggatggttaataattaataaatgtattagaggcacatgggagcaccctaaaactataattggcccattaaattatagtccaccactaattatactcattagcccaataagcctaatataaccccttagggttaagtgttgcatataaaaggattaatatgtgtttagtatgagtagagtgtgggtgtgtggtgaaagaaaagggttttgctctcataggttctcttctaccatcttgggatacattgaagaacttggtgtcatagcaaaatggaaaatgcaaacatgggaggtatgtgttttttatattgtttgtgatgctctaaataaagtattgatcttggttcataatctgtagtagttcaacaattggtatcaagagctagtatatttgattttagagctcatgaacttaacccattttttgttttatgatttattttattttcggattaatatgtttattaatgggtaatgtgagattaaatgttgtagaatgggttttttcttaatatttggggctgttgctatatgtttttatagtaaaatatcaagttttttataaagctcattaatggaggaaaacccatttcgggttcaaaatctttatctattattttgtattttttgaattaaatgggtattgaaaaataatagagggttgaaaatagaacaaaacccctcaaacggcgtcgaatttggtggccggatgtgggagatatggccgggtcacgaaccgggtcgcgccgatccggatttcagaccgcggacccgtctggggaattctgggcgacagggacgatgaaaaacgacttgtcgtttttgcctctgtcgggcaaaacgacatgtcgttttgtcgtagtgcttcatcccctaaaaaacgacgtgtcgtttttggagtttcagcccagcccttcgaacgacgtgtcattcggatccatgcccccttagtgcaaacgacttgtcgtttgaagccctctgtgtgtgggtcgttttggccaaacgacatgtcgttttcttcaaacgacatgtcgtacggccattgctatttaaaaaaaaatatatatatcaaaaggcagcgggcacgtggggcgcgtgggggcgcgtgcacggcccattttgggccatttttcatattttttaattctctattatttcttggtatgtacaatactaattgcatgaattttattcatacttggttgataattttagtattgtggcataaattttgtgatttatttcagcaattagtgtttattttcttgcctatcgtaagattaagcatggaaaattgtttggtaacgaggaacatttaaatattaattt

SEQ ID NO: 343905 - DNA, 879 bp, Cannabis indica
aattatttagggcgttacagtgtaggtatgcaactacatagttgaagtgggttttaatagattgactagtactacctttatcaataaggtgtatcttgtttttttggagcccatcaaaaaagaactccacggttaagcatgcttgacttgggataatttcaggacgaatgacctcctgggaagttttcccaagaagtgtgcaagtgaggataaaggacaaacagtgttggtttgtaaggtcagtcgtcatcttaggaaacagctagagtgatgtaatcgtgtataagagccattaatttatggatgtaagggcccaatagaggcttgaagtggggactttacaaggctaaagtctaggatgggatctaagaaagtgtttgagagtgcacagaaaattatggttgcaaatgaaggagatacgtcaaatcggattgttgatcctaccgttgttctagtagttgaaacgagaaagataaaccaaagaatgactgcacaagacaagcactacgaagaactaagattccttgtagaggaaaaatttcaacaagaacaaagcatcgctagatgtcaacatgattaagatgaaaatcataagcatcatcaagactgttagggtttatgccttgaaaaaactataaagacattttctgattattaataaagagttgaatattttgatatatgcatgaatgttaagttattaatatttattattaaatattgcaaaatttcttatccatatatgaggttgtggcttatagttgtacagagaactaagaccacttagccatgaataaaatagtcagcaacatgttaaagttatagaatctttaatcaatggttgctagtacagttcatcgatgcctgttcttcgatgaa

SEQ ID NO: 343906 - DNA, 792 bp, Cannabis indica
gaattgggagacaatcctagtttatatggcgttcttgaagctaaagatctaatccatgcctgtgctcaaataactattgctaatggggaaaatgtctccattcttaatgatccttggcttctttataactctaacagctatgttgtctcacgacaccctactcttgtgaataagtcggttagctgcctctttcaagttgatactcgcgtttgggatgaggatgttgtgcgagatctgtttgtttcccgtgatcaggatcttattttgtccattcaacttagtaattcgaccgctaatgatggttggagttggagacttgagacttgtgggaattattcggttaaaagtgcctataaattcttgcaagaatccaagggtgcttggtcccgagatgccaatattgatttttggaagcggctttggtcattaaaaattcctcctaaggtcagcaattttttatggcgggctgcttcgggcgtgcttccaacttgttttcaacttcaaaagtgtcatgttcccgtcaatgcagaatgccctttgtgcaattctagtacacaaactattcaacatgtgttggttgaatgttcgtttgcaaaagctgcttagaatcgcagcatggtggacgtcggggctggggctgcaagattcagcagctggttgttggggattttcaccaaggggcatgaaggtgaaatggaggaagtggcggtggtaagttgggctatttggcatgcgcggaatgaatttttttttttttttttaaaggaagagttggcttgctttaaatattat

SEQ ID NO: 343907 - DNA, 559 bp, Cannabis indica
aaaaaaaaaaaaagaaaagagataagcaaaaaaattgatttttacctattttcaaaatcaaatttcactaatatctaaaattcattttaaaaatcaaattaatttatttctcataattaattccatgaaatagcatgaaaaattgaagaaaacgaaaaaaatggcaggtggtacatactgtccgcgggcgtggaagggggggaattgccgagaaaactcagagcaggggtccccttgcatgatttccgcgcgcgtgggaagggtgatcaccacctcgatttttctgattttcaaaaattcaaaactaattcaaataaaatcgaattcgagttctgcgaaaaagtaaatttcttaattttttccatactatcaaataaaaataattccagaaacaaaaaatcaattattttccctagaattgcacaaacatcaatcaaacaacaataagacacacaaaacaacatgataccatccaaatcacatacaaatcgttttaagtccaaatttcttgcaagcaaataaattaccatggctctggtgcaagttgttggaattattt

SEQ ID NO: 343908 - DNA, 534 bp, Cannabis indica
ttttttgttttttttcctttaatttttagcggtaataatatttattatttaagtttaattctaaaatttttacaaatgagatttaaacttaaacatttatactgtaaattactttaaatttaactatcgattataaataaatttaattttttaataataaaaataatacataattattaagatattaccatatgttttaaatatcgttaattaaactgactatctcattagattctaattacataacatactctatgatgtatttaaatatataattatttttatatgttaatgatgacactacgtaaataatgtttgattatataagttcatataaaatacttatttagtgtactttagaggagaagagccttgacaactaataaagagcattgctgttgagtaccaataaagcttatcacttattataattgttactttatgattggttatcgatattattttattagttatatgagtatatttaattacactaattataatagggaaatttgattttctatgcttagaaaa

SEQ ID NO: 343909 - DNA, 642 bp, Cannabis indica
agctgcagagagggggttgtgtcatcagactttaagacatatggcagtttcaatacgcctcctcccatgcggcattaaatgcgagatgactgttcagataggatctgacacctcccggagaagctttgttgtagccttgctctccgggagcatgtgagacttacatgccttctccaagaggcaagtctaaagctgatcccttcggttaaagagacttagctgatttatttaacgctaaaccctttccatctacgtgtcatcatccggttggtccacgtattttgggcaaaatgaggggcagcacattatattgtatgttgtgagctaatttttaaggtttcgaataatttagtgttgatcgaattttaacttgctataagtatatacattcactaactttttgttattataatttattatcaatgcatgcttagtggagtttgaatatcttagatattcatttgtagtgaagtaggttctatgatatattatactacagtcagatgagtgtaataatatgcatggcagttgagtttgaatatcttaaatatccaatcatagcgaagtaggttctgcgaaaacatgtactgcggttagatgggtggataaattttgtattgttaatgttattttgtttgtttt

SEQ ID NO: 343910 - DNA, 778 bp, Cannabis indica
taaaaatataaaataaaattaaacctaaaaatgaaactatctctgaacttaaagcggtcctaacgctcttaaggtcgagaagtacaattatcttaaaagtatatttgcttattatgaggaaattatattgtatactcacttttgtttttaattttttactttttatttttcatagatttatttaaatatacccaattttataaattgatgtcctcattagaagactccttaggttaatgtaaaatatatgctagacttaataaaaaaacaatatgaggatagttttgattaaaatttacaaaaatgaggtatttttctacttatctcgcttattattcttggagaagtccttgtatttatattttacaaaaataccatgtttccctcaacttaatctaattatcacttttaaggttttgggttgtgccctatcaaaatgattttattggtcctttttacaaaaataccaattttaagcatgataagaatctcacaagaatgctatgcctaaaattggacacattctcattcttgtttagttatcaaataggtaaggagacaagttcattacaagatcacatatctaaagttttactaattacaaaaatgtcacttttcttaattgttccttactggaagattagccctctttatttatccacacatttagccatagactacttttaagaacaaaaaatcgagtaatataataatagaatagtggaaattgtattgcttacccattttatctattagtttttatttttaccttcatttc

SEQ ID NO: 343911 - DNA, 557 bp, Cannabis indica
tattttaatgttattttgtttgtttttattgttttacttgttttatttgttattttatatatttttaaaaaatttgggaacgttcaattacatgcgttatgctaccaaaatttctgtagaattaagataaattttactaaaaataaataaatattaaaggaaaagtacatagcacaaataagtaattaattactagctagttgtaagaaattaggtgacataacacaaataattatatacacatttatataatttaatcatcatattctatataattatttatgtctaaccatataaaaactacaattagtaaaactctaatagtatttgaaaaaaggtacatttgacaaggaatcactttttacctcattttgttttgaaacaaaaatatgcacaaatcataatcaacatgactctcatcagtataaccaaaagcaggaaaataataagaaaacaaaagagcatatttcctttttattttctagaaaattcggcagcataacgactatattttgaatcaacccaaaaattataacctgcataaatatttgtacaaa

SEQ ID NO: 343912 - DNA, 638 bp, Cannabis indica
aaaaaatcaacaaaaaaataaaccaactcttcatcaagaactcgatttcttgataaagaaactagtttcttggtgatttttctggtactttaccagcgacaataccaattctgacaaatattccagagtttactatcggtactggaaaagtcgccgtagtagctaccggtgtcagaaaaatcgccagagttaatgccggcatcgaaaaagtcgtcagactcattaatgtcgccagcaaaatcaccgaaaaaatcacttagaaagtggtttcttcatcaagaaaccgatttcttcaccaagaaagtagtttctacatcaagaaaccgatttcttcaccaagaaagtggtttcttcatcgaggaactagtttcgtcacacaataataataaaaattatgattacaaaacaaaaataatatacaatgaaaataattgaaaccagtttcatcaatcaaccaaatgagaaaaaaaaaacacaaaaaaatactcataaatataaacaaaacaacacacaatgcacaacaataatctaaaacaaaatataagtgtgaaaaccagtttcaaacctagaaacaaaataataaaaagaaacttaaaataaaaaatatacaataacatcataaaatagagcaacctcat

SEQ ID NO: 343913 - DNA, 464 bp, Cannabis indica
ttaattataatatttattataaattatccaaaaatttaaaacacacacacttttgtcggtgtaaataacttacacccgtgcaatgaaattttgcgggtaacagttttgccggtgaacatttgcgccagtataatcattacccgccaaattatattgcgcaagtatcagttatatactaacgcatatttgtgtcggtagaatcttcacccgccaaatgaaaaaaagcacaccaattttcaccggcacataattgcgtcggcataactttttagtgaacatttagccaacacttaacaacgacgagccacttttagccagtgaaaaaaagcgccactgtgaagtagttttactggctcatatacaaattgtgttgccaaaacctattttaccaactaggtattggcagcaaaaattgttggcgcaaacaaaaagtcttttttcttataaggctaattaggattttt

SEQ ID NO: 343914 - DNA, 441 bp, Cannabis indica
aaataaactttaaaacaataaaaattgacataattaaaaaaaacataactatcattgttcaaatcagtatattctaaaaattcatctgcattcgagctaagtcttgaaccatcaagattatcaagggattgagcaggcggggcaggataataaggttgtccagtctgcggtataggtaagatctccacaaactttcgagtatgcgggcgaaccataataggttgttgctgttgttgctggctctgcgcactgaaaatctgaccatacataggctgttgtggagatcctcccatttgaccatacactggttgttgctgcaacaatgacccaaattgaccgtacatagggtattgttgttgggatgagcctccaatattgccaaccataggttgtgtctgagatcctcctgtggcatccgaaaaaaataatggaggagactgt

SEQ ID NO: 343915 - DNA, 791 bp, Cannabis indica
tttatttcactatagcataattggtactcacttctcagatctcgcatcgaaatcataaaacagttaattgatggccaaacaattaaaagtaattaagcacgaatgaaatagaatacataaaaattagggagaaaataaaccatattaaaaccgtaaaaaaatgtcaagcaacatccatctaaccctaataaagtgtttagctacatatgtaacatgttcatggaagcaaaatcatacatattatctttaagaaagagaaagatagagaataaaataatactgaaaaccatctgtagaatgcctttagtattgacttttgtctctgaaattcgtactcctttttccctctgaattgccttccctaaaactattgaagttcaattcttttatagccaaaaaaatgatagaagaaataacaatcactgaagaaaaaaacctattctgcttaggattagaagagaatgtgagttttctgctgcatcgactgacagtattttggccataactttctcgatattgctcagaattggacgatttaagatgttctggaaaaataaaagagggatctagaacctttatgttttgactttttctaaaatctaataagaacatagtggaatttagacttaaagtttaagctttaatttcttgcacaattttctctatgttatatatcatctttttatgagatttttattattcttttttttttttttttttttttttttttttttattcttattcctttgtatattttcttaatcttcttctattttaaatctgcaaaaata

SEQ ID NO: 343916 - DNA, 829 bp, Cannabis indica
ttacattgttatcttaataaataccaattaaaaaaaacataattgttcatgctaaattctggtaaaacaaatctacacaccaccgctctttaaatttcttcatattgtcatcgttcacattatcaaacgtaagatccagcatactatgctcgatgtgctctatcacatacatcccgcaatcaccgttgtatgagacaataaaaagtaaataaataaaagtatgaaaattaaattcaagttaaataataaaaaatgaattgtaattaagttaccttgattccgtctattgtacaatgcttcggtcgatgacttttgaagtaaaagttttaacctggctctctgagacggccaattgaggcatgacgattatttcatgactctcgaataggccagactgcaacatcaaagttgggagtatcttttccaacattgccaagtgactcttcaattcattcggggaaatcgatctgaggcttgagtcaaatatgctcaacaactaacgatcaaggtctgcctctaatgtcacccaatgccttgcactatcaaagaagagggccatatatatattctctccttattcttccaactgtccaagtattggcctttatcccctcgaatcaaatccaatatgtcgtcatcccattgaaagttagtgtggtcatcacccgcagattgccaccgatcaattactcctgatgggaaaatacacgacatgatgacacatctatttgggtacaccttcggataaaattgttgtcgtctcctcatcaaatgaaatgccacatccaaatactaaaacatgaaaattaaatatgtcagagattaaata

SEQ ID NO: 343917 - DNA, 677 bp, Cannabis indica
tgcgggccgacctgagtgggaaacaaactaagcgatcccgggtcctatgtcacgacaaagaaattcgataaacaacttatccatattcctaacaaaccctagctccataattagaaaagtttctaactttccactagtttaaaatagcttaaacatcactaaaatagcctattctaagttctaaaaaacaccccgagcgaaactagttttcaagccaaaactaggtttttaccccagtgcagccaaaaccggtccaccggttttacttatgcctgtgaaatcggttaatcggtttcccttgttgcagaaaatggaaactcgagtttttggctccaaaaccaaaccaaatcttctccaaacctgttcaaaccttccagaacagtacaacaatcataatacaacatatttcaagcttcataacacaaaaattcaatctctaactcaaaatcacatgctcaagtgaggaaattcaaattttagcttcatccaacacatttcaatccaagcagccaatgaaacctctcaaaacaattctcaaaatactcaaatacctagcctaatcataacccaaacttagtttaagtcctacagcaacaaagaaacgaaaccctacttcaaaacaaactttaaacctaaaatttttaatccaaaatggttgagaacttaccttgattgct

SEQ ID NO: 343918 - DNA, 609 bp, Cannabis indica
actatttattgtgtttcacagcaaaaaatactacttctacagtttaacataaaatgaggagagaatgagcttttcaataattgtgttacaagaccactgtattttatccgatttgttgggtggtggttgtggcactatgatttttgtagtagacttcatttcatttacggaattttagcattgttctggtggacagttgttcttggtgctttctcttggccaatatagctccctatctttgtagttaaaaatgtgaatttggtctgatttatctaatttatttttttattaaagaataaaaataagtaaacgagaatgagacaagaatataataaaaccgcagttaatgtaccttataaaatattcataatatgaaaattcatagctctaatattagaaagaactatatacacactgatggagaatatctatagtgggaggcaaattgtgaagaaaaaaaaatcgaagggagcaaataaaaaaaaatggggaattaccccatatattatttttttcaaatttacggtttgggtttctaaagtagttgcagcgctagttgcaataagggtttatgtacgattttttgttgcaatttaagttgcagcgcta

SEQ ID NO: 343919 - DNA, 1034 bp, Cannabis indica
ttgtcttatctgttggcatgagcaatcttattcctttccatccatattgcgcaggaacacataattaatttggcaaaagcatctctttccaccacttgagaagcataaagtaaaacattcttgaaattaatctcttcttttacttcaagtagaaaaaagaattccagaagattccaaatgcctagtgaaacgggacaccaaaaaatagcatgagcattcgactctcctccaaaaccacatagttgacaagaagtattagaggcgatattccgtctaaacaaaccattacgagtaggtagaattttgtgataacccctccacgcaaaatgtaacaatattctaggaattttcattccccagaattgtttccaccctaatgaaaacacatcactatgaaggttgagaattatctgtagtcattcctaggttataaccactcccaactgaataactaccataatttgtatcgtgccagaatcacgaatcctcatgattaaacggacttaaaggtatggaaaaaatacattatgcattaggtacattaaaatattgatctactactgcagtattccatttccctagtgactcaataaaacctgacactcttgccacctcatacgcaggatgcgaacttggaagaaacgaaggtggtctaggcaaccaagggtctctaaaagtcctagtattcataccattgccgatactctgtcgtagccttttaataataaatctcttccccataagattcattgccactttgatgatggatatgaaccattgtttgcctctaagatgttagatactctaaaatatcttactttcattacttgtgccaatattgatgatgggtttattaagatgtgccatgctttcttggccaaaagagcttgattatactggctgaatcgtctaaatcctaaccctccatcactctttggtttataaatcttatgccaaaccctccaatgaactttttgtttattgtcaactgagccccaccaatatcttgctattaatctttctatctcttcccc

SEQ ID NO: 343920 - DNA, 517 bp, Cannabis indica
gtagtttaatacaatatgaaaggtttatacagaatttgaatcgaatcctaagatgttaaagtattgttatcctaaatcattagtcaaaatctgttgtgatatttactaattgttatccagtcaacatatctatccttcatgttatttttgaatagtaaatttttgggtaaattgtgtttgttgcataaatacctaatgttttagatttatatacttaaatactttatctttatttttggaggcaaaactatccaatagtacaattcgtttacacccgttaatactacttccgttaactcataaatatggacacgtggagggtccatatgcattacatttttttttaaaattttaaaacttaatattctcaatattagaaactaaatattaattgttccaaaaaaaaaaagaccaattctcataatggtttactcagttatgttaatttagttttgtatctctcttattatttttttttaaaacaagttagcatctagtttttgatattaagaatatt

SEQ ID NO: 343921 - DNA, 1671 bp, Cannabis indica
cacccacatattatcttcttttttcgcaatggcccaaacatatatatttaaacatagtagcaatatttcattaagttacctgtttgagacccaaaccccgtgctgatttctccttgcaaacattcctccaagctacagcagcaactcccttaagttggtggctgccactccatagaaagctcctgtaaatagcctctatttctaaaataactttctttggcagcactattatttgactccaataagagtgaatagcgatcaagactgagtaagatcaccacccttcctccaaagttcaggaaacatgatttgctatatatcaaagtttgagagacataatgtagtagatatcatgtaaaacataatttagtatataaacaattactgaattagtaaaattgaatgcaattagaaaaaaaatttaaatccaataatttcaataattaaggagaatttttaacgacaaaaaaagttcagaaaagatgatttgatacatgtcaaattttagagacaaaagtctcaattaatcattatttataaataaaaaagtattattaatgagattttataaattatgattagtataatttaatatggataaactcataaacacttaataatcgctaataccaatgtgtaacttatattaaaatttggtctccggaagaagctataatattagttggtgattttcattatttatgtcttatcataattattttttgttaattgtttaatattaattggccttttgatgttagatttgttatgtattaataaaaaataagatcaaactagctaattgccatgtatcctacttacttgctaactcctatatattataatatgcctcataaaattaagcactaaattgtaactaaacttagtaataaggaagcttacatgaaatactagcacataataagcttacagactaaaataaaatattaaacagtacatttgagtcttaagtaaattaccccattagagggctaagcatatttaattaactacgagcctttactaattcgacccatgactaagtcttgcttgtaaataaagtctcacggtctcacctcaatgtcaaaagattatttttctcagttcttatgtaaaaatattgtcaaaaaagaacactctctaccattgttcatataacactctctaatatttattaatcatgaactaaaatttattaacatttaaattatgtaaaaaaattattattttttatttcttgaaagctctctttttatcaatttacaacatagttactgaaaatctggataacattactattcacaccatattgtccatatatatctcaaataattaaatgagaatatagcattttccttttgctaagaggaacattatttactcttcctcattaattatatatatatataagcttcacaattcacatatatccattaagtggtggcatgtcatattaaaatattatataccttttaatcataaccatgtgcatatcttcttttagctagagacacaatatttggtaaaagatgtagactttaagtacgaaagataagatgaattaataagacatatattgtttaataatattaattatagaaagaacttaaatgggaaatgggagtgaaagagtacatttctcaaattcttagttaaaaataatttgaagat

SEQ ID NO: 343922 - DNA, 1082 bp, Cannabis indica
acgagccgtccttaccactagactcagctcgtcgagaaaaataacctacactaaactatttcacctaacttgctactttttccagtgactttttttgttttagctctgcccttttccgacaatatcgggtaccgttttgaaaaacagttggcatggatgtaatgtactcgtcgaggtagtcgttttgaaattcactacccttattttcggtgacatttctggtacaccaatttttaccaccaccagtagttaatgtgcaccgcttaggtgaggttttggaactccaaacgttaagtataggcatattatacatcgttaaagtcaattttgaatgtagaatgcaatgataataattatttggccatttgatggtataggtgaaagtaatatctaagattggactaaataattagagctcgggactttagagcttaagattgtcttttggacaaagtttaacgacttgggagaggtagggactcaacttgattttcatatgtgttgaatatcattagacatattccaatttttatgatttgcaaattttttgaaaattaaaaacttaatctgcatacttttcttgactgttttggggcacgtagtgccaaatatatttttgtacaaatatttatgcatgttatgattttaggtttattcaatatacattcgttatgctgccaaattttctatgaataaaaaggaatatgttcttttgttatttttattatttacctggtttggttatactgatgagagccatgttgatcatgttcggtgcatattgttgttgcacgacctagtctctgtgtaaccataggtagatgaggtgtgcactcacttgtacgtgaaagaactagatgtacaaggagtcaattaaatcccaaccgcaatgttatggtggttatcaggtgcgactacccagcttaggatgtcgttttctatgattggtaatattgggagcaaggggtctagtggatggtgtgatatgcatttgacgcttgattttgtgattctttggggcctctctactttgtgtatacatttttataatggtgatgggatctttatttttaaaaagctaa

SEQ ID NO: 343923 - DNA, 835 bp, Cannabis indica
aaattatagaataaattgggataattggttaattgagattcataatttgaaataggaaaatcatcgctctaggtcttaacattaacattcatttcattgatgcattagagcatatgcccaattatgttaagtgtatgaaggaggtgttgaaaaagataaagaaatttggggattatgaaactatgagtattgacctcgcttctagccaacgacattgagtcaaaaataaagctattaaataagataagaaaaagaaagaaaaattcgtaaaataaagtgaacaccaaattctaaaaaggttcaacctcgtaagtatggtaatagcctactccccttgtatttgtattgacttgacagaagggacaaagtgttcttcctttcaaaagctcttacaattaatctctgagtaactttctctcttagatcactcttttctctcttgaatgtatttttaaagcaattctctcgatccccttcatagtgaggttaggccactatttatagggacttcatacatgagggatggtttcccttttgcttataatgagtaaaataggaaactacattaattccataattacaatgcaagaaataggaaactagaatgtgttagtgttattgtctgacttaatccagtaattatagggattgtcttcgcatctggacacaacaaaattgatctctagaattgccatctttcatgcttcgcttagcataagcacatctgcatcttggtcggacatttctttgttggtattatatttatccaggatcttagatctatttgcaagtatgttgagttaacaacctagtattgaacttctaaaacgatgaa

SEQ ID NO: 343924 - DNA, 1891 bp, Cannabis indica
gtggaagaactagaagagattgacatcgatccagatatcccggccaggatgctaaaaattggaaaaggtttgttgctcgaagtaaaattatcattgataaaatttctgagagcaaaactagacatgttttcctggtcacatgagtatatggtcgcaattgatccttcgataattttgcacgtcctaaatattgatcccaattctgactagttcaacaaaagcgaaggttgtttgacaaggagcgagctctagccctgaaggaagaggtagagaagctacacaataataatttcataatcgaagctttctacccagcttgggttacaaatcccgtactggtacccaagccgaacaagaaatggcgagtgtgtattgattacacgcacctcaacaaaagcatgccccaaagactgttttccacttccaagaatcgatcagctcgtggacgcaacagccgagcatgaaatattaagcttcatggatgcttatttagggtacaataaaatcaaaatgcatctaccagaccaagagcatacaagtttccgaacagatatgggtctatattgctacaaagtcatgccatttggtctaaaaactactggagccacacacaaaagattggtaaacaagatgtttaaagaccagattggacgaaacatggaggtatatgtggatgacatgctcgtcaaatacaggaaggctggggggcacatagatgacctggacaaatgcttcaaagtcctccgaaaatataacatgaaactaaatcccttaaagtgctcctttggagtcagctcgggaaattttttgggctttattgtcaatgcccgaggaatcaaagccaatccaaagaagattcaaccttctagatatgaagtcgccaacaagaaccaatgaagtgcaaagtttgactggtcagatcgccgcactcagcagatgtgtttcaaaatcaacagacaagtgtgttccattcttcaacatcctgcaaggaaataagcaatttgaatggacggtggaatgtgaaaaagcttttcaggagctaaaaacgcaacttgcaaagcctcccgtactctcgaaacctctggacagagaagaacttggggatatacttagctgtcacgaagcacgctgtgagtgccgagctgatcagagaagaaaacaacatacaacacccgatctattacgttagtaagagactcattgaggccgaaggccggtatccgttgatagggaaactcgcttactgcctaattctagcaacaagaaagttaaggccctattttcaagcttatcttgtttgggtgtacactgatcaaccattacgctaaatattgcaaaagctggacgcctctggacggttactcaagtgggtagtggaactaggtcattacaaaatttacttgcaaccctgaacaacaatcaaaggccaggccctaggagactttgtggtagaatgcacaggtcaagaagaaagcatatcataaggcaaccctgagccggtacaaacacctcagccaagtaacagtgaagacaagcccacttggaaaatacatgtggacatgtcggctacagatcagctatctggtacaggaatcgcccttttcacacctggggggcaacacctgcacgctacagttaagtttggattcaaggcatctaataacaaagccgagtatgaatctttaatcgttggcataaaattagcctgggagatgaaagccgaacacattgaaatctacagggattcaaaactggtggtaaatcacgcatctggagaatacgaggctcggggagaaaagatgatagcttatctgagttaaatacatgacctgctcccacaattcaaaagctacggtctcagacaaattccaagggaagaaaacacgattgc

SEQ ID NO: 343925 - DNA, 1694 bp, Cannabis indica
aaacaaaaaagttcagcattaagatctttcctaaccaagaaaagagcaactagatccgaaaatgcaaggtaagaaatcggtaataaattcaagaatatcttaccattaaatgaaaaatattttgtccactaacttgccaaaaaggactttacaatctccccctttggcactttagatgaacaaaatattttttaacacaaagtacctgcaaattaaagttagcaaaaacaaataactactccccctgagtaacacaatcgaaaaacaaaagagcatgctaacttttaatccaaaatagttcgcaagtaccaaacacaactccccttggaaaaagggtcctgagttgataaaaacaaacagttaaaaaacaaatattactccccctttttgtttatctaagggccaaagacaaaaagacacgaaaatatagaaatatgtctatcaaaaacaaaaaagaaagaaaaaacttaggccccataaagcttgatcaatgtggacagctgcttggacatctcttgccgaaccgcctccatggcagcaagtcgattgttcacaagctgaacctcattcttcaattcctgaacatctgcagaagcagaactcgaacttgcaccactagcagtagcagcaccaactttaggacgctttgtaaaagctccatcaaaatactccaagggttgaaaaatggttccagtcagagaaggctcaagagtttcatgagattgggccacatctttctgagaggaaaaaatcttaaagattaaatttggaaacacaagcttaaaagtgcggtttttacctcttcgaaatgaaataatctgattcaaaatgtgggagaccaagtcgatggatgctcccgaggtgatacgaaagaggaatgaggccacatcttgagacaccacggtcttgtttgagttgggaagccaattgctaagagcaaacctcatgagagatgcatgagcataggtaagatgtgtaatgcgaagactctcccccgatttcaaatcagcccgtgcaccagtgagttcagtgagcatcaagtggcgatccatagacattatggcatttggtacattttctggcaaatgcaaggcttgggaaatgtctttttcagagaagggaaactaatgtcctctaacaaacacttttcgaaaaagtctagaattctcagcaagaaaatcatcagataagttagcatagaattctttgacaatgttttcaatgtacccttcgaaaccagtgagagtgttctcccattgatggtattgaatgagcttaacaataccatataccctatgagcatgcaaatcataattcctttcactctcaaacttttgggtagcatataaattccaatcacgctccttatcacgaaagtagaaacgagaactataggagtgagatgtagggatattaccaggagaggaatccttcatgggctgcttgcccttggcagtagcagaggccttggctgctgaagatgttcgagaaggcactggagcatatttggtcaaaggaggctcaggttcgagtttagtgtcttcactctcagaagtggctccaatgtcttcaggaatctcttttttagaatgcagagacacggacttattagaggaattaacagagggatcctccttgggttcttcttctgaacttgaagaaaccgaagggggatttgtcttaagcttcttggc

SEQ ID NO: 343926 - DNA, 615 bp, Cannabis indica
atctatatatgcccccaaccttcctggatttgacgagcatgtcatccacgtacacttccatgtttcgtctgatttgttctttaattatcttgtttaccgatctttggtgtagcttcagcgtttttgagaccaaacggcatgaccttatagcaatacacacccatatctgttctgaaacttgtatgttcttggtctggtggatgcattttgatttgattataccccgaataggcgtccataaagcttaatatttcatgccctgttgttgcgtccacaagttgatctattcttggaagtggaaaatagtctttggggcacgccttgttgaggtcggtgaaatcaatacaaacttgccatttcttgtttggcttgggtaccagtacgggattagcaacccaagctagatagaaagcttcaattatgaaattatttttctctagcttttctacctcttctttaagagctaaggctcgctccttgtccaacagtcttcacttttattgaactggttggaagtttggatcaatatttaggacatgtgaaattatagaaggatcaattccgaccatatcctcatgcgaccaggcaaaaatgtctaggtttgctctcaaaaat

SEQ ID NO: 343927 - DNA, 1004 bp, Cannabis indica
gatattcatatcaagtgtagtgtcgtttaactttacccaagcaataagaactgtaagattgtaacaagaaatagctttctctaccattacttctttttatattcataataaattatggaatattcgttttctatatgtactacacttatagggatactaaattctttactgtctgataagtgcatctaaatgtacagaagacataactctcattctatccaaaatgaaatagagataaagcaatcaaaagctttctttagtttaaataacagtgtcttttaaaagcaactgaattatttagcttcactggttgaaataaattattatagatgggttcttacacccttccagaataattcctccaccctagagtaattattatttcagatataaagttctgagttggtgtagatataaagattttaaatacacccctatcatctaacatgtaggtcacttttagagattctttcttgattgtctccctatgttcccttgttggattacatctttgatggctcccactcaatagtaggagtctggtttaatgcatacagaagtgtgcatttaatctcttactattggtacttaaggacatcttgttgtgacattttatctttatctagaaataataagtttgttttagactaagtcatcaacatagcattctagtattaacattaatgtaaaatacttgcttaagattaagtaatcattagagacaccataaaatatttcataaggaccagggtttgtgcttgagtcttttgaatagacattgcatgatttcttatcttatcctcataattctgataagttataattatctatgtgaatggttagattaacttttcttagctttattttaaagtttctttcttgaacatattattgtaggtcatcactagtgtctgttgggattttaagctctaaataaaacttattttaatgtaatcttatttgttatcaataaaagataaaaaattattttatgttgcatggtt

SEQ ID NO: 343928 - DNA, 756 bp, Cannabis indica
aaattttaaaaatttaaaataatttataatataaaaatcagtgttcacacaatctatttcacacaccgtataaaacaaaaaagacatacatacaacagactgtttaaatcttatttttagcgtgttaaaattttctaaatttatcaaaattttacaatttgtcctaaataactataacgcacacgaccataaaaaaatatattttttttttggtaattacagctaaactatctgaactttaagattttgtataatcaactcttctgaaattttagtggtaaaaccctccaaatctcaattactttttggtctctacttttctgttagtttttgactgttaaatgcctaagtagattacctctatgtatacaaatgtacacctggtagattttcattagcccatgtaatcttaattaattaaaatattacaaaaattaatttaaatcatactaaaccttaaaattcaaataatttagccacaaattaccctgaaagatatagagaatgaagtataaaattttccaaaagtattagggaaatttgaatttatatgtatacatttggtgcatattaaattttttgaacacaagcttattataattaaaaaaaataggcacactttatattaatacccataatacccttctgtcttatgttctcttctcttctaactttatcatctatactctctatttccatccataccgatggtggttcgatggaggtccgatggtggtctaatggtagcccaatgct

SEQ ID NO: 343929 - DNA, 1424 bp, Cannabis indica
gtgtgtcactaaaacctacaattttttagtgacccacactttaatgtgtgtcactaaaagcctaatttgtagtagtgaatgttataaccttgccgtggccaaggctaaaaaagaagtatcctctagccagagcacagacaagggaaaaaacctttctaagtagggaactttccaaggcgggaatgaagatgtggatcctcgacttggggacccaagcagcaatgttggacctgtggaagaactataagagatcgagattgatccatataccccggccaagaagctaaaaatcggaaaaggtttgttgctcaaagtaaaatcaacattgataaaatttttgagagaaaacctggacgtttttgccttgtcacatgaggatatggtcgaaattgatccttctataattttgcacgtcctaaatattgatcccaacttctgaccaattcaacaaaagcgaaggttgtttgacaaggagcgagcactagccctgaaggaacaggtagagaagctacgaaataacaacttcataattgaagctttctacccgacttaggttactaatcccgtactggtacccaagtcgaacaaaaaatggcgagattgtattgatttcacagatctcaataaggaatgccccaaagactgttttccatttccaagaatcgatcaacttgtggacgcaacagccggggacaaaatattaagctttatggacgcttattcggggtacaagcaaatcaaaatgcatccaccggaccaagaacatacaagtttttgagcagatatgggtctatattgctacaaagtcatgccatttggtctcaaaaatgctggagccacataccaaatattggtaaacaagatgtttaaagaccagattggacaaaacatggaagtatatgtggatgacatgctcgtcaaatccaggaaggctgggggcacatagatgacctggacgagtgcttcaaagtcctcaggaagtacaacatgaaactaaatcccttaaagggctcctttggagtcacctcgggaaagtttctgggcttcattgtcaatgcccgaggaattgaagccaatccagagaagatcaaagccctcctggatatgaagtcgccaacaagaaccaaggaagtacaaagtttgactcgtcagatcaccgcacttagcagatttgtttcaaaatcaacagacaaatgtgttccattcttcaacatcctgtgaggaaataagcaatttgagtggacagaggagtgtgaaaaagcttttcaggagctaaaaatgaaactcgcaaagcctcccgtactctcaaaacctctggacgaagaagaacttgggatatacttggctctcacagagcatgttgtgagtgtcgtgctgatgagagaggaaaacaacatacaacacccggtctattacattagtaa

SEQ ID NO: 343930 - DNA, 1555 bp, Cannabis indica
tctccccccaaactaaagatgcagattgtccccaatgtgttaaaataaaattgtggttgagagagacttacctgagccccatcagaaggggtttggtggaggtggctgatcataaggattgaagcggggcggcattgcaaagtagttgggttcttccacaccgacattcattcttgtgattagcgtgttcaactgttgcacctgctgttcatcaaaaacgctcctttgggccatgtaattctgaatgtgcatgttctgctgaataagataattcagctgatcatgcgtgtactgcatggctgggtcgagaggcccagcaatacgtggcggtacaatattttcatgctcctctcggtcttccgcaggaggatttctctgagctggcggttgaccatgggggtgtggtggtttaaatcgaatcaccgtggccatggagatactgcgttgtggcggtgcctttgtaccataggagtattgtggtactccatgtgcctcacacaaggtggttataatatcagcaagcccgagtccacccccacaagatccctcaaccatcatatcaaaactcactctaattatgtcccccacattcaggttgtaacccttcatgatggcataaacaaatttcaacctgtctatctaagcatcagaataatgtttgtttggtaccaacctcgcactaacaaagtatagccatgccttggctaccgggtttagttcacacctaaacagctgataaggttctccatcgattcatgaaacttgaggcctgggtagcccaaagtttcagttatgtcctcataattcagactctttgctcgaatttgttgttttagtggttgttcttctacggtgaaggttggtaagtcatagacagcatgaatagcggctgtgaaaactggcactttcaccccctaactttgaccttgtcatcctctctatctggccaattggcaaagaattctaaagctaaggtttggttgttgcgctcagtgacatccacaaacttactccagcgcctattgactatttgctctctcataagctcaaatacaacaggaatgtttctagtttgtgtaggatcaccaatgtctatgcccctatcttcgatgaagggtctatctttaagttgcaaaaatcgctcttgtgcctcaatattcaaaaatctcgccctatcaacattagagcgacccctaggtgggttagatgaagaagctccccctttctaacttactctagctcttttaggacccattttcaaaaattctaacactcaaaatttaagaaaatttcggcagcacttccccttaaaaattcactttccgggtaacaacccaatcacaaatagcacaattctaaatcacaaacaactcttcacaataatgcaatgaataaaatcccaaaaatcacactaaaatttcaagattctccaaaaaatccaaaattatccactaataattgcatagagagtttaagaaattgttacctcaatgaaaatcccccttcactctgttggaagttattttaccaggaacttagatctactcacaagtat

SEQ ID NO: 343931 - DNA, 665 bp, Cannabis indica
aaactaagcggtctttacacctcttatcgtgactatcgaacggtctacccaatttatcaaaaattctggctgccgcataagaatgagtgaccccagagtcaaaaaatatagagagataagagttgttgaccaagagctgacctataacaactgagggatagcttcagtaacagcccgagaaagagaaaacacccttaccaaagcgggcttttctactgtcttttgctcttctttcttgagttgcgggcagtctccttgtactatccaggcaaaccataatgaaaacatcatcaccctttacactctcccaaatgaggcttcttacagttgggacattccggctaagtgtatcgagttttggaaccaccttgccagttggctcgatcctggttcccttagaacctcttgttcttatttgagccaccaggtgcagatggtgcccttcgcttctggtcaacattcgagtcactaccacccctaccataactagtgctaggaagagtagtggccccaccaacagcctgagttccttaggactcctagatgcactcaaatgcaccctcaactcatagtgccttttcgaccatcttaacataggtgatgttatcatcgattgtgatcatcaggtcgtgtttaattttgggattcaacccatccagatactt

SEQ ID NO: 343932 - DNA, 583 bp, Cannabis indica
aaaatttaatattattggcaatgttaacctactaataaatcttaccattaaatatctgtaggtaaacaattccttcacctacagatatttattagtagataaaatattagtaggtaaaaatcagatttcttgtagtgacattaatactttaatttatcctgatcacatatatgtaagtaacttgaatcttttaacccaacctcaaaagtataaagagtacaagatactaagctgattatcatctaaaagcataaacatgttttgtcaaccaagaatgaaagaacgatagatgcaagataagaactactcaaaattttgtacaaaatggagaaccaaatgaaaagaattaaataatgcaaaaccctaaagatcttttaagggagtcaaactgacttaaatctagggctttagtaaaaatgtcagccaattacttttcagtatcaacatattccaactacaatgtttggttgtcaacaagttccctaataaaatgataccttttatcaatgtgttttttatgagaatgtagaacaagattttttgaaatatttatagcacttgtattttcacatgcagaatgaca

SEQ ID NO: 343933 - DNA, 741 bp, Cannabis indica
atggttttaacaatagttctcttggctttgcttcttagttccttattctgacaatccattacttgtttaaactaacaatggatttcatcacaagtgtcttccaagtcataacaaggtgagttctttgaaaccctcccactacgacaaggtacctgactttctgtctaagaacataagtggtactgtcctcttcggttgtgtcaagacaacagaggcagtggaaccatcttttatagaaaaagatgattaaacacttttggaatcaagaaaacttatctcctctactttgctactttgttttcagacttagtcattttcttagaaaagcagtatttgttgaaacaaacacttttttatcttaatgaccatagaatggtccacccctaatcacttagaatagttatcaaacatgcaaactttagttaacagttttagcttttcttaagatcacgatcaggacatgcatgaatctagtaatggtttacactaagtacacaaccattccatcattctgaaatttttcctatcactaaggtatatccctagaaggacttaggcaactgttagtaactaatcatagacctttcactatcatcaatatgcaaattgaattttttgggagggtaagtttggatactattcgaagttcaacttaatgatctttgaactgcatatctaccaaatatttcaaagatttcaaatttctcaaacatttcaaatttctttgcataaggtaaaatc

SEQ ID NO: 343934 - DNA, 722 bp, Cannabis indica
aaccgggcttccaatgcgaagggcttcccggcaatcgtttggcttctcctctccaccgggctccccacgcgaaggggcctcccagaagcctcctgggccttggaacaagccttctcctgggccttccggtagagatactcctggtacttcttctccatggtggaaataagctcatcccgggaggtcttctccgcggcaggaaccctcacgttcggacagataaccttagaaaggttagagtcctccactgactggttcggcaggattagcttagccttccggcagttctccgtcgtgactaagcccccgacgtcgagatccgcccggtcataagtagaaaagacctgggcccgctgaaggaaaatctgagtaggcgcggtccgctcgtatgggggaatcctgacccactccgtgagaagctccgagtgctccacagctcggaacctggaggagaagaagaagcaatggcgatattccttgatgtgggtttgccgattataagggaccacaccatcatttgaagggtgagcccggaaaccataaaaaccgtctttaagtttgtccccctttttggggacggaaacaagttcataaaagtacaaaatctccgccggactgggagagccccatccccgggcggagtaaaaaataaataagcctgaaagcaggcggtaagcttggggaataagttggtatggcgcaaggccgacaaatacaagaaa

SEQ ID NO: 343935 - DNA, 907 bp, Cannabis indica
gactcgaaagtccatcatcacctaacaagcctcttatctcagacataactgctttcccttttccgagcacgagaggaggtggccgagctggcgaactaggctccctaatgcgaattacatgttcaataggcctgggcggggccagaagtttcttcctcctcttgagcggagtcacctgcgcttcctcagcttcatcttcaggattcaagggctcctgagcatattgcttggcccctgcacctcctttcaacttagcctcgcgcttcaatttaatcagctcattctctaaatgagcttgttcagcccgtccagcatcagatgtcctcttcctccccttcactggcttgggaatgaaatccttcggatagagcccgtacttcacaaagttatcctcgcaggtcaactggatgatattccggtcttcccccggcagctgagcaagctcttgagctctatccctaagagtaagagtgaggggagagcggtgatatgttggaatctgctagaactgagtataggtgatgcccacgccatccaccatgaagtactcatcaacaaaatgtccaatttcgctgatggccttatcccaagtgcccgtcaaccacttgaagtctggttgagagtaatagaagtaccccgacctaccttacttaggagtggactttaaatcaaagaaccagctaacctcgtggggagaaggcatatcccatttctgggaggcataaaggacgaagaggacacacagatacttaatgcccttaggagtgaactgagtcgggcaaaggcagaagaagtccgtcacattcttgaagtacgggtgcagaggcagcaatgccccttgctgggcatgagcacccgaccaagcgcacatccccctttcagggtttgtggctcggttattgtgggc

SEQ ID NO: 343936 - DNA, 821 bp, Cannabis indica
cacataaaaattcgagctttagtgattgagtgcatgccaacccatagcaagttagtcctcaatcatagtgtgtaagactgtgaggaatcaagtgtcagcctcagatcttgattatactctgtgacataaaagaacaagagttagagatctgagcagaatgagtcatttaattccattacaactaatttaaggtttctcatactttatatgtgtttaagattcattgttttagaaattcatatttaggatgttaagaacatacttgttagtaaatctaggtcctggtaaaatataatccaacaaaaaccccaatcgaatatgtatgcttttacaactggtaaagtttgaagcctattgttcatacatcttatacaagggaacctaattctaccatcacaatccttatattttgatgtcatctctaaaaatacatttagaccattccaatattgtagacatctatgatttcgcaatgtggtccaagacttgtcgattgccatctaaagtttaataaaggcatacaagattttattgtttaaagaaaaagtgaatgataaaattttatgatattttaagttaaaatatcttatgggagagaaatgaggtggtgtgtttgaattctaagtgtgatcacctaaaaactataaaaagaagtcttcgatgctcatttgggatgaacaagttttctttcaagaaagtactttgctagaaaaccctgaaaggattgataattcccaaaactattttctagatagttcctttagttcttagagataggggaaataagcttttagataaaggtgtaataccttgttcaagtc

SEQ ID NO: 343937 - DNA, 790 bp, Cannabis indica
ggctactcacttagattttattaatcataaagtgaaaataaaataaaataaataaatatattaatagaaaaataattattgatttatattttatacagattttaaccattacttccaccgacagttttgtgggcctttttttagattttaggttaagaaatgtgttactgttttctttttttagttgactagtaatagtaagtactcattaaattaattattaatattttcttttttctcttctaagaattttgcttttaattagttatatctgtatttaaatgatgaatttagattaaattaaggtcgaaaatgttatgtcaccgacaagaatagaccaaggatttttacttatgaaaatgatagactaaagatttaatctcataaatattcattatttaaataattatatgttagtctattttttttagggatttattagacaaatactgagttattataggcacccattacggaaaaagccaataggaagagtgaatgaataataataatttttataatatattaataaatcgctggaaatagacagttctaaacctcctaatcttttaattaaataatgaagaattttttgcggttaaattctctcaacatcattctacttgcacttaattctctaaatttaaattttaacagtaaaattctctaaactactgtactgcttataaatttaagatgttatttattttttacagttaattgctaatatagactgcttatgtgtacactttttatacatgtgttaaatttatattagtacacctaatat

SEQ ID NO: 343938 - DNA, 817 bp, Cannabis indica
aaaagaactaaaggcaatgttggtacaacatagagtatcgctgacaatcgattgttggacatcaatccaaaatatttcttatttgtgcttgactgcacattgggttgatgataactagaaaatgcaaaagaggattatcaactttcttaaggttcctagccataaaggggaccttgtggaaaaagagttgataaattgtcttgatgagtggggtatctccaaagtatttgcagtgacagttgacaatgcttcttcaaatgatgttgcactaagaaaatttaagggcaacttgtttgaaaaggataatacagttccactaaatggtaaaatatttcatatgaggtgttcggctcatatcttgaatttgatagtaagtgatggtttgaaaagttgaatgaagcaatttcaagtattcgaaatgcggtgagatatgtgaggtcatctctagctagactaaaatggtttaaagaaagttgtatggatgtaaatattgaatcaaaagtcttgttatgcttagatgttgttactagatggaactccacctacatgatgttagaagctgctataaaattcaagaaaaattttgacaatttagaaggagatgcaaactacacaaggtactttgatgaagaaagaatggctggtccgccaagtaatctggattgggaaaaagcaggagtatttgtcagttttttgaagagactctatgatcttactaatcggtttagtgggtcattatatgtcacatccaatctattccttccaaatattttgaaagtacaggctgatttgattactatggcttctagtcctgata

SEQ ID NO: 343939 - DNA, 759 bp, Cannabis indica
aattaaaattggtaggaagagtcaagacactgtaaaacaacactaccaaagagcaaaaattcaagacaagagaggtcgttttttgggtcagagtctttcgttgtcgtaaccgcgtcgaacataaattaaataccacgtggcactaattggttattgcggcgtcaaagttaaacagtgtgaagcatagaatgtgttttcacttaaaaagaaaaaaaggccacgtggcactatacatggcagggccattcacttaaaaaggcctgtagggcccagcttcccgattttccagtccgaaatgcagcacttgtaactaacatgattatattgtttccttttaaaaaaaaaacatgtttataatgtaattttttttttatataatcattacataagaaataagaaatgacaagtagtcctctatcacagcagagtagaggaatttattaaaatattcctctataatttatttatgatcattacatcaatttatttatatttttttaatctatttaaataatatatttatagggacacaattttgtcatgttattgtactttcacagaatgtattttgtaatgtacaacaaccgttagatggaaaagttatttgatctaagagctgaagttgatctaaagaaaattagggttaaaaaatattaacgtaccttgagacctaatattattacgtaccctgagactcatctaatgtattcagtacatcacggaatacatttcgtgaaagtataataacgggaaaaaatc

SEQ ID NO: 343940 - DNA, 650 bp, Cannabis indica
aaagaaaatgttcaatcctacctggcagctctccacccgctactttttcttttgggccaaatccaacccaccccaactcaatttttttggaaaaagaaatgaagagttcattaaaaataactgtcagtaatcaaagtctacattttagatgaggccacctaattatagcataatcaaggaaaagtgccaatttgacaagttcataagcaatggaatgggatgacatattacaaaggaaatttgaatatttatgcattcattcagtcaaaattggtcccctaaacctaagttattcaatattagtagaataggtaaaatttttctaaaatcctattctacccctctcatttgaacaatcgactctctctcttcctcccgtctctctcttactctcaaacccatttgagcaagaatacccactcgaccgaactcaccatctgagcacaaagatccactcaaccaaacccaccatctgagcacgaagacccactcgacccaacacctttgtctccctcacaacaaatgttttatttattaattaagacactttataagtgtaattaataaatatatttaaatggtgtttttgtttaataattatttataattattaaattaataaaattaacatttaaataattaggataaaa

SEQ ID NO: 343941 - DNA, 722 bp, Cannabis indica
gggcataaaacccaacagacgggggccccgacgcgcttcaagcaaagcatcaagccttttcttcttctcccggaatttagcaagagcctcttcaggcttgggatagtaatcgagtttaatactttggccatttgactgccaggccatatagacgccgtcgtcaaagcgcttggcgcaatgcttgcaggagacgggggtcaggagctcatctctcttagccttcttcaaggcctggtctgtgaactccctcagctccttcagctccacggtcaagttggccttagactgcaagtctgcctggtgcaactcctctagggacttcaccttggcagccaattcatccatggcttccctggctcccgaagctcgcgtcgggccatagccacggccttgccctccgccttgagcacctcctggtgcctcgcctccacttcagcctccctctgcttggcctcctctcgaagctttgcctccgcaagggcctccctccgttgagcctcctcctggaaagcccgcctttcaacagacaagtcccgaaggatcctcatggcctcgtctatgccccgaattcagacatgatgaagccatggtcgattaaagtcttggagaggcggccggtctcagcagtaatctgaaaaaagatacatgagatcagatgccttagacaaagtatcaagggatggaataaattacgaagtactcaccgcggccatggcagaact

SEQ ID NO: 343942 - DNA, 1401 bp, Cannabis indica
tagttaggcccttttaagaatttattttagaagaattagaactaaatatgaagggatagtgttgcttagacgatcaagtcatctcaatagaaacaatcaagaaggaggagcttcaacacctacaagaagtttaagaaagagatgaactacgaagctaagttagtcgtgctggaggacaaggataacgagatacactattatggaagaggcatccgtgtaagtacataacaatgcataagctaagttgagaggacgctcgttttcacaagtagtcggtgaaagagaagccaagcttagggaacgactccaacctcaggatgaaaagtcattgacgacattcttatctactctaaaactctggaggaacatgaggaacacctgaggatgactctaaaccggcttaaggagaaccaactatacgccaaattcaagaaatgtgagttctggttagagaaggttacattcctaggccttatagtttccaaagctagagtcacagcggatccttcaaagatcgaaccggtcaagagctactcaacgcctaagactggaagagaagtaagaagcttcttgggtgtagctagttactatagatgcttcgctgaaggattttccaagacaacaattcctctaaccaacttgagtcgaaagacacaaaagtttatcttgtcagacaagtgtgaggatagcttcaaaacacttaaggataaactaataatagccccagtattatgtgttcccaataactaggataagtttgtggtttactgcgatgcatcgaaacaaggactgagatgcatgctgatgcaaaatgacaaagtagtagcgtatgcctcaagaaaacttaaggagtatgaacagaggtacccaacacacgattaggagttggtagtagtagtttttgtgctaaaaatatggaggcgctatctctacgaggagaaatgtgaaatttatactgaccacaagagcctgaagtacttctttacgcaaaaggaactcaacatgaggcagaggcgatggctagagcttgttaagggctatgattgtgaaatccactacaacccggggaaggccaacgtagtagcagacgcgctaagtagacgcagttatgccagcttgggaatattggcacaaatagaaaggccactacaacaagaactccaaagaagtggtatagagatcattactccaaaactagctaacctaaccattgtctcaacgctgctacaagaacttaaagatgcacagattgttgatgagttcttacagaagaaaagagcaggcatgccagagaaggaggcagaggatttctccgaaggtacagacagcatgctaaggtataagggaagagtgtgtgtagccaatgacatagagcttaaaagaaagatcatgatggaagca

SEQ ID NO: 343943 - DNA, 521 bp, Cannabis indica
tgcttcttcatcattatcatcattcaaatcctacatgcatggaaaatcatgaacacaacaaagttctctcacttgctgcccagtgaagcatcgtccgtctcttcatgtagacatgcagcagaaaaggcttctataaaagaatcataacgacatattttgatggaggaatctgaattagggtttttgtttatagcatctctgtagctactataaatacctttgttatcccaatttttgcactctgacatggcatcccataatggggacacatggaatcaacttggagtgtctgctcggagggtacagtctgaacaggatgcctcgctggcatactcgacgcaaagcaatcaacaatctgcgcagagcaaccaacacttagcgaattcagctttcgcattgtgagtcatcaacggaatcctataacttgggcatcagattatagagatatggcaatacccacgatcccacgatcagtgtattctgcgtttatcccacgattagtgtattctgcatttatccca

SEQ ID NO: 343944 - DNA, 614 bp, Cannabis indica
cttttgtcgaagtatgccaaaaattctaaattggttctttgtccttgtcttaaatgtgataacatggagtgtatggacattactaggataaatgagcatttatttaggaacagaatagacaagagttataaggtttgggttcaccacggagaaaagaatagagttccgggcgagggaacgtctaagtctgacaaagttaagggtgttaatttggactatgaggatgatcacattccataaatggtaggagatgcacaatttgaattgaatatcgatcctttgaaattttaaagttttgtagagaatgctgataagcctatttaccctaattgtaataggattactaaattatcgacacttattagattatgcaatataaaagccaaacacgggtggaatgataagagttttatggatttactagctttctttagtagagttattaccgaaaagtaatatggtgctttaaacgcagattttcgttaaccagatatgagcctaaacaatgataaacttgcacacaaaaactaaagacagtaaaaaaaagaaaagtatgaacacaaaagaattttttatgtggttttgcagttttgcattgtccacgagtcaatctt

SEQ ID NO: 343945 - DNA, 687 bp, Cannabis indica
tgagaaccaaaagctaatcagttagcgaggattggatgctaataatataaatatgtcttatacatataaataccaagatacttattactattattatttaaaataaatctaaactatttggtgacacactccgaggtaattaaacccggtgctctgataccatttttctgtcacgacccgagccctaggctgtggcagatatgtaatatccataacttgggtggtcaaaggtcacactttgacccttgtaggaagataaagcttataaatgatccttttatttatatcacaaaatactaatttaaaagaaatggattaactcctatattaataagaaaatattagtaacaaaatcaggaccactcatcaatataaaagaacaataatatccccacagttatgtaatcaccaaatagatagatttaataagtcaataaaataccaaaataatacctagcatccatcattcctcatttctaactagtacatagctaatttaagtcatctagaccatccatttcagcttaaatacaaaatcagtttcattagaagattaaagagtagaataagactaaactaataacgacttcctttcccaacggtaccatcctcatccactagcatcaaactgagttcctggaatgggagaaaatagggggtgagcttataaagcccagtaggaaaaca

SEQ ID NO: 343946 - DNA, 721 bp, Cannabis indica
ctctctctctctctctctggtgcctagcactctcttatgtgtcattatagcaattggtccaattaagtgttgagtcctaatcatatattttaatgtaataacttttagagagtatcgctagctaatcgcaaggtgacatgtctagaggtgctaggcactattggtgtccaatagcaatgcttatatttttcacactattttttttatctttatatatacaaaaaaatatatataataagtatacatttttatatttttttctaacactttttcgctctctcacaaaattttatttttatacatttcatatttctttttctcttttttacattttcttcttattcatactcaaactatttcatactatttttatttaattaattgcattttataagaaaaaatcttaattaacttctttaaattttacttttacactttttctcgtaattttctaaaactttctagctatcttagaaaaaaaattaagagcactcctatatatttctctcttttacatgattgataaaagtagtaattttttaaatattttttagtttattcagagttaatttatgaataatttgtatattttaataaggttgatgtcttgttatttagagttatctttttgttattttatagttggtttacgttgttgtataggtattttatagttatttttctgttactgttatatttttttttgtacagttattgttta

SEQ ID NO: 343947 - DNA, 709 bp, Cannabis indica
ctagacccggacccggacccaaactcgaaccaagaccaggattagaactaaggacttagacaaagaactgaatccagactcatatcgggattggcacttgggacttgcaaccaacctcgaccaagacccaggacgcgaacctacaactggagcttgatttgtacctagacagaaatcaagacccgaacccaaaatcagaccaggactcgaactctgacccaaactaaaacccaaactcgaactcagaatcgtaaatggaactagaactgaacaaggactaggaccacgacctaaaccgaaacccgaacacatatcaaaacccagacagagacataaaccccaattgatactagaactcgaacctgaacctagagcgagacccaaacccacacaatacccggggcgtggacccagaatcaggatagggacttgggaaacagaactaggatcgagacctagtacccgaccctgacctgaacttgaaccttggacccagctcgtgacccgacactagaaatggaaccagatgcggacccgagattgggatccgcatctcgaccaaggggttgcaaaaaactcgtagtcggtgtttggatttgggacccagccctggacccgaaccctcatatggacccaaacccacacccggacctgaaccaagtcccaaatcaaaaagtggacccgaagcagtaccctgtgacttaaaatt

SEQ ID NO: 343948 - DNA, 1001 bp, Cannabis indica
aataatgaaggtcttcaactattagagcaatatatatatagggacacgattttgtcttgtgatgtactttcacggaatgtattccgtggtacattagatgagtgtcagggttaccattttttaaccctaattacccctagatcaatctcagcccttagatcaaataactctcatttaacggttgtcgtacatcacggtatacattccgtgaaagtacaatcacgaaacaaaatcatgtacctatatatatattagagttttttcaattaaattatctcaactattattttatttgcacttaattttataaagtcaaattttaatatagtaaaaccttccaaacttttaaactgctagcaaatttaagatttcatttatttttcatagttaactgtcactgtttatgtgtacactttgtacatgtggcacgtttatattagtacacctaatattattattattattataaattataaaaaatattttaaaatttatgatatttttaatttttatatattttattttttatttttataattttatttaggtttgaaataataatattaaatgtaccaacataaacgtctcacgtgtacaagagtgtacacataaacagtccatggtggcagtttactggatgatatcttatatttactaacagtttagtagttttgaaagttttacttacagctaaaatttaagcttgaaggattaagtacaaatgaaacgatagttgagagtttagccactaaaaactctttttctattgggggagggggattcaaacttataattttctcttttgtctttgtgtagagaagtgtagaactactaaactatataaccactattagggttcatttggaacgtcgtattaagtcatattgtatcattcaatgaattgggattatatattatattttttatataatactatgttaaaattttaatttatactaaatattacatacttagatacccataaaaattaataccacata

SEQ ID NO: 343949 - DNA, 998 bp, Cannabis indica
atctgagaggaggacattccgaagacagctttctgtactaggtatggacattatgaatttttggttatgtcgtttggactaaccaatgctcctgcagcattcatggacctgatgaatagagtattcaaggatttcctcgatatctgtgtgattgtgtttatcgacgacatcctcgtgtactctcaatcagaagaggagcatgagttacatctttcaatggtactgcaacggcttcgggaacacaagctttatgccaagttcaagaaatgtgagttttggctatctcaggtgtccttcttagggcacattgttagtaaggatgggatcaaggtggttccaggaaagatagaatccgtcaaggattggcctagaccaaaaacaccaacaaaaattagaagtttcttgggtctagctggttattatcgtccgttcgtagaagggttctctaaaatctcaacacccttaaccgagcttaccaaaaagaattagcggtttttatggtcagataaatgtgaagctagttttcaagagctgaagcagaggttgattacagctccagtgctagctttaccttctgacaaagaaaagttcatggtttattgtgaggcatccagacagggtctggggtgtgtactgatgcaagccgaccgggttatcgcttatgcctcctgtcagttgaaggattatgagcaacgataccaacctcatgacctagaattggccgtagtagtatttgctttgaaaatctggcggcattacctttatggagaaaggtgtgaaatttataccgaccataaaagtctcaaatatttctttactcagaaagatttgaatatgagacagaggcattggttggagttagtaaaggaatgcaattgtgagattctttatcaccccgggaaggccaatgtattggccgatgcccttagccggaaggtgttgggttttatgccctaaataaaaccgtttacaatctgattagtaatcaatataagaaa

SEQ ID NO: 343950 - DNA, 742 bp, Cannabis indica
aattgaccattttacccctagctttagaaatacccaagttataaccttaagggcattttagtcattttatttggtaaaggtttaggtggctgcctaaaggagtgacacctagcaaatgtttcagctgagattaattcttttaatcttccttttccatttagggaaaaatcaagaaagtaggaaaataaggaaaataacattttctcttgaactctctctctttctttccttcggctgaggcaaaccagggcaaggaccaaccttttcatcttgtttttctggaattcaactagggaatcaagcactcttgaagctaaggtaaaaccctagaaccctagagcatgtttttgaagtttttctttagtttgaacttgtgaaattaagtttcaggggctgttagggtttgagttgtttaaggttcaaattttagggttcatttgagttaatttaagttcctagtagctggttttaatgggtgttgttggttttgtgcaactttgaacattgagttcaaagctttgagctttaatggcaaattgattttgattggcttgttctgtgaaatactggctgggttttattgtttatgcattgtataggagctctggaaggtttcatggcaattggtggagagttgagcaacaaatgaaaggttttgggaaacctggtgcaaaccggctagccggtttgcagtgccacaaaaaccggctagccggttttggcagggttccccgggcctttc

SEQ ID NO: 343951 - DNA, 510 bp, Cannabis indica
taatatcaacatatagttttacataaaaatattatattaaaaatataattcaatataatacggtataaatacggcgtaccaaacgaactcttaaaacgatatttaatatcgaatttctcatatgtttcttttaattttaaactaatcagattcttcatattttttttggatacattattataaattatcccaaacatataaagaaagatttaggctacacctatagagatacaaattacgtaccttaaaggtccaaaaacctttttggaagtggaacaggcatgatggaaatatcattagaataggaaactattaattggaaacataaagaatttatttttattgcaaagcttatcttcattgttgttttcatacaaataatcttcattcctatattcccatgttgccaatttagttaattaatattgaataccattccaaattctatataatatatatactagtgggaggcacacgtgctctgcacgtgtattcaacatgattttttat

SEQ ID NO: 343952 - DNA, 445 bp, Cannabis indica
gagaatttaaattttcaattataccttgtttgtgcagttctttgagggcttgttcattgatatgaccaagtctgtggtgtcacaatttcatatttgattctagccctttcaccatacttgcctctccagctggaacagtttctccttggagaacatataaaccattgatcttttctactttcatcattaccaaacaacctttagtgatcctcaggcttccgtgcatggaattgtatccatatcattcatcctcaagcgcacctagggatatgaggttttacctaaagttcgggatgttccttacgtttgtcatcacccatcatactatttgatggaaaccttcccaattccaatgaccctgtaagaatgattattttgttggaaattcttttaccaggatcttagatctactcacaagtatgttgatcaacaccctaaatatgaa

SEQ ID NO: 343953 - DNA, 523 bp, Cannabis indica
gcataagaccacacaaacgatcacgcacagccacagtaatattcttgctaaagaaaacagaggacttagcaaagtttacttgctgaccagaagcaagctcatatctatgcaaaagccgcaacacattctgagcttcattctcattagccttacaaaacacatagctgtcatccgcgaataacatatgagacaccataggagcaccccgagccactcgacatccagtcaaccaatgatgccgctcataatgttttaacaacaacgagagaccctccgcacaaatcaaaaataagtaaggagacaatggatctccttgacgcaaccctctgcttggtgtaataggccccattgaatgacctccatgagtaatattatacgaaaccgtagtcacacagaacataatcaaatgaacccaatgttggtcaaagcccataaggatcaacatgttctcaataaaactccactcgacttggtcataagctttactcatgtcaagtttaatagccataaatccctccttccc

SEQ ID NO: 343954 - DNA, 606 bp, Cannabis indica
cacttcaagattctaccctcctctacactctctgtcagttcagatcttcacccttccaacaaacagtcagcctttgttctcaccagtgaaccagttgcatctgcatcaggctcatcttcttgcactaattgtaataaatctgttgattctgtgtgtactctttggcacaacagaattggccatccttcccaaaaggtagtcaaatctgttttgcattcttgtaacatcacatgtaatccaaccaatccaagtgtatgtaaagcttgctgtttaggcaagattcataaaatcccatttcccaagttctctcacactgaatattctgaaccattgcagcttattgtttctgatttatgggggccttcacacacattgtctcacaatggttataagtattacatgagctttgtagatgcctttagtaggttcacttggatctatttactcaaaaacaaatccgaggcattaaagactttcttgcattttaaaactgaaactgaactgcaattaggaaaaaaattaaagtgtttcaatccgattgggggaagtatagaaattttctgaaccacttaaacaagctggaattgttcataggcacccatgtcc

SEQ ID NO: 343955 - DNA, 729 bp, Cannabis indica
ttattataatattatatttttttatataaacttatcatataagtttataatatatattttatatattagaagtttataacagtaaacgtaagagaacgaagccctcttctcccttcgacgaaaccctctccctcctatatctatcttcttcaatttttaatctaaaatctagcgatctaagctccggtagtagcagaatagcgagctcatagagcgggaaagcttaagggctcaggatcatcgatcgtacttcaagtaggtcggccaacatacctgaaccggaacttgaggtaagaaaagtatattaactgcatagtacgttgtatgtaatgcaattagtattttttgaattgattaatattgagatacagttaatattgttacataatgaaaagattgattggttgagtatcgataatgtgatgatattatgcatgtgatatatgggctcacctgattaggtgatgcaattttcctgacgacgtaccgggcgtaggtacatgcgtcagtgatatgtgatgagtaccgagcgtaggtttgggctcacctgattaggtgatgtgattttcctggcgacgtatcgagcgtaggcacgagcgtcattgatatgaaaatgcctgattatggcatagatcgaaactattgttgggtttctacctggcgacgtatcgggcgtaggtatgggcgtcagtgacatatgataagtaccgggcgtaggtacgagctcgt

SEQ ID NO: 343956 - DNA, 978 bp, Cannabis indica
tcttctactgtttgggtatagtgttaaggttattcttagttggatatggtgtgtattctagggttggatatcctccccctatatagtcttttctgtacacatttatcattaattcaaatacaatgaaagtttccttttaataatagagataaagaaattggttccgtaaagcaaccaagataaaaacttaacacgaaaaaagttaaataaaaaaatcaaaaactgattctttgcattaactaaatcaaaaatccgttcccaaaataattaaattaaaaaccatctccttgaattaattaaatcacaaactggtttctgatataaataattcaataattgttttatgaaatgacttaaataaaaattcagctgcgacataaattaaaatagaatcaatttacaacaaaaatggctaaaaatcaataacacacaataacttggaaactagatataattaaaaaaaaacaagagaaaatgagtttcaaaaatattgatacataaattataacagaattaattccgcaacaaaatgagtaacaaaaataacaaacaataacttagaaatcgattctaattataaaaaaaaaaaaaagaatggttccaacaacactaaggcatgaattaaatagaatcgatttcacaataaaatgagtaaaaacatacaataaacaattaaaaaataatataaatcatacatatcacaaaaactagtacgctttttaagagattcctttcgtgaaaagaatatggaatgtaaggtacaacaaaacaaaacaaacaaaacatggtatttttttgttataaattacagccacaacaaaataaacacatctatattcaaatgtaaggtaccaggttacttacaaaagcaatataaaactctaagattgaactatgaggtgatttttttcaagacacaatatttttttgctataaattgcagcgacaacaaaacaaacacaaccatattcaaaagta

SEQ ID NO: 343957 - DNA, 541 bp, Cannabis indica
atacaccacatactaaaattttttacttttttacttttatactgtgggacagaatttttttcaaaaatactgtgtaagtttcatattgtgtactgtgttaagtttttactgttgttttacggtttttttttagttgtgtatttttgtaaaaaattccgtgtatcaataaaattgtaaattttgacctaaaacctaatatttttgtaaaaatcccttattaaatgtattaaatgggtcagcccaaaaataactcgaatccatttaaggtgaactcaaatctactaacttttatgtaaatttcgagcagggtggctcttaaaatttagtaaattataaaaaaaaattaggctcttatttagataaaaaaatataatatatttcaagattaataaaatatataattaaaaaaaaaaaagaaatttacgggcctcgaaactagtggattgtagacacaggcctaatctacttatttttagagccgaatcttatttgaggaaattatactctataccttttttatattatcctcttttatttttac

SEQ ID NO: 343958 - DNA, 610 bp, Cannabis indica
gcaatatctttttatggaataactcattaatggcataaatatcaaaatatatttgtaacctgctgactcaaaaatcaatgtacgaactggcacttaatgtattaacggaaaccatatgtcgttgaaggagaatcgcgaggcaccaaagaaaagtaacacataccttagcttacaataagcaaactaagtgtaaaagtcagatcggttcgaagaacaaaaatgcgagatgaccatctcggtacgagaaaacttcctatagtttcatccaactaacaggagcgaggctcataaccctggaaagttagaagatttctgtatacctgcgatcaacgtaagacatatcttgtcgacctcgaaaagaagaatggttccagcttgccattgggatcactacaataaagtttttgtggagacatctctagattcaacaattaaagacgtgtttaatacacgatattcttgacctagtaaaagcgagaaaatcacagctttgtaattaactgccactatgcaattataaatagtggcaaacaatctcaaaagagggagttaaaaactcttatgaaagaggcttcagaaaaaagtactcagaaatctgaataagattgac

SEQ ID NO: 343959 - DNA, 678 bp, Cannabis indica
ctgttgaaggagttcaaaactttactgtcctctgctaatctgttgctcattgatgctgaggagaagctcatcaaagacccgaaggtgagaaaatggcttgatgatctcaaggatgccatttatgatgcagacgacttggtttacaagattgacactgaagcatggagaaatgaactggaagatggtggtcctcatgaatctcttggtggctgcacttgtactagtaagctacttctaaaactcatctcatcaattcctttaaattctttcgataaggctataaaacctgagatagaagagacacttgggaaattgaagcttcttctagacaataaagatcttggtttgaaacgtatagaaaaacaagaacatccaaaaagagtatgtgctccttcggtggaagaacctgatgtttatggaagggatgatgataaagaagctattattaagttgctcttgtcggatgacacaagtgccggtgataaattgttagtgatccccatagtggggatgggcggtattggaaagactactcttgctcaacttgtatacaaggacaaaagagttcacgaaacgttcgatactaaattatggattacagtgggagatgaaaaagttgactacatgaaagtgatgaaactaattgtggagaaggtcacttctgaaagatgtgaaatt

SEQ ID NO: 343960 - DNA, 556 bp, Cannabis indica
aaaaattgttcattataaaaaatgagcatatcaattcacctcttttatgtctgacattaggtaattataattttaatattttttatatgcgtataataaatatttataatatttttaaattttttaaatatattataataatttaccatactaaaaataaaatttaaaattgcacacatacaattggcaaaaccagcctttatttctaagggaggtcaaatttaaataattttctttcttgtacaagtgtgaaaatttttgtacatctgtatattaattttctttgttgtaattataataataaatgttagagatattattacaatggaagaaaaatcaagatacattacaactctattgtaaaataatacaaagattagaataagagattgattaaatatatgttacaatacatatatatacactatatatattacatatatatatgaaaggtagaagagaagatagattacacaatattatataacacacatatatataatatgaagaaatatatatactcacttacaactttgagattagtggggatcaccat

SEQ ID NO: 343961 - DNA, 555 bp, Cannabis indica
ctaagtgagcgacatagtctttcacatgttgagattttacgagcatatcgcaacatacatttccattgtcttccctagtaaatctgtaatcatcatgttaaccaatctttggtacgtcgcacttgcattcatcaatccaaaaggcattactttataatagttcaaactttgatcagtgatgaaggagtatgctcctggtctagttcgtacatcggaatttgattgtatctcgagtacgcatccataaaactgaggagttcatgacctgcggtggcatcaacaagctggtcaatgctaggtaaaggaaagttgtccttggacaagctttattcaaatctgtaaagtcgatgcacgtgtgccatgagccattgggctttagtacaagaacaggattagctaaccagtttggataaaatgactcctttatgaagccgcatgccagtaagcgatctacttcctccttaagcacttggtacctcacgggatccatcttatggcgcttctgtcgtactcttcacgcatcgaggttgatgttcaagcgatgacacatgacct

SEQ ID NO: 343962 - DNA, 1088 bp, Cannabis indica
aagcacctctaaaaattattaaatttgcttaaaaatctttgcttgcaatagttatataaaaaaacttccctttcaaataaaaaactttcttttcaaataatataattattttatatacctttttttttcttttgctgcattgtaatatttatatatacgattaattcacataatattttattaaaaatgatttatacttgtgtgtaagaatttcaaaacaataattaaccgtggccaaacaagtttttaaaagagatacgtgcagtgtaaatactttatgtattcggtttcatagactagtattgttagaattattttatgaggatctagatttactaacatgtatgtttcattaacaccctaaatatgaattctctaatacgataaaagtaaatacataagagtttagaaaaccttacattgatggtagtggaataacattactccttccactcaaatctctaacccttgtctctttatgtcacagagtaataataagatttgagcctggatctccttctatcctctaggtttggttaaccaccgtcttctgcactatgattgagtacttgacttgctatgtgtgggcatggtactctatcactatggctcgaattggcgaagaacaatgaataaggtgcaaaatcactatataaaggaggctctcatctactagttatcagagaatgaaaactagatttagttggttgaagtgagttgttggatgagaatgagagcatcgtgttccttttatagtatttcaactatggtttaggatttaattatatggattaaaaaataataaaataatgggcaataatttcactaagtggccagccacactaatgggcctcactagttacaattttgccactttatttcaaccatttaatcctctttcaataatgccatgttttttcaatttcaatcctataaatgtcaaaactaatcattaataatataattaattatcaaataaaatttccatttattttatttattaattagaccatacaaaatctcttaattaacaaataaactccaaaatctctttttttttcacaattaagcccttgctttgtgaaaat

SEQ ID NO: 343963 - DNA, 602 bp, Cannabis indica
taaatatatatttatttcaacaactatttaatgaaaaataataaacaataatgaattaataatttatgtatgtattcaattaaaattaaaacaaagacaaaggtacaaataattttaatagttataaacatattttatatttataattaatttatattttttttttactaacatatatctttattatttataatatcacatgtctattaaaaaaataaaataaacaatttctcaaaataattaaataattagaatattttttacaaaactaaacaaaatatgttttttttcaggaagaattgcggcaaaagtccccaaaaacttagagttgatgcagattagtccccaacctcaaaaattggcggtgatagtccccaaggtcgcattttctgtaagtctgttggtcccttttctaacagatccgttaaactcaaataaaatgccacaggtcaatttttattgatccaaattatattttaatttttttgaaacaattatatttttaatttaaaataattaaaaaaaaactaaacaatttttttttcttttttcttttatcttcttcttcttgtaaatgcccagaaaccaccctaacaagccaa

SEQ ID NO: 343964 - DNA, 866 bp, Cannabis indica
gatacatatcaaaatttagagggtgaaaatcttaattagccttaaaatcaatgattaaaattgatgacacgtagtcatgtattgagtttgatttaagggcgtgttgaagcattgcttattacaaatgattggctcacgctcattttatacactcaactcaatgatatgttgtacaataatcaatatccatatatacacatcaaaataatacaatggggtctcactttattaattgatttttacaactaaaacagtgacaaagtataatcatttaaatgagaaaaatgattaggggtattttatggtattatgtgatatattgttattgatgcaaattaatatcgagtacttacacatattttgatttaataaataatataaaaaactactaatcactcataacacgctatatcaacagggttgaccctgaaaaatatatggcccaagacgaattaaattttggggccctcaaaaatatataaaaaaatatcaaaagaagactgttatgggatttgaactacacacttcttgagaaaacttccgaggaggtcacccatcctaaaattaccccaggtcaagcacgcttaactgtagagttctttcgtgatgggctaccaaaaaacaagatacaccttgttaatataggttgtaccaatcaatccatttaagctctcttcaattgtgtagtctcatacctacacaacctcagaatcatcacatttgaccttctccatgcgatgtgggattgcacagcttaccaggtatttcgccttatggatcacgggactactgactgtcacagaacccatgaccttggacattatgtcatccacctcaaccaactaagctatgaatatttgttgctt

SEQ ID NO: 343965 - DNA, 828 bp, Cannabis indica
aatacttggtgttattattataattattatgcttattaattttcctatatatctgcattaaatttattacaaaaaaggctcattatttgttaatgaaaatctacgttaacagtttggtactttcattaagagcctgcgtgataaaacttagaaaaaatccctcctaactaacaaaaatttgtccatggctgatcataatcaaaacgataatagtcatcctgaagagactacttatcatcttgggaaagaaccaatgggttcacagtggccacccacttcaggaacaacacgttcaagaaggagccaaggtggtaattatcaaaacccagaacgaaggaatgaagaaaccaatcctaatactgattatatacccagaagtgaggacccttatgatcccactagtcatactctagtcatactgatgtgatactgtcaagtagtacagtactatcgaccataatatcagcctatactcggtacgctagtcatactctagtcgtaccgatgtgatactgtcgaatagtacctaagccaacatacatttattgatatctaatataacactaaatatactgatacttctattataatgtaatctaacaggcttaactaacatgtacgctaaacatgtaaacacatatgtatatcattatactaatcttatcttgttaccaaattcaggtgtgccggccaacctgagtggaacaactactcgacaatttacaggcccctagatcacattatttgtaaaattggtaagtgacacgctaaatcaattttcggggacttaaaattgaaactaaaagtttccctatcgatggataacat

SEQ ID NO: 343966 - DNA, 520 bp, Cannabis indica
acaataaaaaaaatttccagcgatggtttcataagaaggtgatatgagactcttaagctttcaaaatcatcatgattacttcttaatcaatctaatataattttgttcatttagatatattatttacacaagcttagatcgttggagaatgctgaagagttgctagctttagcttatgggtcagatcacttagtaacacattacgaaggtgttgtagtgaatggtgttcgttttatggtagttgaacgcgataagaagcgtactagtcaaaatagccgagtctctgtggcgggaacagaaagatttaattattatggaatattggaagatgtaatgatgttaacttttactggtgtgtatttagtgacattgtttcggtgtaaatggtttaataccaatcactaacaaaaaaaaaaaaaaaaaaaaaaaaaacgagtgtgcaatgaactacgtaaggcttgatcccacttcgggtacgtaggcaatctagtttataactaggcccagccacacaaataaa

SEQ ID NO: 343967 - DNA, 1090 bp, Cannabis indica
tgaaacagctggtcctcaagttggggaaacatccacaccactagcaacaatgcactttccacctgtcactccggcggtggtatctgagggaatcatccaactcaccaccgaccaatatactgcgatccaggatcaactgcgtgcactacaggccgaagtggatggacagaacagagcccgacgcccccctcgagcccctactactcgcacagacaacccacaggtaacgaactctagacgtcgtaataatcgtgttcgcagggaacaagaacccatcctgagggtctggacctaaaccagccaacctcgagagaccaatctgcgaggtatcctaaccaggaaacacaggttgatgaagaccctgagcggcgtaatcctcgcagccgaccatcaagagacaatgacgcagaattcgcctcttcatcctcgcatggtcgtacacctagcagatatacaaggtctggttctgtagagacgcatcagggaggacgatatcaagtacataggggcaatttgcgtgataacctcaacgcggttttcagagcgcgctcctgcgccccacgcaacgaggaaacaccccgtgatctccctgtgcgcgatcaaggtgtaaacactcacaataacccgcctatcgcaccggcagcgactactggagtcaatatcccagcaaacctcgctgcagtagtcacgactcctgcagtcgcagcagtccgactcctgtagctggaggaattgaccaaagcatgcttttgcaagctttgaaaatgctcgagcagcagagaaagcccatatacaagctgtgtgggacctctcccttcactacggaagtgcgacaagctcaacttcccaagggatttcgactatccgaatccctgaaatataaaggtacctctaatcccatagattacctaggaaaattcaatactataatggaattggatcaggtaccgcagctcgcaaaatgtcgcattctcgccgcaacgcttgaggaaaacgcccatgattggttcacccaattgcctgaggcctcgatatcgacatgggagacctttgtcgatttatttctcacacactttcaggccacgatgac

SEQ ID NO: 343968 - DNA, 505 bp, Cannabis indica
tgttagggtttgattcttgttcagttcaaattctagggttaattttggttgattttagcttctagtagctgatttggtggtgttatgttgaatttatgcaagtttgagctttgaactaaaagcttttgtctttaatggcaagttgagtttcattgggtatttttgtgattttctggttggaatatgttgtgtatacattgtttaggtactctgaaaagttttgtggcagttggacaagttttgagcaaattggcgagttttcgtggagattggtataaaatctggtttatcgattttaccagtttctgtcaaaccggtataccggttttggcaaggttccccgaaaaatcagttttctcaattctcgtccatttcagtgccctagttgggtgtttccctatttcatgagttagagtaatcccaagagagtataatagaacctagggttgtgggttcgggtttcccattttagtgttttgaccatgtgatttacccagttttatta

SEQ ID NO: 343969 - DNA, 1019 bp, Cannabis indica
agccgatatgtgtcatcgggaacatgaactcgtggtgaaggatgacgtgagatgtgagatgatgtggatatcctatcttgtgcatctctgtattcctgcaaaaaagtactgacatagctctccacacagagattagtgacatgattaggattgaaaatggttctgtttctgttattccaaatggcccaaattaaacgcaaaaaagagcaaagttggtctttttcaaaactttcaaagcctcttaacatgaactctttaatatcacaatatttgtttttaatataaaattgataaaaggaggagtgtttccaaattttacctgccctggaacattcaagaagggagtgagtgttggagtcataatgggagaggcaaagggagcaaaagggggaggtagtggacttacgattgaaaaggttaagattagagggaaggatatgatggaaggctttccaaacaaaatgtttgattttgggtgggatattggaggaccagacagtggtccaccaacgcttgtatgtagcagggtttgaaggaccaggagaggaaagatttgagttggccaagtggtaggcagaattaacggtgaaaacccccgaagggtgatggttccagatgaggctatcattgttgtgaggatcaatgggaacagcaagaatggcattacacatctcctcatcaaagaaacgtctgagctttgaaaggtcccaatgtcggtcttcagtgataaaaaaagaaacattttgggaaggaggtgaaaggccaggttttagtatagctttgccatgagagggaagccaattggattcagaggtattgactaggttaccatccccaattttccaaataaggcctttggtcagaagatcccgaccccaaaggatacttctccaacagaaagaaggagtgtggccagtagccgcgagcaaaaaatcgttgcgtttaaaatatttggccttaaggatctgggcaacaagggagtcagggttggtgagaatgcgccatgcttgcttaggcag

SEQ ID NO: 343970 - DNA, 847 bp, Cannabis indica
acaaaataagccctgatgtcccaatgatcgtacgctctaggcctaaccaccccgacatgtacaatctccatctgctcgctatcacggttgctcaacctaagcattgcccttacctacacatgcaaacaataactgtgagtcgacagacttaataagaaaaacataaacaataacatagcaataactcggattgtaattaggctctcatacacctaaccataaccctatccttgtgtctaacatggtgctgagtctagaacatttgtacgatagtactactgaccataatatgagcctatactcgatacgctagtcgtactctagtcatactaatgtgatactatcaagtagtacagtactatcgaccatgatatcaccctatactcgatacgctagtcgtactctagtcgtaccgatgtgatattgtcaaacacgacttacgccaacatacatttattgatatccaatataatacagaacataatgatatcgctagtataatgtaatctaataggcttaactaacatgcacgctaaacatgtatatacaaatgcatttcattacactaattttaccttgcaaccgagtttaggtgtgtcggccaacctgtgtggactactcgatgaattataggcccctaaatcacattaattgtaaaattggtgagtgacacgctaaatcactttctggacttaaacttgaaattaaaagtttccctgttgataaataacatggaaataccctaaatgtcgtaaaaacgggaagaactagggttcccaaaactgccctaactggtagaccagttgtaacgccctattgctaaggcacgctacagtgctttttcaat

SEQ ID NO: 343971 - DNA, 629 bp, Cannabis indica
atacaaagcaagtgtccagttaattacacaaggattgtattcattgtaaatccgtttgtacattgattcacaataattaaactaaaccctaaacactaataaatgaataacagcttttattcactaaatacaacaacgtatgcgacttctattgctcgagttggctgttcatattctggtgtaagctcgtgggcttaggatatacctaacatttggttaagtctaagatgcctacgttcttaaatagttgcatttacggacatcgtgtaatgagctgatagaacctagatgcatgagtctatattggtttatcgaggttgttgggtcaccgggaccagcttgcattatagagaatcgatctctatgtcttcgcaggagtatagaaaggatacccgcacatatcctggtacattcgagttagatccgttctttggtcccacataatgtgagtcacatgaatgcgtttagactttgatcatattcgcatcatctcgctgactctagctcaggcgaggtttagactcgaggagtctctcatggatatcccagcttttctgggaaaactaaatacacgtgtcctccaaacaggagtctggtctcgagtttttaggtgagagaaatctcactat

SEQ ID NO: 343972 - DNA, 740 bp, Cannabis indica
gtttacacatttctctacaatcagattccttcataatattctctataattaaattattaagaacacttcattctaaacacagtcaccctcattagtgacccctgttgaagtgtcactaaaaagttttagagttactcaatgtgggtcactaaaatatccttttttcttgtagtgaactattgatcactaacactatgggctaacataccaaagaactatacaatcaacccaagttttgataaaccaataaaagataaagtaagctcaaataaaaagtctaacattctcacacttgggctacattcgttttaatgtatgtatattatatatatcaaagtagttttgtttgaaaatgactcatgggttaaacaataaaaaaatatttgtggctactttaaataataagtctttgatagcatctcaatgtatcggtagaatttcaccttcgatattgaactatgataattatattatttttaaatcaacaagagatattcataatcacaaataccaaagtattaaatcgacatggttaataagtctagtagtgtggtaaggaattatgttcaacatatgatcaataaaataacataattttcttatcaattcttaattttactgatattgtgattcttaattaataagctagtaaaattaaccatacacaacttaataaataagtttgtgtccctaacatgcttgaaaaattaagccaacaaaatatcattgtcattaagtaa

SEQ ID NO: 343973 - DNA, 516 bp, Cannabis indica
tctctaaattgtcagtcaggatagagtaagcagtgaatttggaagaattttctctaggggtctgctcggctttgccagaaagctttccctttttcccattgtcttgcctattgttattattagatcttttgtcgcctaatcttgagtttctcagatactaggggtgttggacggatgttccaacagagggagcttgtgattggcccggtttaagctcgacttctactcgctgaatggcctcttcgagcttgatgaaaccatttacacgatcgagtaagtcactcatagaatctactagtctatccctcttgatgtcattccaaagttctccgagaactttgatgccccccagtcttgcagttaatttccctttttcggttaacaatgtaacttttgttgtcagtcatcatgaatctactaatataggctcagagaggctcccctggcctttgcttcacttcgaccaggttctctaagtgcaatgggagttggggagaagaagagaattgtgcatgg

SEQ ID NO: 343974 - DNA, 595 bp, Cannabis indica
agagttcccataccaacgacttttccagctaagctattgccaaaagtgacttccccacactgcataggccgaatgttaatcaaaaagtccttgtcatctgtcatatgtctaggcaaccactatcaaaatactacatttgacatgcatcacttttatcagattaaccagctagacaccttttcttagtccattttagtttcaaacatttatgtttcttttgagatttttccaaattaccaaaatcatttattttaaacatattttgcaacgtgaaacatttaggtctgatatgtccttttctaccacaaaaatgacaagtaggaacaaatctttttacctcagatcttactctttttgtaaatcctgaggattttgagtcagcagaaacagcttccgccacgacaggttttgaagctgttgccgcagacttcaaatttgcaacatcatgaagattcgttggaacactagattttagaaatttcgtgattccaaaactctccataccatttgatccgatgccagcaaaacctctttgacatgcattctgagctttttcaaaaatagaagatccatgattaagcatttgaacattttt

SEQ ID NO: 343975 - DNA, 762 bp, Cannabis indica
attattattcaagtaggcgactcaggcactaaatttagaatctagctagcgtgataggaaatttttcaaggtgcttttagcagtgagacaattaactagaatgtcataagtccaaatccgaatagaaagagaacaaaattcatggtgtcaagattttggacaattaatagtagattcaagaatgagtgcaccaaaattcatgaactagagcatctcatttcttataaagctcataagctgatcagattgaaaagaaaataacaatacttaaaatcatgtaaatctttatagaataataatcttatataaaattataaaattattttaattttttttaaaaggaagaattttattcaaaccactaaaaaaattacacaaaagaagcttcagccgcatctagaagccaagaaggagaatttttaaactaacaccaagataagttatgcttaaaggtcatggaaacaatcaagtgaagaaacttattacaataactagtggggtctcacgtgtttcgcatgtgtggctcttaaaaatatttatgtgtaactattttaaaaaataattagcattttgtgtctaaaatttatgatactaccaaattgtatcttttaaaatgtaaattatgatgataaaattttgtgaactcttctatttacagaaatatagtatttttgttagcttttgtttttttattatttcataattaatgtgttgttgaaaattaattatttttctcataaacattgaccactactaaagtat

SEQ ID NO: 343976 - DNA, 746 bp, Cannabis indica
atgagttgataaatatgaagaaatttgaatatgatttgcttaagtgaacttaattttttagagaaagaattttaaatcttttttccttaagatttattgcattttcaatataaaaaaaattaagaattacataaagattaaatatatatgtatatataaaaagacataatatgataatagttaaagcttaagataaaaacgctaattattcaatatttaaatagtaaaaataagtaaaatctaacataaaagactatgattatgcaaggagatatttttattcttccatttagaatgatcaaaacactaattattctatttaaataaatcctaaatagaagttctatccttcattttgaattaatttttttaaaaaagttttaggcagtgtacatataaattaataggttttttacaatgcaccacactcaaaattgggtgtgccagtggacttttttttttattgatatctgaataattataatcttaatttttttgtatgtgatgtctattttaattatttaagacttgtgtgttgtagttacttataaaatgataatctttaaaagaggtactttatatgataatgtttattctaattatacaaaaagctttctgtatattattataaatgctgaaatagtagagagtgtatcgatttcgtaaagggtgcaccataaaagtttctcttatatattattattgatatgtttataaaatttaaaatttatttattttatttaaaa

SEQ ID NO: 343977 - DNA, 788 bp, Cannabis indica
gaacaagctgaagaaaggcgcgatagatagagttgagtactagagacaagaaggaactattgaaaggaagaaatgaaaaccttctccaattcctcgcagagaaagctatatcaggtcttgtacaattagcaagatacatcaatgctcctattgtactaagatatgatacctctagaccaatgagcttttcatgttcttctctaggtcaaaaatgatctttttccacatcaagtgatctaattaccattgggctacttaattggtgtgatttatccatataaaaccgtctcaaaatcttttcagtgtaagttgactgataaatgaaaattttacattttaaatgttcaatttttaaaccaagataaaattttattttttctaaatatttcagttcaaactctttttttagatattccacagcttctgaaagtaaatttagcaagtaaatttaattatttgcttctttctattttgacattctttgatagatgtaggttcaagatcctcattttcatttataatttctggcgctacattttatgcaaaaatattgttgacaattacttcgagtcggtcccattcttttcctgcattgacataatttattgagatctcattgtttctaatatttttcaggtacctgaatttcttcaagagatttgtttatgtcaacatttttctcgaaatttttagcatcatcattagggccatcttaattattttctcattttcttttttgaggatttttatctttggaattgactggtctaccacgtttcaaacgtgct

SEQ ID NO: 343978 - DNA, 1464 bp, Cannabis indica
tatttcgcctcaaatagcaagcaagcaagttctagaatttttttaaacaactttccacatttcacaattagcatacataaactaattcaattgctaggaatttacttattatgattctatgttcttttaaagcacaaaattgaaattagtcaagagtataatatcaccaagcacacagatttttcgaaataaatgaaatttccaaatcatgctatctatctactttcaaattcactcacattaagcaaattaactaaaaataaagaaccaactaaaaacttaaaattttaaaaataaactaaaaataaaaatttaaatccacccccaaactaaagtgacacattgtccccaatgtgacattaaaaagaaaggaaagggaacttacctaagcgccacatcaggatggcggcagtgggggtggtggttgcaaatttaattgggatacagtccacctcttgtatccatacgacccttgtaccaaatgaagagaactatcctccaatgttgctaatttcgaagctatccataagatgagattcaccttcacagtttatacgcatcagtcttttcatacatcattgaaaagtttgaaatcgttctttggacttccctttcttcttgttggtagttacttctcgattatccttcactaattcaaccttacaacatgtaggaatttcaatcggagtaaatacattaaatttatttcttcatcttgaacccgcaactttaattcccccttttgtacatcaattaaagctcttcccgtagccaagaatggtcttcccaaaatgatgggaatattttcctcttcctctatgtcaagtattaagaaatcaacaaggaagataaacttaacaaccttcaccaaaatatcttcaattataccccgaggatgagtcaaaggacgatctgccatttgtagagtcactgttgtgggcttggcttctcatgatcttagtcttttaaacacaaacatgggcattacgttaatactcgctcccagatcacatagagcttttatttccattgaaccccctattgagcatggaatattaaaactacccggatctttaagcttgtgtggtagtttcttttgtaggattgctctgcactcctcagcaagtgccaccatattaaattcttccaacttccttttcttggatagaatttcattcatgaacttcaggtaagttggcatttgttccaaggcctctataaatggaatgttgatgtgcagtttcttgaatatttcaaggaatttcaaaaacttcttatccagcttattcttgtgaagtctttgtgggtaagggagtttgatatgatgatcaatgctaacaggtggtacaacttctttttgttgcagaacttcagtagtctttttcttgtcttgagttggtgttggtgcctgttgattctggtcctcttcaaccacttgttgctctgcccttggtccctcatatt

SEQ ID NO: 343979 - DNA, 669 bp, Cannabis indica
ctacagtaacagaattacattctgctgctgcagactattacagttaaatttttactgtttttctgtaataattatcgacattagcaaaaacttagtttttcaattggcatcaaagcaggacactaaactcttagtgtggtcctttaacatttttgtgtgtttttatgcaatatgttgttttttgtagaagtaaaatcaatttctagaccaccattgctcaatgattctaattatccttattgaaaagttagaatgagggctttcatcaagtctcaagatgagcttggggatggttctatcaggatggtcttctcatgttgtgacagattctgaaggtaattttaaaataaaatctgaacttgattggtcaattgaagataataaacaatctgcttacaatagcaaagctttacatgctatatttaatggagtaggtgaatgttatattaaacttatattgtcttatgaatctactaaggatgcttggcagatccttcaaactcggtttgcaggaacatctgatgttaagcgttctagatttattatgcttcaaaccaaatttgatgagcttagaatgtatgaaaatgaaacattgactgagttttatgaaaggctatctgatatagttaatgaatattttgctcttggtgaaaagcttgatgattctgt

SEQ ID NO: 343980 - DNA, 828 bp, Cannabis indica
ttttttgcagagtaatgatttatattttttttggttgaatgatggttttaatacaaatcaataatcaaggtatagagtagttagtatgattcatttagtgaaaaaattagttatattgtttctaattttttttatataaacgttcaggttgtaaaagaggatttttttaacttggggttctacaatggtagtcgcttgcaacatatttgaattagaggtacactttaatcattttttaataatggataatgtatatttttttatatgttttttgtgtgtatattttgatggtatcttgtcactgcaaaataccagtaataacaatctgtaaccagttcttttatctctctaacctataattttctttaattaacatcaccagataacaagccaatggcaatatataatatactttcagtataaatgaattgtccaacctcaattttttttgcctaaatgataaaaatgtatgaatatataatttaagcaacgtgttagtttttatattagtgatcaatcatataaaatactaaaaactaaatttagactttaaaaatgaatttaactattcttaaaagcagtgttcacagatgacatgtttttttattcttatagtatttgaaaaatgtagggaaacattggaaagtaaagctacttagtagtttctcaatttgaaagtattgtttttatttttatagtatttggataaatggaagaataatgggtgggctattcaatgtctctttttctctttctctttggctcgaccgcatcatttttgcaagtccttcggttgtgtcctttttgtaagcatcttgcacatttatt

SEQ ID NO: 343981 - DNA, 550 bp, Cannabis indica
aggaagtagtggtggagaaagcaatttacttaccacagacttacagttcctataatttgggtttagtcaaatacactaccttgatctggagatcaagacaatagattaattgaaatgcactacctgttttatgtttgtgcaagtgggagttttttggaattgtacgccctaaataaaacctatttcaatataatctgatttgttatcaatagaagattagaagttatttatgtttacatgtagtttttatgtttatggtttaaagtataaaatttcggttaagtccagttaatatagttattcacaattacagtgatgtcaatacagtggaaggtaattgtgattatatgcttcagaagataatgtcccattactcatcagtgcagtggatttattttgatgtgctagttagtgataaagcttacatacaccttggatacatgttatgttctttccaggacattggcaaagaatgctagtatcggatgtatagagtatacattagactgggaccgatattgatcttagtaaagttattataatcttaccg

SEQ ID NO: 343982 - DNA, 648 bp, Cannabis indica
cgaacattcaaattgttcatccgaatatccgcgagtattcgagacgtgaaacaacgcctatgaattgtgtgcggttatgtcagtttacaggtcctattctatgaatgttacctagtttcacacataacctcattaacacccactagcatacattcctaaaaaagcctttaaaacacccaaacccagaaaataaagcatatattccccaaaagcagaaaacgaaaatgcagtgatttagaaactaacctttagttctgattcctgcgattgctctcgatcacttctgagattgaaaaagttggggaaaaaaagggcagaaaatctgggactggattctttcgaagtgtatgcactggagggaagttaagaataagagggaaaaatgggaaatttgattcgtatcaagcacttaaatacccatatcccttattaattgggattctgacacgtggcagccagaatgcctaaggtcgcccaatctaacggccaactatggccacgcctacacgaaaaccgaagagtttcgtgacgtggcaccctaaagataatgaaaattaatcattacagccgtcatttttcgaaaccctcgatgggacaaccaaaaggtcacctcctcgtgacaacctttcacctgtctctcgagtaata

SEQ ID NO: 343983 - DNA, 470 bp, Cannabis indica
aaatgacataaagggcatgaaatttttctaaaatcttttatgaatcttctataaaaaccggcatggcctaagaatgatctaatttcttttactgtcttaggtggaggaagttttgaaataagatctacttttgctttatcaacttctattccttgagatgaaatcacatgacctaagacaattccctttttaaccatgaaatgacatttttcccaattaagaactaaattcatttctttgcaatgaattaaaacaagagaaatatggtacaaacaatcatcaaaagaatttccaaacacagaaaaatcatccataacacttcaagatttctttcaaccatattagaaaatattgcaatcatacatctttgaaatgttgctggagcattacaaagaccaaaaggcatgcgacgatatgcaaaggctccaaaagggcaagtaaatgtagtctttcttgatcttcaagggcaa

SEQ ID NO: 343984 - DNA, 577 bp, Cannabis indica
gcttccgcctattctcttcctcaaagcgtcgagcatctgccgagacatgtctgcacagaaaaaaaacagtatggtgagaagacagccatcagaaacataaggcatgaaagtcaagaagctcaaaaacaagataaagtaaaatgcaaggtgaccacccgaacaagactcagaagtccatcatcacctgacatcgatcttatctcagacatgacagctttcccttttccgaacacgagaggggatggccgaacaggtgaaacaggctccctaatgcgaatcgcatgttcagcaggcctgggcgtggctgggagtttctttctcctctttagtggagtcaccagctcttccttagcttcatcttcaggattcaagggctcctgagcatattgcttggcccttgcacctcctttcaacttagcttcacgcttcagttcaatcagctcattctccagatgagctggttcggtccggccagcaccagatttcctcttcttccctgccacagacttaggagtaaagtcctcgggatagagcccgtacctcacaaagttatcctcagaggtcaactagataatat

SEQ ID NO: 343985 - DNA, 535 bp, Cannabis indica
ttacaaaactagtgacgccgataccattcacctaacttgattacattatttttgtcatgggacccttaaacatctacagtgatagtgtgactacagccagtgtacatcggcaccactaagtggaaccctattctggtatcagttagtgattttgttacgaaactggtgactctgtgttacgaattttatgtttactacgcaagtatacgcaatcaagtagtatctcacgcaagtgaggtcgaaccacagggaattggattaagtactactaaactatacttatgattctatttggtaaaataataattttgcaatttaaaagtaaataactcagaaaattaaaaagaaaataaacgacgattaatcaagatgagagattagggaggtgaatcctgttgataagttaccaatgttaatacctaattgctatccttatcttaatgtgaatgacagattataaattaacctaactcttttcagatcttttaggttctaaataatatgttctctaattaacttcttaattaaatcaaca

SEQ ID NO: 343986 - DNA, 550 bp, Cannabis indica
gcccttgatagattgggggtggtgcgaaattcgaccgaatttgagtaattattgaaatttttgggatcgggttggtttcagcaagccctaaattcgaatattcggaatatgatttgattttctgttgtcattgatctctattttttgccacaaataataaataaattattataattcaatctttatatataataggggtcttatgcaatccctcacatttacacacctcagcctatttcctttgttttttcttttttttttgttggggtaaccgataaaggttaagataacaacggtaacaaaagttacacagaaggagggggaatttcttccatccaagaaagttcattgtctatcctaaagttgcggctaacatgagaaagagatgcctcaggaaaactagacaataggactttaatatcagaaaagataacccccagttcatttaaatacacagtctggccctccaaagctgagaccaaagaaagtgaatcagaaaaaactttctccacgggaagtcccacatcttgagcccaacgcaatcctacta

SEQ ID NO: 343987 - DNA, 576 bp, Cannabis indica
atcctctagctagagttcggacaagggaaaaaacattgctaaatagggaacctcgtaaggcggggatgaagatgtggatcctcgacttggggacccaagcaacaatgttggaacaggggaagaactagaagagattggaatcgacccaaatatcccgaccaggaagcttaaaattggaaaaggtttgttgctcaaagtaaaattagcattgataaaatttctgagagcaaacctagacatttttgcctggtcgcatgaggatatggttgggattggtccttctagaattttacatgtcctaaatattgatccaaacttcgggccagttgaacaaaagcgaagactgttggacaaggagcgagctctagctctgaaagaagaggtagagaagctacggaacaacaatttcataattgaagctttctacctggcttgggttgctaatcccgtactggtacccaagccgaacaagaaatggagagtttgtatttatttcactgacctcaacaaggcatgccctaaagactatgttccacttccaagaatagatcagcttgtggacgcaactgtagggca

SEQ ID NO: 343988 - DNA, 800 bp, Cannabis indica
agaccgggaccgggacccgggacccgggagctgggacccgatacttagaccttatacctgagaaccgaattgtgacccaaacctagaccaagccaagacccaagacaaggaccagtaccgaacacggaccgggacctgcactcagactgggaccctaacccagacttggatcttggaccctgacttgaatcgaggacctggaccaaggactcacgatccaagacccaaacctagacgcaaacctccacctgacactcgaaccatgaccaaagacatgagctagaacttgactaggatctggattttggcccgtgacccaggacacaagacacgaggcttggacctgacccataatcggtgtgtaaatcagggaatcgaacctggaccaagatccagacccggaccagaacccaaatccgtaccagaactgaaactagactaaacatgaggtgggtgtttggatttgtgaccaagactaggacctgaacccaaacacggacctagacccagataatgactcggacccagacccactcccaaaccttaaatcataccatgtgacccgaaattgaagccgagactaaacctcaaaccctaaacactaaacactaaacccaaaaccctaaatcctaaaccctaacttggacatgggtatagaccaatacccataccgagattggatcccagggcccaagcccagacctagatacagacccgaacctagacccagactgaggacctaaaccaagacctgaacctggtctgggacctagactttgattaggacccagatcaggatc

SEQ ID NO: 343989 - DNA, 693 bp, Cannabis indica
tcaaagtccatgacacaggctcatagtaagtcttctaaaatctgaaatcttcactctgattgcccatcagtctgagggtgaaaagttgtactaaattttagctttgtacccatacctctctgaagacttacctagactttcaatgtaaactttggatctctgtctgaaatagctcattttggagctccatgaagatgaactatcttcctaacatacaactctgcatactaatccattgtataagttgtttttaccggcaaaaaaatgtgctgacttcgtgaaacagtccactatgactcatactgagtcatacattctcgtggttctgggtaaaccttcaatgagcttaatttgggtattgtgagacccgaaatccaagcaccttactttgagctcaagcccgtcatgtttcaaatgctccaaacagttggtcaatttggtggggcaccaacggaagatcctcacctccatattcgctcatttttggaggtgagtgactatttcaagctacaagaaattagtgaagaggctttaaggttgaagttgttcccatttttcttgagggatcaggctagagcatggcctaatactcttcctcccgattcggtgactaattaaaatgacttggctgaaaaattcttgagaaagtatttttttttccaacaagaaatgcaaagtttcgaagtgagatca

SEQ ID NO: 343990 - DNA, 433 bp, Cannabis indica
acacagtaccccatcatcgaaaaactggttttctgcctcctaatggcctcaagaaaattaaggccatatttccaagcacacccgatcaagatactgactccggcaagtcctacaaaaaccagaagcgtccggaaggctcctcaaatgggcaatggagttaagtcagttcgacttacactacgttccccgcatctccataaaaggccaagccttggcagacttcatcactgaatgcaatgaagccgaggcaactgcgaatgcgccgatgccatcgatccccacatggaaagtgtttgtggacggagcctccaatgaaaatggatccggagcgggggtggcaatgatatccccgaccgaactttgactctaggcagcactacggttcggcttctcagcttcaaacaacgaggccgaatatgaggacttgatagca

SEQ ID NO: 343991 - DNA, 725 bp, Cannabis indica
attgctcccttgcaatcatcacatctccacaattggttaaccgctctaaaacttattttacacttaattatatagtttgttgtttaataaacaacctactttgtggtctaacattccccaattacttgaatatatgcccattaaatttcatcccagtttataagctttccccaatctaggcgagtatatctttccatcattgcttaataaggtaatcttttcccagaatttcaatagtctccttatatagcaaatagaccatctagtcaaatataaaagcattttccatcattaccgtatcaccatatgtaatccaggtaatcatccttaccttagtgataccactactctccctgacatttttttatacgttactctaataacgtccccgcttcaagcctcaattggaccccttacacccacaaaataatgactcatatacacgagtacatcacttgagctgcttcctagactgacgactatccccagagaccaatccaagcatttccaatgtgctttactctaactcgcacacttcatgggaaaactccccaaataaaatcactctaggttaagaacacttagcaatggagtttcttcatgatgggctaccaaaacaagatgcttcttgctaatataggtagtcctaagcaatccattcaagtccccaacaacaatgtagtcccacgtgtacattgtaacgccttaatgctaaggcacgctac

SEQ ID NO: 343992 - DNA, 483 bp, Cannabis indica
ggatcatgggcctatataatcaagcttccaataagcagaactagaatttaccaagtaaattctctatcttattaatttctctttgcgccactatagatttggaattacactcttaattatatagaacgctctatatgtaccaagatatagatacgctctgaatatctgttgttataattcaaatagtcaaagatcctctatagatgatctacatcaaacagggacaaatttagctttctatccttcaatatattttatccttaaacacttagctacctataaatgatatttcagtaagctttcaaaattctcatttcataaactttctagtaatatttttcaatcaatgaaacgaaaagggcgcaaactttaattcccgtatgaaaaatcaaactttcaatcctaataatcaatgtatacaacatcaaattttaagttctcaaaatttataaaaataaataataaataaaaacagattttata

SEQ ID NO: 343993 - DNA, 677 bp, Cannabis indica
cttttagttcttgaaattttgacgaaaagatgatgtttgcctgcttgtttgaattgttcttgctgctgtgttttgatgttgatttcagaggttcatttataaattaaaatgttgattcaagcatgttaggattggtgattacttgattttattgagatatgaaattttggctcaaaaactatggttttcaaagagaagtgttgaaatctgttgctgttgttttgttgatgtttgttgtggttaccagaggttaagttatgcatgtttaagtaggtttgggctgaattgattgcatgttggtgttgtttaatcaagtttgagtttggagctcaaagcttgaagctttaatggtgattttggtttgtttgcatgaagctcggtttttatgctttagaattgttccttagggtctaaatagcaggtctggaaggttttgtttgaattggtttggatttgagcaagttatgattttttggttgagttctgcgaggaaccggaattccggttgtgcatccggaattccggatggggttctgaaatttcccagaactggaattccggttgggcaaccggtctgccggttgggtgattttcagaaaccctagattttctcgtttctataatatttggggtattgccatgctttttatcgatagggaaacttttagttcctagtt

SEQ ID NO: 343994 - DNA, 557 bp, Cannabis indica
ttgaccttgcacgcgcccccacgcgccttctctctctttttttttaatttgctggaacgacatgtcgttttcgaaaaacgacatgtcgtttgtggaggacgacttgtcgcagggtcaaaaacgacccgtcgttttgctgctcgaaaaaattccaggtaatgcaaaacgacatgtcgtttggctgacaaagcccaaacgacacgtcgtttttctgctctaaaaaacgacaattttaccccagataaacgacatgtcgtttgcccgacagaggcaaaacgacaagtcgtttttcgtcacccctgtcacccagcaagcttccccatgggtccgcgggtctgcaactcggatcggcgcgacccgttttgtgacccgatcggttggagcattaccggccaccaaaaccgacggcgtttgaggggttttgttccattttcaaccttctatcaatttctatcatccatttcatccatttttcacaaaaaaatataaaacactacccataaaatacaaatccgaaaatgggtttccaccattgataaactcaataaataaacttg

SEQ ID NO: 343995 - DNA, 993 bp, Cannabis indica
gttcgagtcttggtctgagtttgggttcgaatttcggtctaggttcggatagagctctgggtgtgggttcgggtccaggtccgggtctgggttcgagtcccaagttccattctcgatttgagtttgggttcagttctgggtctaggtcctgggttccgatcctagtcttggtttgagttcaggtccgggtttaggtctaggtttgggtctgattctaggtctgtgtctgagttcaggtctcgagtcagggtctcatttttggtttgggtcccggttcgggtttaatcctggttcgtgtccaggttcctatcctagtttgggtttgggtaggtttcgggtctgggttcgggtctggcttcagattctcgcgtctaggtcaagtcctagttcgggttcgagtcccggattcccatttgggtctgggttctggggcctaggtcactagtctaggtcccccatctatgtccggttcctaggtcttggtctaggtccaggtttaggtttgggtcccgagtcttggttcgagtttgggtcccatttcgggttcgggtcgaagtttcgttcccagtcttggtccgtgttcgggttcgggtccgggtccgacttcgggtctcagtcccagtgtgggtctgatttttaagtcccatgtctaagtcttgttgttagttcctgggtgtggtcccagttttttggtgtaggtctgggtcagggtccgggacccggtctgggtccaggtcctggtcttggtttaggtcccaagtcacaggtcccggtccgggtcgaagtcccagtattggttctggtctgaatttgggtttaggtccgagtcttgatatagggtcgggtcccgtgtctcgagtctagggttcagtttttgatctcgctcctagttctggggcccaattttttgtcaaagtcccccatctaggtcccgatccttggtctaggtcttggtcaaggttcaggtttggggcccaagtcccctatctaggt

SEQ ID NO: 343996 - DNA, 582 bp, Cannabis indica
cctaggctttttaggggtttaatggacggagtcctttatccttccttgactgatgtgatttctcgtaaagtagccgtcactagggttattaatcatagagtagtagctgcagaaggggggttacaccgtcagactttaagacatatggtagtttcgatacgccttcttccatgcgatattaaatgcgaggtgactgttcagacaagatttgatacctcctggaggtgcttcttcgtagctttgctctacgggagtatgtgaaacttacatgccttctccgggagtcatgttaaatgccgatccctttgattaaggagacttagttgaattatcccaaagtttaacctcttcagtctacgcgtctcaatccagttggtccacgtattttggacaaaatcaggggcaacatttacccccaagccttgtttggtaaaaaagtaaacaaggcttgcttagatgcctccggttgccttctggcatgtgccttgggcgcgtggggatatattaatgaccatcattactgcagttatttgctttttgcagacaacgattcgttttctgtccatttattgatacggcgca

SEQ ID NO: 343997 - DNA, 814 bp, Cannabis indica
tatttacaaaaatacctccataatgtaaggataatatttaaaccttttatgtgattttaattaccaaaataccacttacaatatcacttccacaatcagacgatggttgcagggtggttgctgcgtggttgcgcggtggttgcatcagacgatagttgctgggtagttactaggtggttggctggaggttgcatcagacgaaggtttcaatcagacgaaagtttctgggtggttagccaaaggttgtgtaaagaccgcatatggttaataccttgaattattaaataattaaggtttatgtatgagattaatcaataattatgaaatgtatattttggaaatatatttaatatcatatatgttattatgctatttaatgtgaattacccaatttctgtgtttgtgttcggaagctgtggacagcggtgttgggccttagagaatcgtatatatatttagactattttgtcgggatgttatagttaagttttgttagtgtcgggaattgattggaatttattgtcttgaccaaaatacccttgaaaaccttttcttaaaattattggtatttatcttaaataaataattctttaattccctttgtccattagttatactcagcccattagttagatatattaataataggttagataattttcttttcttttgctgaaattacctagaaaatactagaactacaccattattctcaatctttctctccttcttcctttctttcgaaccaccaagagaccagcggaagtgtgggtttcttttcagtttaattctgtgaattcagaggaatttgagt

SEQ ID NO: 343998 - DNA, 954 bp, Cannabis indica
gagcacgggctccgggcagcacgatcgtggtaacattctgatcgtctacttccctccttcttcttagatcattccttaggtcatgggtcgcccccatcctttcaaatacagaagcgcctggctgcctcagctattgattttcttggttgacgggtggaatggcaccactgatctggttggaaccaactagtatgacttctcctgatgaattgctagacaaggtctgcccgcctaccgttaggcccatgagtggaactcgtgaccggggattgggcggctgaccgtttgtagtctgggaagtattcatcgctggatcttcgtccgtgtgtatgccatatccctacaatctgatccccaagttatagggatttcgttgatgactcacaatgcaaaagctgaattcgctaagtgttggttgccctgcatggattgctgattgctttgctctgggcatgttagggaggcatcttgctcagactgttccctccgagcagatactccaagtggattccacttgtcaccaatatgcgatgccacgtcaaagtgcaaaaattgggataacagtcgtcaaccagtagcagtcaaaaacaaacaactaaaaccaagattacttcacctggaaccccgagatatgtcaaggattgaccttggatattgaaacaattgtgggagtatgttagggattgaccctgaacatcaaaacccgttttataaaaaccagatactcctggaagatttataaaataaacgattagactgggaaagttcttatgagattaatgattgtaaatcacattgctgatgaagtatttttaacttcagttgtgaataaaataatcatttctttcaaacaagtaattataaagcgtaaaccctttaaaattaattgaggggcatatatgtatgattaaccagaattaatctagaaatatatagtacaatgaaaacccatca

SEQ ID NO: 343999 - DNA, 550 bp, Cannabis indica
gttgacagtaaaaaatgatgtatgtatataattctcttttttgcatctccataattaccttttcataaagaagtttgaagataaaggtattaatctcgaaatcttagttggtagcttataacctcctacaatattttctagatatatagctctgtgataggtgtttaattaaccatcttaaaaaattaaatcttaatggaaaataaaaaaaaaaacaaattgaaatttgaaggaaacatataaaaaaaaggtgagaagagggaaattgaaaaaagctttgataatttggattgagggctttaaagaacaaaacaattgaaggaaacatatagaaaaagagaacagagaggaactaaggaagagagatgtggtctctcttgatgacagctattgagctttttcaaggaattcgcctttcccatttttcacaaaactttgtacaaatctatttgcatatttccttttagaattgattataaatggtcattggaattgattttcatatatctattagcatatttactttttagtcctatatcctttctaggta

SEQ ID NO: 344000 - DNA, 928 bp, Cannabis indica
gatccgagctcctaccccacctcaatcactgcatccagagactaagagaggcaaggagatgctcacccactacatgaatcggtcggtccatgagttgaatgagcatctggctgaagctgacaatgagctttccctggagctgttgatgggaggagtcctgaaggagtttacgtgggtaagccttccttgacagtttcctttaatccttctttacttggctcagattttaactattttttttctctatgtagactggtctgaagatggcttacacttattctcgagctaagtctgctgcctccaagaacattgcaatgtcaaacaccttgagggcggaagttgacttggccaggaaggacgttgatgaagccagggttcaactcggagtcgtccgattggaactgggtgaagtcaacaaaaagcttcttactgcttagaagaaagttgccgagctgaccaaggatttagaggcttctgaccatcttgaggctgccatgacctccttttccaaagaagtgaccgacctccaggaagaaagggaggttcttcgaactgtctttcgcaggttggaagcagagaagaagaagaggaggagtagcttaacgctgaagtaaagaggctcaaagggaaggtgaatgacttagagacagccggtctctagattttctatgccttttggaaggctaatcctcaggcaaattttgattacctgggcgatgccaaagacatgtatcttgagcactgtgcttcccaggcggcctatggagagtccgaggaaaccacctctacttttcgttcagaacattgacatgcccctcacccagacaacagatcctccagctcctactggccaagaacacccagactacttctctttttatctttcttttttttttatatatttgtcctgccataaggccttttttaa

SEQ ID NO: 344001 - DNA, 541 bp, Cannabis indica
aaaaaataatacttaaaataaaagtttatataaataaaataactaacactaaagattatatctgcaaattaataatattaaaaataaaaatttataaaaaataataataattaacactaaagattatatctagtaactaataacactatttagctattattattttcatcatcatcgagaattatttagttcgttcttctttttttgttgtgagtatcacaataatcttcatcagagtcttctaaatgatttgatatgttattttcagaaatagtgtttgtagaggtaaaaatttgcttaatatttatgatatttttgagaagtccaatatgcaagtcagacgagcccatcaataatggatccaacaatattgggcccaataagacagtcagacggactcgccaggccttgaaatagactaacgagtgagccgatgggctacaagccggatcgtcccgcaaccgggtttgagcccggccaataagccaaacgggtgaaatcaagttaatatggaaccagtcaagaagacggttactactcc

SEQ ID NO: 344002 - DNA, 2117 bp, Cannabis indica
tctttattagactctcccctatgatgactacttagagataaatttacgaagtatgaaacgatggtggaagctcataaaataagaataaccttgactctcgcctaccgggacaacgttagattcttattttgatcgagtaaaaggttgctagaatggtgtctgttatacccaaatttcggttatcatttgaagagaggacatgtggcaaattaggaaggatatgaattaatgaatgtaatgataattacatttgaaaatggaatagctcattaatgcggtaataacagaatatgcttacaactcgctgactataacgtcttacgcgagatagaggtatacaaactattgtctcatacgctaacaagaaaccatgcgacaatggatgtgtaaggcaaggcatcaacctcgttacgcatcaagggttgtaagcgagatataattactgttaagacacttagcgtataatacacaatatacaaactaagtataatagtcggacaaactcgagcaactaatagcgaggcgtccctctcgctataggaaggcacattgcttgtattactggtactttcactaatcagcttcagacatctttcaatgagactcgcaatctcgtggatttagttctctcagataaaagctgacattctaatgtcgttggctattgaagttcaccttctcgccaaactcgcagaagcgacaaggcttacattatcaacctcggaaaagatgtgggaaaagctctagtatgttatcaaggttattgatagtgtgttcctatcaagacaacccaaaatgttatgattttcaacatacacgattaccttgaccgagtaaaagcggacccatcacagctatgtgatattcaaatattaatcgcatttattttacgtggaatgtaatcaaaccctacgattttaggggataattgttgtaaagatatcagtcaactatgtaattaactgcctgattatgtaattataaatagaggcaagttagactgaataagggacgaaaaattgataaggaaaaaggccctagaactgtataagaaatctaataagatttcgtggactatgcagaattttaactgcaaaactacgtaaaaaaaccttcgtgttcttatttttcctttactgtttttatttttctgtgcaagtttatcaccatttagtctcaaatctgaataacgaaaatctgcgttaacaatgtccattttagatgagttgacaactctattcaatgaatgatatctttgactcttgcctacggggacactgtatcagtttgttggaaaccttggaaattattgatgtgcttgttttgtattttcacatgtctttgttacttgctaaatgataattttttaattgtgtatgaatttatatggaacctatgttgttttctgttattaattttgtagtataatttcgaatcttcattgttggtctaacttaatatgttgctttaataggacaaatcccaaaggattttcatccattggacaaacataatagtgttagatctcaacatataagtatttataaatgcaacaattagttgtacatccaaagatgacaacttagactagtatttacaatatgaaataatgaaaaagtttataaaataagaatgattttggttctcgcccaccgggacatagttggattcttattttaatcgaaattatcctttatttttcctcttagctttttcatttcgaattcgcttaatagtatatcattggatgaatagtttataaatcatctacttatgatgtcattcaaatttctcttatgaaatttaatggcgtagatgactatattcctgacattcaatctagaaatgatataaatcctcgatcttttagaaatctcctaattatatatgtttattttaggcaaattagacttagagttagattagtagtggtggtccaagagagaataatcactcattgtatatttggtataaatataagtttttgactttaaattttagattctaaatagaaatttttatttcagtttcctagatacattgtacaatacaatatggctttcacaagtttttttaatatccattttctgtcaatggattcaaactgtatgtttatg

SEQ ID NO: 344003 - DNA, 1040 bp, Cannabis indica
actctttttttttttcaatattcctttttgttaaatatttgtaatttaaatccttcctttaatcactttgatcaaaaccaaacacacacacttctcctaattgacaacaagagcttaccattttagaagcatgtcctcaaaaatcaaattccacctttgatctcccaacccaaccatccatccattctcctcacaactaacaataattttttatttttttttaaattatgcaactgtccagaactagtctagacctcgaattcataggtttgatatagttatattttcagttttctgtgtataaataatgattgctccaatgattatttgtcataaatcataatatgaataatgacaaggaatagtcctacactgtaaccttgctttccacctggccatcttcttcttagagcaaagcctattagagcaatttctaatgatgctctctatattttatttaaaatttaattaaaatagctaaaatattaaataaaaagttattttattattcttactctaacatattttctattttaattagtattttagtgtgttttaataatattttataatttaaatttattaaatataaattaacttattggaacgatgaaaaatgtaatagtatttttattaaaaatttaagcataaaataaaaagctcattatatattttttattagagagagttatttttttcatagtatgaccttattttttaaaaattcattcttcattttagttaagaatatatttagagaacatgattagagatacttttgtaattaaacaagaggagtgccaatactaataagtcctattatcgtaaaacattctcttattccaaactctccttatagactgaattgagattatttgtgatattaagacgggagaagaggtgtatggcagttttagctacaaataaatgtattcaatctaataataactgatcgatttaatgataactgactaataaatattaggatatttaattatgatcggatcatattaaatgttatttttgaatatctaattgga

SEQ ID NO: 344004 - DNA, 596 bp, Cannabis indica
aggcagaacttcaaaaattcataactcaaccaaatcaaatccaattaacctcaaaccttccagacctgttctatacaacccctagaacatttctaaagcaacaaaaccgagcttcacacacagaaactcatttcaccattaaaggtcaaagattgagttctaaactcaaaacttgactaaacaacctatcatgcattaaacctagattaaaatcacataaccaagcatttaaaaactgcagaaatcaaaccctaactcatgcaacaactacagccactaaaattccaattttctctttgaaaacctaagcttttacactaaaaactccacaactctaacaacctaaccatcaagcattacaagcagcttaataacatcaattagtcatgcttaaacctctgcaaacaactataaaatcacagcaacaataacaacttaaactatgcatgcaaacatcatcatttcatcaaaattcttcaagaaactaaaagggagagctacaaggatcttaccaacaacttgaggtcaaaatctatgctaaaaccagcttgaaatccaagagaaatcccccccaaacccagctgctcaaaaccgaa

SEQ ID NO: 344005 - DNA, 590 bp, Cannabis indica
aaaagaaaggttggctaaccttccctctactagaggctggtggacctatgttgggaatagggccggccaggggtggtctgagaagactcctttggttggccagttcattgtctccttgtcctgcttaagtatttggaatcctcgtcaagttgtacattgtgcattgtgacttggccttcttgttaacaagctatactcgacatggcataaattttgcctatgtagacatgccacattatgttggcaaaaataaggataacggaagagtaaaatagtaatttgacaaaaactaattacgagccgacatatggagggataataactagaattgattatatcaatggacatgcagtaaaactaaataaaaaaaattctaaaaaaactaacagttcaactccatatttatagtggagtatcatgaatttaataaacaagattatttagttgatgagattgattaaataatctagtttactcgaggatagaattgtaggtccataatccctggattgccaccttgaaacactatcaagggtagagatagaagttgtatatggaagttcgaaaaaaaaatctattttgaattgtta

SEQ ID NO: 344006 - DNA, 1486 bp, Cannabis indica
atacttgtttggaccatctaatcaagaagaggaaaaagttaaaaaaattaagactaaaatgtgtaaatctttaacatgcatcaatctcttattttttttaattatttttttcttgactaaaatttgattgagatgtttaatttgaaccaatttataaaatagattacaaaaatactattgtccctattttgtaatcttgacttaatgcatgcatgcatgtgggtacgttgcaagaaacttatttaatataaataaacaatgactcattgccatttgattatattatcattgtttagaattatgggataaactataattaaactcttatcaagctatacatcattattttttcactaaaaaatatattacattttttattttctcttccttttttcattttctaaaaaaaaaattcttcggcaaaatactctcaaatatcatttcactttatacttcagactcaaaatttgtagtaaaatcttcctaaatacatttcaaataaaactttggtacaattaaaagaatgacactatctgaaaaaatatatttcaaaaaatttatcttgtctcgaaggagtcttttatctatcataagagcatctccaatgataaattttttgaggatattctagaaatttgcatggatgctatgttgtggcattgatgctattttttttcttttaataaaaaattgaagctaaaaaattattgtagctaaaaattgtgagatcataattatagtatttttaaagagtgctatacattagagtatttttaaaagtaagtgagtcaaaaatgatatggaagaaaaataaaataaaatattatatttttagatgatgtataattggagatgctctaaggtgatgtttgctttggtgtaatagaaatgtaatggtaatagtaatagtaatataatggaataggaatcctaatagtaattaattacaatgtttgatttgttgttggaatgagtattgtaattaaaattattctgtttagtttggtatgtgaatgtaatagaataaaatatatattgactgaaatatttctattatttttattttttataattataaaattattaaataaaaggtaaaatagactttttaatttcttttattatatttttattataatattatattgattttgtaatgatgaccattacaatgatttttggactattacttaatacaatgtaatggattacaaaatgtattatctctgcgagtgcacatagacacggagctaaatcgtctgtccttttactgtcgcaattattgtctctccactcaaattttgacacctcacctaaaagtaaaatgacaacaatgcatttaacgtgttagtttctcttgctaaattacactactcccttctgttcacaattttgtccattctttatttctgttttttttgcttttgtttctctttagaaaaaaaggacagaagatttggctcctatataaaataaaattaaaaaa

SEQ ID NO: 344007 - DNA, 581 bp, Cannabis indica
ccttcatatttctttcaaatggatacatccatctcgcccacaccggcccacacagccttgcttctctcactagatgaaccattaaatggatcatgatgtcgaaaaaagatggcggaaaaaacttttccaggttgcacaatgttttgactacatgttcatgtaatgcatctaacttatccaattctaattccttcccgcacagcctattaaagaaaatgcaaacatgtgtcaaacactctcgaacattttttggcaagactgatctaatggcaattggaagtagatgttgcattaacgcatgacaatcatgtgatttcagacccattagtttcaattcagtctcattcaccaagtttttgatgttagacgagtaaccatcgggtactttcatatttgcaagtgatttgcaaactgtttgtttctcttttttggacaaagtgaaacaagcaggaggcaaatataaacgttcacctttcttctcaggtgccagagattgtcgtatacccatttcaacgagatctaaacgactatttagaccgtccttagttttgccgggaatatcaagtaaggtaccaataata

SEQ ID NO: 344008 - DNA, 710 bp, Cannabis indica
aaaactaaaatattaaataaaactaagcacgtaacaatcacctagtaaaaataattatatattaataaaatatatataatttataaaattatttatataaaattattaattttattataaatttaatacatatataaatattatattcacttaaaaatatttttattattatgtaattttaaagattgtttattgttattgttgttaagttgatatatttttgtgttttaattttttctcttatataactctatttagttattatttaaaatataacttttcaattaaaatataatttatttagttttaagtattgttatattattgtatttgtaaactgctatcgttgtttcaaaaaaaaacaaaaaaaattgctatcggtgagtttatatttttagtagaaaaaaaatccacttcgggatgataatgtgacattattgggcgttagacaaacatatagaacaagaatgttgtaggacctatcaaaagtttcttaccgataggggattttttttaccattaattttaaatcttgtagttattatgatgtaaggtgtatactcttattacggaactgtttgtttacaattaaaataatttttacatattataataatatttaatgatatattaatttaaaaaaaataaaatgatattaataattaaaaaatttattaattttaatttttattatttaaagttaatttgaa

SEQ ID NO: 344009 - DNA, 1264 bp, Cannabis indica
tcctattaaagaatgtaatttttagtttctaaacaaactattaatctcatagataacgctgaagcagtcaattatcccaatctccctattgtatgtaatcaaggcgaagtgctcaataattaactctttcacctaaagcagtaaattcacgaagcatgtaattcatttaacttagataaagctttgagaactatagagatagactaatctaggcaataaatcaatgaagcatatatttcatttaacctaaattttattcttcatcacaaataaaaattgcaatttgtcacaaacacttagaatcctagactattaggtgaatagtaatcctaagataaagatagattaaagtaaaatataatttagtagttatctaaacaagattaaaataataatcatgacattgaacatagaagaacagaagcaatttaatacgatagaaacaagaaattaacactcaataaagaaactaagaattcatgtctcggattttgaaataaactaaaagaaaactactcagaactagacattataatgtatatgataatatttaataagagtagaaggggaagaaaagaactagaatgaagaacacttcgaagtcgctctccgtctcttccttgctttctctctgagtttctctctgaggtcctattcatagtgcttcaaaaatagatgaatccttttagaattaagattctatttataatagtattaggaaatatctcactaaaagaaaagataactcattttttaaacaaaatataagaaaatcacaacccttcttgaaaatctatctttctttttcgccatccttttttcagaaatttcctactgcaatgactgatagtattttggccataactctctcgatattactcaaaattagacgattcaagatgttctggaaagctaagaatgagatctaaatctttcatgttgagctgcaagtacagttctgcatctacggtcgtcagaatttgtaattaagttcctcgttaaatcgagctcgctggcttccactatttttcaccaaaatgtgctgaaatccctctgaaagactctaaatgcataaatagtctttaaaatagcctaaaaaattaaaatcacactaatcatcaataatttaaagaatcaatttaagaatattaatatgcaaattaatcatatttataagataaatatggactcatcaaattctctcacacttactcttgctcgtcctcgagtaagttaatgataaaatgaatgatgcttaaaaaaa

SEQ ID NO: 344010 - DNA, 647 bp, Cannabis indica
acctaaggaatgatctaaacagaagaaggggaacaaacgagcagaatactacaacgatcgtgcagcccgaagcccatactccaatccccgctcagaaagacactaacgtaatccaagtcgaccagaatgccgagcaagtcagcccagccgtacaggcccagcttgatgagttgaagaatatgtttcatggcatggccggacaccgtaataatgatcttgagttagaccgtgctcgcggaactcccttctcaccagagatcaatctcctgacactgcctcacaagttcaaaatgccaacgtggaagatgtatactgggagagaagatcctctttcccatctcaagtattttgagatgcaaatggatttacaaggagtacaaggggacgtatgctgcagaatcttccccgccactctgtcggaggccgcacagtaatggtatttcaagttggctcctggaaagtttagttcatggaaaacctttttttttcggaattccatgcacaattctcttcctcacgtcagctcccattgcttctgggagatttggtcgaagtcaagcaacgaccaggcgagccactccgggcatacatcagcagattcatgatggaagcgaccaaagtcttgagggtaaccgaggatggaaagt

SEQ ID NO: 344011 - DNA, 603 bp, Cannabis indica
atttactaacaattatgtttttaacatcctaatataaatttctaaaactaagaaaataaacacataaaaggtatgagaaaccttacagtggtggcagcagaattaaatgactcattccactgagatttctaacccttgtatccattatgtagcagagtatccccaagatctgagcccgattctccttcttgttgtttggattcttcagagtcttacatactatgattgaggactcacttgctgtgtgtgggcatgcactcaatcactaatggctgaatattggtttgtgaagaatagctatggatttcgaaattaagagaagtaaggaagaggtctcataaacatagagagaaaactaggtttttagctttggaggcattcgttggataatgagaccataaccttcctttcacactaattttcaatagggttagggttgaattattaagaataaaaaattgacaaaatgagagtaaaataggaacctaattgtcggccatatgatgggccctacattagtttgatttttgccatttttctcaataatttttttctatttttcacaagtaccactttttgaaacttcaaccctataaatgccaa

SEQ ID NO: 344012 - DNA, 513 bp, Cannabis indica
gactaggaccctgaccaggacccagacccagagctagaaccgaacacagacctagcctcagacaaaaattgagactggaactctagcccggacacggtcgtgtacccagaccggaaatgagactcgtacctagacctaaatcttggacccgatcccaagcacagacttgaacctcgatagggatccggatacaaacctagactcaaaccaagacccagactgggatcgaaatgctggacctaaatctggacaaagatcctgacccagacccaaacttggacccgcactcgggacccaaaatttgacctagacctgaacctagacctggatcagtatctagacctggaaacaaacccggacacaaactcgcacccgaacataaacacccacatctagaatacgacccaaagctagacccggacctggacttcaactcgaacccagaccaggatcagaaccaaggacttagaccctgaactaaagacagactcagatcgggattggaacttggga

SEQ ID NO: 344013 - DNA, 680 bp, Cannabis indica
taaatgtcccatctgagttcagaagttcacccccccccccaaactcataacaccatggtgcaccaaccatttttcttctccatacgttcccaaagacttcaaacctcaattggaaccaaaaacaacgaattccaaggctgaggagctttcgaccaatccaagccaagggaaccgcgtagatcgttatggacgatcttagaggtcctcctcaggctaacaaggaatcctggaggaaagttggcatggttttggatgaatcttggagggaagttggcgtggtttctatcagaaaatccaacgaacccaagacccaaacctgcaccagaagacctttgtgccaacctctctctagtatcgaggaatttcctaaggctgggaataaggtcttggctgcaggaaatgggatcttttgatgaggggaatgaggtctatacagaggttgagaccttctacatgtagatggtctttctcgagctacgtgtagccagtctttctctaagctatgtgtagacagtctttctccaagctatatgaagacggtctttctcgattttaccgacccccccttacattctttgtttaggaagatgacttaatggttttcccctagtggcatttgtgtaattacaagtttatagcccaacttgggtttttcttatcttaaatgccttgtactcttt

SEQ ID NO: 344014 - DNA, 766 bp, Cannabis indica
aaccccatttcttttgtttggaaacttcaagcaagaatggaatatcgacataacagccttttaagtcatataaagttggtcgacctaacttgacgttaaaggttgatggaatttccaataccagaaatgggtgccattatagtttatgctcgtcagagcttgcccaacagtgaggggtagcgaatttgccctagagatgtgactccttagccagagaaaccacatactggcaaaagatagggggttagatctttgagttggagccccatcttttcatatgttgtcttgaataagatgttggaagaggctccattatctatcatggttctggccacaatcttgttggctatctggacttccacgaccaacagatcgttgtgcgagaatctgatcttgacagcatcttcgtcattaaatgttatggtgggttcccctgctcgtgggatcttcgtcttcctctcttctacggccaggactacttcttcttgctcatgctgtactgttcgggcatacctctcccgggctttgcctgaatctccagctatgtgcgggcttccaataacgacttgcaaatgtccatctactggtggtggtagcaagtcttggttgttatcgccctctgattctgatcggcctttacatacttctgtacgtgcagattatttttccttatcaggaattcaatttctcgcttcagattgttgcattcattggtgtcatggccgtagtccccatgaaatcaacaaaacttggtcatgtctctctt

SEQ ID NO: 344015 - DNA, 598 bp, Cannabis indica
acataacagtttagaaaccttacattgatggcagcagaataatatgactttcgctcatatttctaacccttattccttcctgtcacagagtaataacaagatctgagcttggatctccttctctcctccgtcttccgcactgtaattgagtacttgacttgctatgtataggcatggtactctatcactaaggcttgaagattgatgaagaacaacaaaagggcaaaatcactatgaaaggagtctctcatctactagttgtctgacagagttagaaactaggcttagtttggttgaggtatgttagatgagaatgatagcatcatgttccttttatagtatttctagggtttaggatttaattatatggatttaaaaaagaataaaataatagacaaaaatcaagtctagtggtcggctacttaatgggcctcactagttacaattttgccactttatttcaaccatttattctttcttccaataatgccatattttctaatttcaatcctataaatgtcaaaactagttactttataattataattaattatcaaataacattgtcatttatctcatttattaattagacttaaca

SEQ ID NO: 344016 - DNA, 92 bp, Cannabis indica
agagagagagagagtgggcggccaaggtagagagagaaggctcaggtttttctgaatgaaaagtgtgaaagttaagtgtaaatttcctgaag

SEQ ID NO: 344017 - DNA, 1296 bp, Cannabis indica
ttaagagtaggagcggacttcaagaaagtcatttctacgatcacagcaaaaaatgaggaataatactaataggggtgaaattctaacaccctagttatgtatgcgataaactacctgatgatggtcgagaagtttgcttggaaagacgtttatcaattcgctcttgttgcttttcagaaggttccttatacaccggctctctccagagacttgcattctcagggatcattttgtgttctcgcagcttggcagtcgtacacaataatctccagtcgcgatcttgtacaggaaggcttccgagaacttcatctgtctctctgcgagtcgcgtcgagtacagggcgagctagtctatctgcgaaaacaaaaagagcgagttagcttaatatctcaaagtaactcaaaaaatgactaagtcaggaagcatgcgacatactaggtcgacggtaaaagtcagtcctaatcctcgggactttgaatatgtaaaaccacttcgatttccaatctcccatattggaaaccatgccttctaccccgttaatctcagaagtggcccacttgctgaagcagtagaaaccattgtgaaggcctacgctttttatatcatagaagtagctaaacgcttctaccgtggcagccctatgtacgtactccatatacatcgcataaaaagcaagggctgtgcgataattgttgggggttagttggaaaggagacacatcgtaacgtttgaggatggccgcaataaagggatgaaaagggaccgataccccacatcgaagaatgggtattgagactaccacatcctctgtgggaataatcgctggattagtaaaggaaaggtgcgccctctaggtaggtttaggtcgcaaagaagcaagtcgcaacaagtttagtcttgtaaaggtagtgaggtccgatttggtgaccctcgagaccaagtcctcgcatgagaagggctcgttcagttgagtgttgtccagcaaatcagtcccgctcccttctacctcctcttcttcctcgcctgactctcgagctggagccgcccaatcgtcatccatctcctcgacctcaacgccaggggcatgcctggagtggatgagataatcgtgtgctgacaccgtagactcgctgtcttgaatctcaatggcccctggttcagcgagctccagcaccattctctcgatgtcttcggaacacatcggacctaattctatacctacagtaggtgcaatctcctcttctgagatcgaagtcgggataaagctatcttccctctggtcctcgtcaccgtcaa

SEQ ID NO: 344018 - DNA, 612 bp, Cannabis indica
aatattaatttttaattaattaagaaaaatgtatcaatatatcaatctctactaatatatacaaaacatatacgtgtttttttttcgtaacttaaaatatatacgtatttgattttttaatttttcatatcttaaaggagaagtatgaagcagtgatgtggcactctaaaatcactttaatctcactatctcttctctcattaattttctctttttcttaattttttattcagttaataaatattaattattaattaatcaagaaaaatctatcaatatattttaattttttttatctaatctctctaccttgtccgatgaactactactacataacatacaggcacagtccatttagatcttttgatgtccccctcattgagagtacaatatttaataccaatataaatcaaaataacaattataatattacccataaattctaacttgagttagtcgaaagaccgatacccaagtccccttgagttataaccggcacttggacaggtatcatacactcttctcctttaacatcaatctgttggaatatgttttaccaggatgtagatttactaccatgtatgttatttaacatcctgaatatgaatttct

SEQ ID NO: 344019 - DNA, 625 bp, Cannabis indica
agaatccgtcgtgaacttcatatagaagcactgcagcttcattttgtgtgacgcatctgagtaatggcattgagaatcctcttctatacatgatcccgtctacaatgatgtaccgtgctacctttcttcccattttccaagcttcatttcggttatttcggagttccctagagttgaaataggctgctattggcgtcatccagttaggagatgtatcgatcattttgatttcttccgtgccggcgttgctaggctcttcaagaaactgtatcgcgaccaggttcaccttgtcacttatatggttgctcgccaatcgggctagcgcatctgctgttgtgttttcttctcttggaattttccttaggctatagcttttgaattgtgctagcaaatcatttattttgctcagatatgctatcattttttctccctaagcctcgtattcgctagatacatgatttaccactagcgttagtaactgcagatctcgatgtgttcggctttcatctccttcactagtttgagtccagcgattagggcttcgtattcagcctcgttgttggaggctttgaatccgaatttgaccgctgcctgcaggtgttgttgttgggttttattccctaaa

SEQ ID NO: 344020 - DNA, 596 bp, Cannabis indica
ttctctccttcgggtttgattaccaccgtcttactcactatgattgagtacttgacttgctatgtgtgggcatagcactcactcactataggccgaaataggaagaacaatgaaggaggtgaaaacactaaggaagaaactctctcatcaactagttgtctcacatagaaactaggtttgatttggttgaaggcatcaagttgacaaagtgtcaagtggatgagatgagagcatcatgttccttttatagtgtttaaactagggcttaaggttgaattatatggattaaaaaagaataaaatattgggcaaaaaatacttcttggccgtacaattaaggtggaccaatttctagttacaattttgtaacttttttcaaccacttattcttcctttcaataaagccatattttctaatgcaatccttataaatgccaaaactatttatttaataaatataattaataactaaataaaattgtcatttatgtaatttattaattaaaccatacaaagtctcttaattaacaaattgaccccaaaacctctttcttcacattaagcccttgcttagtgaaaattcttaaataacacata

SEQ ID NO: 344021 - DNA, 774 bp, Cannabis indica
taaacaactgctaatttccaaattaactaagcgggctttacagttactggggatagaattgagatatccaccttttgaaaaacttgccctatgcctaatacatgcatctcaaaaattaaggccctacttcaaggcacatccgataaagttattaactcatcaacccctgagacaaggtttttcaaaaccagatgcttctagaagattgataaaatggtctattgagctggggcagttcgacataacttatcacccaaagacatccttcaagggccaagctttagcagatttcctgatagaatggataattctagatgaaaatccacttatccagcgagacgcagacacttggaagttgtacgtcgatggagcatctagtgaacatggctcgggtgcagggatgatactagtcttgccagaaatctttaagtttcactatgccttaagatttcaattttacacttcaaaaaacgaggctgaatatgaatccttgatagctagtttgaaattagctgaagtgttaaaagtcaagaatttgttgtgttatagtgaatcgcagttaattgtgaatcaagttctaggggaatacacgacaaagagtttaaaaatggcaaaatacttggagaaggtttggaagaacgtagagaagtttgattattttaaaatcgaacaaattccaagagaacaaaactctaatgctgacgccttggcaaaactggcctcgcagaacgaacttgatgcattgaatttggtactagtggaagtgttagacga

SEQ ID NO: 344022 - DNA, 512 bp, Cannabis indica
cattcttcaacaggcacgcggtctgagccctaaacttctcccactgcttgggatatatataaatattaaaatatatatatctaaaaatagagaaatagatatgagatagattctatatagagtaagaatagagttagtaaaaaaataatgtagatgataaaatattaaaaaatgggggtttaatggggttgtagatgccttaattaataaggaaatttacatatataaagtactaattttgataaaaaaaaaattacatttttacatttagaagttttttttttttttcaatttttatgatattctataaaaataacattaaaataatataaaaaataatacataaaaaacaagaaactaataacaaaataacaagagaacaactaaaaatacatcaaaagataatattttatgtaaataaatcttgaaaattataaaaatatttaaaattctatacaatcgtatttttataatttttttttttagttatttttgtgtatttttaaaataat

SEQ ID NO: 344023 - DNA, 513 bp, Cannabis indica
gcagaagcagagtattcggaatctgtcactaactcatcagccgtaccctagaaatattgtaaacctcgttctagcactgatcggagatcggatattggacgacgggacaggaggagtaactatctgataaacaattacttgactcacaacaggtactgtccttactgatttgagtccgcgaatgagggattacatacagagagaggacgggaaacttttctggttgtttgagttttctcaactgattttctaattttgtacagagttctagattggcattctacagggatatgatttagccattatcccattcttttttgttgtttttttttaatagtaattaggtttgtcatgattagtttaataatctggatggttgcgagatttgctctcaatctttttccattcgaaacataaggaccagggccaaagaaagtttcataattttctgattttggttcaatgagaaatattccatttctttcaagtgaataaaaaaaaaaaaaaacgtaa

SEQ ID NO: 344024 - DNA, 890 bp, Cannabis indica
  modified_base (36)..(36): a, c, t, g, unknown or other
ggactctgtattctgaagtgaaattatagtgtttanagttgaattcaggtagattaaggtttgttgtggtgattgagcaaggtttgagtttatgaactcaagctttgctctctaatggtagaattctgattttagatatgttgggttgttttattgcatggattatgtctattatggtgtaattaggtactctagaaggtttggtaagcttttggggccaaattggggttgttgtggggggtttttgtgtttcctaaactgagttggttgaccggttcagtgggacctgtagaaactggaattctggttggtccccaggaaccccactgaactggttttctggttggggaaccggtctgctagttggggcagttttgcgaaccctagcttttcctgtttttttgatatttagggtattgccatgttatccatcaatagagaaacttttagtttcaattttaagtctccaaaaattgatttagcatgtcattcattagttttacgaattatgtgatttaggggcctgtaaatcgtcgagaaacggttccactcaggttggccggcacacctgaattcgaaagtgaggtaagattagtataatgatatgcatgtgtgtttacatatttagcgtacatgtttattaagcctgttagattatattaaaataacagtatcagtatatttagtatcatattggatatcgatgaatgtatgttggcttaagtactatttgacagtatcatacgactaaagtgtgactagcgtaccgagtatagactgataatatggtcaatagtgttggaattatatttatccaggatcttagatctactcacaagtatgttgatttaacaacctaatattgaacttctaaaacgatgaactaaaca

SEQ ID NO: 344025 - DNA, 641 bp, Cannabis indica
tgtttatgattatgatattcttattgagtttgtcgactcacagatattgtttgcttgtgtatgtaggggcaaggctaaggttgagcagccgtgagtgtgagcgaattaggattatacatgtcggggtggttagacctagattgtacgatctttgggacagctggttgtattttgtatagtcgctaggcgaaaacttttgtagtacatattattaatcagttggaaatattttaaactttggatcccagatatatacataaaagttagtttattttaatggtattaataattaagtaaagcttttattattcatgattttcaataaactcgttgattagcaacgaactccataggtgatataaaatcatgataacatgcctaaactagtaggatgttagaattttgtatcagagccgctaggttatcattcgaagatcatcacgacatgtataatcatcatcagagataagctcaaatcacggttcagtaagccttgattgctttaatagtatatcttattagtatgttataataaaaaccttataggaaactgttgggtttcatgccctaaataaaactccattttaatgtaaaatattttattcaacatcaataaagaaacagaagtattttcattcatt

SEQ ID NO: 344026 - DNA, 1076 bp, Cannabis indica
aaaaaagctaaattgagtgtttgataaattaaaattttaatgtgctatgacctgctaagattatattataataatgataatgttataatctagatcattataataaaaaattatgctatataaaatttttatttttatatatttttaaatatttttccctatagtataaatttatatgtatttgtgttaacgcagatttttgttaaccaaatttgagtctaaccgtgacaatctcacacaaaaaataaaagctataaaataaaaagtatgaacacacagggtgtttacgtggttttacaattaaaattttgcatagtctacgagtcaatcttattcagatttctgattcttttctcagggcctcttttgtatgagtttttccgtccttttttttttattatctggccactatttgtaatcacatagtggcccattaattacagatttgactgtaatctttttacaacgatcatcccctaaaatcataggatttgattacacatcacgtagtgtaaatgcggttatgatttgaaaatcatatagcacgtctttaattgttgcatctgaggatgcctcgacagaagcttggttccagtgatcataatagcgacctggagccattttttcttctgaggtcgatgacgctcgtcttgtgatgatcgcggttcttatttacaaagagttcttcgaggcttgtttgaatgttagcttctgactcgtcaggattgtaggcctcaccgagaagatatctgaaatttcttggaagcctccctatagcgagattggcacctcgcttattaggtctcgagccaacccgactgttatacttagtttgtacattacagattatgtacttccgcagtcgatgtgtaatgctttcgtcttcctagctgtaacattcataatacctaagtaatcacattcagcgacatatggtttctcgttaatatactaagccacagtttgtatattaatttctcgcataagaccttacagtcagcatgttataaatatactctgacactgacgtaattaataagttattcataaaaaacgattgcatcgatccatattcc

SEQ ID NO: 344027 - DNA, 537 bp, Cannabis indica
gttggatttttgatttcttattttctaccattaacaaaaattgacaaccaaaaactgatcattgtgacatcttggatttcttatttcttatttctaacgttgtcgaagcaaatgaagagaagaattgggtgtccttccaaaacacaaggacctattcctattgcggtcgccatgtccacctctaccaccacacctgataatcaagttgcttccaataaagatgggtcaacctgttgggctttgtgccctaaataaaactctatttccatgtaatcttttctaatcatatcaataaagaaacagatttaatttcattagttgtttaaagtgttatttggttcatgtgatcatttatttacttatttgattaataaattcatccaaacccttatcacattgatattcttgtttattgtgttgtcaacacagtggaaagtaaacaagaatgtgtgattaaatgtattcctagatttatcagtacacagggtttaactaatatgtagtctacaacagagtttacttgtaccttggataagt

SEQ ID NO: 344028 - DNA, 570 bp, Cannabis indica
taatggagattgtattagttagaaatcacaactccaatctgtagtagcactttcaactatagaggcagaattcatggcgaccacagacgcattcaaagaagcaatatggctacaaggaattccgaaggagtagaagcttctagttggaaaggcaagggtatattcagacagccaatcctcgattcatttgtgcaagaatccagtttatcaagagaagacaaaacacattgacattcggttgttttgaataagggagaagatagaagaagaagtaatcgagttgaagaaagtgaagtcagaaatggaggcccttggattccaagaggcaaggggtactaaaacaggaagttgacaagttgttagccaacaaatttatacacgaggtgttttacccctcgtggatagccaatcatgttctcgtcccgaagcccaacagaatttggagaacttgtattgacttctccgatctgaataaggcatgcccaaaagactgttttccacttcccatgatcgaccaattagtggatgcaactgctgggcacgagcttatgtcatgtatggacgcatatt

SEQ ID NO: 344029 - DNA, 593 bp, Cannabis indica
taatttctttgagtaatgattgagaatttatttttttcctttcaatattactatcagtaactacgataagtcacatggtcttttaataaattgtgtgattaccaaatttaacaccttatttacggtggacatcctatttaattcaatttttttttttctcttttgattcaatccaattagtaattagatttaaaaaatcatcatccaatccaatctaattagactttaaaattcaatcaaattactaattaaattggatcgattttttaattggggatccaaacacacttaaattttaatattaacataaaaatatgaataaaatacgtaaaaattaaatattaccccttatataagtttaatatttcataaacatactattgttataatgtaatgcaactaaaggtttcaaataatgaaaacaacaatacttgtaagtaataaaattgaacaaatatttgaaaataaatacacaaaataatcaagtattacaaattcaacacaaaagaaaattcaataaaactataattaatagggactttttcatttttgcacttcaaaacaatttttttttttgtcatttttacggaatt

SEQ ID NO: 344030 - DNA, 1906 bp, Cannabis indica
tgattttaggagcctgtaattcgcggagcagttgttccactcaggttgcccggcacacctgaattcggaatcaaggtaagattagtataatgttatgcatatgttatcacatgtttagcatacatgttgtttatgcctgttagagtacattgatagtagtaatagtatacgagagttgtactgattactgataaatgtatgttggctgaaatactgatcgatgttgtcacatcattatggctagagtaagactagcatattgagtatatgttttaaataattaaacaaaatttttattattcacaatttccaataatctcgttgattagcaacgagctacacagtacgttaaaaatcatgctaacacgcctataatagttagggtgttacaatttggtatcagagccgccaggttgtcttcaaaagatcttcatgacatgtacaatcatcatagtagtctgctcgtttcacgttcagtaagcttttattgcttagtagattatttagtattatgatttaagaaaagcctgttaggaagcatgttagtagcttgatgtagaataggcgcatgttttaaatttccaaataagcggcattagtaagtttttctttaatcacgatctaaccagactagctcttggttacgtaggttgttcaaattagtatggacaccaggcgaaacaccaggagccagggcaattcggctggatccaattaaggtcagggagctcagattcccctaaatgttcttggtttaggtagaggtcccagggacagggcacgtggttagggtgatgctaacccgccatagggtacccaagctgcctaagctgcctaagagtgggaacacaggtttgcagaaatgcaaactagaatcaatgaaacaggaagtgattcggcagataagacaacagggtgctcctgcagtccctgctccagcaataccagtggctcctgcccctgctgtgtaggtcgaacctattgtttcattgaaccggatggctccagttttcctgggaggtcccaatgttatgaaagccaagctatggctaactgtgatcactagaatattgaactttatgggcgtcactggaaatggtagagtggtctgttccactttccaatttcaagaggacactctggtttggttgaacatggtgtccatgattcataatgttaactatgacctaggaaaagttccaggagctgattaatgccaagtattataacgaggcagtcagaagtgccaaaagaaaagaattcacacagctgactcagaaagagaacatgagtgttactgaatatacgactcagtttgaccgcttggcaaggttggcttcgagaattgtgccaaccgatttcactaagaaagagaagtacctggatgtgttaaatgcgaagatcagacttgacttgatgattgctactgaccacagaaccacctatgcagaaatgttggataaggcactgcgagctgaggacgcagtgggatgtatggttgagtctggtggaactcccgttgttggcggggctcctacccctcctgacccagagtgccccagttgtaaaaagcaccatctgggaagtttaaagggcaggggtgtttccagtgcggcatgccaggacattacaaaagggattgtccccaactcagaactgaagcaccgaagactgcagcgaaacccactccagccagggtgttcatgataacttaggttgatgcagaagctagcccttcagtggtaacaggtcagctctcaatcaacaactcttatttcgctgtgttgtttgattctagggccacttattcctatatgacagctagaatttttagtaaattgggtagaccgcatggtatttatgaatcagggtttggaaccctattacctggcagagagttagttat

SEQ ID NO: 344031 - DNA, 1056 bp, Cannabis indica
aaaagattgattggttaagcaataaaaatacgatgattgaacataatctatgggctcacttgattaggtgatgcgatatacctgacgacgtaccaggcgtaggtacgggcatcaatgacatatgatgagtaccgagcgtaagtacgagctcacctgattaggtgatgcaattttcctggtgacgtatcaagcgtaggtacatgtgttagtgatataaaaatgcctagttacggcatagatcgaaaccattattgggtttcttcctggcgacgtatcgggcgtaggtacgagcatcagtgacatatgataagtaccaaacataggtacatgctcttctgattagacaatgtgatatattagtgccaagtaatggcacgtgctcacctgattaggtggtgcaatgatattatatatgatattacattataacacgagcttgcttgattgggcaatgcaatacagattatcaaactaaagcatcgacttgcttgattagacaatgtggtgtaatgaagatagttactttatgaggtaaccagggccgaccctaagaatatatgggcctaagacgaattagattttggggcctcagaaatatataaaaaaaattaaaaaatagtgttatgggatttgaacacatgacattgtataatatgtcatataccttaaccaactaaactatgaatatatgttgtttacaatacacttgattttacataaataaatgtctaatgaaactttttatttttttattttgggcccccgaaaaatgttggccctaggcacgagcctatcccgcctatgcctagggccgaccttggaggtaacatatataatttatatttttaaataattcttattattggtataatagttttgtattaccagatatctgaatactgatgcttattcatggcaaatgccagtagtgatttggattttatcttatgaataatgcgtgatggtatgattctgattgtggataaatgataatattcgaataataaacttattattattacttttcttgttaagtcattgtgactcacgtgtgct

SEQ ID NO: 344032 - DNA, 2250 bp, Cannabis indica
acaaaaattttatagaggttcagccccgagcagttcggtattagcctaatcctcgttatttgtattaactcaagaacaaggagaaagattccttttcttatagctcttacaaaaatatctctgaatatgaattcttagaaaatatctctcatgtaacatccttcgaccctttgcccagtgaatatgcatcactatttatagggctatgagcttggagagaaagtatttcccttctcgttataatggatataagcagaaagattgcataataaatacagaatacaccgattgtgggattatgacagctttccatatctctgcaatctgatccccaagttatagggatttccttgatgactcacgatgcaaaagctgaattcgctaagtgttggtaattctgtgcggattgctgattgctttgcctcgagcatgcatatgaggtatcctgcttgaactatatcttacgagcagatacttagagtcgattccacgtgttaccatcatgtgatgccacatcagagtgcaaaaattgggataacatttgcccccgagtctgtacgggaattccgaagttacgtgtagacttcatctgagctgtctttgcatttgaatgggtgacacgtgtcaggtctgcctgttcgcgactcgatgtgaggctgactgggcgtcccttcaatttttggctaataaatgctatgacaattaatattttgaaatccgattttctctcaccacgattgacggctacacttgattacttttgatttcccatattcacttttagggggtaatcgaggcgtctgaggttcttttgaaatgattaccccttttcgttgttttcctataaataccagtgaccatttgtccacaaactcattttctccaaccttccttgctaagtaagttcagagggaaaagagaggtttttggcttcaagtttgctgaagtgctttaatcaaaactgcttgtttggcttgacgtaacctgaacccaaacatttgattccttgagtaagttctccatttcctttatgtttactctgcttattttctctctgaatgtactttcgatttttgtgtagaagatatgtaggaaaccctaagtttagaaactctgggattttccttcgttacggttcatgccatttcgtcgtccgtaatgcttgcttcttgaactgcataatgcctatcttttatcttgcctattctaagcttcatgaaattcttttgccctaactggctaaaatttcaaacttcctgagttttgacctttcgttgaatattcttattctttaatctgttgagtactcgtggtcggcatatttgcctgttttaacgtttgatatcccgaccaaacactcatcttgcgtgttgtcttttgtagatgaacccaggtgaattttggggaagcaaacaccaaatcgaccaggatctgcttcaactcttgcacgaggatcatcctcatcttcgttctagtcaaacttctttgagtacaagcattcttcattaaatcttttgtccagcaataggatgatggctcgtaccaaaaagacaatgcgtagggtcgacgcctccgatcctcaagtggctcggcacgccaccttacccagtgctgaacaagatccagtggtccaagaggaggaggatcatgaaggggacgctgaggtctaggagattgaggagcaggacgatgtccgtcctagcagtctctccaaggcggaggaataggaggaggttgcacccctaaactatgggggatacaatgaggccggtgagccagttgttgttgatggggatgtgctggttgagggcgtggactacgccagtgaggaacttactgctgcggttcctcatagaaggcaaggtactttgggtgcaaggtgggcgagccctccgtccaaggttactgaggcgcacctgcaggatctcgactaggatggtacctgggcgaattggactgttacattcccgcccacaataatcgggccacaaaccgtgaaaggggaatgtgcgcctggtcgggtgctcatgcccagcaataggcattgttgcctttgcacccgtactttagaaatgtggcagacttcttccgcctctgttcgacccaatttactcccaagggcattaagtatttgtctgccctcttcgttctctatgccctaaataaaaatctatttcaatgtaatctctatcatttgaatatcaataaagagacagaagtattttcatcacttatttaatgtgtcatttg

SEQ ID NO: 344033 - DNA, 565 bp, Cannabis indica
aatgattttttttctttttctttcttttcttcttcttcgtcttcttcgtcttctcactgcaccctaacccctaattctaaccagccaacaccagctgctgaaatggctccagaatcacaaccccaatagcctcaatcacaaagattcacttccctgatgaggacgacgtagctctcgacgcctctgtcgagacctctaaccacgacaaattcatgtgcgacgttgatacctccctttctgtctgcgataaacctactgaagatcctcaatgccagcccaaccctaattcttttcttcaatatacaacaacctcacttctctctctcaagaaatctgggtggtgatggcatctcgggcgtggtcgacggaagaggagagggcgaagtctgagatttagggtttaggtcgaaggggagagacggcataatttttgttgcaggccggaggggagagggatgagacgtaggtggagagagaatttctgggcttggacgcttgtgaatggttgaggtgcagctggcggctcggagtggttttcggcaagatcaagagggtgggtggtgag

SEQ ID NO: 344034 - DNA, 564 bp, Cannabis indica
ttttttttagttgaatgaccttttgtagaattttgagatttataatttataccattttgtggtattgacagctgcacttagtctttgcaactaagttgtctacggctatttttgtgatgctatgataattaagtgttgaatgacctctcttttttgataccatgtatcttttgaactggtccaagctctttcatctcaaattttcttttgagcttggctttgatacttttgatcacatatttatctttgctcatgatgagcatagcatccacatagagcaataagaacatgactgtagattgctccatattcttgaaatataagtagtgatcgtatgcgaatcgtttgaacctgatttgatgcatatacatatcgaatctcttattccattatcttggagactgtttcaaaccatataagaatttattaagcttgcacactaattaaactcatttcccttccacctgaaagctaggtggtttcttcgtgtagatctctccatccaagaatccatttagaaaagtagtctttattagaatatttctaattaaggaaataaaataa

SEQ ID NO: 344035 - DNA, 1149 bp, Cannabis indica
gctcatacctccagtacctgaaaaagtgacaaattaaacaaaactaccctaaataaataggggcccaaccatataataggtgctaaagccttttaaggcgccaaagccataaaaatggcgcaaaaagagcaaaatcaatataaacaaaactatagcaactttacaatataatccattatattggcttacccaaaactaatatatagcaaacaacaagatgagaacaactcaccaccttcccaatagtcaaccctataccacataagccgagactcttggctcaaaactaatgtaacaatttacttaaaattcatcacattatacataactgttaagaagaaagttcaataacaagggcctaactcaaaaagaatgagtacaaattctaaataaaatattaatgtataccaaataaaaagcttaatgattcaagcaaagtgaccggtaatatctataatcacaaaccatacatatatacaatctatgacacaaacaataagaatactagagggaaaattattctatgttaaaactatctaccgcctatggataaatggggccttaccaaccataaagttatgaaagttaaagttttagattcagaaacatttctaaaaatcctatctcatatgaatatctaaccaaaaggagatttaaatcaaaaaaataaaactcactacataatcgggttttctgttaaaccgataaggatctgacatatcattctttttacccataactggattaccaccactttcttcattctccagaactagacttcttggtcctcttattatgaaatagcttcaaaatcacaatgcataattaaccacacaaaacacagaaataaggagaaaatatcaataaatgacaaggaacaaatccaattaaaataaaccaatcactatatcaaaattaaaagcaacgcaaaagcaaattgggatacatccacagccgatgctttgccagcgataaagataacgatactggcgcttcttacggcaagcacccgccatcttggatctggtattctccctcctggatctggtcttccccatcatggatctgttcttctccgtcctggatctggtcttcttcttcctagttgttctaagccaaaaccctcttctctgtccgtctctctctctc

SEQ ID NO: 344036 - DNA, 487 bp, Cannabis indica
tgctactccacattggtagcaaactctagatcggcattcacccaagtggtgtctcttgcattttgggcattcaggttgccaaacctcatttctacctcaacggaaaccctggttaccttaaaactttctatttggacccacaaccggtagtccatctggtttcctttttcggtcattggggctaaagcttttactcactcagtaccaaatgaagtctttcacatgtccttcctctgagtactctttttacaaattaaactttcagctccctcaacagtgagagctaagtccaattgaggataggtcttcacgacccctgatttcttggctgccataaccacatctctagcaattgttgggttttgtgccctaaataaaacccatttcaatataatcaaatttacttattaataaagatcagaaataacatattatgttgcatggtttacattatttatttcatgattatatacataatgtatgaatt

SEQ ID NO: 344037 - DNA, 737 bp, Cannabis indica
gataactacgtagcttggagcagggcaatgcaacttgccatttctgtcaaaaacaaaatcggtttcttggacggttcgatctctaaaccttcaccttctgatctaactctttacaatgcttggataagaaacaataatattgttatttcttggattttgaattctgtatccaaggaaatttcatctagcatactctatgatgaatctgcctatgccatttggaatgaccttaaaattaggttccaccaaagaaatggcccccatatatacaatcttagaaaagatctcatgaaccttaaacaggataatcaatctattagcatgtattttactaagcttaaaactatatgggaagaattaacaaatttcaggccttcttgctcctgcaatggatgcacctgtggtggagtaaaaagactccaagatcattaccacatggaacatataatgtcttttctgatgggtctttctgattcctattctcaagttcgtggtagtatccttcttatggatcccctaccagaaataagccgtgtgtttcatcttgtcacacaagaagaacaccaaagaggtactcaatctagcaccagcaatccgaaccctgctatggcatatgcttttcaaggaaacaagaatactgggcagaaaactgataatcaaccctcaaagaatcagcccccaaagaagaacagaccctttgtacccattgcaacattttgggacataccatcgagaga

SEQ ID NO: 344038 - DNA, 535 bp, Cannabis indica
tttgacaaaaaatcagttcagggtgctatttgtacaattttagaaaatacaaggtctattttgtcatttaacaaaacagaagatccaataggtaacttgtataaaacacaaggtccaaaatggtatttatccaaataataaacaaccacactatttttcgttcttaaatttatagctattcaaggttatctttttttctcggccattcccatcggccttacctgggtttaaatgttagcttggtcagcgttgtattttgctattgtgattcaatttttacaactgcgattagtcttgtttttgtgacatgattttgaatgttttagtcttgtctctatgacataggtttggagtgttttctgtcttatctgtatgacgtgattttgtttttttttgttgttagtttcttctttgttctttgatagctcgtcattaaatcgttgttagtagttgggaataacaagctctctgcgactgaaagagttgttagtagtgcagttacgtaccttatgttggaatatattttatcaggatc

SEQ ID NO: 344039 - DNA, 683 bp, Cannabis indica
agagatctaagcggaaggagtcacttaattctgctgcacccaatgtaaggtttctcaaacgttatatgagtttaaattacattgttttagaaatttatatttaggatgttaaacaacatgcatggtaataaatctagatcttagtaaaacataatccaacacatataccatctgtcataccgctattggtataattaagtattggatattataaaacttgtgggtgccacttatagaaggtgctaggtgtcacaagccgactatttagacacccccaagtaggcagaacgtgcagcacttgctcgcacaacgagctagcaagtcaacctaaacgcgcctgtaggcaaacaagttcaaaggttaagtaggatacatgtctcgcacacattgagtgcaaacaagaagcatgagcaagcaaacacaaagcgtccgcaaggaccaatctcacacaacccacaagaaaacgtatagacaaatggcacgcaatgatccaacaaaggcatcaaacaggcatcacaaagaccatataaaagcatggatgaacatcgttttattattatatggccttgatagggcaagggagtacacaactgggcccctatcatgctggtgacaaggtacttcataagtcaccaggtcacccccctaaagagcttattggggttttaagggatttctaggaa

SEQ ID NO: 344040 - DNA, 554 bp, Cannabis indica
acacttcaatcataattctaaagttatcgatctcaaaacccccaagggagttatgaaaataagcttcggcttacccgaagcgggtcttgccgccgcgacccaactcaaaaaattaaccatcaacctcagaagttaattttgaccgttagctcatcatctatggtcaaaattaaccaatttagatcttttcatattttggattatttttttttctattttcaagaacctccttcacctataaaatgagagctcctctagcttatttttcacatttaaaaaactacccataaggtcaggacatctctctctagaaattagagctaaaacacttagccatttttttaataccatctcgtaagaaattaaaactcgaagtagacgtagttccattactatcgcgatacagggagtgaactactataaattattatgtctctctttattcatatttaacaatatttcattcttgccaatctagcaagttggtgtggcttagaaatctctgtctaaattactgagtcaacattatttaataaatttttttattgaaaaat

SEQ ID NO: 344041 - DNA, 616 bp, Cannabis indica
ttttaaattgtggacaatgccatattattttttttttaattattattattgtgattttgatatcaattatcaaatatatttttcatggaattaatgattttgtcgagatacctgaggttctgtggtgtagtgataggaatgtttttactaatatattttcttacctagtatggaattcgaattccattacaatctctcataggaggtttatgcttaacactatggagaattaacttgttgtggtagtgtcatctttaatgggatgagaatctttaaagtatatactgatgacccaattaaaaaatgatgaactataagagtactataattggcatgtgattctcgagattatttaagctatcgataaaatggagaaaaaatctgcaccacgtaatcctttattttatcaaaaaaataaaagatacagaaattaaaaagtttgaagactaaaaaaattagtagatataatataatatgactaatagttattattagtatttttttatataaataaaattgtttacctcttgaactatgaatttttgagttttatttcctaattttttttccaattgtcaaaaattttccctaaaactacacaaaacattacaaatat

SEQ ID NO: 344042 - DNA, 507 bp, Cannabis indica
aagttaagaagctgaaaaagaattaaaatgcagagtgactgcccacccagaagatcagaagtccatcatcacatgacatcgagtttatctcagacatgacagccttcccttttccagcaatgggataggatggccgaacatgtgaaatgggctcccttatgcgaattgcatgttcaacaggcctgggcgtggctgggagtttcttcttcctcttcaatggggtcacctgctcagcctcagcctcagcctcggcttcatctttaggattcaaaggctcctgagcatactgcttggccctgacacctcccttcaacttagcctcccgcttcaattgaatcaactcattttccggatgagttcgttcagaccggccaacatcaaacttcccctcttccccgccacgaacttagcaaaaaagtcctctgggtaaagcccatacttcaccagattatcatcggaggtcaactggatgatattcctgtcttccttcggcaaccgggcaagttt

SEQ ID NO: 344043 - DNA, 931 bp, Cannabis indica
  modified_base (73)..(73): a, c, t, g, unknown or other
aaaaaagaaaaaacaaaaaacaaaaattataataaaattaataatgaataagctagaagaaagaaaaaaaaanaaaaaaaaaaaaaaactaaacgcttcgattggatccttatcataaatgaggtggtttataaggtacgtgagaacatacatttatggatgtatatgcattttaagatggaaacataagagtatggaagggttaaacgacaatacgtttagagagaaagtaaataacaaataaccgaatgaaccccactccattgaattgaatgatatcatgaacaacaacaatattgtacgtctttaattactctctctctaatgagatttttttggggttttatcctaacttaccttctgaagccagtcccatcataccccatgaatgaatcacgaacataggaaagaaagtaaaatgggccattatgtttgatatatataagcactaattaacaacaataataatagataacgatatatgatagcgtagatggaccaactactcctgtttcggaaatgatgtcttcttggcttaccacgctaactccatcatcctcaaccctcaaatttgccacaatcataacgcggagctctgtcctttggttttaagatctgctagtcgtagtatatgcgggatttttttaaggtggagaatttgaaaaatattttatttataaaatatttaatagtttgttctaattgaataattacactctaatattgtgatcttgaatgtaacatatttaaattaaaattgattaaaatattgtcttattccaaaaaataatagtgctaagagcacctccaatattagtatttgggaaattttatttacaccccaaaaattttcaagacaccttattttaataatttttattttcaaaaaaaataatttttattttatttaaaattaatatatttaattata

SEQ ID NO: 344044 - DNA, 713 bp, Cannabis indica
ccaagagtatgctcgatcagtgatagactttgaaaattctcagatttttaattcaaaatcatgctcataaatacccaaatcatctataaattgaatgatatgttctttggcattgccgaatttcccattgtattttcaaaatattggactcatgtgaccgcaaaggtaaggtttgaccggaacttccacagggtagggttgatgaaagtcgatggaagttaccgatgatgatgatttaccccttttggcttcaaggagaccaatcaatttgtcttttgtgacgaactcagaggaagaccgagcctcttcaccaatcctttcagcaatctcaaaagttctaattcctcaaacattatcatgtgtcgccggagttcgttgttcaacaatatgtacttgccttataaaagattcatttattgcacgttctttaggtaagccgctcctttcaatagatgcttcttggtgtatctgtggtaaaagccaacttagtagctgcatcatgccgtcttgcgccttttggagcttttccaatctagctaacacaacttcatctctgttcatcaaattggtataattattattattgttgttgttatcatttttgctaaggtattgttcagatctgactgtctgactctcaagtatcggagtacagatatctggattttagatgagagaacagaaattgttgggaaattattttaccaggatct

SEQ ID NO: 344045 - DNA, 1450 bp, Cannabis indica
ataagccgacttggaaactacacgtagacgggtcggctacagatcaactatctggtacaggaatttctcttgtcatgcctgggaggcaacacctgcacgttgtagtcaagtttggattcaaagcatccaataacgaagccaagtatgaagctctaattgctggcctaaagttagcccgagagatgagagtcgagcacattgaaatctacagtgattcatagctggtggtaaatcacttatccggagaatacgaagctcgaggagaaaagatgatagcatatctgggcaaaatacatgacctgctcgcacaattcaaaagctacgatcttagacaaattccaagggaagaaaacaaaactgcagatgcgttagctcgattggcaaggagtaatgtaagtgataaggcaaactttgttcctatctatttcttcgaagagactaacatcactagcgcgaaagcgatcgaaatgattgatacttccccaaactggatgacaacgatagccgcctacctcaacactggggaactcccaaattatcggaatgaagctcgaaccatgggaaggaaggctgcacggtatatcatagtagagggaattatctatagaagaggattctctatgtccctgctcagatgttacgcaagaagaagctgtacaactcctatctgaggtgcacgacggattctgtagaaatcatgctgtcgggaagagtttatataagaaaattctaaggcaaggttatttctggccaacaatgattgatgatttcaaggcctatgttaagaaatgtgacaaatgctagagattttaaaagatacctcgaggtctgcccaacgacttaactcagatgcaaagatcgtggccctttgcgaaacggttgattacttcactaagtggacggaagccgaaccactcgcaactattacatcaaagaaagttcaagactttattgtgaagaacataatctaccggttcggatggccgtacaaaatagtttcagataatggaaagcagtttgacagccaatccttcacagatttttgtgcgaaccatggtatcatcaaaagtttcttcgcagtggcagatcctcaagcaaatggtaaagttgaagcagtcaacaagaccttaaggatacactaaagaaaatactcgaagatgccaaagaaaattggttggaagaacttcttgaacttctatggttgtatcgaaaaactgagagaatggcaaccagacagatcccatttgctatggcatattggtataaagctatattacctagatagctcaagcctgttggaaatattttaccaatgtcttagatttactaataagtatgttgtttaacatcctaaatatgaacttttaaaacgatatgaaataaacacgtataaagtatgagaaaacttacagttgttggagcggaatacaatgtctccttccactcagat

SEQ ID NO: 344046 - DNA, 845 bp, Cannabis indica
aggatattaaaatattatcagtaataagcctacgaggaatgaaagcgctttgagattctaaaatgacatgataaaggacacctttcaattggttagctaacaccttcgagactattttgtagatcacattacaaagagcaataggccaaaaatcattcatagattcaggcttagacatttgaggaataaggacaatatgggtgtcatacaggttattcaaaaactcaccaaacataaagaattgtttcaccaacttcactacatccgaaccaactatgtcccagaacttttgatagaaccccgggttaaaactgtcaggacccgaagatttatccggatacatttggaacaatgcttttttcacttcttcactatcaatcaaagtcacaagatcaagattcatctcggatttaatacttcctcgaacacaatcaatgacacggtcccaacttgtattggaagcagaaaataaatctttataatagtccatcatcaatgtgctcaacccactatctcaattaacccacactccactgtcatttttgacagaaacaatctggttatatttcttccgcgtattggcacaggcatgaaaataattcgtgttttggtcaagggttttcttttaattcattaaactttaaaaaataagtcaatatataatattaataaaagttccaaaaaaaactgatagaaattattgcaagataatgaattaattctgatcagttttaacactttcaaatgggccgtaaaaaatattatgatggaagcaaattacattttaatgttttttttacatttttaagattttttatagaaacaatacgaaaacaacaagaaaa

SEQ ID NO: 344047 - DNA, 778 bp, Cannabis indica
caactttacacttatgtgaggttaacttaatgacatgaactaagcctgtttctctcgaaactaccatgtgggcatcaattttgacaatcttagacaattttctctgttcttcatgcattctcaatgagagtaggatttcaaatccccattccctattaaatagtggatttcaaaattttaagttgatgactacttgagtgatttcctttaatttgaaataccgtgaaatcatgtcgacattggaatgccaacatttactctaatcttctgttgttgtcttagcattgaatctcttgtcacactatctgtttatgtatatattgatgtagtctttatcttctgttaagttgtggtcttattcatctcctttgtttgatagcaggggaggcctccatcaactccttagctttacagcatacgaggccttcaacatcccctcaactttgtagcggaggaggccttcatcatctcttcggcttcacggtgggggagtcttcatcatctcctcaactttacagtggaggaggtcttcatcatatcttcggctttacagcagaggaggtcttcttgacgactgtcaaagatgtgttgtaacagtcactgactattccttggtgaactaagtatgtgactaactgttgggttttgtgccctaaataaaaccctttacaatctgattagttatcaatttaagaaatttgaagtgatttatgtttgcatgaattttacatgcttatggtttaatatgttttaaaatatgcataaaatctgttaagtc

SEQ ID NO: 344048 - DNA, 684 bp, Cannabis indica
tttttaataatacaatacaatgcaatgtgagccaaacattgtataatttaacacaacatactaatacaattcaatgccaaacgtagtattgtattaaaattatacaatccaatccaatctaatacaattcaacccaatagaatacaatacggcaaaccaaaagagcccttagtgtctaatttactacgagcataaatcactcatgtttacagatctactaatacttatgcccatactttggctaagtttgcttttatggtgaataatgaatgttcttggttggaggatttttcatctccacttatgatgtaacaccctaataaataggcacgttacccaaggtgattaagaaaccctaatcccctaaacaggattactaaaaagataaacacgagcaatttcaactttaatcgaaaatatattgaaaataaaacttgtaataaactttactttacaatcaaaagttacatgtttcgggatcccaaatctattttacaaaatattacaagtcttttcactagccgaactaggcagcaaaatcagagtttcaaaagtatgtcactggtagaccccaacctacttggtctagtgtgacccgaacatgtacatacatcgcgcagctctcgcactcatggctgatcagagacagatttaccctttcctgcacagttgagcacccgtgag

SEQ ID NO: 344049 - DNA, 612 bp, Cannabis indica
aaacattaaacaacaatcatcatcctccgtaaatgggaaatttagataagaaataaatccataaccattcctataacaatattcagcataaataaattaaagaggaatagagaaagaaactgttggtggattgattctggatcttcactttgaattactctgctcttcctcccgttttctgctgtgttttaggtctccaaatcgcttctcctgatttccaatcgcagttttctatttatatctgatttttagggtttgtcggacaaaaatacccctgaccatacggacactcgccgcggccagatgagcttctgaaaaccacgtttctgttctgactttctggccgcggccattgtgatctcgccgcggccactagacctaatttttctgctttgacctctttcagtaaaatgggcataactttctcatacaaacttcaaataagctgatttagcgttggaaagataaaaaaaaagatctaacacttttatgttttgacttcctccaaaatatgatcagaacatagttgaatttaggctttaagttttaactttattttctttcaaaattttctctattttatagatcactgttttccaaaatttgtccaat

SEQ ID NO: 344050 - DNA, 603 bp, Cannabis indica
atgttaatttcaatacttatttccatatttctttaaaaccatgggtaatttttttgtctaataaaatttcatataattttttattttattttttgtaataatatttaaaatataattttttatggatatattttttaagaatattaattaaaaaaaaaacctagaaatacaaattaacataatcaaagatatatattttatgcaaaataaaaattattaaaatagggtgcaagcattttataaatttttgggtgtatataaataaaacttttcttcaaaacaatttttttttttttgtatttttacggatttctacgtagcaacttacatagcaaccaacagagcaacttaaattgtaacccaaatatacatagcaacccacatagaaatcatcaaaacaaccaaaaccgtaaaaataatataaaaaacaattaaaaattggtatatggagtaattcccctaagtatcaactactaataaatatattatttctgtgtgtaattattaattattttacaaaataagacactagaaattgagcatgtttggtattgtttttttgttttttgttttcaaaaaattgtttttaaaaatgagaacaaa

SEQ ID NO: 344051 - DNA, 1367 bp, Cannabis indica
gtaaaataacttctaacaagaatatattgtggttacaaaattatagtaatgcatccaattgaatctaattgcctactctatttctaagtgttgaggctagcttggaagatcgttgtgtgaactcttcagtaagatcctagattggatgttcgataataatacgaaaagatagcgagagtcccctaataggctacaagaggtattgtctatcttttcattagtctagatttaatatatatatatatattatgttgagatccttgggatatggttcatattatattaaattatttttaatcaaatttactttcgttattctaactctgatatggaccataaaatcaaacgcaagaaaccgcctccttcctcctcctcctctctctctttctctctctctctctcatctctcatgctgtgagtgactcttggtattgggtagaggaacatcatggccagtattctgttaaaagtacttgtagtctagtctagaggattgatggccatgaaactggtgatggtgatactaggtttggaagggtctttggaacatgagagttcctccaaaagtgaaggattttttatggaaagtcgtttctaattgtcttcctaccaagaagaacttatgtgatatgcgggttgggttggatgtggtttgtcaaatgtctggtatttttagtgaaacaacctctcactgcttgttatcttgtgactttgcttggggttggcaataggttgacatttgttactttgttagggaggtaagatcttttagagcatggtttagaaagattatggggaaattttttggggagtctttggctagagtagctatgatttgttagggtatatagcggcctcaaaatgatatggtttagaaacagaaggggtagtcgtttaatgaagtggtgtcgattgcatccagtctctagactagtggagtaaagctcccatcatggaaagtctttctcattgaattcattgcatggatatgatggtgttgagcgttggatcaagcctatagataattgtgtcaagattaatgttgacaaaaccattttctcggaaactggtaattatgggattggttttgtggttcgtgactcatccaggtagcttttggttgctgctacttgtcatcatttgggcgttgttgaatgtgactatcagtagtcccatgatctataagggaaaataccgaataagttgtgcaatctcacatcgcttaaggaaggtcaagttcgatgattctgagactatgtaggaatgggacacaaagttgaagaggacttaaatggattaattggtactacctatatcaacaaggtgcatctattttttgacagttcatcacgaaagaactccatagt

SEQ ID NO: 344052 - DNA, 598 bp, Cannabis indica
tcttcgaaaacactgtctttccctgaagttgatcgaacaaatcatagagtctgagtaacaggtacttgttcttaattgtcaacttgtttagctccgggtaatcaatacacattttgagagaatcatctgtctttttcacaaacagaaccggagattcacagggcgatacattgggtcgggtaaacccaatatcaagcattccctgaagttgtaacttaagctccttaagttctgctggagccattctatatggagctttagaaacaggttcggctccaggtgccagatcaattacgaaatcaatttctcattgcggcggtaatcctggcaactccttgggaaacacgtcgagaaagtcttttaccactctgactacctcaggcccaaatatttcaggtttgctggagtcaatcagtactactaagaatcctacacatccactatgtagtagatccctagcccttaatacagaaataaccgagatccgagacccctgaactgatccaacataaacaaatagatcttcaccttctggctggaaagttaccattttccgcttgcaatctatactggccgaatacttggatagaaaatccat

SEQ ID NO: 344053 - DNA, 460 bp, Cannabis indica
gacatatgcgatggagaggagagagagaccgacgggaggacatgtgggtggagatcgatggacgagagagacgagaagaaagggagatcgagagagggaggaagacaacgagagaggagggcgatggtgcggaggcgtgggtggggttttggagagttaagattttcgttttagggtgtgggaaatggagaaaaaataggtgagaagaaataggtggatatgtgggaaataaaaaagaagtaggtgggcacgtgagaaatgtggcgagaagtagatggcaattttttaacgggcccttatactcgacggtttaaaaccgtcacctatagtataagcaacggtcctaataaattcatgaattctaattcaaacagtcacctattcttgtaattacttttataaaccgttgggaatactaatttttcccgtacaattttaaacagttacttaattttttagc

SEQ ID NO: 344054 - DNA, 634 bp, Cannabis indica
aagaagcctcttaaagctgttaagtcagctaataagaaaaatgctgctaatcctaattcaaagacaaaaggaaagtgcttctagtgctcgtttagagaattattaaccccttgggttattaattttggatatattaaccatgtttattttcttcttatttcagctccaactgcttaaacttatattgctatcctagcgagttgagttgaatggttggacagaagggtggagattgtccaagtgaaaatgaagctcgaatcttcttaatttttgaattaattgttttagtttatgaacaatttagtttcaattattagtttgggattttattccctatttcatattattgcagacaattcattatgacatttttgagaattttagtaaagttttctctttaagaaattttcattatgaattgcatttatgaaattgagcttcatttttatttaatttgtatgccaataccaattatatttatatgtttatcatgtttttgtgcgtgtatgaatttaattattgatgcaaaatttatggtatattattttctgcaaaagagatgtaacacataaacacttagaatttaaattcagtgtttatgaataattgttaattcttaagcaattattaagat

SEQ ID NO: 344055 - DNA, 480 bp, Cannabis indica
attcattccgtgggtgtaagggcccaatggaggcttgaagcggggacgttacaaaagtcgtacttactgctcacgattttgtaggtacagaaatagaaattcctagattggttgaagatctattttagagaattgtctagtgagttacggtcttgttcaaactatgtgttagctgtcaataaggtgtattttgattataaatataccttatagcagctaggtcatgtaactctttcatacactttgaattgtattcatatcttaagtaaagagtgtctttgttttgttaaaaataatgttcaggagattgccttttaagtcttgctttgggaggaagtaagcactcttcaaggagattgaagggagttcgagcatttgaagtttcagcaagagtcgattagaaggtggaatacatcaatcttacagcatacattaagagggagtctatttatgcataagtcaattactttgtatttttga

SEQ ID NO: 344056 - DNA, 1053 bp, Cannabis indica
atgctccgccgctattaatagtattagcggccagggccggccctaggcataggcgggctaggcccgtgcctagggcccacaattttcgggggcccaaaataaaaaaataaaaaaaattattagggttttatttaagtaaaattaagtgtattataaacaataaatattcatagcttagttggttgaggtggaagccataatgtccaaggtcatgggttcaaatcccataacactcttttttatattttttttagaattatttgtacggagatacgtgcatttaaaaataattgcatgaatgcactcttctatattaataccggtttttttttaataactgcacacacgcatactgatgttcaggtttcttagattgaagtagctcatttccttattaatgcaaatttcttctcccacattatcaactcatgtgttgtacttgctagctgtcctactctcatttgtaaccaaataaatgaaaaaataaataaataaataacaagaaattgatttacctttttttttcttaaaataaataaataaaaaatttcttcctcatttctttttttttttcttacttaacttttatcagtagtttaaaattttaataaaaaaaatttcaaacaggcacatcaattttttttattataactttaatatatatgtgtaattaacttttaatactaaaagaattctctctcatttttctctttttatatgtgtaaatttttttttttaccacattgataattatttggtctcaaaaattacaccattaaatatattttttaaattgattatttcaatatgtaagaatcatatatttatttgttgtccctgaaaatgataaccaaaatcagtatagtaacattttagtttcttttaatcattatgtaaataatagtaaagcttaaacaaaattcaatattatcaaacaacttcataagttactaaaaaatacaatataataaaaaaatttatagtaatttatgatattatttgatatgctgaatattattaagtttaaagttttattatttttattaacaaaaa

SEQ ID NO: 344057 - DNA, 1297 bp, Cannabis indica
agcgggttatgggtctaacagtgttgacttttgtattctattttgccgcttaggtcggctagaaagaaaggacttgtaataagtttgtaaatatttttgggatcccaacggtttaaaagtttaaaagtattacaagttttattttcattccgattaatttaaaagtttaaattctgcgctatttttgattagtaatcccgaattaggggattaggattccataagcattttgggtagcgtgcctaattatttagggcgttacactatcattccaaactctccaagcttgttttgctaaaagagcttggttataaaaagacaaaatacgaaatcccaaacccccaaaaaacttagagacagagatgtcatcccaatttttccaatggacctttttagtgccctgagaaccccaccaaaatctggctatagaactttgaattttttgacagatcgatttaggcactctaaaacaggacatagcaaatgaaggaatggcttggaccacagccttaattaaagtttccttgccagcacgagagaagaacttgtcattccaagtatttaatctagaggaaaccctttggaggagataatggaaaaaggaattggtgaccctaccaacacaatgaggaacgccgaggtatttgctaataaaaccctccccatgaagttgcaaagactgacgaaattgaagctgggagtcaacagaggtgttaggggagaaaagaatagaggatttatctctattaaccaattggcccgttgctctgttgtaaagattgagaatggcattgagggcatcactagatcgagaatggacttgggagaaaagcatgctatcatcagcaaacagaaggtgagacaagggctgagcgcccctgcagatctgaattccagagaaatttgcatttgtctcttgcagccgaatagcagcagagggaccctcagcaattaagaggaagagatagggtgataaagggtccccttggcgaataccacgggtagaatgaaaggtgtttgtgagagagccatttatggatagcctaaactggacagtagaaagacaacgcattataagagagataaaagatgcaggaaaaccaacatgagaaagcaattgatttaggaaagaccactcaaccctatcaaaagccttttccatgtcaaggttaatagcagcccaacctatcttccccgaacgtctagaatgaatagcatgaataagctcattagcgataagaatgttatcagtaatttggcgcccctgaaggaaagcactttgattgatactgataat

SEQ ID NO: 344058 - DNA, 524 bp, Cannabis indica
ttttttttctgatttactctggagttatagaattgtcttctatagctacagaaaaactgtttcaataccagttttataatttcgtatttaattaagaatttaattaaataataaactggtaatattaaaatacagaattttaattggtatcagagcaagtcactaaactcttagtgagatcttgagattaatttattccgtataatttattttgtgtgaaatgtctttgtttacagaaggaagctccattactcaaccacctttgctgaatgattttaattatccatattagaaggttagaataagagcactcattaagtcacaagatgagaaggcttggagagctatattacaggtaggtcgtgacctactgaaaatgatgataaaggtaacgctgaggtaaaacctaaacttaattgactactgaagatgaaaaattatccggttataacaataagggcttacatactatttttaatggtggtggtaaaggtttattaaattaattttatcttgtgaatctg

SEQ ID NO: 344059 - DNA, 452 bp, Cannabis indica
ttaaataaaaataaaaagtcacccatgaatttctcataaaccaagaatttcagttatatatagagttgaaatatactaaatatcagttcaaatattaataggatttgttttattattattttattatatataaataatattttattattttattaaataaaaataaaaagtcacccatgaatttctcataaactaagaatttcagttatataggcacactttatatagaatagatatatccttcgaaaaggagacagaggtcatgacttgaactaaccttttcttaagctaattagcaatttttcctcacatattccaaattatacccttgaacttttttggccgttaaaaattcctcctaaattattaaaattgttaaatttaaaaacttttgtttaatttcattcaattttactgtttcagtaattgtttatgtattaaaacatgctccc

SEQ ID NO: 344060 - DNA, 1178 bp, Cannabis indica
ccacacaataacctggacctagacccagaatactaataaggacgtgagaaacagaactatgaccgggacctagtacccgacccagactcgaacttgaactcaggacccagctcgtgacccggcaccagaaatggaaccagactgggacccgagattggtatccagatcttgacccagggcttggtcaaaaccgtagtaggtgtctggatgtgggacccagccatggactcgaaacctgacaaggactcgaacccacacccggacatgaacccagtcccaaacgcaaaagtggaccagaagccgtaccctgtgacccaaaattggaaccaaaaccgaaagttgaccgggattggaactaggacttggatttggaatcataactgagattggacctagatctagaaccgtaaccggaccaggacctagactccaaatcaaacatcgacccgaattgggagccagacccgaatccaaacccaaacctggactcgggatccaaacctaaacatgaactcagaaccaaacatggaatcagactagggacacagaaccagggtcgggacctaaaaccgcaccccagtcttggtcccaaacccaaactcagaaatgggacctgggatctgaaccagaaccagaccgagacccgtggcagtgatccagatcttgactcgggattccggtaacggggcctggaacagaccagtagtcagtgtctagatctgggactcagattaggaccagaacctagacgaagaagcaaacacgaacccagacctagaccatggacacaaaattagaacctaaacaagaatcgccgaaccaggagcctagaacaagattaggaccgtgatcaggacccggacccaaacctagaatcgaacacagaccaagccttagggccaaactgagtgtggaattggaccaggacaaggtcgtgtacccagaccggaactgagacccggacccggacctaaatctgggacctgatcccaaacacagacttggacctagatagggatctggatacgaacctggactcggaccaagacccaaactgggatcaaaatgctagacctagatcaggaccgagatcctgaaccagacccaaacttggacccgcactcgggacccgaacttggacctggaccaaatcctagacccagatcggggtccagacc

SEQ ID NO: 344061 - DNA, 703 bp, Cannabis indica
cccatccagtcgagccactagtactagtctcaccacagtcccttggggtacagcttgaaaagcgtgcagaggggaaacaactaaactcaccctctcgcactaacctaacttggcatgatcgcccaagttcaattccatagttctttaatatatcacctgtgtagcctgagatagatcgcaccttcgattctattagctcaacttcaaaggtgactccagggtcctggggagtctttgatgtacgtggcttcagaggcattatttaaaagtccaagtcatttagttcaaaagcaattgtgactttgggtaaaaacaaaggctttgttaaaggaataaaggacacactgggaggttctggccaggccgtatctcgcaagaatcagcgtttgccttcggagatttcttgcaagaaatgctgatagcgactagaattctcttcttagggggttctcactacatgttccctaaccctagcattgttcaattctaatttggaagtgggttttgaagggttggatttatacgagatggctgattttgtaggaaactcaagttctaaatcttctagacgataaattcttgaaccagaatgggacatagcatccagcaaaaagcagtgtaacgtccccgcttcaagcctccattgggcccttacacccacggaatgaatggctcttatacacgagtacgtcactctggctgc

SEQ ID NO: 344062 - DNA, 946 bp, Cannabis indica
tgcctaatatccttatggaatttacaatgtttgttagcatctcttttgctcctcgaattcctcacaggcttgggtttgccgaaggctaccttctgctcatgtgcgaggtaaatattctcctagtttcattaagctcggtataagaaattatacaatggcacgtatttgtcacgcttcttttgtttctttctctccttcgacggttccttaattctgtcctttctcttcggaccagaagcccccgagttatcaattctcgtggaagcagtacctgttgaatcattgctgggtttacctcccgagcttgttttcaacaagttcgtttcctttcgggcttcttccttccggacaaacacctaagccctttcgttgaactcagtgatgcttctcacaggacgtctttgtaagtcatcccacaacttgccccctgcggttaatggattagtagagatccccgcctgaagggctgtaagttgcgtgttgttgtccaaatttctaaccctagcggcagccgtgctaaaacgacttaagtacgccttaagtgtttcgtcgggctgctgttttatattggttagcgaggccgcttcaggatgcctgtccctagcggcctgaaactgcttcttgaaatccctggacagttgctcccaagaaattattgaatgatgagtaaatttgttaaaccagctactcgctgctccaacaagcgaggtgggaaataacatacagcgtaaattgttcgtcacattactcgctcgcattattgtattaaagttattcaaatgcgagacaagatctgtggttccgtcataagacaagacatgcgggtttttgaatcccgaaggaaaatgggtattcataatatctgggtgatacgactcaagctcctcgtcagagtcgtatccacatagtttccctaattcccccacttaatatctcctgaacttgt

SEQ ID NO: 344063 - DNA, 640 bp, Cannabis indica
ccctaattgccgcatggtgcagaggagtacattcctcctcatcgccttggttgatcagatgttctacttttggtaaaagctttctaaccaagtctgagtaaaataaatatactcaaaatattaatgtacaattataaataacaattaatagacatgtacaccgtgcttacttaatattctatttatcttttaattttataagctcattttttatatttttcactaacttatcatcccaaacgtacccttgaaaatatatcttttatttaaaatatttttcacagttcctaatgatggttttagaataaatttgtattggtttaaatttgaataggtggatatgaggaataagtgtttaatggttgttatggtaattgaagtagtgatattgatgagtagttattgatttagtatatgagaatggtttgggcttagaagagagggttgtatgagaaggtagtaagctttattgatagtttggaacccttgaaggggtatttatagttccttaccccttacactttatggttagaattatttcctctagatccttcttttactagagggaattatatccaaacaaatctaaatgtttctagagtttaacataactagtatattctagacttaatctaatcta

SEQ ID NO: 344064 - DNA, 494 bp, Cannabis indica
cagattcacacatttctttgaaaaatcatagtttttgtacaaaatttcacaaacttaaaccaagcaactagcatgcatgaaacctacttaattccattcaattcaagcatagaaaatcaaagaaaacaacctaaaactacagcagccacaacatcaaaatcatcatgcatttactcatctttttcaacattttattcaagaaaataaaggaagaaagctagaaatcacataccacaatcaagagatcactagagttttgcaaataaagcttgaatcaccaaggaaaatggctggcttttgatgctccaagagagccgaaaaagagagagaggtttgagagaaaagctttccaattttttctattttttaaactttgtaattttttgtaaaatgaaatgaaagctatttaacatatatcaatcttatttcagccaaataataataccaaataaacatataatgccactaataaaaacactagaagacaaaatact

SEQ ID NO: 344065 - DNA, 542 bp, Cannabis indica
aaacttgcacaaaacctaaaccaactatcaataccagctgctaagacccttaattaactcaaattaaacttagaattcaaaccctaagcatacctaaacctaggagcccttaaactcaaaaatcacatattgaaactaaagtacaacttcaagaacttaagggaagaagaagctagggtttaccttgtcttgacttctcttgaatcccttgctaaaattaccaaattcagcagcaaccctcttgttcttggctgggttcgaagagagaaagaggaaaggaaagagagaatttcctattttttggcttttcttctaattttactaaatgagataaaaagttagggaaatcaatttcccttggctgaaagaatttgcttgctaggtgtcaactaactaggcagccacctatctcctctcttggcaattactaaaatgcccttactcataaaactagggtattttcaaggctaggggtaaaatggtcaactcccataaccccgcttaatcccgatattttattttctctaaaatatttccaacta

SEQ ID NO: 344066 - DNA, 508 bp, Cannabis indica
aaaaaaacaatcatttagttgcttttgatgtgaataagatatcaattggttacttttcaattaaaaaaatttatttcaaaactttacatatatataaataataaaataaatattttaatgtgtgagaaacatatttttttaagtctctaaaaaagacgactaatattaaaagaaactactttgtttcttttttatatttttaggctatattatgttattttattgtttaagatgccttaggttactttttattttttttttaatgtaactcatatgattttttagatactattcaatttatttacaaattattttataaatttattaaaataattttgtaaaaataagtttatttttgtttaatcttgtaatgtttaaatataaaaaaaaaaaaaacttaagcaacttattattcagatttacattaaattttattaaaatttaaatatcgtttattatttattaactaaatagaaaaaaaaacctaaaatatttaataataaaaaaa

SEQ ID NO: 344067 - DNA, 699 bp, Cannabis indica
gactattaggattgtaacaatggataatcataacgtatatacatcgtggtacatataaagcgttctatataattgagagtactattcaattccaaatctatagtggtgcaaggtggaattaataagttgagaatttacttggtgaattctagatctacttattgaaagctcggtgatataggcccatgaaaccataaaagatcacctaggggtatttttgacaactctaaaatctcgactattcccgacattcccaatgtctaattatattgtctcgctatactaaaaatactaagatgtgattctaatagccaaacactgcgttctaatgttgtcggacacaaaacatgcaaaatttatgaaataccatatatgacctataaaatgcattctgaattcaaataaatcatcgtaaataaataattcaaaactaataaccaagtttctaattaaaccctaattatctgctaatttccaatttaaagctaagcggtctttacatccatgttcctcctatctgcttttcaaacatctcattcactagttgctgatatgttaccccagcgttcttcaaactaaaaggcgtgactttataataataaagtcccatgtttgttatgaagcttggatgttctttatcagggacatgcatcttaatctggttatatccagaatatgcgtccatgaatgtcataagct

SEQ ID NO: 344068 - DNA, 1002 bp, Cannabis indica
tttattgaataagaatagtcagtagtacacaatagaatgagcccaagattatagctcaacacagtaaagtattacaaacaaatgcctcacctttgaggaaaatctcttcaagagtgatactctcttttacatccctctacacacactcactatgatcttggactctctctctcaaatgaatctaaagtatgagctttggagattagaactcagaactctccttttgagaatagagaaacacctatttatagttgttggtggggtcccctttaagttggtattaaagccaactattataaataacaacggctttcttcaaattcatctgatgagcaaatagatggacataatgacttgataggttaagtgagtttaataccaacaattctacctgattagactcacttaaacactgatccaaaataaatgagtgagggaatgaaatgtcctgaatgctcaacaagtttagacagtgcctaaacttgtctctagttacacttttaatgaaaatatctgcagggttatcatgtgtgcttattttcttcacttgcaccttcttggatgacacaatatcccttatgaagtgtaacttgatatcaatgtgctttgacctcacatgaaatattggatttttcatgagatgtaaagcattttaattgtcacaataaattgtgatatcctcatatttgaaacataattcctctgtcagccccttaagccatatagcctccttgatggcttctgtagcagccatgtattcagctttcgttgatgataaggctatcactttctataggttagatttccagctgatgcagcccccaatagcagtgaacacaaaccttgttaggcttcttctagtgtctaggtttactgtaaaatctgagtccacaaaaccaattatttcttccttgtactggttctccttactgaacacaatacctatgtccaaagtattggaatttattttaccaggatcttagatctactcacaagtatgtt

SEQ ID NO: 344069 - DNA, 962 bp, Cannabis indica
ttttgaacttgaagcttcattgatcaaaacaaagatacaaagcaaacaagccattacaaggaaggtaaagaaccattccacaataactccctgtctaatcctaaacccaacttagctaaattatgagcatgagtattatcatccctcttaatgaacacaactttaggcctaggactaaaggacaaagagttgttaacatcaattaacacatcatcacaaacactattattccagttacaattattaagcttatcaaccacaaccttacaatcagaatacaagggatgaacaggcagattaattaacttggtccaagcaactgcaagagaaacaactttagcttcagctacaactggtgcaattaacccagcaactggcttcaccaacccagcaatcacctgatccgaatcattcttcaccaccacacttaagctaaaaacctgcttcacattatcaattgtcgcatctgtgaaaatctgatacctgcctgaaggacacctttccatatccaagatattctgatcacacagagtgagaggagtaaatcatttctgttgagcatccagatactgcagaagaaagctttgacaccaagcaaacatatcctttggatcaagagtgaaccgattaaagaaagcattattcatttgattctaaattgtccataaaaagcacaacactaaatctgcagaatctttatccaaacttgaaaaatattagaaagaaaatgcataatatccaaatgtttattttgcaagtaaaaatgagcaagatctgaagtcttccaagctttcctagctctaaagcactctagcaatgcatgcataaccgtttcaggggaatttttgcacaaaggacataaatgagaaggtataatatgtcgttgggagagcaaaacagcaaccggtacagaattagtcacaattctccacacaaaatgtttgactttaggaggaatattt

SEQ ID NO: 344070 - DNA, 1122 bp, Cannabis indica
gttctttatttaattcggtatggcttataatgggtgatgcattcactttggtttcattcttggcaaccttgtgagtttgataaacattgggaattttcagcatgatttttcttctttctcgacagttttttttttttgagtctccgagtgagattgtaacagctatcaagctgtaaagagccatatatgttttttttttgttggtgcacgaagagccatatatgttcttgtaatgtgctgctatcttttaaattttttttttttttttttttttttttttttttataatttatttatattccattttgcacttgtatttgaatatttgaagatgaaagtaatggttttgaagctgttattttctttgaagtgacgctcgttttgcaaaacgatatttaagaatgtgtttttgagtgcagataatattgactgtatcttgtttatggtatttgtggttacattttcaagagttgaagagtgcttggaattcttttgcttatagagtagatgtagtaaaaatgtttggtaggtatatctttaaattaatagttgcagtgttaaattgcactacatagtacatacatttcctcttcaacattcctactcatatggaatcatataagttaatccagtgacaactgaccgatttaattacaaccgaccgacaaatattgaatattcaattgggatcggatcagattggatgttatttttgaatatccaattagatcgaattaaatgttggatggggtgtctaaaaatcaaatacatttaacatgcaatcaaactaattagtgttttcatttagtttagatgagtaattagagtttatattgttacacgtaaaatatatatgtatatataaaaataaacattaaaagtttattctttttttcttggattggatggatctaatccaatttaatacatactggacttaaaatattagatggattcgatccgattcagaaaatactaggtctaaaatattaaataaactcaaatagaaccaataaatatgtataaaatatatttaatggacataaccgatccaatctaacatctaatggatgttagatcgattggataattgaaaataattagatcggatcggttggtaaa

SEQ ID NO: 344071 - DNA, 779 bp, Cannabis indica
tccgggtctggggttgggtcttgagactcgatcccaattctgatgcccgtgtctcgtgtccaggtcccccatccaagtccgagtcctaggtcctggtccgacaccaggacccaatcggggttcaagtcctggatcgagtcggggttcaggtttcgatcttggtctatgttcaagtctaggtctatgttcgggtccaagtcccgagtttcatctaggttggtttaggcctaggtgcagtgccccatccaggtctgggtcctagatcccgactcggtccatgtttgggtttggtcatggtctcgatccggatctatgtgctaagtttcaatcccagtgtgggtttgggtttgggttcgagtccaagttcgtatttggatccgtatctaagtttgacattgggtctggtatcaggtctgaggtctaggtctgggtccgggttcgggtacgggtctcggtccctgtctggttacacgaccgtgtctgggcccgagttcaagtatcagtttgggtctagggcttggtccgagttcgattcgaggtttaagtccaagttctggtcctggtcacggtcctagtcttgttcaagggtcttggtctagtggttcttattcaagttctagtttaaggtcgcgggtctggctcagtgtccaagtttggatcctgctctgagtcccagatctggatccctgtcacgtgtcccggtcttgttctggttcaggtctagggtcctaggtcaaagtttgggttcaggttcgagacttgggtgcggttctaggtcc

SEQ ID NO: 344072 - DNA, 858 bp, Cannabis indica
gactcgaactagaaaaaactaaaaggaaaagactaaaaaaccatgtcaaaagacaagactaatggaaaaaactaaaaggaaaagactaaagaaccatgtcaaaagacaagactaatgggaaaaattaaattagtttcaatacataaacacgatcacaacattaaaattaattaaggaatgaactccttataattctaatcccataacaacattaattggaattaaactaataatagtaaattaataaatgaaaacaaaaatctaaaacagaggacgtcgttgagccgaactgaaccactctcagacgattgctcttgaaccctcacagacgactgaagacgactgctgttgaaaccactctcagacgattggccgtcattgatcggcgacgccagccgactgaaccgaacggaagcttctcgacgacccaaccaatatgtgatatcttctctctccaatacgcgtgcgaaatcaccaattattacggaatcaggcaaaatggtgaaagaataaataagaaatgaatataagacttaagcgatcgatggattgcagaaaccttcaaactaaaatattatgaatttaattttcaaaaaaaatattatgaatttatgatcataaaactaaaaacacacacttatatttattagtttttaaaaaatgtgtaaaaaaataaataaaattataattaaacgtggtatgtttattaattattaatctaatatattttttataataatatttgtaatgatatattatttttaattttaatgatgatatgttgatataatatatttattaaatttaaaaaaaaattaaaaataaaacatgtatgtttattatttatttttactatat

SEQ ID NO: 344073 - DNA, 723 bp, Cannabis indica
cataaaacccaacagattgtacatcaatcttctgtgggaaggtggctcaagttctacaggcagcatagcttcataaccgtatgccgttgcgaatggtgtctgtccggttgtcattttcttagttgttcgatatgaccatagaacttcaggaagctcttctggccaatttccttttgcatcttcatgttttttcttcagtgtatccttcaaggttttgttgactgcttcaacttgaccatttgcttgaggatgcgccactgcgaataaacttttgatgataccatggttcgcacaaaagtcagtaaaggattggctattgaactgctttccattatctgagactaccttgtacagcagtccgaaccgacagattatattcttcacaataaagtcttgaactttcattaatgtaatggttgcgagtggttcggcttctctccacttggtgaagtaatcagccgctaccactgcgtactgcactcctcctttgcccttgggtgattgtccgatcaggtcaattcccaaaatggcgaagggccacgggccttgcatctaagtcaactcattaggtggagttctaggtatctttgaaaatctctggcatttgtcgcacttcttaacataggcttttgaatcttcaatcatccttggccagaagtaaccttgccttagaattttcttagataagctttgccgggcggcatgatttccacaaaatctgtc

SEQ ID NO: 344074 - DNA, 1256 bp, Cannabis indica
ctttggaaaaaggattatgacattttaaattcctagttgacattataaatttacaataatactcatttggaccattttatcaactttacatttttaggctaatttaataattttaccttgtttcttcatagtttgtgtttgttaagtttttttatatattctcatcactttattttattttgttgaaaccagtttgtgagtaattagttctataaattaatttccaagttttaatccctgtggagacaatactcgatttatcactttattacttgttacgattgcgtgcacttgcgtatacaatttttcacaacaagtttttggcgctgctgcctgggattgatttagtgaaattttgtttgtgaaacttaattactatcaatttggttttttgttgtttttatttgtttagttttatttttttttgttctattttacgctttgtttgtcttgttttggattcttttgcaaggtacttgagatgtttaatcgacaagtccttatgaattttgttcaacacaacttggagcccttgtatgaagcatggtagagatacaagacatttctaatgagattttcatatcatgggctgtccaaatagtgtgaattagaaatcttcctaaatgggttgtgttcacctcgattttagccaacgacaatgagtctaatttgtaagcgacaagtagtttaatacgagtgtaatataataaagcgaataaagacaaaagaattttatagaggttcaaccccgagcagtttggtaatagcctaatcctcgtagcttgtattgacttaagaacaaggagaatggttccttttcttggagctcttacaatagtatctctgaatatgaattcttagaaaaatgttttgaccctttgcccagtgaatatgaatcactagttatagggctttaaacttgggaagaaagtatttcccttctggttacaattgatataagtagaaagattacatagtaaatacagaatacactaatcgtgggattcagacagcttgccatatttctgtgatctgatcccaaagttatagggatttctttggtgactcacgatgcgaaaactaaatcaattaagtgttggcatgttgcgcggcttgcccactgctcagctaagaggacctcgtgtgagcgaatgtaggttgtgtcatgttcggcatatttcttgcgagcaggtacatagagttaattccacgtgtcaccatcgcgtgatgccaagtcagagtgcgaaaattgggat

SEQ ID NO: 344075 - DNA, 773 bp, Cannabis indica
attgtgtattttctatttatttaagactattggtaaatattttgaaaattctaaataatttatactatagaaataagatttaaacaattgtttaccacacgtataaaaaaaataatcacaataggtgcaaaaaaatattctaattatattttcaatttcgtaaactctttgaaattttttaaaagtttacgtgtagtctaaatagctacaatgaatacaattataaaaaataatttggcttaaaaattttcttggatgctaaatcagataaaaagaatatcatattaacttttttaggggatgtactataaaattaccttatatacaaacatacatataggactcgacatcgggcgggttgatcaaattttgagttcaaaaaattgtacccgggcccgacttgtgaaatggttcaggtttgcaggtttcgggctcgcaagtttacgtgtctacacgttcgggtcgactgagttggttgggtcaacgggttgacccggtcaactcattatattttttaaaaaatatcaaattttatgtggtttttttatatagtaaattaagcatttaaattttaatcttataacattatattctatattcgttcgattaaaataaaataaaaaatgaattaatttcaaatctaaaatacaattgtcaattccaaactatatatactatatactatattgttatttttaatatattatctatgtaataaaaataaaatgattaaattttaggtttttttttaatatattatatatgtaataaaa

SEQ ID NO: 344076 - DNA, 958 bp, Cannabis indica
tttttgggatcctaactattttaaaagtttaaatatattacaagtttattttcattctgtttaatgtaaaagtttaaattctgcgctattttgattagtaatcctgtttaggggattagggtttcataagtattttgggtagcgtgcctaattattcagggcgttacaatcctcctaattttgtgaatcttaatgttgacctcaaatttagccaaccgacagcagagttgtatttatgattaaaatcaccatgtgtaaacaattagaacaagtagataaaaaggacacaatgatatgagagataataccactcagatcataagtgttgtggttctagagtggctctctttgaattacaatatgagaatgtgaagtagatcttaagtagatgagatgagagagacttagtctcttctacactgcaaggggtgtgtagaagagagagctagggttttgggagcttgaacttaagagcttaggaatgagagcttaagaggttttaggtttagcctagtggtctttaaataggagagactttacatataagatagtaggttgatatcccttaaaatgaggagatatcacctatttttttacacattaaataaataagaaaataacttattaattaatcctaaagaataggtaaataacagaagttaaacccctaattttgtgggttgttgaagccaattcatagctgatagtgttgttcaggttgaaagatgaagagacacagaaagtccctatcacaggagaaactggccggcataccctttgctggaggatgggtggcctatgttgcactaaggccgactaggggttgttgttggaaatattttaccaggatctagatgttgggttttatgccctaaataaaactcatttcagtataatcaaatttacatattaatatagatcagaaataacatttcatgttgcaaggttcacatgattt

SEQ ID NO: 344077 - DNA, 768 bp, Cannabis indica
taagtagatctagaattcagtaagtaaattctttaacttattatttttaacttgcgccactatagatttggaattaaatacactctcaattatatagaacggtctatatgtaccacgatatagatacgttatgatcatccattgttacaatcctaataatcaaggatcctctatagatgatctacattgaatagggataaatttacagttctaccctttaatgtattttatacttaaaacacttagccacctataaatgatactttagtaaactaatataattattgaaatgatgcctcaatcatttatttctattcagccaaactcgaaaaaaatcatcgtttcacttctaaatacttatagacgctatggattccatatctatgattagcgctcccactcaattgaactaccatgttcccaagatgtaaatatctactagaaccattggtttgcttctacaaatacctctaagaacataaataatacagctaaggtaaaccaaaccatatcagaattatgatccatacattcgatactagtaaactttgccaatgtcatgaaaagtatataacacttatccaaggtgtaggtatacattatcgttgattatcatgccagtctaaatccagtgaactaacaaatcattagaattaaacttttgaacatataatcatgattatatttcactgtgctaacgatactataatcatgaacaaatatatatatatatatttatatatgttctgggcttaataaaatttatac

SEQ ID NO: 344078 - DNA, 635 bp, Cannabis indica
tttttaaaatgacaaaaaaactgttttctattctcacttttaaaaacacaattttaaaaactaaaatctaaaaacatatagtcaaacaggctctaaataaataagaacaaaggcaactccaaagagatcacaaattatatatatgtcatgagtatcttattcttttttttttttatatgacattttgagattaatgctacagtgtaatgtaggcacgacatttttttttatatatatatttatatatttaaataatatttatatatgtttataaatattaggataatgtgtaatttctctttatattattaaatgtattggaaaatttaattttttatccttacattaagagaaattttttcccttaaacctaaaataccctatattggtaaaataggacaatatttacttaattcgcacattaccccctcattcaaatttgactccacaagcatcggacccaacacaatttatttgaaaaatcactcaacacaagcatcggacccagccccatcgggtgccatcggaccccatcggagcccatcgggtcttcgtcttccccaacccattaacatggagcatcggacctgcatcggaacccggtggttcgatcgagatgggttcgtggtggagga

SEQ ID NO: 344079 - DNA, 548 bp, Cannabis indica
tagccaagcttaatggcccatttaagtagtcgggttgatggttcaggtttctacaaaacctgtcacagtggttgatcgatgtacaccttgatagggtgtgcttggaagtaatgtctcagctttctggaagctaaaagcaagttgtaggtcagtttctccatgagtgggtatcgactttctgtgtcgattagccttttgctcatatagtatacacggtgctgtacaccgtcttcttctcttgtgaggacaacactcacaacatgttctgtgactgccaggtacacgccgagctcttcattgtctaggggtttagacaacaccagtagttgggctagttgttttttcagctcttggaatgtgttttcacattcctctatccacttgaatttttgttgcctttgagaatgttgaaaaatggtgcacatttgtctgtagacttggacacaaatctacttactctagcaatgcatcccattagctttgtacttccttgacagttatgggtgacttcatgttcaaaaggggttggatcttgtctaggtttgctt

SEQ ID NO: 344080 - DNA, 651 bp, Cannabis indica
atgtgtggttctgaatagcgacattggcacaggttatttgatcaagtccaagactgggcgagggagatcgtcaccaagagggtggttctacggaggtagagggacaagtgtagacttaggattcaagagaagcttggagtaagcttaggagttgagatcaggaagattcacctgcggtctgtcgatgagggcatcgacatgttgaagtggggaagaatgtaacgtgcgtgccaagatggcacgttacaagctaagtgatgcccacaagttggccaagtggtggtcaagtgggggcgcatgttctggtgcatgctggtggcatgctgatgcttagtctgtacggtagtagcattttcgtaaatatcttcaatattttctggatcgggacgggacttggtatttgccatttatttaggtctacaaatacaatggttcaatcagtttggcaaaactatgtgatttggtatgcggcttggccgtatgtctagagagccaaaatcatgcatgttcctggtagaaagctaaaagctcaaaatgctctttaagggggtaccctggtgtcagctctccaccactccctagaacatttgtgctaagtgagctactactagtcagcggggctagtaggatggccatatgaggtccatgtag

SEQ ID NO: 344081 - DNA, 784 bp, Cannabis indica
tttgttacgtgattgagaaaaattaggggaagacaatcccatgaaattagcacggttgggattggcactggtatgggttggaccggttgcgttcacaccaggagagaagctgctgccagctttgctcaatcggaggtaaggagattcagtgaaattctggtgccgctgagaagctgatttcatgtgaagactgtatggttttacgataagatgctcaggagtatcaaaatgccgtgggcataagcgttccgaatgccccatgagaccacaaataaagcagaacgttgggacgttttcataccgaaaaatggcgtagaaggaactgccatcacgtttcttgaacttcatacgtcttttcaagggtgaatcgagagaaagagtgacacggatccgtagaaattcacgccaaacgcctgtgaagttgttggggtcgaattcgagaaacttaccaacgtaattaccagcatctttggccactttcatggtcgagaaaccggcctgaagatcgtgaatatgaacccatagatcaagtgtgttgagcggcacaaccctaggattgccaccttcgttgagacacttgattatgagttgttttcgatcgtaagtccacggactgcctttgataactcgttgaatgtcgatctcatgatagaattgaaacaaaaaacgattttgatcaagttgtttagcgtacatacctctgtcgggtttccacaagtctgccataatgttctgaaagatacgaaaatcagagatctttccagttaacagccgcccaacgaga

SEQ ID NO: 344082 - DNA, 525 bp, Cannabis indica
aaatttttggggagctccgcctccaggatgtgcctggcacatggctcccggtcctcacagtcagagtcggagtcatcgccattttatctcccggagactcgagcaatgtcttttcggagtatggtaagttcagccatgattctttcatttagcgttcccgtggagaccgtgggcacgtgtttcttttggtctaggtgatcccgaagctcaccgtgttttccgttgatctaatgtctcagatcgacgggagggtatttttggcctcttccttctgcccctccgggttcctggtgcaaagaaacactctttcggtcctctcgatcctgagggccaagactccctctttggagttttcccctctgcggacctttcccttttgggaaatctgagcggacctttcggcggatcctgtgcctttttctttttcccgagagtggaagtagggtttttctgttggttcccttcagagggataccttatagggctaggttccctagacttcttcttctgggcacttggcgagga

SEQ ID NO: 344083 - DNA, 743 bp, Cannabis indica
ctttgtttggaaacttcttgtaagagaataaattttcttatggaaagttgtctaattttggaaaacttgactttccctttttctaattgatgatttcgattttgcatttattagaacaaatcaaattatctttatttgacaggtttgaagtctaaattcatgatcttggttcaatttagaaagttttctttctgatcctgatctgctactgcgaaacccgattctgatgctgcaaatcaggaattttttttagaaagttttgtacagctgggaaatcatttttgtggttgtctctagggttgctatattctataaataggacctagagagcagccaaacaattttatctcttcttgtctcatattttcatacctttttttgtgagaagagtgtttcttttgaaaaaacctagagtgttcaactaggttttggttttcttattatgatctcatactattcatagaataggttgtagacaagctttgaacaagtgttagtcttcgggagaagacttttccaagtctcatttggggaagaagtgagcatatatctttgggagaagatttgtttaagccttacttcgagaggaagtaagcacacaccaatagttgaagggagttcactacttggtgtgtttcagagatcagattagcaaggtggattacaaagggttgcggaaaatcactagagtgagtctaaatttgtttaagtcaattgtttttataatctttgatactttacta

SEQ ID NO: 344084 - DNA, 865 bp, Cannabis indica
accgaccgatgtacaaccctacctaagtgtctcttaaagaagaagaaaacctagagtaatattggcagagttttagctacataaattgggataccccttatatatgagaattgaggggtatttatagactaagtggcgggtatggataggcccatgacacgcctaaggtttctgccaaaatcccaatgttggggtaatttacatgcgatattagagttgattgaatgatcctatggaaaatattatgcccgtgcgtaaaatagttggataataggaacattttgtaccatatggacacatggcatgcaaaagttcaacttttaaaagtagagcccacatgtcacataaaccttgagtaaaggtctataatacccatttgggaaaaatgtggtagaaatacgcgcactaccatgtttgggcataggagacaagatctgatcttcgtcagaaaaaacataactgtcacattggtgacctatagactgcataaaagttcgacatgcatgacattccagaatggtcgatgtgtgcgttagacccttcgaatacctttctgggtatcgtttgggtgagcttccctttttagacccctttgactctgggagaagaaattcgccttctgcatccgtaaagctaagtcaagcttaagtaggcttctgtgtgttcttccatctcgagttgttcccgatttcaggaggcttctctgtgatagaattgtatcaaatggctttgattagggaaggattaaattaatcttcctcataaaatgccatttgtcatgctttgcagaaacgcggaaaacaatttaaaataactaaaacaacaacattactaagtaatataaaatatcatgaaaatagataca

SEQ ID NO: 344085 - DNA, 770 bp, Cannabis indica
tatgcaccaatgaaatagtgagctgaagcagaaatcgatgatcggatctgaggttgaaggaggggctctcggcagtggaggggtggcggagcttcgccggtggtgtcgagttctgtcaccgtgagagagagaagaggagatagagtgagtgagatcgagagagggagatggagtagtgagttcgagagagggagacggagtgatgagggagtgggtgagggtttctgatagatggaagcaaaatggaaggaataaggcaaaatgggggaatgagcaaaaatctaattttttaaccttatacccgacggttttgaaccgtcgggcaaagaataagccacgttttaaaactgtggcgaatactttccccgacggttctaaaccgtggcgaatagtgcatctaatttttttttttaattttttctctacatttattaactgtcgcctattgtttacgagtgttaaaaactgtcgcctataatacaatataggcgacgattttaaacactcagataatttttttagcgacgggtccccaaaaaaagcgtttttgggaccgtcgcgaatttggccttttgtagtagtgtgtgatgcttggtattagagttgggaaagctcaggctatttttcagtcaaatcagtttataagttcttgcaagtgaccaaagaattaggggcacaggatgataattccatgttttggaatactcttcgaagctaagtgttcccccaaaagtgaaaaatttgttttggcgggctgctactaattgttt

SEQ ID NO: 344086 - DNA, 678 bp, Cannabis indica
tactagctatctacatatatgttagttttttttattaaggttgttattgaacactagtggtgtttagcatcacttacaagtggtgtcttgtgattagttaacgatattggctaaaagtcattacatgaaattatatgcgactcgttacttaattacaccaatagtagtgatatatgacacttaggaggttaggagggtgttaggcatcaatagtatcttttgacattttttttttattccaatttgaattacactcgtaaagagtcacttaaattgagagcaagaatagatagaataagacatcaggggcacacccaagtgagagcaagggcttgcccatatgctctaggtaggggtcttcattaaactgcttaaactgtccgcaccacaccgcaccgcaaaaaagaaatgcggtttgaaattctttgcggtgcagtcccagtttgaatttttcttaaaatgcgcggtgcagtacggtttgcagtcttgaattgttaatatgcggttcaaaccgcatcgcaccgcacattataaaaatactaatttttatatttatttaggtccaatatgtgaatgtccaacccaaagcccactaattattacattgttatagcttaatttttttttcatattttttttcaagccttatggtatttttgacaagtgttgctcaagttt

SEQ ID NO: 344087 - DNA, 202 bp, Cannabis indica
catgaaatagcatgaaaaatataagaaaacgaaaaaaataggcaggtggtacggacagtatgaaaagcgtactgtccgagcgcgtggaaggggggacattgctgagaaaactcggcgcaggggtccccatgcatgatttccgcgcgcgtagaagggtgttcaccacccgatttttcccgatttcaaaaattcataactaatt

SEQ ID NO: 344088 - DNA, 2093 bp, Cannabis indica
aggactttatccttttggtcaaggatctgcactagctgttcttcatatgacatatctggctgtagctgaagactttcatagctaaatacatgagtggggtctgaaacgtattttctcaacatagagacatggaatacgttgcgaactgctaaaagagctggaggccaagctaatcgatatgccacttgtccaaccttctcgagtatctcgaaaggtcctgtaaatctaggtcataacttgccccttttcccgaaacgcttgatccccttcattggagatactcgtaaaaacacgtggtcccctacttagagctcaacatctctgcgttttggatctgcataattcttttgcctactattagaggcaagcattctagctttaatcttctcaattgcctcattggtccgttaatctgattctggacctaggtatttcttctcccctgtctcatcctaatggatgggagatctacactttcttccatacaacagttcatagggagccatccctatcatactttgataactattattgtaagagaaatctatcaacggtaggtacttactccaggagccctcgaaatccataacacagactcgcaacatatcttccagtatctgaattgtcctttcggactgtccatctgtctgaggatggaaagctgtactgaatttcagtacccatagcccgttgcaaacttttccaaaacttagaagtaaacttcggatctctatccaaaactttggattttggtacaccatgcaatcttactatttctttaacgtacaaatctgcgtactgatccactgaaaaggttgttttaactggtagaaaatgtgtagactttgtgaatggtctaccacaacccaaatagaatcaaacaaacctgtggttctaggtaacccaactacaaagtccattgcgatatcttcccagttccactcaggtggagttaaaggctgcaacaaccctgccggtctctgatgttcagccttgatctactgacaggttaggcattttgatacaaattctaccacattcttcttcattccattccaccaaaagtaaggtttaagatcttgatacatcttggtggtacagggacgtagggaatatggagtggtatgagcctcttcaagaatttcatttatgagttctgcactattaggaacacaaaccctagttttgaataataacatcccactgtctgacactgtaaaatctctggcttgaccacttgatacctcttccctgatctttactaattctggatcagttaatcgagcggctttaattcgttctaacagatcatattgcagcgtcaagttaggaagcttgcttacaacaaactagatgctagatctgaccatgtcctctgctaactgaggtgaaatctgaatgatactagctacctgcctgggccccttcctgcttaaggcatcagccactacattggccttccaagggtggtaaaggatctcacaatcgtaatccttaactaactccaaccaacgcctctatctcatattcaaatctttttgggtaaagaaatatttgagacttttatggtcagtataaagttcacatctctctccgtagaaataatgccgccaaattgtcaaagcaaatactacctcgacaacttccaggtcatgagtcgggtactgctgttcatattctttcaactgacgagaagcataggcaataacctgatcatcttgcatcagcacgcaccccagaccctgtctggatgcatcacaatacaccacgaatttctccttatcacaaggtagggctaacactggggctgtaattaatttctgcttcagctctagaaagctagccttacacttgtctgaccacacaaaacactgattcttcttagtaagctcggttaagggtgttgaaattttagaaaacccttctacaaactgacgataataaccagcaagacccaagaagcttctaacttcagtcacagtttttgctcttggccaatccctgacggattctatctttcctggatccaccttcatcccatttttgctaacaatgtgcccaaggaaggacacctgagatagccaaaatttaca

SEQ ID NO: 344089 - DNA, 608 bp, Cannabis indica
ttgtaccattttaaaaatacatcgattgtctattttgtcatttaacaaaacagattgtccaattaataacttttttgaaacacatgatccaaaatgatatttacccaattaaaataccttatttaaatagaaaattttcataatccatacttaaaaaatgctaaattattatttttttttaaaaaaaaaagccctaattatactatactattttatccttataacccaaactacctttcccatttactcttttcaaaaatctcaaaaaatattcttctctctaattctctcattatctgtcgtgcctaacggacttgactgaccttaggggtgttcgcggtgcgagtggtgcgatttttgaccatttttttaaaccaacccgcacatgcgggttttccaatttcccaaaccgcacccacactgcgaaactaaaaaaccgcaaaaaatcacatcgcaaaaaatggtgcagtgcggtgcggtttttgcggtttggactaccaccaataattaaattatcacaaatacaacaaatcttgagcaacacttgtcaaaaatactataatgcttgaaaataaatatgaaaaaaaattaagtttcaataatacaat

SEQ ID NO: 344090 - DNA, 856 bp, Cannabis indica
ttatgttatataacccattctattttagtgataatcggttttgagttatttcgtgtcattaatttttattcattataacactattgtagaaccggttctattttaattataactggtttaaattattttgtgttatttatttttattcattatgctacagaactggttatattttaattataaccgatttgagttatttcgtgttatttatttttattcataatgttatagaaccggttttatttttattatatccgagacatttgatccccacttttttttttaaaaaaaattataaccggttttatgagatattatgtgttaagaagtattttattgtgaaactaattttgtttttaatttatatttcagtgttttaggaactgatttcttttttgtttttaattgtaatcggcttgagttattgcgtgttacttgtttgtactcactatgttatataatcagttctattttagttataaccagtttgagttctttcgtgttatttattttttttcattataacactgttatagaaccggttctattttaattataactggtctgagttattttatgttatttatatttatttattatgttacagaaccggttatatttcaattataactggtttaagttattagtgtttattcacataaccagttatacttttatttatatctgaaacatttacttctggtgacttttccagtgacttttccggcgatgttgacttttttgttgacttttctggtgacgatgactttttcggtgacttttctgatgccggtgacttttccagtgccgacgacttttccggcaaaatttattgttgttttacaaatatgggatt

SEQ ID NO: 344091 - DNA, 527 bp, Cannabis indica
tggtccgggttcgggtcatagtctgagtcccagatcttgatccctgtcacttgtcctggtctggttccggttcatgtcataggacccagttctaagttttgcttcgggaccaagactggggtgcagttctaggtctcgaccccaattctgtgtcccgagtgaggttccatgtttgggtcttagttcgggtctaggttcggcaccgagtcgaggtatgggttggcatccgggttcgggtctaggtttgggttggagtccgggtcctagtccggttacggttttaggtctaggtctatgtttggttacgcttcgaggtccaagtccatgtccaagtccttgtttcggtcccgttcccgggtctcaatctacttgtggtttcagttccaattttgcgtcacagggtacgggttctggtccatgtttatgtctaggactgggtttgggtccgggtctgagtttggtttctgctctgggttcgggtctggggttgggtcctagatccaaacaccgactacgggttcggtcca

SEQ ID NO: 344092 - DNA, 698 bp, Cannabis indica
aatttgaaaaaaaaaaaaatttaaaaaccagtatatggaataattcccctattttttaataaaaaataatatttattaaataactttaaaagattaattatacaactaaaatatatataactagaataaaagctaagaataggactaaatataagtgcatttatatataaattgaatcaaagttacatgcaaggcgaagtatgctttgttatataatttgagatttgaatgaaaaaaaaaataagggttgagatgcaaaatgaccctaaatttggaaactaagttagtaaatgtccactttttagaaaaattaagaaaatggccaaatctaataaattagctaataaaaattataaaaatgtatttatcacatattgtttttaaaaaatatatatatgataataaaattaaattatgtaatttttttagtattgcatattattatattgtaacaaaaataaataaatatattagatcatgcaaatatatacagcagtattagatatatcgtagtactgaaaattaatataccttagtaataaaattatataccacaaagaaattataacaatactaaattaatactcaaaaaatatatatatcatgctaacaaaattatatataccaatattaaaatatgaatacataccaaaaaaattatatataataaaatagaaactaagtatcatattaaataa

SEQ ID NO: 344093 - DNA, 855 bp, Cannabis indica
taacttttagattgtaaagttttaattattacaagttttactttcattccatttatgattaaagtttaatcttcgcgctaattttattagtaatcccaattaggggattagggtttcataagtatcttgggtagcgtgcctaattatttagggcgttatagttgcactgcctcttcgagcttaatgaatccatctactcgatccaaaaactcagccattgatcccacagtcaatctcttgatatatttccataattctcccagaggctcaatgcccccagtatggtcgctaatcttccctcctcagtcaggcctttaacctttatttcttcagtcatgagcctgctagtgtaggcccttagaggttctccaagaatttgcttcacttctaccaggtcttctaggtgcaagggaagctgacgagcagaagaaaattgtgtgtgaaattccgaggagaaataagtccatgaattatactttcctggaggcaatttgaaataccattgttgggcggcctctacgagtgtggccagaaaattctacactgtacattgcctcttaccccctgtaggttcatctgtatttcaaagtacttcaaatgggataaaggatcttcttttcctatatacattttccatactagcattttgaactttgggggtaggtcaagaccatcaatttcatgtgacaagggtgatcctcgtgcccggtcaagtttgagatctatgagttttgggccggttaggccttataccatgcttttaagttaatctatttgtgcttgcacaagtggatgaacttggccagcctactcattgacctgtatcacgttgagatctctttgaactggatcttg

SEQ ID NO: 344094 - DNA, 401 bp, Cannabis indica
aggtctggttgaagttccaatgcttcataactgagaacatgagattagtctgatacatatttttgaagcatcgaaacatgaaacacatcatgtagaactgccagcgctgggggtatagccaacctgtatgctacttgtcatatcctttccagggtttttaaaagtccaatgaacatggggctaagttttcccctcttaacaaagcgtttaatacccttcataggagatattcaaagaaataccatatctctgacttgaaaatcaacatctggtcactttggatcggcatagcttttctgtctactttgagcagcgaacatatgcactctaatattgtcaattgcctcatttgttctttgaacaactttgggacccaaaaactttcttttgcctacttcatc

SEQ ID NO: 344095 - DNA, 566 bp, Cannabis indica
tattcaatacaaactttttccaccactacatatccttaatcacaaaatcattgatattgtgaaattcctttctatatgtctactcctctagggattctagattctttactttttgacaactacttcagtgttagttaggaagtaacactagtagttgataaattattggtacaatgccaaaaaccgtattaaactttccaaaggctgttaaagtagatttcctgcaactttaacattttgtctcactgttagagtgagagactccaaatcgattttgacactactccaaaaccactgctccactcctagagtaatcactaggggtgggcatccgatccaatccaacctttttttcctcatccgatccaatccaattagtaattggatttggaaaatcatcatccgatccaatccaattagacctcaaaatccaatccaatccaatccaattactaattagattggatcggttttttaattggatatccaattacacacctaaatttcaatattagcttaaaaatataaagaaaaatacgtaaaaaactaagtattactttttattt

SEQ ID NO: 344096 - DNA, 1159 bp, Cannabis indica
aaacaagaaacaaaaaacaataccaaacatgctcttaggttcctgccacaattggaatccccatgaacaccacagatgtgttaaatcttatcaccacaataggcgccacaagtctggccactacagctggccaaactgatacaagcatccaacggatccaagtagcaggcccttacctccaagagaagacccaacattgacgcctcatactaaaggaaggacccaggggcgacagccccctcgaacaacaattggatcttgtctctagttctacgttggagagacaggcccaggagtggcgagcctgcaattggcgagccctatctggacttgggagaagatcccgagttagccagactcagagaagttgtaggccatgcaggccaaactgaagaaccatgcgctgctgattgtgatgctttcgctcagcagagacacgaattcttgagatggatggatgacccagagtacatcctttgatctcaccaagtagaggtagatcgccgcaactgagaggccagtgatctgataagacggttcaactagagaaccgataaggccaggatctcctcagagatccacttcaaggaagacttgttgatagatcagggagggtctatcaacatgctgatcaatccattcctcaggagttaggacagatcttcccttgcctgagggacagatcttcccttgcctgagggaggacaaacctttcctcaaaggtcaaacagcaaaaatagccagatcccatcaaccagcgacacaggggaccagccaaggatctctagcttattaacactccccattgtgcaaccaatagccagccaaccatcagcaggagcacccttggcttgcaagagtacagtacttactccccaaggggagcaaggtgcccagaggttaatcttcaactggcaaggactgggagtgggtggaaacacccaaaatgaagattcaagaagtgaaatcgatcacttcagacatctagatccaccaaactccagtaattggtgtgatcttgttgtgatattttgcacacgcaagtgtacgtatcgttaacaagtagtaaactcatcaagagtgaggtcgatcccacgaggattgtagttaagtacgttaaaattaaacttttacttctatttggttgaataaaaattaa

SEQ ID NO: 344097 - DNA, 517 bp, Cannabis indica
gagtggaccctaaacaaaacagaacataatatatcaaatttgatccaaattctaccgaaatttctgcagcataacggctacaattgaatgcctctaatgacaaataacacagatataatagtagtttgttcatccatcccaccagaacacatatattgcaaaacctacttcactttggttgaatattgaagatattcaaactccactaatcattaataattaatttataagagaagttacctcggatgttacaattaagtgtttaggccaaggaaggaacatctttggtacgttcccaacatatctgcacccttcaattgagatttggattttagcgtcctcttgcagcatttgtgaaatcaaaacccgggcatgtgaatcatggtgtgcagtgaacagtgattttaccctcatgctcgtacagagacgctcgtgttggaaattattttaccaggatctagatttactaacaagtatgttggattaacaacctaatatgaattctaaaacaatgaaa

SEQ ID NO: 344098 - DNA, 589 bp, Cannabis indica
aaacgtaaaattcaagtggtttaaccgctaatattcctattatttatttaaatgtggatgagatttttttttctgtcgtgtatatttgtaaaataatattattatgctatattttttttttaataaaaggtatgtttttacttttaactttaaggtaaattttgttaaattttttataattttgtgtattttatatccacttccttattttttttttccattacaattctttattttttttctctttaaagattcttcccatttcattactttctctatatttatctttcttccatttttttttctcacttatgctattctattttcctttcaattttttttttttttggttttaacataattaaaattctatattttaatattacatatttttatcattctttatgttatattcttatgtattttcgctcaaaaaaaaatgttctattattgtgtttgtttttaggctaattagtaatttttccccatgaactttgacatgtactaaatcgtgcccccctaaactttttttgtcgttaaaaattctaccactgaactattgagattgttaaatttaaggacttttgtc

SEQ ID NO: 344099 - DNA, 780 bp, Cannabis indica
gatctaaatggaaggagacattatattccgctgcaaccaatgtaagattttctattactttatatgtctttatttcattgtcttagaaaattcatatttaggatgttagattagtactataatcaacatacatgttagtaaatctagatcttggtaaaaaaaaaaagctctaacaataaccaccgcctctgtctcatcttcaaatcttttaaagtaaagaactacttgagactcttgtggtctatatagatctcatacttctctccatacaagtaatgcggccaaattttcaaagcaaacacaataacaagttctaaattgtgtgtcgagtaacgctgttcatactccttcaattgacgagaagcataagcaatgaccctgtcagcttgcatcaaaacgcaccccataccctgtctagatgcatcacaatataccgtgtatgtttcttgatctgatggtaaagctaacactggtgtcgtgatcgaccgttgtttcaactcttggaagcgtgtttcacacttatcagaccatacaaaccgttggtgcttcttagtcaattcttgcagttgcattgaaatcttagaaaatccttcacaaagtgtttataataccttgacaatccgagaaaattttgaacttcagtaactgtcattggcctcatccaattcttcactgactcaatttttccctgattgaccataattctgtcttttccaaaaatatgccctaggaaggacacttgtgataactagaactcgcacttcttgaactttatataca

SEQ ID NO: 344100 - DNA, 553 bp, Cannabis indica
actaaaaataaaatttaaacaatcacttacatcatttatttttattttttatacacatacaattaattagtttgaactttatattaaacatagtaaattattcaattttttttttcttttaaataagtgaaatgtatgttgttgtccctgattttgcccaatatacgtggaccaaccggacaaggacacgtggatcaaaagatcttaacatttgaattatttgctaagtctttatgaagaaaggcagtatccggaacctgcctcccggagaaggcatacggagcctccgatgctcccggaggcctaagtaacatcaaagcatctacgcgaggtgtcaggcttcccctgagcagtcatctcgcacttaatgccgcatgggaggaaacgtgttgggactgctacacgcaataaagactgacgacacaacccccaatctgcacctacgaagctataatcacttaagtctattgacggctacaatgcgaagagtcacgtcagtcaaaaggcaataatgacattccacataaaagccctacagcacttagggatttga

SEQ ID NO: 344101 - DNA, 763 bp, Cannabis indica
atagaagttgacaaggcaaagtttgaagtcattgagaagttaccagcccctaccacggtaaaaggcataagaaacttccttggacacgcattaaagacttttctaaggtgtctaaacccttgtgtagcttgctggaacaaaataggccttttgagtttaccgctgaatgtaatgaagcatttttgaagttgaagatagctcttgttacggcccccgtgattgtagcacccgattggtcatttccctttgaactcatgtgcgatgctagtgattttgccattggagctgttctcgagcagcggaagaacaagatctttcactctatttattatgcaagtaaaactcttgctgattccaaaattaactacaccactactgagaaagagctattggcggtggtttttgcctttgagaaattcagatggtatcttgtggggaccaatgttattgtgtatactgaccactcggcaatcaagtatttgatagccaagaaagcttctaaaccgaggctcattcgttgggttttattgctacaagagttcgatttggaaatccgagacagaaaagggatagaaaacaaagtggtggaccatctatctaggttggaaactaacaatcacaacggccacctagagggagaattacaaattcgagactcattcccagacgagcaactgctggtggtagagcaagcacgggtaccatggtatgcggacattgtcaattacttagttggaggtgcccatccacctgattttaccaa

SEQ ID NO: 344102 - DNA, 752 bp, Cannabis indica
ttcattcctatgccagtgaaaggggaggaagaggaaatcttgtgttggactggctgaacaagctcatctggagaatgaacttgtccaacttaagcgtgaggctaagttgaaaggaggtgcaagggccaagcaatatgcttaggagcccttgaatcctgaagatgaggctgagcaagatcaggtgactccgctcaaaagcaggcctattgaacatgcaattcgcattaccgagcctagttcgcctgcttggccgcctttgtcccgtgctcggaaaagggaaagttgttatgtctgaaataagaggcttgtcaggtgatgattgactttcgagccttgctcgggcaatcatcttgcatactactccgtcttatttttaagctttttgactattatgctttatgtttctgatgtctgttttcttcaactatgttgtttttgtttcgtgcagacatgtctcagaagatgcttcatgctctgaagaagaggattggcggaagttccagcgcatctccttcggccaagaaatctagaggcggcgaggggaactcttctaaggaaaagacgcctgccggggaggttatcgacctttttgaggagctaactgttgcaaaactgtaaagcccgcttagttaatttggaaattatcagttgaatgtgattaattatgaaattatttatagctatttaaataatttattactgttatttatgtattcagtagcttgcctattttgtaattccggtgcccggta

SEQ ID NO: 344103 - DNA, 508 bp, Cannabis indica
agccaaaaatgtcttgtattttctgaatatctaagccgtaaatttttaccctaaaaagtccttttgattccgaaaagaatgttgtcaacattagtggagagtggtaagcatgcaagcatattggctattagttggtggactgattcgatggactgaaacaattatgacattatttcaatattgaagttagtttgtatcagtacattgtttgaaaagatgagcatcctaattaattgttagagtttttggagttgaaaatctagtttagttaatggaaggaaatttcacatgagccaccagtaatataattatttgatagcttagttaatcgaatttttagtgttagtcttagtcttactcgatggcgagtaagaatctagtttgggggaatttgttaggctacttttagcctacggtttgggtaactttttatagttgttttccgtctttgttattctttttggaatatattacgcttgttttctttggtttcaggttttcacacttg

SEQ ID NO: 344104 - DNA, 1035 bp, Cannabis indica
cttttcctccaaaaggatctattacctcatttttgatgaaaaaaaattcaaagcaaaagttggatcttcgatcggatgcttgaaggcacctagattaacaaattgtcaacctgggcgctaggtgcttggggccccggggtcctgggtgctcaaaaatcaacttgcttcgaacatgattttgatgcctcaaatatgtccgtagtatgtcaagtcgatgtcccaatgcaagttttggcaactttgcactaagacggtcccaaaaactaaaaccctagttgaggatgccaacttgggcactaggtagataccctaagtgcccatgctggcttccgggttgcttgttcatgtaattttagctcctgaaccatttattaggtttttccatgtcttcatggtataaaatgctgaaagatagtgagttagattcaagttattgaagtccaaacttccatcccgaagatcccagagtcaacttgagcacagggctagggtcccctccaaggttgactgctatgactcgggtctactcaacactgtgatgtcatccttcatgccacatatcaaatattgatgttcacgtcaccaaaaaagtttccaagttaacacaactcatccatagccatggaaaacccaaaaattaattattgagaggcccaagaacaagctgctcattacccatcccgatctcctcaatcagtcacttattttttttccatctctatgctcatcatcttctctcttattttatttaaaattatttttaattcaaattataatttggacaaataatgtttcaacatgtggtattcttgccagcacttaacagagttgttgaattggttatcgacggacttacaacaaacatgacctagaagactattgccgctattttttcgaagtttggaactaattaatctacatcaaaataaattatttttttagatttttgtcataaatttccttttaaaattagattaggaatagaaataaacttgaataaatattaatatacataattgaaaaaaaaaattatta

SEQ ID NO: 344105 - DNA, 594 bp, Cannabis indica
ttaatatttaaaataaaattttttttttttgttaagtatattttttaagaatataaattggaagaaaaaagtaaaaaaaaaaacgtataaaaaagatatatattttatataaaataaaaattgttaaaatgagatgtctttataagttttgtttttggggtgtaaataaattttttctaaaaagtatatatatattttaaggaatttttctaaaaaaatttaattgggggtaaaattaaattaggtataattaataaaataatcagttttttttttttttttgagaaaataaaataatcagatttaatttaaatattttgataaataaatttaactttgggtataaaagaaaaataagaaaccctaacccaaatcctatttcatcttcttcttccttccgcccctcttcttcctctctttcctcttcacccaatctgcctccacagaccaccatcgccatcatccaaagccgcctccacaatcatttggtgtctccactgcccccccgattcgactccggtacaaataaatcaagcggcagtcggggtctcatctaagaatctcaagaggaaaacttgaggtgttgtgcccccc

SEQ ID NO: 344106 - DNA, 508 bp, Cannabis indica
aagcggcagtcggggtctcatctaagaatctcaagaggaaaacttgaggtgttgtgcccccccaattcgaacctcgaatcctctacctcaaacatcaatcggtcgactgtggcggagaaattcctcgaggtgttgtgctcttgttccagtacgattgcgacgaagaactgtctcgaggcgtggatgagtgcgacgcccctattccagtacaactactggtctaccctcaagtaatgatgcccatttggtgaacgagacgatgtcgtttctagatttgttgatagggctgtccagcaacacgttgagcatgatggcatcaaacatgttcggaagtgaggtgcccgccaaaaacaggggaatttgggcaagtcattgttcttagtgttctgggtttctcttggatttcattttgaaactaataaaatctatgaatattcatttgagtgtaattcttttgggtataatttatttattatttagtgtatttgtttgagttgaatttgttgtt

SEQ ID NO: 344107 - DNA, 442 bp, Cannabis indica
tgatttttaaataataaccgcatttattttacgtgggacgtaattaaattccacaatttcaggggattattgttgtaagatatctgtctgattcgtaattaactgcattcctatgtaactattaataggagtaggttacactgaaaaagggacaaaaaatccttaagagaaaaagcccgaagagttgatcagaaatatctaataagatagactcgtagaattttaactgtaaaactacgtaaaaaagctttgtgttcttattttctctttactgttattattttctatgcaaatccatcacgatttaggctttaatatagttaacgaaaatatgtgttaatagtttggcgctttcattcagagcctttgtgaaaaaagctttgaaaaaaatctcttgatattataaaaaaaaaaaattctccatggctgacaacggagaaaa

SEQ ID NO: 344108 - DNA, 550 bp, Cannabis indica
tcctcccatgaactcaaaatcccacacacagacacaaaataataacaataataatattaataagatagttacaatctcaagcaaaattcaaaacagaactattgattattgctcaataagaaaaatcccaagtaaggaaaaggataaaaaagtctgctgattgtggaaaattatagtcagttaacacaactgaaacaaaataattgaaactaacattgctactattctttactgcttgcacttatattttggtttactgttgtctggtttaaaagggttcttcttgctggtgtttcgatcttaatattggttgtgctttgagtcatgtgttgtgtagaatttacaacaaaactcataccacaaagagagggaaagaattagagtataccttccagtatctcatatgaattgaataaagaaaataatatcattataatcaatcaaatttgcacgtattcatatgactaagatgatatggaactgaatcatatggctcatgaatttaacattgccacgaaccaatctactctcaaggcgccgctcgtcctca

SEQ ID NO: 344109 - DNA, 498 bp, Cannabis indica
gaagagttgcagaagtttctaaaccctaaggtttcctaagcgtatttctacagcatagttgaattcaaagtgtaaacatgcaaagaaaagcataaaggaaattggaaacttactcaaagattcgaatgtctaggttcaaacaacgtcaagcaaactagcagtcgtaagaaggcacttcggcaactttgaagccaaaaaactctcttttcgctctggagtttacttaacagcgaagggtgataaaataagttatgtgccaatgttatgggtatttataggcaaatcacgaaaagaggtaactacatcaaaggaacctcagacgcctcagcttcccgcctaaaaaacgaatatgggaaatcaaaagtaattgactgaaaccgttagccgtggagagagaaaatcggattgcaaaatactaatttttagagcatttattagccgaaaaccgaagggacgcccaatcagtttcacatcaagtctcaaacgatcatgctcgac

SEQ ID NO: 344110 - DNA, 605 bp, Cannabis indica
taaaaaatcacaaaacatataacataatactagcttttatctaggcgctcatacaccttttcacaatacttcaggtgcatcaacaacattcttaataaaactacaacctatgtaccacatgtactaagtactcatcccgtactagtattgataaggctgaaccgcacctcaagtatcactaagtattgtaccacatgcactttgcattcgtcacatactaatgttggtaacattgtgtcataccctttcaacatcatatactataccgatgcactctgtaccgcaactgtactagtgttggtagtatacaaatcacataatatagcatgcatataacacatatacacatatacgtatacacattttatactaattttatctcgtttcctaattcaagtgtgtcagtcaatcttgttatcccatttttcgcactatggcgtggcaggacatactggtgacacgtggctcctatttcctacatctagctgaagagatattccgaacaaagctcagcatacatctgcatggatagagttttcccgactgagcaaattaagggtagacggttcgaactgttggaatttattttaccatgatcttagatc

SEQ ID NO: 344111 - DNA, 798 bp, Cannabis indica
caagggaacatgcttcacatgtaaatttatttgtttgaggtatcttttgattctttaatgaatgaccatgtgaggtttcaataattcttcgcatcattattgaaccaggatgaccaaggcgatcatgccaagtatttaaaattgagagatctttacttttctctttaactatcgcatgtgactcaattacacttatatatgtataatgtagtccagtggagagcattagtagtttttctagtatgtaacgttttcctgcattacatttagtaatgttcatatatttcatgtcacccttagtagcagaatcagtatcatatccatgaagatatatatcattaaaactcaacaaattcttttttttagattttagtgaaaacaaagcattgtttatagagaactttgttccatttggtaataaaaaatttgcgttaccaatacctacaatcaaatctgcaggacttgatatggtgttgacaattgcttttgttggttttaagtcagaaaaatattttttatttctaaggatagtatgtgttgtgccactatctggtatgcaaaaatctctgatattatctttatgtttatcttcattgagagtacaattcatttaacacttcaagatataacaataaggatgatgtgagaaatatatatatttatttcatcaaatagaaatatagtacaagcaaaacattaatagaaatgcataatacacaaacatcacaagtaatgtaataaactgaaaaataaaggcataatatatcaaatatagtagttaatgcaagattatactta

SEQ ID NO: 344112 - DNA, 518 bp, Cannabis indica
tttgattgatattggttaaattcttatgattcattcgctattagttatcttagacggttgctcttctcatgcatctattagtccactaagtccagtaggcttctttttgaaataatattaattattacattagtaattaagtatattaattaagtattaattttttaattgaaaaaaatttataatttcgagttacgggttataacccgaccaggaaaaaaataaataatcaaacccgaacccgaaacccatttggcgtcttttcgggttgaacccgacccgaccaaacgggtttttaggtgatcggtttttttggcagcgggtcggggcgggtagtcgggttttccgggtttacgggtctaaatgtgcacccctaatacggaatatataagttgggatcgggtttgatctcgttataacaaaatacggattgttacctaattgtactgtagttgctggattgaaggattgaattaagaggtaagttgaaaaatatcatttttattaatcaattaatc

SEQ ID NO: 344113 - DNA, 1093 bp, Cannabis indica
ttaacctaagatcaactaagtgacgccaaacttagaaaaagatataacaataagtatataatatcttttcactgtcaatattggtcaagtttgatgtataatcgatacttccaatacaagtttactttgctaatgccttggaaagaatattccacttatacaagtgtaagtaaactacatcactgattatcaagtcagtgtaaatccaatgcattgataaatcgtgggactaaatagtttaaagcatataatcatgattattttttactgtgttgacaatactataatcatgagtagcaatatgtttgaaacttaacataatttatatattaaacatataatcatgaaagtaacatgtgaactaagcatcataaaataatttttgatattttattaatcaataaataagattatattaaaatgagttttatttacggcataaaattctaacaaactcacacttccactaattataataatataaaactaaaagtgcatttcaattagtcttatcttcttgatgtccatagtatgtagtattatctttgtaataagatctaaaaggttgtatttagtatcagccttctccaccattacatcctccttagtcacaaaatcattgatttgagatattcctatctatatgtttactcctcttagggtactggattctttactgtttggaaactatattagtattattgtgaagtaacattagtagctagtccatgacaagaataacgccaaatgatgtatagaactttccctaggctgaataattgtgttacccacagaagctactaaaataatcaaagaaatccatgagggcttttgtggagatcacataggttggcaaagtttatcgaaaaagattatccaacaaggatactattggccaataatcaacaaagacatgcatgaatttgtcaagagatgcgacaagtgtcagaagttttcacatatacctcatgtaccaccaacataactaagaatgatgacctcgctatacccatttgcaatattgggaatcgaccagatttgggcattacccacatggcaaggaggagcaaagtacgctgtagtagcagttgac

SEQ ID NO: 344114 - DNA, 1389 bp, Cannabis indica
aaaatctccggaattgagaaattataaatctaatatttatttctaaatattggggtccataattaaactaattcacaaataataataaaataataaaataataaaaaattagtgctaattgcccttactaatccaaattactagagcggtcattacatcatccatggcttggagccatttagacttgtttccacttaaaatttcctcttcgtagcttttagggtcttcaatttcaatttgttgtaccattgccagtgcaaaagtgatcaggtctgctttcgcaaaccttgctggagggtgaatttctcttctggttctatctcgtgccaagtgataaccttccaaacctacctgtctggatcctttcgaaacttctatttggaaaatgttatattctggctctgcaacagcttctgtctgtgcagtatcttccagttccataatagcttctagttgtgaaccttcttttggacgtttcattctgtactccatttctatccgagtagtgttcttatttctagactttcatgcatcgcactgaaacacactacatttcccgactatcaagtggggaaattccaattcattaaaaaccacatttttagtaattacaacctttggtctacccttcttggaaatacttattgtataacccaaggcataacctaagaaagttcctttaactgatctaggttccatcttgtcaatggattggatgtacactcaaaggttcttaaatgcattaggtttggggttctgttgtaccacatttcataagagatttttaggcctataactttgtttgggctcttatttttaaggtaggtagcagtagctaaagcttcctccaaaatggtttctctaatctgaaactaaatagtaggcatctaactttgtttaacagggttcggttcatccttttagcaactccattttgcttcggagtcttcactacgattctatgccaagtgatcccatacccttgaaacaacatgtcaaattcagagttaataaactctaaccctttatacgtcctaaggtttttaacttttagattggtttgattttacacctgagttttccaaattctatactgttctaggcattcattcgtagttgtcaacaaataggtccaaacacacctactaaaattatctactatagaaagaaagtatttcttatcggagtgagtaagcactttgtatggcccccaaagatcaacatgcacatattttagtatcttctttgttgtatgccttgctggtgtgaatttcaacttaagatgtttccctaaaacacaagcttcacaaaatggtaaggcacaagaatataaattttcaattataccttgtttgtgtagttatatgaggccttgttcactgatatgcc

SEQ ID NO: 344115 - DNA, 540 bp, Cannabis indica
gggcaaggaggacctaaatatgtagtagtagcagtcgacttcttcacttaatggacggaggtcgagccccttgtttccataacctggaagaaagtccttgactttgttgtcaagaacattatgtacaggtttgaaatccccacgattatagtatctgataatggaacccaatttgatggcgacttgtttactgaattctgcgagaggaacaaaattatcaaaagcttctcgtcagtatccacgcctcaggcaaatggacaagtggaagtcgttaataaaaccctaaaggatactatcaagaagaagctagttgctgccaagggcagatgggtaaacgagctacctcaagtgctttgggcccacaaaactattgagaaaacagccatgggacacactcctttctcgctagcatttggctcgaaagtaatgctgcctgttgaagtgaacatctcgactcacagaagagagttttataatcatgaagaaaaccaggaacttttaaaattatccttggatttacttgaagaaaaatgaactgag

SEQ ID NO: 344116 - DNA, 718 bp, Cannabis indica
ttgtatgtctgataaaacttaaggcaaagagcaaacttgagttcagctctcaatgaaagcattaaaatgttgacctcgcttttagccaacaataactagtcaattaataagcgataagaaatgtaattaagatggagcaaaaaccagtaagcaataaagaacacaagattttaaaggggttcgacccctttagttcggtaatagcccccttagattgtattaactcgagaacaaagaatacattatttcctttctcaaaactctcacaataaaatctctgagtattttctattagatctccctgaaataattctttcgaccccttaggatagatcactatttataaggctaaatgcatgagggaaggttttccttttgcttacaatatctataattgataagaacatacataacaaatttagagtacataaattgagggattcagacagcttgccatatctttttgatacgatcccatgattgtagggattgctcgtgtgcttcacgacatcaatcttgaaattgttaagtcttgatacattgttcggagaaatgaactcgtttgttgttcggatcatctgcccttgctctgctcggtcaggcagactttgtccgtatagatgtatggttgaggtctgttcggaatatctcttcagccagatatagagaattgcagccatgtgtcaccagtatgcattgccacgttatagtgcaaaaa

SEQ ID NO: 344117 - DNA, 679 bp, Cannabis indica
ttttttgttttaatacatatattgtatagtcttaagtaaataatccgtatgggaatatgtttaagagatttggaagttttagaggtacaattaagaagttaagatatgttttgacgaattaaagaggattgcaagatatagggcatgaatatgacttgaataatcaatggtatgataagtatgaagttatgtgatatctcagatggttagcattatagaagaagtgatcattgaacataactacaaatttatcaagattacagatttgaccactatcataaagtatcacaaaagtaaacaaaagttattgtgtaaaactagataatctcataattaagtcgacttgatttaaagagtattggaggaccaggaaccaaaggagagattagcaaataagatacaatgaagtggtaaaagaatcaagagactacaatagaaatcaaagtctatgccatccgggaaataaagacaagtggaatgagcatactactaaatgagttatattcaataccgattggtggcttaatggatcattaaaattatataaaaggaattttatagggctcaagtgattattttcctgcgtcatggaactagtatttatcattgttaaagtaataaccacgaaactataataatggaattgtagcttttatgaaggaaattaagtaaaaaaaaa

SEQ ID NO: 344118 - DNA, 1273 bp, Cannabis indica
tgtatttgctccaagagatcaaatttaaataggcagtggactaagttcgtggatgtcactgggcgtagcaaccaaaccttagctttagaattcttagccaactggccaaaaagagaggatgacaaagtgagagttatgggggttaaagtgcctgcttccacagctgcaattcatgctatttatgatctaccaaccttcactgtagaatagcaacaattgaaacagcaacttcgagcaagaaggttgaattatgaggatatagtcgaaacccttgggtatcccggccttaggttccatgaatttgatggagaaccgtatcaattgtatcggtgtgaactcaacccggtagccaaggcatggctatacttcgttagtgcaagtatggtcccgaacaaacattattctgaggctcagattgaaaggattaagtttgtttatggaattatgaaaggttacaacttgaatgtggtggacatagttagagtgacatttgatatgattgttgagggctcttgtggtggtgaacttgggcttgctggaattatctgtgtgaggcacatggagtacgaaagtactcttatgatacaaaagtagcgccacaacgcaatattaccttgtccactgttcttcgcttcaaaccacctcacccttatggtcaacagccaactcagagagatcctcctacaagagaacaagaggagcatgaagacatcgaaccaccacgtcttgtagggcctctcgacccagctatgcaatacactcatgatcagttgaatgatctgattcaacaaaacatgcacatgcagaattacatggcccaatggagtgttttcaatgagcagcaggtggcccaattgaatatgctagtcacgaggatgaatgttggtgtggatgaccctaactatttttccatgccaccttgcttcaacccctatgatcagccacctccgccaaaccctttctaaggggctcaggtaagtttctctcatcctggtttatttccacacattggggacaatgtgcatctttagtttggggggagagacttaatttttttcattgttttagttagctagtttttttttggttagtgtcatgtgttgataattgagttggaagattgattgaatcactgttattcactagttcaatggattaacatcttaactgtgtgcttgactcgtaactgtttgaattaaggtggatgtgtattagaaggttgttcatgtagatgtaaaacatttgttttcgatgcatatcacttgtgttctat

SEQ ID NO: 344119 - DNA, 1456 bp, Cannabis indica
acgtatgcgtcttctaaatctgcaagttggctgttcatattctggtgataaactcgcgggttcatcgattatgctcgggatgtctgcgtccttaggtagtcgcctcctgtggacatcgcatgacgggctgataggacctagacatgcaagtctatattacattataaaggctgcagggttcttaggaccaactcgcatttatagagaatcgttctcttggtttatacacggacacggggaggatgctcgcatatagttcgatatatgcgagctgctctcttgtctcggatgcgattagacttcggtcatgctcgccacctctcgctgattctatcttaagcgaggtttaaaacttcgaggagtccctcagggacatctcagttttctgagtatacgtgtcctctaagtaggggtctggcctcgagtttctaggtgagagaaatctcactataacacatgcccctagtttcgcgatgtgacaggtacggtcacaagggaaactatactcgagagacaggtgaaaggttgtcacgaggaggtgacctttggttgtcccttcgagggtttcgaaaaatgacggctataatcattacttttattgcatttatggtgccacgtcacaaaactcttcggtttctgtgtaggcgtggccatctttggccgttggattgggcgactctaggcattccacctgccacgtgtcgtgatcccaattaatgagggatttgggtatttaaaccccctgattcgaaccaaaaatccccattttccctcatttttctttaacttccttaactcctttgtttcttcactctcagagaaaccaccaaaaaacacttccataaattgcccagatttttgcctttcttcgtgggtttttcttgactctacagtgctgtcaagggcgattcgtgggaacagatttagcagaagtaaaaggttagttttcgaatcttcactgtgtttcgttttctgtttgagtggggactgtattttctgggtttttagtatgcatgagggtggtttaagaatgaatgtttatagatggtatgtatgaggctatgttttttaggtaaaaacctgggtaatttcatagagaatgacctgtaaattggcataaccgcatacggtgtaagaaatacttgaataggcactgtttcatgctttgaatactcgcgggtattcggatgaacacttcgaatactcgcatatttgcgagacttacttacttctgattgttgcctagatcttttaggattttgtatactgtgaatttagtcgcgagaacattaactgagtttccaaatggtggatgtgtcacagtattctaatggtcatatacgcggttatatgccccttgagatactgtgatacacccagccatttgcgacatgcgttaatgttctaatgagcgtactctttggctggtagatattctcgaaacggtgggagtacc

SEQ ID NO: 344120 - DNA, 679 bp, Cannabis indica
atatatatatatatttagtaatgtttatggagtttgattatatataataatagtattgttatttggtattaatagtaactggccatttttatagacatgagattttataaatagttagtgatattgtttaagatcatctcgaatggatagtgtatattttgggttaaatttgacttaaaatatatcacaaaactatatttgacccaatttttatatttgtgctctaatgcacaaggtacaaattaactataaaagtcaataatatcactaaaacttattgaaaatatacaaataattaattttatttatattattttaataacttataaatataaaaaaaaattattaatgaatagtattaatgagtggcaaataggtaattaaaaaatgtgatatttattgtgagctaaattttggcacatgctatttttgaagacattgcattgtatactcattttattttattttttttaatttttaccttcattttctatattctttaagatagacctacttttataaataattcttattataccccttgggttaatgtaaatcatgtgctacacttaagtggagggtaaaggtatattagacaattcactcacaaaagtgagtagattttaatgaaatataatataatgatattttttattaatgaatacaaaaaagaggtatt

SEQ ID NO: 344121 - DNA, 651 bp, Cannabis indica
tagatttatcagacacagggttgcacaaccggaattctggttcctcgcaggaaacatgcaaaaatccttaactcattcaaatcgaatccaattcacaccaaaacttccagacctgttctaaatacccctaagaacatatccaaagcaccaaagcagcccagaaaacacataatcgaaaatcaccatcaaagctccaagctttgacttcaaaactcaaacttggttaaatctaactaacatgcatccaaatcagttcaaacctacttaaacatgcatataataacttcagaaaacaacagcaatcatcaacaaccaatgcagcaaaagattccattaattcactttgaaaagcatagttttgagctaaaatttcatatcttgataaaaccaactaatcaccaacacattcatgcttgaatcaacaaaaaacatcataattaaacctcagaaatcaaaagaaaccataaacaataaccacagccacaaatcatcaagcatgcattgctcaactttcttaaaaactaagaaactaaaagagaaactacaaggatcttaccaagcaccttgaacaacactagattggatggaaaagcttgaaaaatcaagagaaatcccagccctagcagccacacccagccgagagagagagag

SEQ ID NO: 344122 - DNA, 1197 bp, Cannabis indica
gaaagaaacctactaaaaccaattgaagaattggaagaggttattctcgacccaagaaatcccactaaatgtgtgttcatcgggataaacctggacgagcagcctaaatagcaattaataagctttttgaaagcaagcgaggatcaattcgcctggagtcatgaatatatgatagggattgaccctaagattatctgccatcacttaaatgttgatccaaactacccggcgaagagacaaaaaaggaggcccttggattccgagaggcaagtggcactaaaacaggaagttgacaagttgttagtcaacaattttatacgcgaggtattttacccctcttgggtagccaatcctgttctcgtcctgaaacctaacaaaacttggataacttgtattgacttctccgatctgaataaggcatgcccaaaagactgttttccacttcccaggatcgaccagttagtggatgcaactgctgggtacgagcttatgtcgtttatggatgcatattctggacataaccagataaagatgtacgtcccagatcaagaacatacaagcttcataaccaacatgggactctattgttataaagtcatgtcgttcagactgaagaatgctggggcaacgtatcagtgactagtaaacgaaatgttcaccagccaaatagggcgaaagatggaggtttacgtcgatgatatgctggtgaaatcaataaagagtaaggatcatacctcagacctcgtgaaatgctttaaaatattgaaaaagtataacatgaagcaaaacccattaaaatgttcctctggagtctccatgggaaagtttttgggattcatagttaacgcgaggggtattgaggcaaatcctgaaaaaatcaaggcattaatagacatgccatccccaataaagcctaaggaagtacaggccctgacagggagaatggcggcacttaacagattcatttcaaagtcaactgataagtgtataccgttcttcaacatattacgaggcaacaaaaagtttgagtggataaaagagtgtgaagaggcctttcagagcataaaaaggcatctcgcaatgcctccaattttggcgaaaccaataactggagagacattatttctttatttagccatctcggaagatgcgaatagtgcagctatagtgcgagaagagggcaagcaccagcaacct

SEQ ID NO: 344123 - DNA, 677 bp, Cannabis indica
aataggcgcatgtttttaatttccaaattaagcggcattagtaagctctcgttgatcatgatcttatatgccaactctgcttacgcaggctgttcagaaaaggtggacgccaggcgaaataccaggagtcagggcaattcagtcgggtcaaatgaaggtcagggagctcagtttcgcccaaatgctcggggccaaggtagaggtcccaggggcagggctcgtggtcggggtgatgctaacccgccacaggctgcccaggctgcccaagctactcaggaagcccagaatttggaaaataggtttgcagaaatgcaagccagaattgaggaacaagataatgagatccagcgattgagaccacagggtgctcctgcagtgcctgttccagaagttccagtggcacctgcccctgttgtcgaggccgaaccagtgttagcggcgaatagaatggaacctctgtatgaaaggttccgcaagcaggcgcctccggtttttctaggaggtccggacgtcatgaaagccgagcagtggctaactgtgatcaccaagatattgaatttcatgggcgtcaccaggaatgacatagtggtgtgtgcgacatttcagtttcgagaggacgcattggtatggtgggacatggtgtgtatgatacacgatgttgttggaaattattttac

SEQ ID NO: 344124 - DNA, 1022 bp, Cannabis indica
taatatcaggaactgtgccatgacagtcatgcttgtcggagcttgtccaacagtgaggggtaggtgaatttgtcccagaggtacgactccttgaccggagaaaccatagacaggctgaagtcatggtgttagatccttgagttggagtctcatcttttcataagcagtttttaacaagatgttgtaagaggctccattatcgatcatggttttggccaccgttttattggctatctggacttccacgaccagcgggtcgttgggtgaaaatttaattttgacagcgtcttcatcgttgaaggttatggtcggctctcctacccgtggaactttgggcttcctttcttccgcgactaggataacttcttcttattcgtgttgcgctgttcgggcatacctttcccgagcttttctcgaatctccagcaatgtgcgagcctccaacaatgacttgtagatgtccatctaccggtggaggtagcaaatcttggttgttatccttcctttgacctagatcggtcttaacatacttttgtaggtgtggattgtttttccttatcaggaattcaatttcccgcttcaagcagtagcattcattagtgtcgtggccgtagactctatggaaccgacaaaactttgtcatgtcccttttgttggcatctttcttcatgggcccagacttcttatatggagccagtgactgagttgccatgtaaacactttctctatcttcagtcaagacagtaaatgcaatgtatttggcatgattctctcgggaagcttgttcggatttgccagtgaactttcctttattctcattcccttgcttgttgttgttgttggtacgtttaccacactagcttgaattatttgggtaatggggaagttggttggatgttccagtggaaggagcctttgactttccaggctttttctcaccttccgctcgttgaatggcttcttcgagcttgatgagccttcggctgagtcaagaaaatcactcattgagtctaccgacccgtt

SEQ ID NO: 344125 - DNA, 753 bp, Cannabis indica
cttagtctagaaggaacttacaagttttagactaagataatatgtcacaacaagatatccatgagtaccaatagtaagaggttaaatgtacttctatgtatgaacttaaccagaatcttactgttgagtgggagccatctaagatgtaatcagacaaggaacattaggagacagtcaagaaagatctctgaaagtgacctatatgttagatgatagggtgtatattagaatccttatatctacactaactcataacctattggagatcgtggttactctgggggtggaggaattattctagaaggatgtaaaaatcctactataataatttaagctccattagcgaagatacaaaaattggttgcttttgaaagcacctaaaagttattcaactgaagaaagttctaactgtgttatctctattccattttggatagaattagaggtatgtcttcagtatattcagatgcactttataaatagtacagaattcagtatccctagaggagtaatgcatatagaaaatgatgttgcataatattttatgaacacaaaggaagtaatggtggagaaagcagttgcttaccacagacttatagatcctgtaatttggttttagttaagtacactacacttgatctggatatcaagacaatagattgattgaaattcactacttgttttatgttagtgcaagtgggagttttttgggattttataccctaaataaaacccatttcaatgtaatctgat

SEQ ID NO: 344126 - DNA, 579 bp, Cannabis indica
ttaattattttgtgtatatatatttttttaataaattatgtaattttatcgattacaatcagttaaaatattaagttagaatttttgatagctttgcagtagcacaggtatgaaggctaaccataacaaattccaagttttttttggtggagttccaaaggtagacagagtgattctgctttagattttatagcttgaagaaggtcttttccctttaaaatatcttgggatctctatgagaccaacaaaatggaaagccaagaattgtggagttaatattaaaaagattaaattaagactccattcttgcagatgattgatttttctaaacaaatatgaaataacttcaaaatgtaagcgtaatctcatcaattggatcaatattgtgtgagttatgattgttttactgaaggcagttcatgacccagtgcccaagttgacatccaacgcccagacggacatcaagttgacatatgacgtcaacctgtaaaaatgtccaagggatgaactgttggaaattattttaccaggatcttagatctactcacaagtatgttgtttaaacatcctaaatatgaa

SEQ ID NO: 344127 - DNA, 937 bp, Cannabis indica
catggcttctagcagtagcaatggagggaatttacatgaaaagtgggctgatatgtgtcttgaggaagaagaagctacagaagttatttttgaggatgaagatgctgatgaaagggaacccgacctcgatgaccgctggtgtctgattgggagactactgactggaaaggtatccgattttctcatttttcaaaacatcatggctgatctttggaagcccgaaaaaggaatgtatgtgaagatccttgaacaaaatcgatttctttttcaattttaccatgaaattgatattcaaagagtaatcaatggcagcccatggacctacgatcggaaacaactgctcattgaacggctcaaaccaggggccaatcccaaaaatgttctgataaacacccttgatatgtgggtgcaaatacatgatctccaatctggttttcgaactgaaaaagcagtactagaggcaggccgattcataggggagtatttggaatctgacccgaataacttcacaggcgtttggagggaatacttcagagttcgggtgcggattaacgtctctcttccattaaaacggagaatgaaattccgtcgaaggggtaacgattctttttctatgccaattttaaatatgagaaagcccctaccttctgtttcatctgtggagtgctaggacactccgagaaattctgtccgaggctctacgacacacctgtggatcgtatagtgaagccttacggcttgttcatgaaggctgctagtaaacggcagaatttcctcagtgcctcaccttggctgagatcggggaagacgaccactccggttgagaacgacgaacctgaagacgaagctgtcaacattaatgcccctgctcaatccgtgcctgaaccagcgcagcaccataatccaagggattcgaatcccattagttccgtgaatg

SEQ ID NO: 344128 - DNA, 535 bp, Cannabis indica
aagttcgagcttttccgacctatttgtctctgtaactttggctataagatcatctcccgtattattacggatcgcctcaaaggagttattgaacccttggtgtccccatttcaatttgccttcctccttggtcgaagcattaccgagtgttccatagttgcccgagaagtgctgcgtacgatcaaacacaagaaagggaaagggggacttatggctattaaaacggacaagagtaaggcatatgatcgccttgaaatgggattttttgcttcgggttttgcgtgcgaacggttgctcaccacatgtatgcaatctcattatgcagtgcgtcactacagtcaacttctccatcttactaaatggtgccccccttgctcccttcaatcctaaacacggactccgtcaaggtgaccctctgtcaccatatctattcatcttatacagcgaggtactctcaaagctagtctcgcgtgctgaaagaaacagggaggtgcatgggattcgcattgccagaagggctgactctatttcccat

SEQ ID NO: 344129 - DNA, 665 bp, Cannabis indica
cgccattttaggttgaatactcgcgcttgtcatttcccaaaaatttctcctttatatcaattaaataatacgtttttggtgttgcgaaattcactcgacaacaaaaatgaatagaaactatatttataccttaaaggaggttgagattcaatgttttatcaacaaaaaatggtggccggattttaaacccaaaattttctatttgggttcggatgacactcaaagagggtaaaaaatgaaaactttttaggtgtatgtgattaagtatcgaaaatggaagatttaagaaaaaaatgtgctcaaatatttgagaaatgggggagaaaggaaggggcggaggtggtggtggcaagggttttgggttttgggttctctacgttttgggtttgttgggttctgctgggttgaggaagaagacgatgctagctatatattgtggacgaccctatggcgtcagttcctatataagaaccgacggcatagggtacacatgtcaaataatcgtgtaccttattctgtcgcttcttatataggaaccaacgccataggttaatttcatataacccaaagtcgttcaacccccaacagactctaaatggtataatgcaattctatacctacggtttttataaaaaaaaccgcctctaaaggtcaattttcaataa

SEQ ID NO: 344130 - DNA, 498 bp, Cannabis indica
aactctaatgtcgatgccttagcaaaactagccttgcagaatgaattggatgaactgaatttggttccagtggagatgttaaacgagccaagtatatatgagaaagaagaagtcgagatgatagatagctcgtctgcctggatgacacccatagtcaactagcttctcgacggacaacttccaactgacaaaaacgaggcacgaaaacttttgtattcaatacctcgctacacaattgtagaaggcaaattatatagaagggggctattcaatgcctctcctacggtgtgttcttcccgcagaaacaaacgagatcatcagagaaatcgatgaaggcttttttggggaccatgcaggttggcaaagcttataaaaaacgattattcgacaaggatattagtagccaactataaataaggacacctacgaatttgtcaagaaatgtgataaatgtcagagattctcacatatacctcgttaggcatggcaaaaagatcc

SEQ ID NO: 344131 - DNA, 575 bp, Cannabis indica
tttacagagttgcaagagagtgggcggtttcctttttgtacatgggctggcggttatttttcaaattttcaaaattggtttctttttctcttctagctttcatgtttatttaatccaatctttgtcatttaatctcaccacctacccgaacctattttcttgtctctcttgttgtttctgttcatcgtcccttttagatcaaaatggtgagaacaaaggacctagggcatccgaaaaagatggtggaaaccgatgcaaccccctccaatgcaccccctgctacttcattcgtgcctcctgctgttgcaaaaataggagattcatcgcttccccagcgtgaatctcagcccgagaagccaaaacgcattcctaagcaagtggctcgaaaatctgtgcgtccttacagaacctggtcttcatcgtcttcatcttcgaaggaatctcctccacctgctgtagttcatcctcctgctgcatcagttcctgccgctactccaacaggtccttctactcgaactcgtgcccagcaagcctctgtcgagaaggaactttgatcatctcgaagtcatgataag

SEQ ID NO: 344132 - DNA, 680 bp, Cannabis indica
taagttagactcggtaaattagtaccttgagtttgatagtaatgcggtctagggttattaccctagaagttatgtgaaggtaagaaagtcatgatgtacaataatattgctaatcaagtgaaagcatgaattagggttattaatctctataagtgttattttgagcatgcaatgatatgttatatgagagactatttggtatgtaatttagggttattaccctaagattctatatgttttgatatctattgaatacatacatatatttcaagagttatgtgcataagacataacttggttagacctagtatattactaggataaaccactgaaagaacgtaatgtatggattacgtaaatatatatgaatagggttatgcgagcaaggcataaccaggttagactcggtaattataatcgagataaaccttactaaggccttattgtaaatagacgtgtgagcgtaacacgtaggtctatgctacatagacatatatagacgtgtgggagcaacacgtaggtctatgctacatagacatatataggcgtgtgagcgtaacacgcaggtctatagcaaatagacaaatagtgcagtggcaccaataattatatgataaatatatatgttgagactaagggttatgcgctcaaggcataaccaggttggactcggtaacaag

SEQ ID NO: 344133 - DNA, 663 bp, Cannabis indica
tgaacttcaatcgagttcccattgctctctgtaagctttcccaaaaagacgaagtgaaccgagcatctcgatcacaaacaatagaatacggtgccccatgtaatctcacaatctcattcacataaagttcagcaaaatggtccatggagtaagtcatgcgtactggtagaaaatgggcagattttgtatacctatcgacgactacccaaatggcgtcatgttgctttgtagtcttaggtaacccagtcacaaaatccatggaaatctcttcccacttccattcagggagcttcagtggttgtaataatcccgctggtctttgatgctctgctttaacttgttgacatgttaagcatttggccacaaattcaactacatcctttttcataccaggccaccaatacaatgcttttaggtcatggtacattttagtggtcccgggatgaactgaataaggtgtagtatgagcttctaccaatatccccttcttgagctcatcattatcgggcacataaattcgtcccttgaaccgaattaatcccgtgtctgatatttcataatctttggcgttactattcaaaatttcttgctttagttcactgagcttttgatctgtcgtctgcccctccttaattctttctaacaaagtggattgaagtgtga

SEQ ID NO: 344134 - DNA, 623 bp, Cannabis indica
aacatcctaaatatgaatatctaaaacaatgtaaataaacacatataaagtttcagaaaccatacagtgggtgcagcggaataataattgctccttccactcagatctctaactcttgtatcagagtatcacaaagatctgagtccagatctctttctcttgaaactgaattcttcgcagccttacacactatgattgagcctcaaactttttactgaaggcttgaatttcataatcttttgatatgaggcatcactatctatttataggaaaccacctaggtttgtgttagaattattatgcattaaaatattgaaaaattaaattgcaaattcccctcaaagtggccagccatggatatgtgggcccccactttgttattttgctatttttttcaatttttctttattttctcaaaaatgccaattttccaattcaaccacttaaatgccaaaactatttatttaataattaaaattaattatcaaataaaattgtcatttaacatatttattaattagacttaataaagtctcttaattaataaaaaaactctagaatctcttttcctcacaattaagcccttgcttagtgaaattcataaattagacatagtctaattt

SEQ ID NO: 344135 - DNA, 1059 bp, Cannabis indica
agtggaacaatctgctcggcgaattacaggctcctaaatcacatatcaatcacaacactgataagcaatacgctaaatcacttcccgaagacttaaacttgaaactaatagtttccctatcgataaataacatggtagtaccctaaatatcacaaaaatgggaaaaactagggttcccaaacctgccccaaccggtagaccggctccccaaccgaaattccaattctgtggggttttcctgggaccaaaacggaattccggttcctacaggtcccactgaaccgaaattctagttcagtgcaggaaagaccaaaaattctataacccaagcaaatcaatcccaattcaaaccaaactctccacacctgctatatagaccacaatgaacatattccaagcgacaaaacaatcatccactcatagaaacgaatttcaccattacagcctcaagattgagttcaaaaactcaaaacttgactaacctttcaaaaaaacttctaattcatgcataaatcaacatattaacccataaccaaacatcagaacacaacaacaactaactacaacagctacaacaagaaaacttcaaagcatgcaaaattttcatttcttacaacttaggaaattaagagaaagctacaagaagcttaccaagaacatgggatcactaattccttcctaaaaccagcttgaaaatcacaaagaaacccccacaccctagctgctctaggccgaaagagagaaagagagagacttgagagaaaatgcaagtttttgtctaacttttgatttttcaacaaagtgagaaagaattggttttcttgcttaataatcagcatataacttaactaaaatcagattaataaacttaaaatagaatccacaaaagacaaatctcatttaggcaaaatgactattttgcccttccaacactaacaaattataaaatggcactaagggagtaatttgggaaattctaaattctcgaccgatcccgaaattcccaatgtctaattataccgccccgctatactaaaaatattaagatgtgattctact

SEQ ID NO: 344136 - DNA, 777 bp, Cannabis indica
atccatttgctcaatatgcagttcttctttagcatctttttctatcattaccctaattgaagtttgcttcacaactggagaaaaaatctcattgaaatccactccttcctgctgagtgaacccttttgctactagtcttgccttgaacttgactggttcaacaccaagaatgccttcctactctttaaaaatccatttgtagcctaccaatttctttccttcaggtttcttgatcattatccatgtcttattcttcttaagtgaagtcatctcttcatcaatagctttcagccatttcaacctgtttctgcctgtagtagccttaaggaagctagttggttctgaagattctaactcctctccagtgagcaatgcatatgctatgaaatcaacatatccaagcttgcttggtggtctggtttctcttctcaccctgtctctagcaagttggtaggttctcaaatcagttgcacgttcatgtgtatcagtttatgcactggttttagaattctcttctacaatttgagtgtcaggttggtccacctccagttgtagactttgaactggtacagcaggttgtatatcattgagagctttggttttcattgccatttcatcctctttgaagacaacatctctacttatgatgcacttcttgaaaccaagttccaaacaccataatttatagcttttgactccatcaggataaccaaaaaacatacacttcaatgctcttggttgcagcttatcctattaaaatgacatttcaatatttta

SEQ ID NO: 344137 - DNA, 1054 bp, Cannabis indica
taaaagtcagggccggccctgaaagtgataagtcatataattatggattagacacattttaactctatatgacccaaaccaacccattttttttgaaagatgttccaaatttgagacttctttcatacataaaatatactttacatccacaaaatatatacaaatatatattttacgttttcatacataaataaattatattgtgataaccttaaaatgtgaattaaccaaaacacgtcactaacatgtagtctatagttactcagctacttctaccaacaagtctaatgtgagaattaatcagtattgttaactttgctactcacacaataataccccgatcaccttaatttttttaaaagcactatattatacacacacatatatatgtatcatttttttgtatgtatacactaggttgaataattttatcctgtttgtaacataaatattaaagtttaaaatattcatctcaacccaatggacccaactcaacccacccctttattattatactaaatagggttgggttgtacaataaaaaaaattgaatggtttatagtttatccaaaccgcaattattgggttggcctattaaaatacctctaacctagccaatccaactcatgggcacccctactcgaaccgaagaactaccaccgaccaaatccctaacatcaaacatctcaaactctctcatcaatctatgaccatcacgatatctcagactctctcaccaatctatgaccatcacggcatctcagactctctctccaacccatgaccactgtggctagaccatcgcaatgtcgaaggtaagattttggaccctctctttttttttttttatttcatttcattgtatttttaggttaaaatgtatgagtttattgatttagaattaaaatgtatgatgaatctctgtgatatgtgagtttatgttagatttaaagttgggtttggtcagatcggtattttgggcaaaaactaatttttacgctgagtaaatggcggcaaaacccccaatactttcgttttggtttcattaaacccc

SEQ ID NO: 344138 - DNA, 659 bp, Cannabis indica
agaaattggaagaaaataaatcatattaaaaccataaaataatgtcaaacaatatccatctaaccctaatcaagtgtttagctacccatgttcatggaagcaaaatcacacatattaactttaagaaagagaagaagatagagaatataatgatgctgaaaaccctctgcagaatgtctcctgtattgacttctgtctctgaattcgtactcctttttccctctaaattgtttgactgaaatcaactccagtttaccctttatatatgctttcagggactaaaaagatataaaaatgcacatgttaaatgcctattcgaattgggaaactaccaaaacccacgtgagagaaaaagacgatttttgtaaagtttagggggcgggccacggcctcacaagggctgggccgcgacccgtgttggagtttcactacatggcttcgtttcgactgtgattttttgctacattgactgatagtattttggtcataactctctcgatattgctcaaaattgaacgattcaagatatccgggaagacaaaagagagatctagaacttttatgttttgactttttccaaaatctaatcaaaatatagtcgaattcaggcttgaagttttagctttattttcttgcacaattttctctattttatgtat

SEQ ID NO: 344139 - DNA, 587 bp, Cannabis indica
ttcttgtaaatgatatttctaaaaaaaactaatatagttaccaaaatgagtgctctatcatttatcgtatttggccaagcttaaaggaaactatcatttcacttctaaataaacataaaagctatagatgaccatatctatgattaacacacccactcaatggaactatcaagttcctaagatgtaagtatgggatataccgatggataagctggtaatgaacaagtcaaagaactcaaacaatacaatcaacttaaactttaacaatcttaggattgagatcaaattaatctatgatcaacatagttatataacagtaagtttatgatatctttttcactattattgttggtccaatgttaaccatgtacatccaatatatgtttactttactaatgtccaagaaaagatattctacttgtctaagtgtaagtaaactataccgttgattatcactgatgaaactcaggactaaatagtttcaagtatataatcacaattatttttcactatggtgacaacactataatcgtgaataaccatatattcagaatttagcagaatttatatattaaacatatgatcat

SEQ ID NO: 344140 - DNA, 648 bp, Cannabis indica
accagatatgcttatttaaacttttaagcataatgagctcaaagtattttacttaaaattaataaataatttgtaatacatatgctcgtttaactttcacattttgtaacttttttatatgtaactagtttaacctttcctattctggatcaggttgattagatactagtttatacatatttttaaagttttatgtgaaaagttccatcatgatatgatttttctatatctataataaaatccaaagttatcttctttttctagttgcgacaagtttagaagttttttttctcaatccatgtccataataaaattcaaagttatcttctttttctggttgtgaccagattagaagttttcttattaaattgcaaccactttaattagtgatatttgggcatacccccttgcgaagagaaattctccattgaggttcagcttgccaagtactgcgagttgttcactatagagtgtcttcatttcttctctgaggaaacagattgggtcatcttcaagcagattggctcctcttcgtgcagagttatctatgagcagatttatctacgagtacagttatctacaagcagactcatctacgaccagatttctctaatcacagttatctacgagcatagttatctacgagca

SEQ ID NO: 344141 - DNA, 557 bp, Cannabis indica
tttttgagagaagaagcgcaacggcattggaacaaagagaacttggtttatgcccacaagactttctgtacaaacttcgacatttaaaaattgacatgaacattttgtatatgtgctttaatacaatctcaactatgtttttatttaaaatgtaatctattctatgtgcttattgtgcagagcaatttacttggaagaacgatgagtatggagaggatggcgaaggagcaagagtatcaaatttgtttagtttactttttttatgacgttgtttgttttactttgtcgcagatggtgatacccctattggataccgagagtgctccgcattggtttgcagtgaatctgaccattgataatacaacagtgaaaattagagactcgttgtattctgtaatgcataagaggtcacgtcagagcacctgcctagagatggtatacatgtgtgtacatagtttgttgttgtattagtgtaattgcaagaatctcagctgtaattgttttaaattttttgcagctgcagactctggaccaattgtttgcctctgtcaagccag

SEQ ID NO: 344142 - DNA, 1104 bp, Cannabis indica
ttacggttggaatatctaaaaaaaatatctaggttaatttcaaatttattaattatttaatttatcatataagataattttaatataatatttcaaattaaagataaggctatcattttaatttaaatatgtccaatattaaatatctgatcttataattaaataatataaaaatattcaagaaattaacaaatatttaaaatgtgaccataatttaaaaaataaaacaatcaatttttaaatttagacctcaaaagatcaaagaattaataataatctaataaaaaataaatattattaatttaaaaagtgatatttaagtttaaatatagtaaaaataatattttattataattttagggtttgaaaattgagaaaaatcgtggaaaaatcccacaaaaatagggttttggggtgttgctgctaggaggggtactcgtgcagcccaggaagtctgcaagcaggccttccgcgcgcgcacgagaaggagcagcagggtaggctgccgaggaaactcagcgtttgcagcctcctgaagccaaaatcgcagcctgggtgaggcccgtgtccgaacattgagcgcatttagacacgaaattgcttgaagcacgacacgttggttggtcttgtccgagggtctggtgcgcatgagcaccaccctcaacaccattgaactcgattttttataacttctataacgttctcaatttttatcagaatcaagttccgtaaaaaccaaaattccttaatttttcacaaggaatccgaaatattttcagattaaaaataaaattattttcatggaaaaatatcataattcacattcaatcatcaaacaacacataaactaacatgaacacatccaaatcaacacccaatcaatattcatcgttttaaatccatatttaaggaaagtaaattattaccatggctctgaggccagttgttgggaatattttaccaggatctagatttactaacaagtatgtttcgttaacatcctaaatatgaattttctaaaacaatgaaataaacacataagggtttaagaaaaccttacattgattgcagcaaataatatgactccttccgttcaagatctct

SEQ ID NO: 344143 - DNA, 438 bp, Cannabis indica
gatctgaacggaaggagacatatcattctgctgcacccaatataaggtttctcatactttatatgtgtttaatttataatcgttttaaaagttcatatttaaggtgttaatcaacatacttgtgagtaaatctaagatcctggtaaaataattttcaacatagtgttcccagtataatcacgtgagaatttaaaaaaaaaaataatacgaggcatttgctcattaaggagacagaggaaagacaacaaattttgagacagacgatttttattggcaatttagttagcagggtgattaaggctcaaatttgtacattttaagtctttatttatgcatattaaattaatataaattaaatattttatattattaatgttaaatttattttagttagaaatatttaatttattctaattttttgtgttatttttcagattt

SEQ ID NO: 344144 - DNA, 979 bp, Cannabis indica
ctcaactacatgcttaaatctctgaaaatataaacaaaatacagcagcaacaacatccatttatcatgcatgcaatacaccattttcatcaaaaattcaacaaacttaaagaggaaaagatgaggagctaacctagcttggattaaacacacataaaccttgaatccacaaagaaagaggagcaagaacccagctgctcctagggccgaaatagagagaggactttgagagagaaagagttttgaaatttttctaactttgtaatttttttggtaaaatgaaataaaaagctaataaacatataaccacttcatttcagccaataataacataaataaacatatataattcatttactaagtccactaaaggacaaaatatcattggggcaaaaagaccattttgcccctccacactaaaataacataaataacactaaaggggtatttttgggaaattctaaattcccggccattcccgacattcccaatgtctaataaaccgtcccaaactactagcatactaagttgtatgaaaactactaaatgacataagaatgcatctctgaattcaataataacagtataataaattatttaaatagctataaataatttcataattaaacgtgattaactgctaatttccaaattaaactaagcggtctttacataagtatttcaaaaataaaattttatactttctttttcaaaatacaataaatatattctcatgaaaatttaatttgagttgcaaattaatttaaattaatacaacttaaattaattttcttaatatttatatataaaaattactactaagatggaaataattcaatttatttcaatcaccatctaagtataattttataaatattaaattaaattctaatttagaattttaattctaaattcgaatttaatgaatatattttattaaaataataaagaaaatacattttaaagaatgagctttatta

SEQ ID NO: 344145 - DNA, 809 bp, Cannabis indica
tgatttataaaatatcttaagaagtacatcactgaaaaagtaaagttacaataaattaaatttaatagaagattaattgccgaatgattaaagtatacatactcgttgattgtaaattaaaatgttgataaatagatgacacgtgtgtgaagatccatcctcggggagtctgtctagttttaagttttccacaaaggaacacgctaatgatgaatgaacagttgattcacaaaaacactcatttagacgccaagtgtgggcctatttttgagtgtttaaattagaggagaaaaagaagggaaagctctctctcagttctcattttcatgtcatgacacgaacatgaaagacttttatattgaaacagaagaagcacaagtcaacgtaaacgtagaaagtttgaagatttgaccgaaaatccacagtccaactcggttgtccgaaacttagatagaactcgaaggcggctgctaccgaaccctccctcgcccatcactatgagttgtttggctcacgctatgactatgattcccctgtttttttattattcaatatcttttcttttgtcaatacctcaatacccattgttggcttcttcttctccttcttccacattcccaatttcacttcctcttcggaattggattcttcgatccttctcttcttcgccgcttgcttccatttttcggctacgaaacgtctctctttgaccccgtcttcatcttcttcttcttgtcttcttttgaaaaaaataataataaaataagacgttagagcgaagagaaattccttgtttttttttttttttt

SEQ ID NO: 344146 - DNA, 550 bp, Cannabis indica
aaataaaaaaaaaatatatagtatatattttcatatttacaaaatatatattagaaattagttaaaaaaaaaaggtaatagtcaaatgtatacttaaacaataaaataatataatatagtactaaaaattaaaaaataaaataatattttacaaagttaactaatcaaaataagtaattagaaatgtacgagataaaaaattatcttaaaataattttttttaaaaaaagtaactaattgatatattatttatatcaaaagcaaccaaaaggttaatatatttttctcacatattaaatggttattttattatttatatatgtgtaaaattttgaaataattttttttactagaaaagtaaccaattgatatcttattcaaattaaaagcaattaaatggttactttttttataactcccaaaaagccaaaatttctggaaaccgagatttttctagcttttattattttcggtatttgctttgaatttcagtatgtatgctgatgtggcacatcagtatttgtgctaataattttcttaaaggtacttt

SEQ ID NO: 344147 - DNA, 988 bp, Cannabis indica
tttgtggcggtgtacaacaaacaactacagagagtaaatcgtgaattcaaaacttgagaaagatgagaaattagcattcaagggtgacatccctagattccaaatactcaccgatacaacaacaatggtgtggagtatagctcaatgagaaaaaattaggaaagcctcacttagagacaggagaaaagtgagacacaattaggaccaaagtaacatatattgaagaatttcttagcatggaaaggacaatacaagtttctaataagtggtgggattagaaaatactcatgcaacataaaggaattcaaggcacaatgtaagcaaaggatactacaatccaattatgacttatattatggacaatagtataagtatgttggagtgtcatctaatgagaaactaagaggaaaactcacaaagtccagccctgctgaaaagagatggtatttctaggccctatagtgcccgagaagagaatgactatggatttgtcaaaagctaaaattgttaagagcaaagaatttggaaaatatttttctcaatcttaaaagccagtaattgagatctttggaaggactctctcaagctgacaataactaacttattgcacacaactaattttcgtccaattgaaagtgcaaaaagtagaagaaaagaacgagatatgtattgataatttggtggcatttggatgtaaaatgagacgcttaaacgaagtatcgacttgtgcttaaaggtagtatgggaagtaagaatcaaaaatcacttactaaggaattataaatagtgagtctccagtaataaatcaaatacaagtaggggtataggaggtataatagtgatggatagagtaaggtctgttcggcatagtttgcaaattatatatatagtatccttaccctaataacttggttgatcaatacattatgagattggtatggttgacttattattaaaagtcaacggaaagtagatagttgggttatga

SEQ ID NO: 344148 - DNA, 720 bp, Cannabis indica
tattatttgtatgctatattttattgttgattaaatattatttttctgttacttttatataattttcttgttgtttttatagaacatcgtaaaaatgtaaaacaaaatctatgaacataaaaatataaaattttcaaaaaaaaaaaattatattttctataattacccaaaaattaaattataacttattatttgtataccaaatatactaaaagtatctacaaataacgaatcgaaacaatcactaacaactttttgatggagaaaacaagatttcgtactatgcatgatggatagtgtggtagaatgaagagagtgagtcggagctagggaagacttgggtggccaaaatgaagaaaaagaaaaccctaggtaccgaaacagtagtttcaaatgatcgaaaaattaatattttaaaaaaaaactaaaaaaaaaagcttaaaaaatacaatctaaagttattttgtttctaaaaatttgtcatggccttttaaaaataaaaataaaaattgttatggcaatagaaccaaaatacctgttttgtcaatggttgccacaacaagaagcccaatgaatagagaggttgatagtatggaagcaatactggtcagttgagccatggtgatgatcaatcaatatgtatattatattgaaaaaaaactatatataatggaataaatatttctattcaaaactatatatatatatatatgcatatat

SEQ ID NO: 344149 - DNA, 642 bp, Cannabis indica
ttgtagatctgcttattggaagcttggttatataggcccacactagttgagacaatacttaattggttttaattaagcaattataattctaaaattagactacgtcttatttatgaattttcactaagcaagggcttaattgtgaagaaaagaagttttagggtttaattgttaattaagagacttcattaagtctaattaataaattaattaaatgacaattttatttgataattaattttaattattaaataaatagttttgacatttaaaggattgaaattggaaaatatggtatttgtgaaagaaaatgataaattgttgaataaaaatagtaaaattctaatttagtggggcccatcttatgaccaaccacctcaggtaaattttggccaatttttatcattttcttaatgtcatataattttatatcattttcttaaggaatagaggaaattacacttactatgtgattttaaaagttcttatgataaatatgacacatttaagtttgaccaatttatgtggtatttttttgttttaaagttttttatggtatttgatatgacatatatatgtaattaggttttcaaatcccatatttaatatttttatttgtttaggaagttttatttgtcattg

SEQ ID NO: 344150 - DNA, 1469 bp, Cannabis indica
tccttctgagtgaaaaagtacttgagactcttgtggtcagtatagatctcacacctttcaccatataggtaatgtccccaaattttcaaggcaaacaccactgctgcaagtttcaggtcatgagttgggtaacgctgctcataatctttcaattgtcgagaagcgtaggctatgactttatctgcttgcattaaaacacacagcccaaaccctgccttgatgcatcgcaatataccacaaacttctcttgatccgatggcaaggctaaaacaggagctgtaatcaagcgttgcttcagctcttggaaactcttttcacacttatatgaccatataaatcgctggttcttcctagttaactcggataacggcattgcaatcttggaaaaaccttccacaaaacgccgataataacccgctaaaccgagaaaacttcgaggttcagtgactgttttaggtctaggccaattttttattgcttcaatcttccctggatctaccataatcccatcttttccaacaatatgccccagaaaagacacttgtgacagctagaactcacactttttgaacttcgcataaagtttatgatctctgagtcgctgcagaaccattcggagatgctgttcgtgttctgcttctgaccgagagtacacaaggatatcatcgataaatacaattacaaaattatcgaggaaatccttgaacactctattcatgagatccataaagggtgccggtgcattagttaacccaaatgacataaccaggaactcgaaatgaccatacctggttcggaaggctgtcttcggaatatcctcttctcgaattctcagctgatgatatctagacctcaagtcaatcttagagaatacctcttgccctgaattgatcaaacaaatcgtcatttctaggcaaaggatatttgttcttaatggttaacttattcagctcccgatagtcgatacacatccgaagagtcccatcgttcttctttacaaataaaattggagctccccaaggtgacacgctaggccgagtgaaccctagatccaaaatcccttggagttgtatcttcaattcttttaattcggtaggtgccatttgatagggtgcttttgatacaggttttgctccaggaattaaatcaatgataaaatctatctcctgctgaggtggtaactcaggtaagtcctctggaaacacatcaagaaattccttaaccactttaacctcttcaggtccaggtaacacaggtttactggaatccactacaactgccaggaatccatcacatccactgcgtaacaaatccctagttttcaacgctgagattcttggaacatgagaaccttgaaccgaaccaacaaagacaaatggttcctcattctccgtttcaaaagttaccattttccgtttacaatcaatactagcagagtgtttggacaaaaagtccatatcaagtataat

SEQ ID NO: 344151 - DNA, 1360 bp, Cannabis indica
ccacaggtggaacctgtgactcggggattggacggctgaccatttagagtttgagaggagttcacagcgggatctttgtctgtttcgcccagggcaatgacagttgcaggttgttgactggtagcctgataggcttttcgtatcaacacggtagcctgtctagtttggtcgtcaatggctgcttgctaagccctcaacgtttccatctctttgtccctccattcaacaaacatgcgcctttgctcttcaaatgcaagattcaccacagcacggagttcctcctgatcataatgcagggtgttggtatgaccttgtatgattccaagagcagcacggaggttcttgatctcagtgtcatctccaatggttgttcaattatttgttacgggcataacgacagtgttgggaatgccctgattagctgctaaaatggtatttccagtctcttgcacaccaggcgcgattccactcccagaagtcatcacaccgtgacctacatctgatgcttgtttaggatttgtggttggcggaacccttgtattccctggattctacagtgtaggatccaccgcctatggatttgccggatcaaccacgcctttacgagtctgtaccaccattgtatttatgattagatttgagaacgatcttgagagtctactctcaatgaaagtaccaaaatgttgacctcgcttttggctaacgacagtgaatcgtgattgtaagcgacaagtagtataaggtatatgtaatataataaagtaactaaagacacaagaattttagagaggtttggccccaagcagtttggtaatagcctaatcctcttagtttgtattgacttaagaacaaggaatataatgatccctttccttagagctcttacaatgatatctctgaatatgaattcttagataagtttttcgaccttttgcccagtgagaatgaatctctatttatagggctataagctttgagggaagaattttccttctaattagaatagatataataggaaagattgcatattgaatacagaatacactaatcaagggattcggacagcttgtcatatctatgtgatctgatcccaaaattatagggatttcttctatgactcacaatgcgagtgctgaaactgctgagtgttgacatactgttcagattgcttaatgctcggttaagcaggttttttctgtgcgaatacatatggtgctctgctcggcatatctcttacgagcagatatacaaagtcgattccacatgtcgccactgtgagatgccacgttagagtgcaaaatttgggataacaccatgacttcttgatctgagaaaagtaaaagttgttgggttttgtgcc

SEQ ID NO: 344152 - DNA, 504 bp, Cannabis indica
aaacctgaaatcaaagaaaacaagtgtaaaatagccctaaaactagaaacaaagagtaaaaactacctgaaaatacgacccgaaacttagactaaaattagccgaacaatgatgataataaaaatcaacttctgatggtgatagtcatttttcgaagctccatgggacccgctgtgggtaactcgaagcttatttttgtaactcccttaggggtgaaatttggtgccgatagcttcagaagtacgattaaagtgtgagaccatgacttgatagagcatgaattaacttcaaaacgtaagttgaattgcgtcaattgaattaatattgagtgagttatagctgttttactaaaacgagttcatgacggccaacacataggttgacatatgacgtcaacctgaacactggataagtgtgaaaatgttcaagggtatgctctttaagatgcctaagtaatattttgacatcacttagtctatttttatgttctggcaaagctagtca

SEQ ID NO: 344153 - DNA, 567 bp, Cannabis indica
cgtaagcgtaaagctccagccaacacatcacccatacctccaccgcgacaaccaatcaacacaaccccaccaactcttgccttgccctcctctccaataccaatcattcccaaacctacacactcaccaccccgcactcgtcctcgtaaagtctcctcacctaaacccaaagctccaaccgccaaaacaactccctcaacctccaagggccaaccaaagcctaagcgcaccacttccacatttccaccaccaaaacagaaccccactactcgtcctagagccaaagccgaccccgtccgccatcaagagcggtttgagatattgcaaacccgcagccagttggccgagcgcggctttctccctgccccggaagctttacctgcatatattacaaattttattgcggaacactagtgggagaaattttgtgcaattcctaggcctgctgtggcctcggttgcccctacattttatgctgcacttgatccaaagtatcctaatgttgttagagtgaggggtcagagtgtccccttttctcctgatgtgattaacgacttatatggattg

SEQ ID NO: 344154 - DNA, 769 bp, Cannabis indica
ttctgtttcccaggtccctatcctgattatgggtccaggtctcgatttttgtgtgggtttgggtccgtgtctaagttcgggttcgagtcctagtctcggttcaggtttaggtctctgtctgggttttgatctagtttcatttgcgattctaagttctagtttgggtttgagttcgggtcagagttcgagtcctgatcttagtttgggttcggttccagatttctgtctaagtccagatcagcttccgggggtgggtacgcctcctgggtcctggtctaggttgggtccgagtccgaagttccaatcccgatctaagtctggattcagttctggactaagtccttggttctgattctggtctgggttccagtttgggtccaactcaaggtctagcttcgggtctgattctaggtgtgggtgtttgagtttgggtccgagtctgtgtttgggtttgtgtctaggtctggaccccgatctgggtctagcttcgggtccagttccaagttcgggtcccgagagcgggtccaagtttgggtctgggtcaggatctcggtccatatctaggtccagcattttgatcccagtcttggtcttcgtccgagtccaggttcgtatccggatccctatctaggtccaagtcggtgtttgggatcgagttcctgatttaggtcaaggtccgggtcacaattccggtctgggtacacgaccgtgtccgggcccgagttcttgtctcagtttgggtctgaggctaggtctgtgttcggttcta

SEQ ID NO: 344155 - DNA, 616 bp, Cannabis indica
tccacaaagtgaataaaccaccatgtaatatagaaagttatagctattggaaataagatcacactgcaaacaaagcaaagagttaaaatataatacaacagcaaagagaagaaaatccataactaaacaaatgggtgttctttattaaaataacaatttctgcagctacatactgagtcaaatcatatttgtataaaaagaatgacataattgtacagctaactttaatagcagccacctccattaccaatcataaaacataaatacagtacaaacttttttttttttaatacagtgagactttgagagagccactgtgaatattagcataactattgcatttaataaaacagaattccaataataactttaactccactctgtctaaaaccaacaacctatgtatataatacaattaaatatgcatagatgaagggcacgccccaagcctaaagattaaagagcttaattttcaaaatcatgagaactttgtttgtatgatttttggctagaaaaatatatagggtacagtacaaaactttagtggcagtagcagttgtttgtaaggttggctgtagtagcagtgtagtggtaatggtggttgcagaacattagt

SEQ ID NO: 344156 - DNA, 486 bp, Cannabis indica
caacgaaaaatgcgatggatggctatttaaatcacattggtaagtttagaaccttttttttagtagaattaatattggaaataattagaataccgagtttgagcggggttatagtttttgaccattttacccctaagcctttagattacttaaggtgtaagtaagggcaaaatggtaattttgctaccttggtggggtttgtcctctagtggattttgtagaattattattcagctattatttgtaaaaagagattgattatttgactattagagttggctagaagataaagaacatttagaatcaaaaccacatttcttgaactctctctttctctctttcgactaaggcaaaaccaggggaaacacttagggttttcatcttatttttgtgttttcatcaaggatttgaggaagttctaaccaagggcatccatctagcatgagactttctgttcaggtcggccaactcacttgaattcgaaaa

SEQ ID NO: 344157 - DNA, 496 bp, Cannabis indica
ttcttctattttaaatctgcaaaaataaaagataaaacatgtaaaattattccaaacatgggtaaaactaaattaaaaatatactaaagttaatttaaaattattactaaaaataagctaacaatttttatattatattttatcaaatgtgaataaaaaatattcaaaactcaagtatatatgaaaaattctaagttgatatggttttttactattaaaataaaatataaaatattttatttagaaaaaaaaataagagatttaatggttatttattttagatatttttatttttttttaatacacaataaataagtaaatatagttttagttcaaataaatttattagattcttttaattaaaacagtttttcctaaaagttgagttgtaccagctttagtttttagttgtagtttgttcataaattattcaaaaagctattttttgattgtttaccaaaaatatttttatcacagttttttcaaaaacatcttt

SEQ ID NO: 344158 - DNA, 468 bp, Cannabis indica
acactctagccgtgcagatgtgatagcattaatccacactataactacaactagtcataataccacatggactcagtattctaggcgtattatgttgagttttgtaccctaaataaaatctatttcaatataatcagatttactaattagtaatctttggaagaataggaatagatgcattttttatttgtgttgtactgctcctagttgtttgagcttgaatattaggaaagaggttcggttgagaatcttgagtaagggtccttttaaagcttgccaaaagaacaattatttactcaatgtaattaaaaggtggtagttgtttggtgtggggctgctggctgtggcagttgccgctggttttggtggtgtggccttgtgcctttgtttgttcttgcttgtttttgaataaagattcctccttttttttaaaaaaagattagaaatcattctatgttgcatggttca

SEQ ID NO: 344159 - DNA, 806 bp, Cannabis indica
atcctgcacttttttctttttcctaggggtggaagtagggtttttcttttggttcccttcggcgggataccttatagggcttggttccctagacttctgcttttgggtacttggtgaggattcctctggttcctttccaagtccggcagggatggctttaggatgcacgtggattcctgctgcctccatggctttttgcatggccagcatcacctcttgcatcttttggttttgctctttttgggctgcgatttcagcttcatgatcgacagccttttgccttaagagtaccaactctgagtagctgccttcgtcgtaggcgtactcatcgaagtttccttcgtagtcgtcatcagtggttccgtcttcttcctcagaacccacagttgctcttgaggccacgtcctcatcatttggatcttgagcatcttgaagagggcgaggttgacgtgtgcttcgagtctccacgattgttgtttttgttgtaatgttgaccgaggttttcggcaaccaatataataataataatttaaagagctataaggaattaagagagagatttttacgggggtggggcgttaatgagcctgaatccacgagtctgtgtatttatgatagtatttattacagagaatgttcttggtggatttttactcttctagttcttatgaaacccagaattctcgacccttctttaatgagttttgggggatatttatagtgtttttgtggggtgatccctaaaatgtacatgtatttctgtaactatcagtaaagtcaaacattcccaatgaatatatcatagg

SEQ ID NO: 344160 - DNA, 864 bp, Cannabis indica
cgaagatcataaaccttccattaagatgtattagtctggggtgcttctttgacctgcgggggtttggtccgcacgtgccaagctaagggcccaccgctcgctcctttcctatgtacgatgtcagaggttgtctctcacgccacataaagcgtgcatgcccttgtgtaccatgcaaaatgatctaacgactaggagcaagggtaattcaaatgaggaaggccttgaagtgacacgcgtccaaagcatcgtcagtacaaccagtatcatctgacatcggtaaagaccatatgaaaaatatgccacctaccaatctaacagtgggggttcattctcatgaagatccatcaacggcgatccttgcaagagaatcggcctataaatacccccagagacacacaaggcaagggattccgatccaagcttcgacttcttctcctataatcccttcgactctccaccttaagatcgaaggcaaattctttgtaaacacactactgtaattattaactccagaatattactactaggcttccttttcttcaagaggaatacggtggattggagaatcaccataaattccggttacttcacctgagaagaagaccggaagaaatccaaacacatacaattttagattcatgcaaaatcaggcagaaaaattagttcaaaactaaaattcaactgtgaattacgattaaaataccagaatactaatcctcctaatatcaattttcagattcataaaatgtagatctatctgaaatagatctagagttcctaatcaatccaaatcaggtataaactgaagaaaaatgtatcaatacactagttaatgtttctcatgttgtaattaacattattttc

SEQ ID NO: 344161 - DNA, 568 bp, Cannabis indica
ccataatgcttgtttctgaactgaataacgtccgtctttcatcttgcttgttgtaagctcatgaactttttttccctaactgaagaaatttttttacttcttgagttcttacttttctttaagcatagtcgttctttaatctgttgagtactcctggtcgacatattttcttgtttattgtttgatattccgaccaacactcatctcgtgtgttgtcttttgtagatgaactcaggtgaatcttgggaactcagacattagatcgaccaggatttgcttcaacttatgcacgaggatcatcctcgttcttgttctagtcctccttcctctagtgaaggacattcttctggccctgtacccagccataggatgatggcttgtacaaagcgcgtctggctgacggaagtgatcctcaagtggctcgaatcgccactttgcccagcgctaaataggatctggccgtccagatggaggaggatcgtgaaggggatgttgaggtccaggagatcgaggagctggacgatgtgcgtcctggcagtccctctgaggcggaggaagaggaagtggt

SEQ ID NO: 344162 - DNA, 311 bp, Cannabis indica
ctttccatctatgttaactcgttgggtggagctcttggtatctttgaaaatctctagcatttgtcacacttcttaacatatttggataagctctgtccggcggcatgatttccatagaatctgtcgtgaactttggataggagccgtgcagattcttcttgagtaacacatctgagcaatggcataaagaatcctcttctatacatgactccctctactatgaaataccgtgcagctttccttctcatttttcgagcttcattttggttatctgggagtttccttgactcgaggtaggccgctattggtgt

SEQ ID NO: 344163 - DNA, 1161 bp, Cannabis indica
ctctctttctctctacaaaaaaaaaaaagaaaaagaaaaagaaaaagaaaaattataatcacattcttacacctatatatgaatacttttagatttttattcatattcaacaatgtcttaataacctttacaaaataaatgtcttaataaaatttaagacttcatcattctcactcaacatgattttcattcaatctattcacaatgctgcgaatacaacaaagaattaggttccaaatctttataaaaacgacataacattttattaggaagaatgaaaatataagaataaaaatgaagatgagaataaaaatagacatggagtgaaatgaaatttaaaatgtataaaaaaaattattaaattttttgtcatatatttccttccatcaacgtggattttttatatttttattttattttttgaatttttttatttacaaatatatattttcagtaaaattaataacttgttcttttattgttttataattaatttatagttgtcgtgagattgatttttcgttgttttttacattttactaagtaaaataaatttttttaatgttaaaattttacaaatgtatttttgtaattaaaaatattatgtcataaatttgtaaacaaaacccaaaatgatagtggtagtggtattacctcaacgacatataaattgtcaaagagctacttaggtggcgtttagttggaagtaataaaatataataaaatggatgtgaaataatttttattcttcctttgtttgttgtagaatgactattctattttaaaatgaaaggaaataccattccaatgtaacatgagaaaaaatttaatgatttttttatgcaatttaaattttattacattcttattcttactgccattcttattcctattcttatattttcattcctctcaatgaaagactaccttaattcatttcaaaactataacacgatttaatttaatttaataattactgtacaaaaataatttaatcattcataagtatcaccttataacagtgttgaaaattgttgctatctattaacaatgttcgcttcttaatgactatctaaattttattatttgaggaaattacactacatacatcttttaaattgatgactttaatttttacactctctttcaaaatctattatg

SEQ ID NO: 344164 - DNA, 527 bp, Cannabis indica
atttggaaatggggtattttattagggtcaattaatgaaaatttcccaattcaaattaatgtgaaaaactatttttatacatgaatcacaatatcaaaaattataatcaaaaaaaatattatttattattatattatctttttaataaaataaaaaaaatatcttatattaattaactaaaattaccacaattaactaaatgtaccctccaaataaaagaatcacacatgcaataaacagtttgaactttatttttggcgtgttaaatttttttgaattttttaaaaatttaccagatgtcttatataattataatgtacacgaccataaaaaaatagactaaaaaaaatctctcgaatgccgaaataaataagagtacatcaatgcaccacttttaaaaaaatacattataattttataaatacaaattaataaatataaaatataaaatatatatacattaaattaaataatatatcaaaaaaaagataatgtatgtcatttgctacaatgcacgatatatatac

SEQ ID NO: 344165 - DNA, 1467 bp, Cannabis indica
aacaatctcaatagttcggggaatttttaacggccaaaatgttcaggaggcacgatttagtgcatgtcaaagttcggggaaaaaattacattagcctaagtaaatatggattgattcctcatatgagttcaaaaaaaaagtacattagccgttcaaatgtttattttgttatgaaatttagaaaaatttatatctatcgatcaatatatcatagatttaatatatctttttttctaaatctctttaattagccttatgtcaatctaccatgcttacttaaaaattgaccatgactaatatgctatgtgttaacgcaaattttcgttaactataataaagcttatttcgtgatagatttgcacagaaataatactagtaaaagaagaagaaataacacaaagcttttttacgtagttctgcagttaaaattctgcatagtccacgagtttatcttattcgatttctctaatacaaaactaggattctttctctaaaagattgttcatccctttttcaatgtatcctgcccctatttataattatagaaggagacagttaattacaatcagattaataccccacaataatattctcctaaaattatgggatttgattacgcctcacgtataataaatgcggttattatttgaaaatcacacagctgtaatttatctgcttttaccgggtcaatgctgacgtgggtttagatacgctgcaaagtgtatctcgctgggtcacctctctgggatagcaacaataaccctgacagggagctgaagcttttcccatgtctttccaaggtcgataatgtaaatactgtcgtttatgatattgaagacacaacgctccatctgacaatcgctgttcttggtgacaagatgaactttagcagtcaacatcatttgaatgtcagcttctatctgagagagctggctcgaaggagtagtgggtctcattgaaagatgtctgaagctgattagtgaaggtaccatgagtatgccttcctatagcaagatgatgtctcgctattcgttgttcagattcattcaaccgttatgcttagtttgtataatgtacattatacgctaagtgttctaacatgtctcgtctacatctctttatacgtagcaaggttagtgcctcgctttgtattactaatgtcatccttatgattgtatcttcatataggaaatggtttctcatcaatatgagaatttagtttgtacatctgtgtctcgcttaagactttacagtcaacgagttatagatatactctatcagctccgcatttaatgagttattctattttaatatcttctaatataattgtcattatattcatttatttgtattctcccaggttgacacgtgtcctcttaagtaccagccgaattttgtgtataacaattgcccttaaaaagttcttttaatgaaaagtgctttaaaatgattacaaagggtattttt

SEQ ID NO: 344166 - DNA, 576 bp, Cannabis indica
ataatatctgaaggtgtagtcatgatgtaagatggttggctttctctagcggtgtcgattaatgggaacgttatctgggctctgatacaattagtctttcttctcatatgttagatttgagagattctcaaattattattactcttgtgtcgtgtggtcttctacttttttgtgttgattgttttgggcatggttgactactaagttattttttattagtatatttaaattacaaaactaaaaatttattacctaaattaattaggaatttccacgtgataatttacttaacacttagtagtcaagttccaatagaagttccagaattataatttaagtattattactggtaaaaaataaacttaaatatttatttacaatcgaagattaaacttaaatatttatatcacaaaattactctaattcttattaaatttttgaagtattgcccgaacttaccaaaagaatccttaattaattaaattgaatgtgaatcattctacttaggggtgttcgcggtgcgggtagtgcgatttttgactattttttcaaaccaacccgcacatgcggcttttc

SEQ ID NO: 344167 - DNA, 787 bp, Cannabis indica
gaataaaaagaaaataagcaagtatttcgatttctccataagtggtaaaccacggctgccaacataagcgttctcacactatccaaaatgttcggccttgtatttcccaaccaaacagtccagctatcaaagttccttgacctaccatcaaaccccagccaattaaaaagcaaagacaacacctgtttggaaaagatgcagccgaaaaagatgtggtggtggctctcggtttcaatgtcacaaaccacacaattattgtttgggatagggatgtacaatcggcacaacatatcccttttaagaagcttgaattgagcagcttgccaaagttgaaaagcatgttttggtacatttaatctgctccaaatttcaccagcagctgagaactcatcctggagcagcacgcttcggtacaacctgctcacattaaatttttctccacctgcagcagcaatttcagttttggtaaaagttgtttgaagcctacaaagcttcctccaataccaacttgtatccaagctcaacctataagaccaaatatcactccctttgagataaatcgagttaatccacttaacccaaagcaagtcctttttattcatcaagtcccataaaaatctagctaaggaagctttgttccactttgatccatccttgaaccccaagacctccaaaggcttttgggaggcacaccctctcccaacttatcaagtgagttctagttcgattatctttcaacccccaaagaaaacccctacataattctcaatctcttttatcacacttt

SEQ ID NO: 344168 - DNA, 513 bp, Cannabis indica
tgtcttgtccatatttatgactcaaaatatgggcataatatttttatatggctctaataccatgatagaatttaggatggaagtgaatatatcgtaaggtgtctaaggtttcatctcaaagtgaattgacaatgaaaggagtagtccatgtatctatatggtattatctttctacacattaacaatgtgagaaaggtattatttatttcgaaaatatgattaatttaaaaggtaataaaataatattaattaaataaactaaaaaatctgttaatttctcaattaatataaataaaattaaaaaaataaagttaaaaccaaaaattctattacatagccatttttggatcatattttgctcatagtgtacccgattcgcactaagtgtggattttatattttagatccaatccaatccgcataataactcaaatctaatctaatccaatctgtaaaagtacagattagatcagttatttttgattggttgatattaaattatttaatatatat

SEQ ID NO: 344169 - DNA, 612 bp, Cannabis indica
gtttgttggaagtaataaaatataataaaatggatgggaaatatttttcattctattcctttgtttggttgcatttaaaagtattgtaatattattccaatggaatgtcttttccataatttttttttagtagaatgactattctattttgaaatggaaggaaatactattccaatgtaacatgagaaaaaattcaaattttttatgcaatttaaattttattccattcttattcctgctgccattcatattcctattcttatattttcattcctctaaaaaaaaggctaccttaattcatttcaaaactataaaacacaatttaatttaatttaataattactataaaaaaataatttaatcattcataagtatcaccttataatagtgttgaaaactgttgctatctattaacaatgtttgcttcttaatgactatctaaattttattatttgagaaatttacactgcatacatcttttaaattgatgtctttaatttttacaatttctttcaaaatctattatttttcaattattctaccaattttacctctgtcatttcacgatagtctttatttttttctaaacaaaattttgctccaactttccta

SEQ ID NO: 344170 - DNA, 771 bp, Cannabis indica
ttaatttcaactataatcaataaaacaatacacaagttcaccgccgcacacaaatttctcaaaacttacttcactatggatgaatatataagatattcaaactcttctataaaaaaggttatagtgtataccgttaataattctaagaaaacttacaaattgttgcttatctctaagttcaagattatcaagcagatcttgtacctcaacttcactctcagtctgcacaaagtggaaaaacctttaaaattcaacaccataaatagcaaagcaattattttcagataaaaaaaacattccagcgtccatagaaatccaaaactaaagcgggtttcaataatttatgtacaaaaccaatctaccattgaattggctccttcatcccatatcaaacctaactagcttagataccctttgattcatttttgtggagagatacaaaactgtagcttcaagatgagaagataatggagtatatagcaaagtttcaacataacattctagcatgagcacaaaataaactttgactaaacaaacgaagactatgatatgtgcctgttgatagacaccttgacaattcattgaaccaacaatagacttcttttagtgaaattgtcaacaatcaaaaatgagaacgtgaactgttatcaaaattctctctgaactattcctatttttattgaagtgaacccaagttattctagactacttctccatgtctttaaaagtattcctatgcatccaattaggacaggaaataaaaaataaaaa

SEQ ID NO: 344171 - DNA, 623 bp, Cannabis indica
acatggcgagaggcgccagtgtctacccaccacccttctgatccaccaatcatattgatctcagagatcatagctgtaaaagcttcttcagtcaagttagcctgcggagcagagctaggcttgttccgacactttcgtgccatatgacccggcttgttacagttgtaacacaaaaactgtgcggggtcattctgtttatgtggaggtggctgccttccatgttggttcctattatggttccaactctgattattgttacgaggagggttgttgcggttagaattggaattcgagttgcggttctgattcttaaaatttttgccattaggcttcagaaccgctggtgtggatttcttagtgttgttgtttgaaacaacaagcacttcatctttctggtcttgttttcttgcttcctcctctatacgaaggcgggtgatcaaactttctaaggaaaattccttagtcttgtgcctgagagtacttttgaaatccttccaggaagggggtaacttatcagttagtacagtaacttgaaactgttcatctaaagtcataccttctgagatgatctcatgtgcaattttctatagctcgtgagattgggcttccacaggtttatcgtc

SEQ ID NO: 344172 - DNA, 570 bp, Cannabis indica
aatatggaaggagcaggtgaagatttaccttaaaatacgttactggaggaaaaagatctatacaatttctttttttatttcaatgaaatatttattaaaatgataaacgtaatttttttttcaataaacaatacaaatataggtgatgtttgcttagattgtaatgaaataaagtaacttttatctagacgaaaatatcctcacttttattacttttaatatttcaaatttaaataaaagttaagatagggcaaaatagttatttgttgacaataatcaacattacaaagttttaaaaatgaaagcaaacaagcaaataatattaaaaatttgcagctaggcacagttaaatcgaacccaattcttatgatctcctcctgcgtcctgattttatgcgagtgtttggcgcacccgattcttatgatctcctcccgtgtcccgattttgttccagtgtctggcgcacctgtggtcgttccctcaaatatcagaacactcatcccacgatggccttgtgaaccacgagagtttgagcctcagttgggtggtaggtgtgaccgtgttggaagta

SEQ ID NO: 344173 - DNA, 674 bp, Cannabis indica
atcgaaaacattaggtatttatgccgcaatttaccctaaaaaaaattatgaaagaggcacgtgtcaattattattgcctctttcgttttgtattttccaacatattgtttattttttgtgcgcatttagttattggaatgtattttaccacgatttagatttattaacaagtatgttgattaatatcttaaatatgaattctctgaaacattaaaattaaacacataaaattttaaaaaaccttacattaatggtagtagaataatattactctttccgcttagatctctaactcttattcctttttgtcgcagagtaacaacaagatctgagcctagatctcattttctccttcgggttggttatcaccttctttcgtactataattgagtacttgacttactatgtgtgggcatggtactctatcactatgactcgaattggtgaagaataatgaataaggtgcgaaatcacttagaaaggagtctctcatctaatagttgtctgacagagttaaaaaaactagatttgatatgttgaaagtgttggatgggaatgagagcatcatgttccttttatagtatttcaattagggtataggatttaattatatggattaaaaaagaataaaaaaataggcaaaaatcacactacgtgaccgaccacaatgtggg

SEQ ID NO: 344174 - DNA, 606 bp, Cannabis indica
agtgtctttctccaacttcatccaagtgaagcggcgatctacatttttatccataaagcatctcatatggtgccatttagattgtggcttgatagctattattgtaggagaacaccattagaggtaaatacttactccacgagccaatgaagtccagtgcacacgctcgaagcatatccacaagcatttggatggtacgttcagattgtccatctgtttggggatgaaatgctgtacttaatttcaaccgcgtccccattgccttatgtagactctcccagaacttggaggtgaatactgagcctctatcagagactatcgtctttggaactccacgcaaccttaatatctcctgtacgtacaagtcagcgtactgctctgtgctgtaagtagactttactggaacaaagtgtgcttactttgtgagtctgtctataattacccaaattgagtcgtgtttcttggttgttcgaggtagtcttgtcacaaaatccatggctatatcttcccacttccattccgggattaccaagggttgtaacatccttgttggtctctgatattcaaccttaacttgttgacatgtgaggcatctagctacaaatt

SEQ ID NO: 344175 - DNA, 644 bp, Cannabis indica
ccaatgtctaataaactgccccaatatactaacatgctaagttgtgattctactgagacaaacaccgagttccatgttgcggggcaccggaaatgcaaaattataaaatttcactatataacataaaatgcatttcagaattcaaaaataacagcataaataattattaaaatatctataaataattttctataattaaatcataattaactgctaatttccaaattaaactaagcggtctttacacttcacctttctcacaccatgggctctcatgggcttgcatgtgagcctccgcacacactacacacatgcatgcatgcacatgggctcacatgcgagccccccacacaccatgggctcgcatgcgacccctcacacacacatgcatgcacatgtgctcacatgtgaccccccgacaacccctcacacacacacacaacacacacttgcatgctcatggcccgtgcgtgggtctcgtgcggacgtcgccgcggctcgcacgaatgctccaccacttgcacaaaggctccacgactcacacaaatgttccactgctcaccccaatgctccccgacttgcacaatggctcatgggctcacactaatttcttcatgctcgttccaagttctaagtaccatttg

SEQ ID NO: 344176 - DNA, 1038 bp, Cannabis indica
aaataaaactaaaaaaaaaaaaaaaaaaaaaaaaaagaccaaatatagttttatgatatattttgggctaaatttaaccttaaatatacaccatccattaaagatggtctaatacttacaacaagatacataattttgatagttttttttttaacttaatttagtagttaaatgatgaacattgctattgaacattaatagtgcctagaactttctacacatatcatcttgtaattagttagtgacactctttaaaagtttactttaaattatgggtaaatagcggtaaaaccctcaatacttttgttttggtttcactaaatccctaaaactcaaatttctgcgggtaaaccccgaaaattcgtattttgttagtaatttaccctttctgtccaaatttagctgttaagtgccaggttgacttgtccacgtggacacaatatacacgttgcacaattttatcggtccacgtaaataattatattaaaaaaataaaaaaaaaattaaaaaaattaaaaaaataatttttttttcctttctttctttctttcttttctttcttttttttttttcttatctgttcatctcagctctctctctatcagtccaccaccttcactgtaaacaccaccaccaacacaaccgaagccaccgtaaacaccaccaccatccataaccatcgtaaacaccaccacccaccactaccgaaactaccaccacaacctatttttcaaatccatatcacacaaaaaaattaaatactaaaaccaaatttaaacaaattcaaatccaacaaacaaataaacacacacaaatatatacacaaaatttcagtccaaaactcaaatctgaaaaccctaactttattttccccacaacaattatcttttctcatatctgaaaataatgaacacaataatacccaaatatttgcagctatacacagatcttgataattgcaaaaaaaaattatagaaatccctagatctaaagagagagaaagagagagaggagggcagatagagagagagagagaga

SEQ ID NO: 344177 - DNA, 1048 bp, Cannabis indica
aatatgtgtatggtgtatgcataattatgttgatatctgtttgagttctaaatacttggaagatgcgaactaaatgtatgataagttatggagaaagtgtaagggcaattgaatagtctgattagcgagctgtctaggcttggggaaaacggtaaagaagaaaatcctttatcgcgacaatactaggaacatgtaaattctgctaggcaggatatgattagacaataaaggaaaatagatccgagatctaagagaacaacatgctcgtcttgtgtctattcttgtactatctacacttcatattgttccactggatgtggtgatatatatgaagccaacttacgagcagatcagggagcgaaaactaaacgaaccaccaattatggggcagaacaaaaaggttccagggtgaccaaaatagtggtcgaggtgagaataagaaatggtgaccttattctgagtgttcaagatacaaaaaggcgccatttgatgtagagccatatcttattttattgcggggtagtgggtaatctgaaaagaacctccccgtagttaagaaagactgatatgttaaaggagaaaagtgtatgggtcctgcccaagtgcttgttgttatgactcaaagagactcgagtatcggtccttcgaccgactcaaattaaaattttatgggcaatattacaatttttgtttcaattgatatcaatattaaatattgtacatttagttagagacatcaagaaatttgaatggactgtgtatgtatgttatttagtagtaacccatttgacggggtagacaaattagagaaataatagtatgagttaaatttgttggtattcctaattgaaatataggacatgagtagttaatggaggcattgatctaactgattccaatcacaaatcttttgtttacaagtgatctaacgtttgcaaaggtaggacaatttatgagtattgtctagaatcctaggtgaattgaaggcggcgattgtgtagtaattttgagattatgtaggtgtgggactacctatgttagcaagaag

SEQ ID NO: 344178 - DNA, 441 bp, Cannabis indica
aaaatgttaattggatcggatgaggagaaaaatgtatattggatcggatgcccacccctaaatgaaattaagtatatttatgaccgaactattagaaataagagaaatgctaaagggcaccagtggtgcctagcaccctcctatgtgtcaatattgttattggtctaactaagtatcgggtcccatataatttaatataataatttttagggagtattgttagccaatcgtaacgcgacatgtcgagaaggtgctaggcaccactggtgccttatagtaatactctagaaataattataagggttatttgcggcaaaacctccttaagtggtcaggtttttgcaactaaccccaaattctaaaatttttgcggtaaaactccctaaactcaagttctgttagcaattagccctttccgtccatttttggctgttaactgtc

SEQ ID NO: 344179 - DNA, 935 bp, Cannabis indica
gtgtttgtactggcttggggttgttctggtacactttctttcttgcctgtgcattctaccacaaattctgctaaggcttggcctttgattgctgttcggggctggaaagtaatttcgtattggtccaactctatcgcccacttgagtagccgtccagaggcatctggcttttgcagtatttggcgtaatggttggtcagtgtatacccgaacaagatgagcttgaaaataaggccttaactttcttgttgctagaataaggcagtaagcgagtttctctatcaacggatatcggccttcggcctcaatgagtcttttactaatgtaataaaccaggtgttgtacgctgttctcttctctgattagcatggcactcacgacatgttccgtgacagctaagtatattccaagttcttctccgtctagaggttttgaaagtacatgaggttttgcaagttgtgcttttagctcttggaaagctttttcacattcctccgtccactgaaactgcttctttcttcataggatattgaagaatgggacatacttatctgttgattttgaaataaatctgctgagtgcggtgatccgaccaatcaagctttgcacttctttggttttagttggcgagttcatgtccaagagggcttgaatcttctctggattagcttcaattcctcgggcattgacgatgaagcctagaaactttcccgagctgactccaaaggaacactttgagggatttagtttcatattatactttctgaggactttgaagcattcgtccaggtcgtcaatgtgcccccagcctttctagatttgacgagcatatcatccacatacacttccatatttcgcccgatctggtctttaaacattttgtttaccaatctttggtatgtttctccagcggtttttagaccgaacaacattact

SEQ ID NO: 344180 - DNA, 644 bp, Cannabis indica
gaattggcatttaagtggttaaattagaaaattggcatttttgagaaaatgggatagaaaaatgacaaaatggaaaaattgtaaagtggggcccaataacatcctaaggccggccacacttgtgtaatttaccttttatttttctattattttaatgctaattaaatctaacctaaacctaggtggttacctataaatagatagtgatggctcacacttaaaattagatgaaatttcttgcctttagaaaattgagcctcctattcttttccttaggccgaaccaccattccttctcttttcttcttaaaattttgataccttgagtgtgtttcgaaaattaatgatagtacgcaagtgtacgtaatcaagtagtaaactcacgcaagtgaggtcgaaccacagggaattagattaactaccactaaattatacttatgattctatttggcaaatcgataattttcaagattaaaacagaataaaattaaatcaaaaactttaagaaacaagtgaatattaatcaagatgacagattagggagaagaatcttgttgtcagtttaccaatcgttaatgcctgattgctatccttttcttgaagtgaatgacagattataaattaacctaactcttttcagatctt

SEQ ID NO: 344181 - DNA, 597 bp, Cannabis indica
atcatttggtgaaataacttgtccaataagttagtgggtcaaaatttgtacttaaagcttttttaagtatggacttgaaaatcactgtacaagactaaaaaaaatataaataaacctttatgaagtcttgtcttgagttccttgagtcttggaatctattttgggtcactttcgagaattttagtaaaattactattttgcccttagtgttaagtttaccttagaaaaatttattttatcttttattgtgctacaaaatccacaaatcattagtaacaaatatttaataatcatcaaaacgaggagacctaagaatttaagtaaacaatctccatgtttttaatgatatcaaatatttgattattttgaaaagaaaaaaaaataaaattgaataaatagattagctttctcttaatgtgtgcaagggttaaaataaaatttatcttttagtttcaccttgcatgattttgtaaaatttccctcaattttatacttatagaacacacagggccggccctgagcataggcgcgctaggcctgtgcctagggcccacctagctcaggcacccaaaaaaaatttatccccttttaaaatta

SEQ ID NO: 344182 - DNA, 361 bp, Cannabis indica
caggtcaattttcagatgctttttagggacatgtgccagtcgttgcacatccttctcttctaatgcgggcattataacatcttttgtcattctattcttgaagtctttcattaacttcccagcaaggatcaaacaatcatgttttactcattcgcccctatgaaacccgtctagcttgaaggaaaataaacacgattagagttaacatctgaattaatgaaaaacaaatcaaaattctcacaaataaccgcttacctctatatctttccgaactttattttttagtgtagggttgacttctttccaatttttataggacaaccctatcgcttgacgacatctaactgttgggttttgtgcc

SEQ ID NO: 344183 - DNA, 1041 bp, Cannabis indica
tcaaacaaataaaaaaatacaaagcaaaataaagaaaataatcacctaggatgttttagcaaaccttcgccaatcgaagcatcaaactttgccctaatttcaagagagacgggatcaacaaatatatcgttaagagtgtaaagacccttcacataagtaaccatcttaaaatccctctcatctcctccagattgagaacctgatgacattacctccattggagtgctgctcacatcagccgacccaaaatcaacaaaaggaaatttcaatgccggtgcacgctttctcttatccaaaagaggagtataaataacagtgtcatcagcttattcatcagaaggaatgacaactgccttttcaactgcaacacttggattggattctggaacctgaaatataaaatttaaaaattagaaaaaagtaaaaaagttgcaaaactaatataaaactgtcaagcacctaaaataaaactgattttaccaacaaagaatataaacaacacttacattgattttaccaacaacctctaaactagccaacgcaacttgctcatcatcaatttcaagctggcttaaactatcgaaaaaatcatctccctttaaagtagactctttgtccttaacattctcatcatcctcagccccctcttcactgcctgcaacagcctcagtttgattcacatcatcagtaggttcatcacaaacaaccttatcaactacaacaacatcaccaccatctttacccaactcatcaccatcatcaaaatcggaatcaatattctctggattaggtagtcccttgtcatcatcctcatcatcgtcaacatcatcatcatcatcattagaatcttgggtgaccaattcatcagatgacttaacctgaatcaaaaaatggtattgcaactaaaataaaataggaaaaaaaaactaataataacaacagtaaaaaatgaaacaataatagtgtaaataaatacttcatcagaaggttgacgatgaatgacattaactttttctttaatatccttaattacagtcatga

SEQ ID NO: 344184 - DNA, 508 bp, Cannabis indica
actttcattctcactgttctaaaacatgttgcctccgaaccttccactaataaggaaaaagaggctggatgcaagaagtaacagaaggatttaaattcatgggttaaaaatgactttttctgtacgaatttcattcttaacgatttatctaatgttttttttttaattattataactcaaataaattagccagtgaaatttaggatgcgttacaaaagaaatatgacactgataagacgataactaaaaaatatgttgttagtcgcttcctgaagtatcaaatggtggatgacaaatccgtagaaatccaatctcacgagcgtcagaaaatcaaacatcagattatttcaaaaggtgtgaatttagatgaacaattttaagttcatctaaattcatttactagttaattattttttaaatacattttatagaagcagtaaacgtacccacgatcaaagtaacatttttctaaccatttttatttgatcgacttaacttctatttaagt

SEQ ID NO: 344185 - DNA, 516 bp, Cannabis indica
ttcgaacatataattaagattatattccactgtgctgacaacactataatcataaacaaattcatatgttctggacttaaatagaattcatacattatatatataatcatgaaataaatcatgtgaaccatgcaatataaaatgttatttctaatctttattaataagtaaatctgattacattgaaatgggttttatttagggcacaaaactcaacacttaaatccatgggagttgaagctcaaagataggaatggagaattagcatcgatccaagctaggataaatctcccctcaagaaatagattagtgtttcatgtttacaaatataattttatcaattgcattttttgggttctatttccactatttcttgtaatgacattcagttatatgttgctcacatgaaacaagggctttatgttttaagaccggatataccaattgcacttaataacaatctttttaatattgctaaacctagaaaccataaaaggaaggagattgataatattg

SEQ ID NO: 344186 - DNA, 624 bp, Cannabis indica
ttttaattgtagtagttatgattttaaaacttaaatatatacatatatcaatatcgggacgggttttgggtgggaatctattcccccgccctgtttttgactcgagtatgaatatttaaactcatacccgccctgttcccgaaagtcaacccccgtccctattccattagaggcgggtacctataggtacccgaacccgcaggtataattcccatctcttttttgatctcatggttctaagcatatatcatattttggcatgtttatttactttggaaagagaatcaaggtatgacaataatccttattctattgtttattaaaataagaaataaaataaattgtattttccacatacatgggaaaatttattataatttaacataaatatataattcaaaataaatataagaaccaaaaaaataattaaaaatcaaccaatgtcaatatatcaatatttatatagatgggtgactacttaatggttacatttttattgtaaccacaatagttacattattttacctgtaataacacgtaactaataggtaaaattcttttttttagaattactttaattataattacctatgtgcttaaaaaaatcatttttaattagacatt

SEQ ID NO: 344187 - DNA, 762 bp, Cannabis indica
ccccaataattttaaggtacatgctgctttacgttttgaattttctgcatctaacaatgaagccgagtatgaagcattaatcgcaggattgaaactcgctctcgagatgaaagtcgagtaccttcaggcttttagcgactcccaaatcgtggtgtgccaggtgaatggagaatatctggcaagaggcgggagattggttaaatatttagccattgtatgcgaactaatgcagaaattcaaaaaagtaactgtgtctcgagtaccgcgtgctcaaaattcacacgcagacgcactggcccgtttggcctcaactagagaagccgaattgctcgatgtaattccggtagatgtattggctcacccaactataaatcgagaagtgatcatggaaatagataccgttcaggaggtcacctggattactcctatcgtcgcatatctggaaaagggtctcttgcccgatgacaaaatagaagcaagaaagctgcgacagcgagccgcccgttatgtaatatatgaccaaaggttgtatcgcagaagttttagtcaacctctactcaaatgcatcagcggggaagattgtggttatatacttcgcgaggtacacggggggatttgtggcaatcataccggaggtaactcccttgcattaaaaatcatgcgacaagggtattactggccaaccttgcgacaagatgctctcgcatttgcgaagaagtgtgacaggtgccagcgaatagccacatatacccaccaacctcc

SEQ ID NO: 344188 - DNA, 533 bp, Cannabis indica
ccttaataaccgaacaacaagggtaaaaacattcttggggctcccttcattccaaattcaattctccctaatccttcttcaactgatatcccatcaaattccactactttcacaaatcctcaacctagtgtcactgtggctgactttacacatatatatgtacctgatttgggtcatgggggtatgtctcacaatgtttttgccacctattctccactcacgtccccaactttcccaactccctcactcaaatctttgtctatctcaactactacacaaccaacaacctcaatatcagtttcaacccctgccctaccctcatctttatctcatgacatgcctactgattatcttgataaagagaataccccaccttccgcaactaccaaaagacaaagtgaacccgtgtccatgaggaaattccttaaacgatgtcgtggtgttggtagtcaatcaacatcttttttcactcctgaatctcataccgaatctctagtttcttcaaatgaggattctattgattctcttgactg

SEQ ID NO: 344189 - DNA, 630 bp, Cannabis indica
atgagagtggatttggccttggaatggatgcacctcctaaacctgctgatgatgccactgaaaaggataagaaatcctatgaggattgggagcattccaatcgctgttgtttgatgcttatgaggtatcacatggatgagtccattcgtgatagtattcctcagattgaaaatgcaaaggattttcttgctgccattaaggaaaagtacaaaaagttctcaaagaatgagaaaaatgagtgcttgactttgttccatcgcactaattatgctgatacgggtgatattagagcccacattgacaagctcatgggttgttaccaaaagctcaagggcatgggattggatcttggtgaggattacatggtgtggtttgtgatggaaaccattccttctcaatttgattcgatcagatcaagctacaatgctcaaaaggagcagtggaccattgaggagatgactgctattcttgccaaagaagaagaggacatgaaaaaggggagagcaagaagtatctccatggtgaccaatccaaacaattctcacaagagaaagttcactcccaacaactctagtgaccaaaggtttcataagaagaaagccaccaatcctaagggaaatggacaagcaa

SEQ ID NO: 344190 - DNA, 663 bp, Cannabis indica
ttttaattaatcacgatttccataaacctcggttattagcaacgagctgcacagtatgtttaaaaatcacgtaatacgcctatcctagtttgggtgttacatagagatacctagtaagggagcctacatgctaggaaggtacaatgagaacatggagctcgttctcctaccaagatactggaatggagagcacctttgtaaatactatcagtaaccagcttacagaattctacttttagtagtagttctaccaactcaatattaaagtgaaaaagagctagtacccacaaatttttttggtgtggccatccactgttcttcaatggtggcctctgttatgcaactcaagtaggggtagccatttgatatgtagaagcaaaactttgttatgtaagcttgtagattcaatttatgtaagttgtacagcaccaaacaccaattaatgaataaaaaacaatatttatgttcaaattattgtgcctaaaccacttgctaacaagattaacttcttaaagtaattctttttttagattcacatgcatacaacatgtagcaccccaagaaaattcctaggcaaggtctaggaaacttggtgaatttcaagtgaccaggagaccgtaagtttgcatgctcacttgggggcacccacaccatacaatgcat

SEQ ID NO: 344191 - DNA, 584 bp, Cannabis indica
aaggtgatcacgcagatcacccctatgaacctgatatcgtcccccctactacgtctccacagaaccagacctcgtatacctgctaggtgtgagaccatgcgaggacgaggaggcggattctacgtcgttgtctcgtgaaggcctgctgcgagggttacgtcgttcggggtcttcatcgatctgcgtctcctggttgggatacctcgcagattggtctcttgaggttggctgatttaggtccagaccttcggggttggtccttcgttccctgcgaacacggttattacgacgcctagaatttattacctgagggttttctgtgcgagtagtgggggctcgaggggggtgtcgggccctgttctgtccatccacctcggcctgcagggcgcgtagttggtcctggatcacggtatactggtcagtggtgagctggacgattccctcggatactaccgccggagtgatgggtggaaagtgccccattgttgctgctggcgtggatgtttctccgacttgggggccagcagtttcagggaatagattgagaggtctgacattacctctccctactccgccattaatga

SEQ ID NO: 344192 - DNA, 608 bp, Cannabis indica
tattataaataaactataaggttttttaatatatcgtcctatatttttttgggcttgttgtgtgtcatgcctttcagactagtctattcgtgcttacatatcgtgcctttcatccttctcgtgttgtgtcgtgctgaaggatatctttttcatgacatgtcgtgctaatttatagcatcatgttgtgttgtgtccaaactcatattttttcatgtctagtcgtgaggggcgaagctagaaataaaatttaggtgaggagattatgtatttttatagtgaaatgctaagcatctatggtgcctagcactcttccgtcataaactattagtgtaatttaatattgaatctcactaattttacttttaataatgattatagaaaattaataactatttataggcaccattttagaaaaaataaataacctaagatactaatttgtagataatatagatcacaataataatatataataattaggtatacatgcctgattgatccatagcaattactgtaatctgatagtgcaatactatcaactaagtcttccttcataagtctctaaatcagaagcaattttatttatctaattatcaaaaggtatacaa

SEQ ID NO: 344193 - DNA, 962 bp, Cannabis indica
ctcagccttcgtccaagctttgttgttcttaagcttcgtccatcatcgtcgttctcaaagcttcgagctacggatttaggttctcaaaccttcgagctagggatttagggatttaggtttgatttagggctttgggttttaggtgtcgataatggttttgaaatgagttttgttttttaatcctaaaatgttgaaaggttttagattaattttagatttgttttatttatttgtgtcagttattagttttagattttaggagaaaataaaaattaaaaagaccggattaaacttggggcatccacgtgtcatgttacttactaggggtgtacgtcggtcggtttagtctgaccatagtatatttttaccaatccaatataaatatcgggttgcaaatatttaattataatttgcccaattaaaaattagaaaaagttcaacccgcccaataattttgtcggtttggtcaggttaacccatccaaacctttattcatttttttttatataattattattcttagtttctaattcaaaaaattagatttaaaaaaataaaaatacattatttatatttcaagttaaaaaatgctatagtctaaattaattttaaaaactttaatataagataaatataattgagtaaacatgaaataattgaataaaataataataaaaaagtaataatattgtatagattttaaacttcaacttcaatatccaaatacaataaaaatgattaagttaaacactaaaatatccaaacttcaaatacaaaatagttttgactaataaatataatttatgtaatgtattatatacatttttattaaaaaaatatactaatcggtttaattcgatttattcggattaattggtcggtttagaataatttgtaaaccacctaatatattcattgagcgatttggattttcatttgtattatttcgggttgtagttttt

SEQ ID NO: 344194 - DNA, 532 bp, Cannabis indica
tagggtcagtcatcaatccaggaagcagccagagtggcgtactcgtatataagagccatttattccgtgggtgtaaggacccaatggaggcttgaagcggggacgttacacatgtaatttaccctattagtgggctttaagcataaaccctaggtgggtcatgtgcatgaacatacccaccacttagcctataaataccattctatttttatacgaagggaggatcacaacctacatagttaaaactctaccaagattattcttcgtcttcttcttcatcaaaaacttagagtacataaacatgttattggttgacatgtttaaacaatatatgcttataaacgggttacacaggtcgtgtcgtgttaatccgtttatgaacgggtcgtgttcaagttttgtttttgacacgattattaaacggatcatgttcgggttaaacataatcctgttatacatgagtctcgacacaacacgaatacgactctcgaacacgaatagtcacccctaccttcacctactccattaaata

SEQ ID NO: 344195 - DNA, 535 bp, Cannabis indica
tagaatttaccaagtaaattctccaacttgttaattctgccttgggccactatagatttggaattgaatagcactctcaattatatagaacgctctatatgtatatatagatacatttgattatctattgttacaatcctaatagtcaaagatcctccatagatgatctatactaaatagggacaaatttaccgttctacccttcagggtagtttatccttaaaatacttagccacctataaatgatatttcagtaaactaaaataattactgaaatgagatctaaataatttatatctattcaaccaagctcgatggaaatcattgtttcacttctaaatacttatagaagctatagattccttatctatgatcaacgctgccattcaattgaactaccatgttcctaagatgtaaatatctgccagaactattggttagcttccacgaacaacttgaagaatatcaataatacaactaagatgaacctaattgtaaagcccgcttagttaatttggaaattagcagttgttta

SEQ ID NO: 344196 - DNA, 527 bp, Cannabis indica
tgatttattaaatacattatttttatattattaaatattgcacttatatatatattgtgcacttttttttataatgtattttttttttttgttcaaaaaacaaatccacacatttttattggtataatctcatattatttttcttttcttataagtttgaaaaaaaaaaagtgactatatttgcacccattaattatgaaatattaaactaatttatttttgatactttttttttaaatttttatgttatttttactattaattttatgtattttaattttttttcatttatatatattattttaaaaaaattaatgattatttttgttgatgcaaaaaattggtgaacactcactcgttagattagtgaaagaaaatagaaattaattagtgtaaatgaaagacacaagaaatttatagtaattcactttttttgtcgcgacggtaataatgctatgtttacttcgagttttttattacttacgagtaattacaagagaattgattaaggcaagagctctatattt

SEQ ID NO: 344197 - DNA, 605 bp, Cannabis indica
atgaataaacataaacaatactgacaaaaaacataaaaacaacaaaaaaacaacacaaaacttacagaatcactaagaaactgatcacaatgaagcaacgagtgaaaccacatctttcgctgaacatactcacaaccaaaatcaaaacctggctcaatcttattatcaacaggaccaaaatatacagaatgaccattcaaatccttcctataaacataaaaacaaacaaaaaaaattaatagaaaatcacatgtataaaaaaataaatcttatagacaactaagatagaaataaacataaaagtaacatacgtcggtctcttaagcaaaccagatttgaaccaagcatcaaaggctttctcatcttcatcattgacatcctctacaacagaatgatccaaagcacataaacctttaaccatacttttaacaacagcagccttagatgatgaactcaactgctgtgcataaggagactgcaaatgtaagccaggctttggtattctcctctcaacaggaggagtgatctcatcaacattaactaaattatcaacgacaacattaagctcagccgccaaatcctaaataaaagaaatagataaaaaa

SEQ ID NO: 344198 - DNA, 854 bp, Cannabis indica
aatgtaattttactattgaaaaattaaaaaaatttccaaatttttgaaattccactaatattatcatcaataataatgtagtatgatgattacatgatataaatctcctctaaaaaaatacatgaaattaactataaactttttatatgttgttcttctagtcttcaagatttactatgtacgactcctgcaaaaaaataaatatgttagtaataaaagtataatttaatttataaattttaaaaatgaaaacaattaccatattcggatctacatcattatcttgatcatttacggtgattagtttagtttttgtgcctgtaaaaaaattattaaaataatataataaaatattattaattaatgtataaacttatataataagaaataaataattatacattgtttgccaattgccaatcaattttgagtacagagcaatgcctccaaagtatatgaagtctcgctcgatgtggactcacgtgtctaccatcagtactcaatgaggactctgaagcaacagtactaaccggcacaacaaatatgtctctagcaatcatgttcaacacaggatatttagatcttgttatcttccaatagttgcatatatcaaagaattcatcagtcctgggtaacacttggtcatctaaatagagatccaactctgacttttcattcattgcaccagatgaagctctaacatataagtcatagttagataaatgatcttgtgttgaaaagatgatgacccttccacaagtgaattgttttcacttaaagtaggacatttagatttgtactcatttgaatagatcatcacaaagcctacacacctttctaattttcaacctccc

SEQ ID NO: 344199 - DNA, 602 bp, Cannabis indica
tgagcttctaccattgtttcattcttcgtaaatttatctctaagtagtcaccatagggagagtctaatagagacaaaaactgacaaaatacttatcttttgagatctttacggtgttaattgcttcaatgaataaccatccataagggggacgaagtctagcgtctcgaggttatattgaaaacgattaaccatgtaggaccaacaatggagcgaatatccttataactaaagctcattattttaaagaattgtattttcatttgatacttattttgatctatttattttaatatatatatatatatttatttaattaaaattactaatttagatgactctaaatataaattttaatttaatatttataaaattatagcctaagaagttttgaaagataaaaatttaattttcatccttagtatttatttttcaataaatattatgaaaattacttaaattaacttggtccaaaattaataagaaaataaattttcaactcaaatataattttctacaaatatatatatatatatgataaaattcaaaatccaatgtatttaaaaataatacattttcgaaattcacattaaaataaaataa

SEQ ID NO: 344200 - DNA, 924 bp, Cannabis indica
acctcgcttttagctaacgacagtgattcttaataataagcgataaaggatataattcagatatgatatgaaaagataaataaagaacacatggtttttaaagaggtttgaccccgagcagttcgataatagcctactccccttgatttgtattgacttacaaataaaaaatacaacgattcctctcttaaagctcttaccatgaaatctttgagtatgctgtcttagatctctctcaagtaattctatggatcactatttataaggctatatacttgagggaaggtttcccttttacttacaatatctataattggtaagaatacatattacatattaagaatacactgattgtgggatttggacagcttgccatatctctgtgatacgatccccaaattatagggattcctcttgcgtttcacgatgcaaattctggaattgctaagctttgatatgcggctcggattgtccacagctcgactgggaggacctcatccatgcaggcatatgagatgttctgctcggaacatctcctttgggcaggtatggagaatcaagtccacatgtcactagcatgtgatgacacgtcagtgcaaaaattgggataacaagtcataagtctgctgggtcatttgggggggaaactatacgcgtacaaaccattggtaaaagtaagtaacaagctcaacaaatatgtataatatatatataacagtttgcacgaacatgtatcaaaataagggaaagtattcattaaaaaggataaacaaagcacagtaaacgcgggattaaaggtttccaagttagctagttgtctcaaaatgaaaaaacataacccatgtttcaaatttgcttggccggtcatttttgtctctaacaaaggcccatgagccaaatagatatttatatatatataaaaaa

SEQ ID NO: 344201 - DNA, 521 bp, Cannabis indica
ggcggttttttcggttttcgatttcgccagtttcggttccagcggtgttcggtaggtcggtttgaacggttttttcggttttctggattttctgctcagccctacaaacaataaatcaaaattcttgaaataaaaggtcaaacgatagacaatgaaatgactgagtgacactaaaacgattaaacgacaataaagaaggaaacaacaatttaagaaacgtaatggattaaatgaagtggaaaacgacgataagaagaaaggatagtaagccattggttcataatttactacaaaaggtcaataattataatttcacaatatagggattataccttattttaaagactttttctttttttaaaaacgaattttagacgtttaaatgtgttaaatagtaattatatattattttttaaattttatatttgagatagaaaaaaaatattatttaacaattaatcgtctgaaaaataattattttaaaggtgcatcttatttttcggtagcccatctcgaaagaa

SEQ ID NO: 344202 - DNA, 623 bp, Cannabis indica
cataaaatgatttttgatcttttattaattagtaaatctaattaaattgaaatgagttttatttagggtacaaaacccaacacaatatcaaggatcttcagccaccacccatctccctccatgtatgatattgtccgctttgagtctaagccctctccgttttttttggcagctttccaaaatgtctcatactaatggagatagtgtccatccttatatactcatgatccttccaaattctaactaatgtgagattttagttgcacacccatccttatatgcatatgtatttactaataaatatttaatttttaatcattataattaattttttatatgattatgtgtagagtattgttaaaaaattgtatacaaacaattgaaactgtaaaaaatatatataatttagtaattaactcattaactataaaaaaaaatatatagtggaaaagttaggcctaaattcgagctcgtataagaaaacgagttgattcatttatgaaaaacagactagttcgaatgaaacacgatacgaatctgagcacgatataacaaatataggtttacgagccatcacgagcttaccttttaaaatattagcatgacacgacatgactcatatt

SEQ ID NO: 344203 - DNA, 2179 bp, Cannabis indica
cgggtacgtaaaatcaaccccgttctcgcacccgatccccgctaagtcgggaattcccgccccattaggggcagattcccgcgggtccctgtccccgtggtatttatgtgcaacactagtcacagatgctataccttgaagatttttcccaacaacacaatgagccattctattatgctttgaggagatttaaagagcttggagagagattcttagaaggtgtccattacagcctgcaacgtggacacagtcgtcacaaccttccgaaaaggccttctagtagaatttgacctatataaagaattaactaaatacccttgcaggactaaggaggatgtgcttgccaaatcatgcgctcaaatcaaatgggaggaagatgaatcgaataacaaaccgatctccaactattcaagttctcgtgagaatcgagggccaagacgagtagagcgcaagtcatcttatcatgttgaaccataccccaacaacagatccagatcatttcaaagtagtggaagagctccgccccaacgatcctgtgattaacaagtaaggggaaaatcatcccaaaagtttagaggctatcaagataaagcaccaatcccagagtacactctaacaatagaccctattgaagtggttgctgtaatgaaaggcatgagaaataaagtcaagtggcctgggaagattcaaaagccagaagctctggaagatatgaccaaatggtgtgaatttcatagcgatcacaaacacaccacaaccgaatgtataacactcaagtttgaagttgcaagactacttcgtcgaggacaactatgagatttcctttctgataaaggcaaagcaaccgtagtagaaggggataaaagataagagagtctacctaaccccctcagaatgcgaggactgtgaatgtgatctcaggaggatcaaaatttagtggaattacttattcagcagctaaacgccatgcacgagaaccaattaatagccaaggaaagccgagaaagccaaagacagtcgttggacagaccatcagctttgtcaatgatgaagccacatatttgctccaccctcaccatgatgtgttagtcatttcatttcttaatgctctcagggatatgaaagttgacgagtcaataatcacccgcaaatctacaatcttaatcgggtttagtggtgagaaaaatcactcgattggagaggtcaacttgcatgtttgggcagaaggagtaaactttcaaaccaagttcatcgttgttgattgtccttcttcatacaatgccatccttggccgaccatggatccatgagatgaaagttgtgccatccacataccaccaagttatcaaatttcctacaccatggggaataaagtagatattgggggcacaaagagcagcgcgggagtgttatcagagtaccctaaaagaaaaaaaaaatcaacctcatagcaactacatcaatcaaatgcaatgattgatccagatgagcctaacatggaggagctagaaaaagtgagcattagcaaggaattcccagaacacaaagtacaaattagggacaagctcacaccggaactttaagcaaagttgatcaaatttctcattaggcatcatgacaactttgcttggtctcacaaagatatgagagttatagaccttaacattattatgcataagttgcaggtagaccccaatttccctccagtcaagcagaaaagaagaaagttcactcccgaatgcaacaaagtgatcaatgaagaaattcaaaagctcattgacattggatcagttagagaggtcaactatccagaatggttgtccaatgtagttgttgtccaaaaaaagaatggaaagtggaggatttgtatcgatttcacagacctcaacaaggcatgccccaaagattcattctcgctccctcacattgacatgcgtgttgatgcaacagctgggcacgagctccttagcttcatggatgcattttctaggtacaaccagatccttatgcacccagatgatcaagagaagacatcattcatcacagaatgggggatcttctgttacaaggtcatgccgtttggactaaagaacgtcggtaaaacatatcagggattggtaaatcagatgttcacagacatgctagggaagtcaatggaagtatatatcgatgacatgctc

SEQ ID NO: 344204 - DNA, 656 bp, Cannabis indica
tcctcgcaggcagaaattcaaatatcatactttgctcaaatcaacaccaaaccataccaaaacttccagacctgttctaaacatcccctagaacatttctaaagcatcaaatccacccagaacgcacataaacaaaaatcaccattaaagctcaagctttgagttccaaactcaaacttggttaaacctagataacatgcattcaattcagcccaaatcaacttaatcatgcataaactaacctcaaaaaacaaaagcaaccatctacagcaagcaattaacagattcaacacatttctttgaaaatcatatttttgagctaaaaacttcaaatcttgaatcaaagcacataccatgcattaactagctctaatctactcagaataacaagattaattctctgaaaataacaacaaatcacagcagcaagaacataacaaaatcaagcatgcattatcataaaattcttccaaaatttccaagaaacaagaaaaggagctaaagcaaggtttaccactactagaattactttgatcttgctaaaaccactcgaatcaaccaagaaaacccagccctagcacacacacacacccagccgagagagagagagaggagagagagagtgtttaccgtaatttttacttatttttcttaac

SEQ ID NO: 344205 - DNA, 582 bp, Cannabis indica
aaaaattgagaaagttatgaatttttgaattttggatgccatggctgtcgagtgggtgcatcgagtgcaccaggcactcggacgagccaggcacgcgcgcgcccatcaccctgcagctgaccgaggtttctcggtcaggcaccctgcaggcgccgagatttctcggcagtttccccccatccgcgcgcgcatgaaggctgcgtgcagcctgttgcacgcccaattctgggcagtttcccaaaataattccaacatctgattacatatcatgaaatgtaaatgcggtgtatgattttggaaaatcatttagctatgatcttcccgctttcactaggtcaagaatatcgtgtattaaacacgtctttaattgttgaatctggagatgtctcgatagaaacttgatatattttacgttgattgcgggtatatggaaatcttctgactttccagggttatgagtctcgctttcgttagttggatgaaactataggaagtttcctcgaagtgagacggtcatctcgcattcttgttctgtgagccggtttgacttttacacttagttttcttattgtaagctaaggt

SEQ ID NO: 344206 - DNA, 973 bp, Cannabis indica
tagagcaattttacgctttttatgttttatttttgaaaaattaaaatagaagaagattaggaaatatcaaaggaataagatgcaaaaaagataaaaaacaatctgacaaaaagatgatatataaaatagaaaaaattgtgcaagtaaataaggcttaaaattcaagtttgaattcgactatattctaattatattttggaaaaatttaaaacataaaagttctagatctctcttttatctttccgaaacatattaaatattccaattctgagcaatatcgagaaagttatggccaaaatactatcactcgacgcagtagcaaactcacctcctcttctaatcctaagcagaataggttttctaatcctaaggagaataggtgtttttcttcagcgattttgattttattttatcatattttggctataaaagaagtggacttcaatatttttggaggagggaattcagaagaaaaaaaaggagtacaaatttcatagaccgaagtcaatactagaggcattctacagagggttttcaacattattttattctctatcttcttccctttttcaatgttaatatgtgtgattttgcttccatgaacacgagtagctaaacaattgattagggtttagatggatgttatttgacattaattgatgattttaatatgatgtattttcccaaaatttctaggtattctatttcattcgtacttaattacttttaattttttggccatcaataaactgttttatgatttcgattcgagatctaagaagtgagtatcgattatgctatagtgaaatagagcagaattttgatataagacgagagtacctgtatggtttagatagcttatagggtttctgtgtttaatgcctcttgcatgttaaatttatcacgagagtagaaagtttgcatgtgattaagatttatatatctgagaagactataaattaccttagtaaac

SEQ ID NO: 344207 - DNA, 919 bp, Cannabis indica
cgggagatcaaacctaatcgttaaatttaacagtatattctgttaaaccaagaaatgccgttaaataggcacttttaatatataaagatataactattccttaagagagaaatgataatgtaatgttgttattttattttttgtaacttcacatttgatgatgagttaattttcataataataattacatattatataaaatacttgacttttaggttcattttttaaaggtaacggttttcatatattaattttatttaaataattaaataattaataaataatgggagttatgaaaataaaaagatattttcatatattaataactattttttattcatagggtgatcatatatttttattaagatgctatatcatcactctaaacaatagtattatattagatatatagatatacatatatataatttaaaattcatcattaacttttattgttaattattataatccataaacttttcatattcatatatatatatatatatatattttattttgtcattaattatcatttataaaaattgtatgactattaggtttcttataagttacatttgtagttaattagtaacatttaatataaatataagtaaatataaataatgaatataaactaaataaaataaaaaaaaatagaaaaatggagaattgagaattgagagaaaactcgtatatgttatgccacatgtcctcttttataccttcctttatatattgatatattgatatattgattgattatttgggatgacctttggcttttataatactcattgatattaattggacacataatttctctattacaaacttaattaagttattattgttattattactaatttataaattattatgatgtaatttaatgaaaaagtaatttaaaaactaaataaaa

SEQ ID NO: 344208 - DNA, 404 bp, Cannabis indica
aaatccaaaaacctatacatatgcaacaaagggaaaagggttgttatgagctaaccttgtggcttggccttgacactagccactccgcaacagaaaagagaaaagagaaagacaatggttggagcttatatcgtccttcatagcaattgttcgaataactgtcaattatatatatatggagtaccttaattatatatttacttatctatatgtatatgtacaggaaccttcaagaatagcaaaaatattgatattgagcctaagattccaaaaggaaatgatagctttgagacaaataaggaaattttcaatggccataatacagttcaatcagcccatttcttgtccttgctcttatttaaaaaaccataacctaccaatcatcaatctgaaaaaaaaaaaaa

SEQ ID NO: 344209 - DNA, 1084 bp, Cannabis indica
attgtcacattctcttgaaataattatgttctttttcccattgtccattgctctttacgagaattggtatagattccatgtcctgtcatttttcacaatatttcatttacgtgacatttttttcatttaaaaaaacactaaaataatactacaaaacagtaatttgttgttgatttagcaattttttctctttgctagaatttatgatttttttcctggtatttctatgattacggtgttgatttgtccgtccccaaccatgaaggagatgtgtcgtttgtgttttggaactgtttacagtataaaagtaaatatattgggcttgggcagtataaaagaaataaaaacgggattggacagtaaaaatgtaaagtttgtcgtgttccagtatttttgaaaatatttggtaagaaagcagtgttttaataagtttcccttacaatatgatagctcatataatcttgatttttatcaaacccaaaactatcatagttttatttttctcttcaaaccaattagtcaaagcctcattcttcatcatggttgctcctctcaaccctttaatacttcttcttatttttctaccttcattcttaaacttttggatttctaatcaaggcttgtgggcttgagacatcacattgaaagttttgtaagaggtaggaaatattttcttcctcaataatgctaaatgttatctagggttcaaacatattatgttttttcgttttcagaaaaaaaaaatttcagtaaagttatgatatctctctcgatattaatccgcttttagagaattttatatcgttagaaagctgatttgatgatctacaatttctatgaagaaactattcaccaattcggtgatattctatatcgaaaattatcatcttgctgatgttgtcgtaattcatttttttcatattctcaaaaaaagtattttcacttaaaatacaatgactctctcaattcttatctattttcaatgatctatatatggttttaaagtttatttgatttcttataagttttatgaagaaactttgtaaagtccttttttggcaagttaggtgacaaaataattttt

SEQ ID NO: 344210 - DNA, 797 bp, Cannabis indica
ataaatcacttcaaatttcttatattgataactaataagattgtaaggggttttatttagggcacaaaacccaacatttaagactgaagtgtgagacattacttgatagaaaaatgaattatcttcaaaatacaagttgaattgcatcaataagatacaaattgagtgagttatggctgttttattgaaggtagttcatgatctaacatccaggttgacatatgacgtcaaattgaacgttggctaagtgtaaaaacgttcaagggatatccattaagattcttaagtgatatattgacaccagttagttcatttatatgttctggcaaagttggtcaccagttcttggagatattgttgttttacggaaatgagagactcaaaactctttatttccgggtgtgctgaaaattaataatgcaaagttgtgaattttacttctctaacttcatagatcataatcattgtgaaaaactagatggacggtcaaagtgacatcagattcagattcgtataagtaaaacccagcgcaccagaccttttgtcaacctaggcgctaggccctttctcccgaggtcctaggaatttgtttttgatacttctaaggcttctaaacttgagaaagagttctcctactaccttattttttacaattctagattcaatggatgcatcaaattagacatttgagcaatcgaaggtagcatcccaggttgattataatgccctaatctatagggacgccacatgggtgattttataaattagtttaatactaatagattaattaattatta

SEQ ID NO: 344211 - DNA, 613 bp, Cannabis indica
gcaaactgatgagtcaacagacttagtaagatatgcataacatatataaaagcaatgctagaccgactttataattaagccgccctgagctcaacaacgggctcgccaaatggttaagaatgttcctaagggaagtacgaccactgtaccaaatgcactagagtaccgactttgtactcgtgttggtagagccattattgtacccccgaaaatcaccaagtgttgtaccacatgcacgacgtaccccctggtaatcgtgttggtaacaccgtaaccacactgatatcctacactatactaacacccttaaaatcacataaacaattagtgttagtagtgtaaatagttaaaacaagcatacattcataatacattattatgctatcttacctcgttccgtgttcaggtgtgccgatcagcctgagtggaggtacaactcgacattttacagggccctaaaccataacgttcaaaacacaatgagagacgcactaaaatgcttaacagggatttaaaattgaaactaaggataaccctatcaataaataggatgcaaacaccctatattacacaaaaacgggaaaaactagggttcgggaaaaagtcccaaccg

SEQ ID NO: 344212 - DNA, 551 bp, Cannabis indica
aagctcgtgaacatattaagtttttaataagtgaagcgtggaaggagatgaatatcagtgaatctgatgatggattaatatatccaatctcattgattgaagatgcgagaaactttgctaggataggattattcatgtatcaacatggtgatggtcacagttctcaggataatctatccaaagaaagaatttcatcctttattattaaacctattcccctatagacacaattaattagctaattataagtgttaattgatcaataaatttaaatgtatattttgtctaatgtacttatgttatcaaataatataatgaaaataatgttgggttttatgccttaaataaaactctatttcaatgtaatctttatcttttaaatatcaataaagaaacagaagtattttcatcacttatttgtatgtcatttggttcatattatcatttacttgtttatttgatttataaattcatccaaacccatatcacatttatattcttgtttattgtgtcgtcagcagagtggaaagtaatcaagattatgtgattaa

SEQ ID NO: 344213 - DNA, 923 bp, Cannabis indica
aattcaaaatggaggaacctcaagaagcaccaaatcaggtggaacatgaagttcaagatgaagaagataggaatcaggaagacctcacagaatatcagcttacaagagatagagctagaagagttcctaaacctaaccagaagtacagttacaatgtgtaggatgagagtattgcctatgcctatatgtgcaaacttaaagccgagatctatgagcctcaatcttatgaagaagcacttaaagacagaaattacaaggcttggttgaaagcaatgaaggaggaaatgtactctctcataaagaataagacttggagagttgtacttagacccgatggcaagagtgtggtatcttgcaaatggcttttcaaagtcaaggaagggaggaccgaggatgaaccggtaaggttcaaagcgagattggtggcaaatgggttcacacagaaagaaggggtagactttacagaaatattctcaacagtggtgaaatataagactataaggttgatgctctcactagctactcagtttgacatggagattgaccaaatggatgtgaccacaacttttctacatggggacctagaagaagacatttatatggagcagccaaaggggtttgtggctaaatgcaaggaagaccatgtttgcaagcttgacaagtctctatatggattgaagcaatccccgagacaatggaacaaacggtttgacacttttatgaccaaacagaggttcaataaagctattatgaccaccatttgtactttaaaggttcggaaatcgctaaagtcatttacttgctactttatgtggatgatatgctaataattagcaaggagaggtcaaatgtcaacaaggtcaaggatttgctcaagtcggaatttgaaatgaaggacataggtgtggctactaagattttgg

SEQ ID NO: 344214 - DNA, 443 bp, Cannabis indica
aaataaaaattatataaaatttcttagaaaaaatatatatatacattgagtttgtaaaaaaattatagaaaataatatcaaaataagtattgaaattaatataaaataatgtagaagaaaaaattttaaaaaaatattaagtaatattttttaaaaattatttaaatttatattttttttttaataatgaagtgtatttataaattataaatttatggggtgcaaatagaactcctatttattaaaaaataaaatgacaaaaaaaccaaatggcatttgtcgtagggttggtgatgggctttaaatgacagtggccgagtagaggcggcggcccaaatcatggctatgaggtgcaattctttaagggaaatttgatctttcatgctaaaaaataacacatggtgttattttaaacaaaaaaattacacattgtgtaaatatgc

SEQ ID NO: 344215 - DNA, 932 bp, Cannabis indica
taaaatatttccaacaattacactagtttagttttctgaaataaataagaataatataaggaaacttaattactttcttaaatcaagagaaataaaaagggaaactaggtaggtttcctcttctctcctgtcggtgtgagtctcacaaaatcagggacgtgattgagatttgcatgcttgaacatttagagaaggtatctctaaagatattccagtcgcttctactctggtcggtacatgcgagctaactgtaaagtagatgctagtcggacagtgtaacatacactgtctggatgctccaacttcttcttcaaatcagttgtttacaagtaataaatctctttggacggtacaccatggagtgtactgtctgttcaggttatgaaattttttccacatgtcactcagatggatgccacgccactctgtacggaaattgggataacacagatcatctataatggagtgctataaaagtggtgtgtatgtattttttagtccatgctcataaaatgaactctaatggtggtgtataatgtggtctaaatttgttacatgctaaaaattgtgtcaaatttagcacaaaataacatgggccaaattttactctacaatatatatatcatttattttatttactcttttgcctctcattaatgcaactaatacattttttatatttgtatttacatattcaatgtgctttttatatactttcaacaaaaatttaatgtttttgttaattttttttattaaaataaggtttatcttactcttagtgcattagagcataattataaaatttggcctaaatctaacatttaacttaatttttagacaaatttagcacaaaatttacattatatattgaagatggtctcaagttctttgttttttttttttttttgtaataggagatgttctcaaaagta

SEQ ID NO: 344216 - DNA, 657 bp, Cannabis indica
tttttttttataaattattagatcaatatgatatattaaattttatatcaagatttacaattatgcattagagcataataataaaagttgatgcaaaaatatcacaaaataattatttggaccaaatatatatcaatttatgcatctcctattggagatggtcttacactcttttttatctattaatgacatgtacatattattaaattatttatactgtaaattatttgtgtagattgggatataatacattctttcttagagcatctttaacggagtactaaaaaagtagtatattattatattttagcacacttaaaaaagtacttctataataacgttttaaaaagtgtcaaattcggcacatgctaaaaattgtgctaaatttgacacaagatatagcattgtgctaaatttggcccacaataaattttacattttttatttattataataccgctaattattacgatccattgacatttaaataactttatcttctttatttattatattactattagaccatctctaatgagtgatgtaaaagttgagttatatttggcacaaaaagtaattttatgatatttttacagcaacttttactatgtgatccaatacataattataaattttaatgtaaaatttaatgtcatt

SEQ ID NO: 344217 - DNA, 581 bp, Cannabis indica
ttttttttgataatttaacaaggatgaaaaaactttcaaaagtaatttttctagagcaggacattccatggggctcagtgatctgggcaagtaacaaagaatatgatctagggaggtaacaaagtccttgatcgcgtaaataagtctctggttgtagaaaagtggttcctggccgcagaaaagtacttgggaacaggaaaccctaaagaggacctttgtcactaggtgcacacaccttcagtgttttggtgtatgtcgctactcacaactttgattggtgtgaatctagatgttggaaagctttatcaatgcatgtttcacaataatgaccaaactcgaagtccttctatcccaaatctgagtcacaatagaaatacatgcccatggtatgtcaaagacgcaaaggtacataagagacccttatgcccgtgaaattgtccaaggagaagagcccttaggctcatgaaattgtccaagagacgagcccttgggcacacaaaattgtccacgagaagaatccttatgcaacaccctactagtttaggcgtgctacaatgtttttcataattattgtgcaacct

SEQ ID NO: 344218 - DNA, 390 bp, Cannabis indica
tttgggatagaagtcaagtttgacactctagccgttcgactgctaggccatatcgacgccatcatcaaagcgcttgacgcaatgcttgcatacgactggggtcaggagctcatccaatttagcctttttcaaggcctgatctctgaagtcccttagctccttcacctccaccgtcaagttggtcgtcggctgtaagttcgcctgatgcaactcctctaaggacttcaacttggcagccatctcgtccatagcctccctggcttcccgaagctcgcgtttggccctggctgcagcctcgccctccaccttcaaggcctcctggtgcctcgcctccgcctcagcctccctttgcttggcttcttccaagaacttctgttggaatttatttta

SEQ ID NO: 344219 - DNA, 609 bp, Cannabis indica
acttctgtttctttattgatgttgaataaatggattacattaaattggagttttatttagggcattaaaaaccacattttttttcttcaactcttttccatatattgggataatacatggcgttcccctatggtaatttggatatccctttcttcaggaagtgttagtgatgcacatatattatccaattcatcagctttaccatttttgatatggggatctgatttagagttatatcttggaattgtccaaacaagtatttggcctttcatgataagggactaaattctcatgcttggctacaaattcaccactcatttatttaataaccagaagaggatcgccaaatacctttaatgactatattttcatttcaagtgcaacttcgaggacaataactaatgctttgtattctgctacattatttgtgcacatagctagaatatggaaagagtaaggtatcaggcctcccgacggtgtcacaaagacaattccagcacctgccccactacttcttgctgccccatcaaaatataattgtcatgatgaagtatcgactgtgaagacttctttgttaggaagattgtaacaccctaactatcttaggcg

SEQ ID NO: 344220 - DNA, 888 bp, Cannabis indica
agatcccaagtccgagtctgttcttaggtcctgggtccagccccagttttttggtctgggtctgagtctcgctctgggtgccggtctttgtttaggtccaaagtcacaggtgccgatccaagtcctagtctcggtatgggttctagtctgagtttgggtttaggtttgggtcctgctacttcccaggtctgggttctagtactagacatggtttgattgctattccgggtccgagatcgtgtttggatcccagtctgggtctaggtctgggtctgggtacagatccgggtccaggtttgggattcaaacacttactacgggttaggctgaaacctcaagtctagattcggatctccgtctttttccagtttaggtccaaggtcttgggccccgtcatatgaatgtatttaggtccaggtttggggttgtgtcccggtacttaggtcttgcgtttcgagtccaaggttgtgtcgcgtgtctcgagtctggggtcgagttttggatctcggtcccggttttggggcccagtttcaggtcaaagtcccccatctaggtccggatcctcagcccaagtttggggcttaggtcccccttctaggtttggatcctaggtcccggtctaggtccaagtttaggttcgggtttggatcgggagtttgggtccaagtctaggtcactgtatgggttcaggttttagtctggttccaggtcctggtctgagtcctagtcccttctcgagctcgagtacggattgtgctctgggttctaatcaaattctaggtcccagaggaggttctggtgtgggttccggtccgagtttaggtcctgagtctaggtctaggttagggtctgtatccgggtctgggtttggggactgcgatccaatct

SEQ ID NO: 344221 - DNA, 328 bp, Cannabis indica
cagttcttattagcaatctccattactctactaaggtgatccctagtcaatagttgatcatttatagcttgccaacaaataaacctatgcttaggcacacacatcttatgccaaatagtaggcgcatactcagagatatcagcagtgatgagagaattatagaacaatctagtcttgaatttcccaatcttactcgcccccaggagagcatctcggttaatggtctctctcagtctcaagattttcttgaaataccaattgctatcctgtttaaaagtcagaagccagaagtcttgaccctttagatagatggaattaatccacttaa

SEQ ID NO: 344222 - DNA, 763 bp, Cannabis indica
tgtttaatttcattgttttaaaattcatattaggatgttaatgaaacatacatggtaataaatctagatcctggtaaaatatttccaacaactggcctcagagccatggtaatatttactttcatgaaatatgaattaaaacgatgatatgtgttgatttggatggtttcatgttgatctgtgtgttatatgatgattgattgatgcttgtgaaattttatgaaaaataattgaattttcgtttctagaattatttttattggatagtttggaaaaaattaagcaattcacttttttacagaacttaatttcgattttatttgaattagttatgaatttttgaaaatcggaaaatatcacgatggtatcacccaccctacgcgcgcggacgagggtgatttcctcggatgcacgcgctcagacagggtgatgaccgagttttctcagtcaggacaagggaacttgtctgaaataggccccatacgcgcgcggagaggctgcatgcagcctcctgcgccgagggacctcggccagatttccccattctgcgcacggacaagtatgcattgctaactgtccgtaccacttgcaaattttttcgttttcttcgatttttcatgctatttcatggaattaacttctgattttttgtgttgttttgtattttgatttttacttttcatttttcaaatctaattatcagaaataaattaatttgattttttaaaattaatttgaggtattagtgtaatttgaacttgaa

SEQ ID NO: 344223 - DNA, 1269 bp, Cannabis indica
gagacattatttcaaagtccaagtcacctggttcaaaagcaatagtgactttgggtaaaaacagacgtcaagctaaaggaatagaggacatactaggaggttcaggacaagcagcatcttgcaagaaatgtagttttccttcagtaatttcttgtaagaagcatctgtggcgactagcattatcttcctgatggattttcagtaaaagttccctaattcttttcattgtttatctctaatttggatgtgggtttggaaattttgggattataagggatggcaatttcggtagggaactcaatttctaaatcttctggacgataaacttctaaacatgattaggaaattgctgtaagaagaaagaaatcccaattcttggaaaataatttatcaaactagagggtggtgaactatgttggaattattttaccaggatcttagatctactcacaagtatgttgtttaacatcttaaacatgaacttctaaaacgattataaataaaaaacatgtaaagtatgagaaaccttacattggctgcagcggaataatatgtctcctttcactcagatttctaacccctgtatcctttctgtcgcagagtatcaccaagatctgagtctgaatgtccttctgttgaatcgggattcttcacgatcttccacactatgattgaggtactacttgttgtgtgtggggcactactctatcactcaaggggttcgaatcaactatgaagaagacggaaagagaggtggcggctaggtcaggtagacggcactcaggttttctctaaaaggaataagatgcatcatcgtttcctgaagccatcactacctatttatagtatgccacctagggttaggtttgaattatttggcattaaaataatgaaaatattaaatgataaatcctacataagtgaccggccaagacttatggatatgggccccacttttacaatttgttattttatcatttctacatctcattttctcaaaaatgccaatttttaaattaaactatttaaattccaatttcaactatttaataactaaaattaattattaaataatattatcatttaatatatttattaattagactaaccaaagtctcttaattaacaaatataccctagaaactcttcctttacagtcttgcccttgcttagtgaaaaattcataaactagacatagtctaatttaagaattataattgattaaccaaaatcaattaactgagtcttacaagtagtattgtctcaact

SEQ ID NO: 344224 - DNA, 588 bp, Cannabis indica
agagaactattgtcgaatcaccatgtgcggtgctgctcaggtttgacagtgatgaaatgaatagtggatcaagaagctcattccaaggaggacacgaatctgaagcctatttatcagtaggaggtcaagaagccactaaatcatagtcgaatatctcagactccatggattctgatgaacatcacaatccggttctaatgatctttaagcttgacttttagaggggttttgttctccaagagttcctgagctcaaccatattggttatcgtcagaaatggtgccagaatcacgtcaaaaaattaatcaaagggtctcggagtcgaaattttgactaggtagatctcttccttagcagctcgtgtcaagtggggcttgcgtgggtggaggtgtcatctaagtctgctaatgtgtgtcactagcgtgagacgagaggagagacgaagagaggtcaccggcaaaggagaagagaagctgttaaggttaggggtgagcgagagtaaaagactgaagagagagaaagatggtttaggaaattatgttttttttatgttgttatcattttatttatattattttatatttattt

SEQ ID NO: 344225 - DNA, 556 bp, Cannabis indica
ctcatagtcccacattgcatgcaatcaaccacacatttgttgctgcacttgctcaaagtgagaaagcgatctgtgggaggctccgtggctgaggtcgtcgcgggggcaggcgttgtttttggggctcgaggtggaccaaaattgataggcccccgaggattcaatgcgccttcttccttccacattggtacacctgcctcacggtaaagaacaatgatagtagctgggacaaataacttccctttcccccggtgtgcacagtcagcaatttctttggctaggaccgtccctacatcaacatcccaacccattctaatgcagtatagcatccatgcgcggtctctgctgacagtagaatcatgcgaggtggggcatagggccgtttgcacgaatgtatacaaacatttcaaatcgtgctacaagttagtgcgccgaaagcgaagatttccataattatcgaaatcccattcggaacctggcttggcaagcaccggcatcatgtcactcacagtctcgtcgctcacttgccctttttgagcggagtattggcattcga

SEQ ID NO: 344226 - DNA, 605 bp, Cannabis indica
taattacacaatttggcatgtttgtctaaccatgtaattacactgtaactgtgtaattagaagtaattgagaggttccaattacactctccaattctcatggccccccatgagaattggatgtaattacactgtgtaattactgaaaactttccatattaaacattagctactaaaaaatattatttttccatggatttactaacaattttaccaaacaagatattaggaattcatatgtaattaccacctaatatccaaacacacattgacaattttaaagtccaaaatttatccccaagacaagcgccttttttccacaaatcacctgaaaaacgatccgtcggaggaaattcaaactccaaaaattaacaattttcatcaagagtcaattttcacccttagatcatcctcaaggccaagatcaacccaaagtgaattttctatattttttgtattatcttattaatattttaatagggcttcattccttataaagggaaaatttctctagcacacttttttacattttactaagttctcactaatgttggagcatctctctagaaatttgaattattttcttagttaattcttttataattc

SEQ ID NO: 344227 - DNA, 504 bp, Cannabis indica
cacatacactcacatacacacatatatacatacatatctacatacatacacacatacatacatacatacatacatacatacatacatacatatagatacatatatacatacatatctacatactcacctacacatacacatatatacatacatatctacatacatatatacatacatacatactcacctacactcacatacacatatacacacattcacataccatatgtatatatatacatatatatatacatacataatcatacacacacatatatataaatctaaacaattaaaaataaattaaaattaaaaaatacattcacgtggtacgttgggcggtggtgcggccggagttggtcatcagaggtttttttatttggagagaaaagagagaaacaaagaaggattgagagggataaagagagattgagagaaattaagagagattgaaagagataaagagagattgagagggaattagagagacgagagagggtgaga

SEQ ID NO: 344228 - DNA, 617 bp, Cannabis indica
aacatgtccttcaatcgtagacagattcgagtgcacaaaagcattacttggaataatagtgccctcttcgtcgtcgctcaccgaatccactctacatctcttatttagatcttccctggcattagttttcaaagtgacaacatccttcagagatgcaaaagcacctgaaggtcttgtaattgatgattgccccttggaaccaattttttgagtcgtagcattcttggctctttccaaaatatcggaagaggacgacattataaaagacatcctcttagtgtactggtctgctacaatcagttcttcctctgttaaatgagtaagaatagaaaactttgcaccagtcaactctaaagctcgcttcaataagaaaatagaaattcaaccactcgatcgaataaggaaattaccttctgtccgcccctcgactttgctccaaagaaaacttgaagccaaatccttctcgtttaacaattttttccaccaccaatctgttgggttttatgccctaaataaaactccatttcaatgtaatctattttattcaacatcaataaagaaacaaaagtatttttcattcatttgtgtatgttttggttcaccttatcaattgcttg

SEQ ID NO: 344229 - DNA, 656 bp, Cannabis indica
aatttaaattaattaaataattaaattatttttcaaaaaatctaaataataaaatgttattttcgaagattatgaaattaaattaaataattaattaaaaagttaaacctataaatttgaaaatttaggttttcaacaaacctaaaaatctaatcaaaaatatgctaacaacttttcaaattttatgttattttaaaaataaaattaaatatccaataaaatataatgataaataaatattatttatctaattttataatttaatttaaataaaattacaaaatttttgaaagttagaaaaatatctggttacaattttaaaatttctagattaaaatagttttattttaaatttcaaataagatcattttataaaattaattaaataatctaaaatataaaatatctgaccttaaatttaaaaataagataaggcaatcaaaatttaaaaataagataaccaactaagtaaaataatagatttttctctattttaaaggttcgaaaactactaatatcttaaattaattaaaaaaaattaattaatttaattctgataattagatttgaaatatgaaaaataaaaatctaaatataaaattacacaaaaatttcgaaattaattccatgaaaaagcattaaaaaatgaaaaaaaa

SEQ ID NO: 344230 - DNA, 727 bp, Cannabis indica
aagaatcaagattctcgtttgattgagatttgatatgacatagaactttaaataaactattatgcaactatttaaaaatgaatatgcacaatgtatcaaagaaaacatttctccctgtatgagttttggaaaaattaaaaagtcaaataaatttccttttaatatataattgcttggatgtagaagaataggcttggatcatccttaatctcaacagttggtaaccatttttcatttaatatttcagttgcagttgactattttctttgttgcattccagcacttgtttcaacttgtgtacaagttcttcatattttcaatccattgagatgaattcgccactaaatttgtaatttacacaattttattcattgatcaaagtgcccattgtaaaatatgagaagtgaaattacgtccctttcctgacattgtgaaattcatttatggtcagtttactatgagaaaactgtaagaaaaatgtaatgcaacaattatatctattacgagccaactaatataaaatcacaaaataactaataatttcacatatttaatacaaacgaatattataataatcgtgttttatctgttcaagtcacgtgtttgacaattctgagtcctgtttttataatactatgatattgtagtagcaaaaccattactcaactaacgtgcaacttaattgcaactagaaatattaaatatgaatttgtatctataagaaact

SEQ ID NO: 344231 - DNA, 727 bp, Cannabis indica
attctctcttttatatagttatacatgggattaagtatttattaaaatggtaaaatatttagaaaatttaataaataataataataataataataataataataataataataataataataataataataatagtgtgagttacaaaagtaaaaagacactattattattaataagaaatgatttgatgatacaaatattatttttatttattttaataatgcataattatatataattgtcaaatcaaaatgaaagataattggtataagtttgcttaaatttgtgctgttttgaaagctggaataagttaatggtatgtgttgaccgaggttttcggcaactagtttaataatatataagagagctgcagaaagcttaatgcatgggattttttacgtggttggggcattaatgagccttagtccacgagtcttttttatttatgagagtgtttattacagggaatgttcttggtggatatcactcctatttactctctttaattcttatgaacccagaattctcgacccctgtctcagtgtgtttgggggtatttatagtgtttttttgggggatccctagaactgaatcatttgtctttctatgcaggttcaataagggcacatattcctagcagatacaaaataggaaatacatgacttataccgtaagtatcttaggagttaggtggatataatcttttatctcttcttgattgatgtga

SEQ ID NO: 344232 - DNA, 511 bp, Cannabis indica
aaagaactcaatgaacacaagcatgagttcatgtatacttaggattcaggttgatctactaatgtcatcattataatatgaataactctttcatggtaaacgacacattaatgaaagatttttattatatattgacccaaccatgcataatcgaattatacataacacatttattacatgtctatccacatatgtgattcgaataaaaattatagtgtatagtataccgtacttagcagtttcgtattaaacattctaaatactttaatatactactgacttattttattcatatcgtataatcttaattcttttgtacgtcctttcaagattatactttctctatgtaaataaggaattttcagatatttaataattatactattataattattatatcatttatcttataattgtattttatatgttctctaacatattatccattaatgacttgtttttagggcataaatccaaacagtgagcaccagagcgaacattgctcatgctc

SEQ ID NO: 344233 - DNA, 582 bp, Cannabis indica
ttctgaatattgctataaatatactgctctggctcatacagcaaatgagctgagattcataatttgccttctccttaaaatccaaacttggtatcagagccattgctggcctctcccatgtctactccacaagacaatcaaccagcatcaactgcaagttcaccggccaactctggtgttgccggagctggttcgaataacagcaataacaccaaccaggcatctcagctcccaaatgccttcgcccaaccaaccctaaatcagcccttttcacttaaacttgaccgcaacaattttacactatggaagacaatggtctccaccattgttagaggtcatagacttcatggatatctcaacggtactctaatgtgcccactggagttcatcatggttggagatactcaggttactaaccctgaatatgagaactggataataagtgaccagttactcatgggatggctttacagctccatgaccgaaggaatcgccacataagttatggggtcttactctgttgctaatctatggagaaaccttgagagcctatatcgtgcctactcaaaatcaaagatggac

SEQ ID NO: 344234 - DNA, 736 bp, Cannabis indica
tgtggcccaatcccttcctagttatgcaatgagtgtgtttcttctcactaaggaaatttgctctaaccttgaagggttaatggctaagttttggtggaaatctcagtctaagaattcatctaaaggtgttagttgggtgagttggcgaaagctttgtcgccataaggatgctggcggtttgggctttaggaatctaagagattataatttggcattcttggggaagcaagggtggcggttgcttactgatagtaactcgctagtggcaagggtgtataaggcaagatactttcctaagggtaactttctaacagctgagttggggtcgaatcctagtttcatttggcgtagtgttttggaggctaaagatttgattcagaaaggtgttataaggtccatttgatccttggctccctacttcggataacaaatttgtcactactttccacccgagccttgttggtcgtatggtggatagcttgctgcaaattgatcaacgagcttgggatgttgaagtaatcaatgatatttttactcctcatgacagtgcgttaattctctctattcaattgagtgattctagtgaagaggattgttggtcttggtcaaaagaaacatctggtatatacacggttcggagtgcgtataagctgctgcaatgttctaatggggattggccgactactgaggtagaaagctgctgaaaaaaaatttggcaactgaatgttccagccaa

SEQ ID NO: 344235 - DNA, 365 bp, Cannabis indica
agcaacaaggggtgctacatccccagcacaaagagacccaacaatgttacgggacgcaacccaagtagccacattttgagcgaaaaaattatccttacgaggaatccaaaacacacaacatttagcatcaaaatttagacaagaaaataaatgcaaaaacagatttgtgagcttccaagaagggatagtagaatctcgaatagcagaaacaagagagaggcaatccgagaagaagttggcatcctcacaattcatccgcaaacacagggagaaggcatgaacactcagcctcaaaagctgggtgtcctatataattaagagtgcaatttcgaatctatagtggcacaaggaggaattaataagtt

SEQ ID NO: 344236 - DNA, 1048 bp, Cannabis indica
aagaccgttgtgcatcacttttctattagacgcgttaagagaaaatgtagtttttaagcactaacaatcattttaatcaaaatagtaaaaatctcatatttctcatagtggctcccctttgtgaaatgtggcccgaactcatttcggaatattttcccactagtcacaatgaatttgtattactaagacgtaaatatgaagattattttcgcgttaaatttggttaaatggtctcctaatttaaaaattgaaaatattcttattttcaaggaaaattttaacaagtttttttcttattcttacattcattagtgttctctaaaaatctcaccctacacatctcccaaaaccatgaaatttcacaaaaacgaagccaagaccgttgtccatcacatttctatgggacatgttgagtaaaaaagtagttttcaagcactcacaaccattttaatcgaagtagtaaaaatctcaattttctgatagtcctttgtgaaatgtggcctggacccatctcaaaatatttttgcccacaagtcacattgaattcgtactactaagacgtaaatatacatattcgtttcgcattaaatttggttaaaatgaacccttaattcagaaattaaaaatcttattctattcagggtaaattttaacaggttttttccttactcttacactcgttggtgttctcttagaaactcactctacacatctcaaaaaattgtgaaatttcataaggacaaagccaagaccggtgtgcatcactttttttattagacactttgactgaaaaagtagtttttaagtactaacaattattttaatcaaaatagtaaaaatctcacatttataatagtagtacccctttgtaaaatgtggtccgaacccatctcgaaatattttttcccactagttacattgaatttgtactattaagacgtgaatatgaagattagtttcgcgttaaattggttaaaatgaccccataattcagaaattgaaaatgttcttctgttcagggtaaattttaacaagttttttccttact

SEQ ID NO: 344237 - DNA, 797 bp, Cannabis indica
ggtcggtgatcaaaccaaactcaaaccgtccagatctggcttcggttttacccacgtaaaaccacacttcatcatttttgacctcactgactttctttttcctcaacagctgttgatgcacaatcgcgccagagaatttcagatcataagcattccaaaaaactccaaagggagtttccttcaccctctcagtcaagttaaatgcttcaaacttagcctttattgaagcaaagtacatgtttcctctgtacgtgatatggcctaaaaaatgcttagccaaggggagtataagttctggagccatctgcaattacaaacaaaaattcttattaattataaatcacacaaaaattgtacattaatcgcaaaaattgcgaaggcacaaaatggtccagatgtaatcgcacaaatattgcacaagaattgaaaaacatcgcataattttccagacacaaatctaactagtgttatgtcgcacaaaatcacaaaataaatcgcataaaatcgctcaaaatccccaaaatcttaaccacatcctcacatcgcacaaaaatcatacaaaatcgcacaaaatcacaaaaaaagatcctacagtactgctaagcatcgcacaatatcgcaaattcatcgcataaaatcgcacaaaaacccaaaatccaaaaaaaccaaagccctagcctagattcttctccaaacacaaaaacttgcaaatccaaactttaataaactacatatttcagttatatcacagattctaaatttaaaggataaattaaaaaaaattaagggaagccata

SEQ ID NO: 344238 - DNA, 727 bp, Cannabis indica
ttttttttttttttgagaaacggttctatataattaaaactttattcctaattatatttattttttaaaaaaatatatatattaataatttgaattattattattttctttaaagtaaatttaaattgcttttatataagtatttatttaaaaaaaaaaattacttagaaagctatcaatttttttagagtaaattgtgttataaatacttaagttttctgccgggtagcaaataagtacataagttgtatttttgacggtaaaaatattttatgttcctagagtggaacttctataggtaccagttcagtacctacgtggcagcccctgataggtttatgttatttaatttttattttttatctaataattatttaaaattattttttaaaaacaaaaatgtgttttgactaaataattatttttaattgttaattaactccctaaagttaatacccaattaaaattttaaagaaaaatcatttaaaaatttaataaaacatagttaaaatttaatcaaaattaaaaaaaaagatttagaactcattttagtgaaattaacattaaatatctacaattaaatcctaaaactaataatttaactaaaaaattgtgacagtcagtagttctgtgatctgtaaagggaaatatcgggtaagttgtgcaatcccacaccgcctggggaaggtcatgtgtgatgattctgagactatgtaggtatgagact

SEQ ID NO: 344239 - DNA, 1558 bp, Cannabis indica
taagatcctggtaaaataacttccaacaggcccctcttccatcttggtacttccaacttacactctttgattcttttaggaaaattccctgagtagtcctttccccaacgccaaagcacttcaccacaagtgtttattttatcaataataccatttggttcagcactattccaacaactcttaacaatttcaaaagcaaaggctctttcaaccaagaattttcaaatcgaaagacatgactcctagcaaccaccacttcattaaccaacaccaaattcaaaggagtatgatctgaagtagacacctctaaattaaaaagtttggctaaaggaaagaaatctaaccaagattgattcaccaacgctcgatcaattctaacctccacccgatttgccgtgcctcgactacgctcccaagtgtacgggtagccatacaactcaagatcatgtaaaccacaatccaccaaagtatcattgaagacctccactaaccacctcggataaggatgaccacctttcttgtcatcttgggaagtaacattgttaaggtcacctataatacaccaaggcaaactagacttacttttcaactcccttattaaatcccaagttctttttcgtaaattcctattcggctcaccatataaccccatcaatcgccaatgaccttgatcacatccacaaattactacatcaatataggacaccccatagtccaaaacttgaacatcctcctcatccttccacaaaagagcaacacccccactcttcccctgacaatcaattgcaagtgcaccttcaaacccaatcgccacacgtacccgttcaaccatatccttcttagcaagagtttcacacaaaaataaataattgggcttcttttggaccacaagatccttcaagaattgttgagcccatgggttcccaagcccatgaaaattccaagatataatactcatgattatgggtgggcctgcataccaaggcccacctttgattcattttttgacccaacaagtccatcaactccactaaccaacttagccgtaatcccctccccaccaagaacgacaccttcccgctcagtccgcctccttttactatccaacaacataaccaaatcctcctcatcattaatttcttcatcagatgccattgattgagtatccccatcaccaccaggctgtcgagtatccttcccactttccataaatatttccttctttttattctttcctaaactcatgggatcatgatcaccaccatggtcaacacaatcaacatccatgatttttggggaagcattaataccattgccggcaccatacgaccgaccactgcctcgaccagcagctgctctgccatcatcattcccagtccgaagccattgagcaccgactaaataatttttctttctcaaatccgcacgcatagcagcatcatacggcttggccaattgctctataggttggtcaaatcattttggacaagaacgatccgaatgtccaattattccacaaacaaagcaaaaggtatgaagatgttcatatttaaaattt

SEQ ID NO: 344240 - DNA, 1291 bp, Cannabis indica
tgtcctccctctggcaagggaagatttgtcttagttcccgaggaacttggcggcggtcttccttgaagtggatctctgagtaaatcctggactcttctatcggttctctgattgaaccatcttattagattgttggcctctcggttccggtgatctaactccacttggtgagatcaaaggatgtactcctggtcatccatccatctcaggaattcgcgtctctcctgagcaaaaatatcgcaatgagtagcgtgtggttcttcagttaggcctggacgacctatagcttccttgagtctggccaactcaaggtcttttcctaggtccaggtgaggctcgccaattgctagctcgccaactccagagcctgtctctcttgcgtagaactggagttgagatctagttgttgctcttgggggctatcgcccttgggtccttccttcagtgggaggcgccaatggtgggtctgctcttagaggcacgggcctgccacttggatcccccagggtgctcgtaccagtttgatcagctgtagtggccaaacttgtagcgcctattgtggtgacaagattccccacatctgcagtgctcatggggattccagttgtgactggaacctaagtgcttggatctgcaatctatgggtcttgagggagacccaaagatgtagatggtgcaacaggagttcttcttgtgttcaccatggcgtttgattagatcatgatttccacgctctcaatgaaagcaccaaactattgacatcaaaaaatgatcaaccgacatcggggttgtatggatttgatgctttccatgtttttgcataaataagaatgaaaaataataaacaaaagaattgttatagaggttcgacccccttgtgatagtgggtaatgacctactcttcttttagttttatttataccaagggttaagactatccagatcactataggtgggatctgctataccacccttaggaatacaaggtatgaatcaataatggcaaaactcaagagttgagatgatgctaaggtaggcgtgtgagagagcgttaattagacacttagagtttagtgttaggatttataaaacacttaaggaatatataaatcacagatctaaacatattcataaaagtgctttaatatagaaaaccctaaatcataaatttatagaaccttcgctaaattaaagaagaagaagatgataaaaatgagcggaagcactaaccagaagccattgttggagattgtagagaaggttttgatcttccaagaatacactattttct

SEQ ID NO: 344241 - DNA, 598 bp, Cannabis indica
gtttggtgtgttgatgttgaacaggattgtggaataagtatatcgcacttacattgtcacagtaaactagagtaacctttagaataggacaatgcaactctagaagtaggtttatgatctagcaagaatcagaaacaacattagccacaccttgtattttgcctctgcagcgggagagagtaagctactgtttggaagaccaagagaccaaattattcctgaggaaaatacaatacccaaaagtgtgtcaaagataccccaatcaacatctgtataagatattagtctattaattgtgaatttgtacaaatacaaaccgtgggataaagtactttgaatgtagcgtatgatacgcttgagagcttgcatattctcattttttgaaacatgcacatgaagataaagagtaactatacatgtgatttaggttgctccgtaagttgtactgtatattctttaaaaaatgaaaaaaaaaaattttgaaaatgtaacaaataaaagaaattccttttttctttttgttgtttgtttttctttcttgtattttttttttttgttttattttattataaagtagattaaaaatgtattaatttat

SEQ ID NO: 344242 - DNA, 778 bp, Cannabis indica
tctatagcaccggaagaccaagaaaaaaccaccttcacttgtccatatggcaggttttcctttaggaggatgccatttggattatgtaatgctcccgctactttccaaagctatgattttatcgaatatgtctgagagtattttggagatattcatggatgatttctctatttacggggactcatttggggtttttttggagaatttagagaatgtgttagcaagatgtgaagaaaccaacttggtgctaaattggaagaaattccatttcatggtgcaagagggtattgttttgggtcactaggtgtctagaaaggggatagaagttgacaaggcaaagctagaagttattgataagttaccagtccctaccacagtaaaaggaataaaaagcttccttggacacgctggtttttacaggtgcttcattaaagacttttctaaggtgtctaagcccttgtgtagcttgatggaacaaaataggccatttgactttacaactgaatgtaatgaagcatttttgaagttgaagatagctcttgttacggccccggtgattgtagcacctgattggtcgttgccctttgaactcatgtgtcatgctagcgattttcccattggagttgttcttgggtagcggaagaacaagatctttcactctatttattatgcaagttaaacttgtaacaccataactagcataggcgtattacgtgagttttaaacatagtgtgcaactcgttgctaatcaacgaggtttatggaaatcgtgattaat

SEQ ID NO: 344243 - DNA, 600 bp, Cannabis indica
ttatacaatgtagaaaaaaaaaacgaccattcacttataaaaaaagtatcgcctccgatcaacttaaattctgggtccaccactgattgttagtctgttaattttctgtgttagttatagcagtcttgggtcttgattcttgtcttcttaacctttttactttgtaacttgagctaagcaacttttgtaaagctctcaaatcaaatttctcttactttacatagataagttcaccctatctttttcctctccttctttaagtatctcatggtattagaactctattgatgatagtctcctatgaatcctgctgttatagataacccttccaacccttcaaacaattcttctcagtcaccttctatggccatgaacattcttctgcttctcttctcccaattcaaaactcctttgccaactctctcagctcctttcttactgtcaagctcgaccacttgaactatcttgggtggaaatctaaagttctgcccattgtgtatatataaatagacatatatgttagactatatatatatatattgtatgtaatatagcatatacaaatgatatgaaatgcggaaaataaactgtaatcatatc

SEQ ID NO: 344244 - DNA, 641 bp, Cannabis indica
gagagaattggaaattgtaatatgaacctttgataaatagtggatgaatttaccctggttcggggaacccaagcactagtcggctgagatgtgttctcagtgcagatgaagcttgtaaattgatgtgtgatttacagcttaaagtttaattcatgttcataactcatatcttgaaatcaatcaatctaaagatgtacaatttggtaacttgaatcattaaaatctcctagttgcactttcacaagacaacttagctaatccattcaccaaagtcttggcagtgactgcattcgaaaagcaccgccagaatttaggattaattgagatgtactaattagtttcatattagtgcaagtgggagtttgttgggttttatgccctaaataaaactccaattcaatgtaatccgtattattcaatatcaataaaggaacaaaagtatttttcattcatttgtgtatgttttgattcacattatcaattatttgttcacatacttgttcttatttattgtgtggtcaacacagtggaaagtaaacatgactctgtgattaaagattcctagatttatcagaacactggggttttactgatatgacaatctacaacaaagtttacttgcttttggagaaatgctatgt

SEQ ID NO: 344245 - DNA, 663 bp, Cannabis indica
aaatgtcacaacaagatatcctttaataccaatagtaagacgtcaaatgcacacttgagtatgcattaaacaacactcctactgttgggtgggagctatcaacgatgtaattaaacaaggaacattgagaaaaaatcaagaaagaatctatgaaagtgacttatatgttagatgatgggtgtaaattagcatccttatatctacaccaactcagaacttaatatcaaagatggttgtttctctgagggtggaggaattattttggaagggtgtaaaaatccatctataataatttagttccaccagtgaagctaaaataactgagttgcttctgaagggcactagaaagttattcaaactgaagaaagttcttaattgtttttatctatattccattttggatagaattagagttgtgtcttctgtacattcagatgcaatatcaagaagtaatgaattcactattcctataggagtaatgcatatagaagattgatgttgcataatattttatgaatacaaaggaagtaatgatggagaaagttattgcttatcatagtcttacagttcctaatatttgcgtatagtcaaacacactacacttgatatggatatcaagacaatagattgattgaaatgcacttctaattttatgttagtgca

SEQ ID NO: 344246 - DNA, 776 bp, Cannabis indica
agaactcccaaaacagagttcggatcacaaagttatgcattttcaaagttggtactcaaatctgcccagaaactcgagggcgggccacgacatgcaaaagccatgctgcagcacctgggaccaactcccatgttccactcaaaggggagggtcgcggcatgctaaaagccatgccacggcacctgggttccaaacccagaaaccagcaagcttcaacttgaatttcagcaagaaacacaccccaaatcataccaaatccacatacaactcaaagttattccccatgaattagcaagctcaaagataaggcattaaaatacatataacatgcatcaaaacccactatatactctgaaaaattcagattaatcaaccatgaaaatcaaagcttcaacttgagctaaatctcaaacaaatttccattatcaagaacttgaattcaagcttcaaataattaattccagagctcaataacagaaaatttcactaataagatcctctaatttctgtccaaacctaacccaaacaaactcaagaaattaaagctctaagcatgctcaagacaacccaacaaacatgaacatgcatctcaaattcaatatcacaacccacaatacattttcatgctttctcaacaattaatttcagcaataaaataaagattaaagtcatagaaagttacatcaaactcaatccaaagacaagctcaaaaatccacaaactcaaagcttcaattcaaggcaatttcaccaaatcaaatttaaaattcaaagagg

SEQ ID NO: 344247 - DNA, 483 bp, Cannabis indica
catacaatactagaaaaataaagctactcctgctaaccttcatacatatacattgatcaactttgttctccatgaaaccattcgcaatgacaactgcatcaaacttgagatattactgtcttgatgcttgtttaagtctataaatagacttattgagcttgcaaatcatatattcctgacatgctcctcaaaaacaacaggttgagttatgtagacatcttcatacatatctgcatttaagaaggcagtcttcacatacatttgttcaagtgccaaattaaaataatcaaccatatccataatgattcacaaagaatctttgatatgaaatcaataccttctctctggctatatcctttagcaacaagtctagctttatacctcactatttttccatttgagtcacgtttgatttttgtaaacccattcgcacccaatgggtctgcaaccttttagtaggacaactaaatcctaaactttgtt

SEQ ID NO: 344248 - DNA, 630 bp, Cannabis indica
ggatttaccaagcttatagtttctaggaaggtgctctctttgatagaaactcacgaaaaaggtgtctccacaagtgaaccaaagacctctatttataatatttaagatcacacactttaaaattcaaactcataactctcttagatgttatggactcaaatgtaactcgtatacacaccataactcctataacattatagaatttcaaattaagatgcgtaacacttttttacacacttaatattggtgataaatgtagagattacaccataactcctatagcattatagaatttcaaattaaaatgtataacactattttacacacttaatattggtgataatagtggaggttacaaaatgtaagtaactctactcttatgttgcattttatgtgaatattatatatatgttactctgaatcacattatatatagggataattgcggcaaaagtccccaaaaacttgaggttgatgccgattagtcctcaacctcaaaaattggcggtgaaaatacctaaggtcccaatttttgtttgtccgttggtcctttttctaacagatccgttaaacccaaataaagtgccacgtgtcaattttttattggtccaaataataattttaattaaa

SEQ ID NO: 344249 - DNA, 690 bp, Cannabis indica
gatggagaaaggttgcagcttgctgagaagaaggagaaaggaagagagggtgtctgaggaagaaaagggagaagagtgttggggaagatagagagagattagggttttcttttttttaattaagttattttaatatttttttattgttttttaaataatttttaagtaaattctagattttaatgatttttttaaataataaataaaattaaaagatatggacctataaggaacttccacgtaagtattgacgtagcaattaacggccaggtacctacggaagttccagagcagtgacggaaggtatttttaccgccaaaaataggacataagtatttatctgctactcggcataaaacttagatatttatgccgcaaattactcgtagattaaattattattaagttttattttgacaaaaaatcagttcggggtcttatttgtacaatcttagaaaatagagggtctattttgtcatttaacaaaacaaatggtccaattagtaacttttgcaaaatacaaaatccaaaatggtatttactcatatatttatataaagaaaagtactaaagaaaatgaggtgacatcctataatattttaatatattttaaaagaagtttagtaaatttagtttattttacatatttgtagacattgagatatatgacttagtgttgggttttatgcc

SEQ ID NO: 344250 - DNA, 603 bp, Cannabis indica
cgtacaagatacctcatacatttgctcggacgaggtcctctagaccgagcagtgagcaatctacgcaaaatgccaacacttagcaaattcagttttcacatcgtgagtcatcaaggaaatccctataactttgggattagatttcagagatatggcaagctgtccaaatcccatgattagtgcattctgtattactatgcaatctttttgcttatatcaattgtaacgagaagggaaatacttcctctccaagcttatagccctataaatagtgattcatattcactgggcaaaaggtcgaaagattttgtctaagaattcatatttagagattgttaccccaatttttgcactctaacgtggcatcatctgatggtgacacgtggaatcaactttgagtatctgctcagaaagtacagtccgaataggatgcctcataggcgtgcctggagcaaagcgatcagcaatccgtgcagagcgatcaacaattagtgaattcagctttcgcatcgtgagtcatcaaagaaatccctataagttggggatcagatcacagagatatggcaagctatccaaatcccatgatcagtgtattctgcattt

SEQ ID NO: 344251 - DNA, 644 bp, Cannabis indica
tttttttttgaactattaagattgttaactttaagaaattttgttcaattttacaaatagaagtctaacgtggatgaaagtttaggagacacgatttaatatatgtcaaggttcagagatatgatttggtagatatcaaagtttgaaggcacaatttaagacataaacaatgttggtaaaattgaaaagaattggacagaaatctttaaatttaacaattttaataatttgaagataatttgcggtaaaaattctaattaaccttatttatgatcaattaataaataatgaaatacttgacaccaagcgcatctggtgtagtggtatcatagtaccctcccacggtactgaccagggttcgattccctggatgcgcattttaatattttgtgaatttttacttactttgtttaacaacaagaagttttatacatattgactatatattgaaagtgtagatatttttgcggcaaaagtctccaaaaagttcacgttgatacagattagtccccaaggttcaaaaatagcggcaatagtcctcaaggtcacactttttatttgtccgtcgatacccagtttgacagcctcgttaagtactggcaagaatgccacgtgttgaagtattattggtccaaattttaatt

SEQ ID NO: 344252 - DNA, 1177 bp, Cannabis indica
ccgccgggaggccccttcgtatttgggagcccaggtagagaagggcccccagaccaaggcctacggtccaggtgccgaatacaggggctcccgatgccagcacttctggttctggtaagtcccctttaacgatacattacgtccctcctgtgcgtgaatacgctagccttaggcctatagggttcgatgaacgtctccttaggtttaggatgccatctacccggtggggggatcatgcaaaggagtattacttctcccacttaggcgattatttaggccggtcccgtatgggttctgggcctccggtgcccgttcccttggatccttcagcctatctgtcttctagctggttccgtccctcggacagctatctcggggatgatgcagccagtgttaagattcgggactttgctagggccgaattagagagtcagggtaggactagcttgattgctttttaagtgttcactgctttcacagacattctaacacttgactcttttcttcttgttgcagcagctgatcccatggatgcgatcttggccacccttgccggagcccacagtcctgatgcttcccctccccctacttcttcccagatggtcacccccgggaaagcttcttccagtgcccctccgaacactattgacttagtggatgaggaggaggtacttcttgaggaagctgaagaaggtgaagaagagcaaggggctcttcctggggaagttgaagaaagtgaagaagagcaagaggttgctctcgtgcgcaagcgcaaaggcaagatggtagcggaggagtcttctaaacggccgcggagggtggacactccggccccgagtcatgattccgggatccctcccgaggcggaggagtttacagtgcctcatggcattgtgctgactccggtccccggagatgaggagaggcaagagcttcggattgccaagtataattatgcccttgacgagtacacccgggggcacgctgaggtggaggccttgaggagggttttgcgagaggaggtgcaaaactctcttaacgaggagaactaccggaatccgtgggatctaaacatggaccccctgacggactggttcaaccgtttcctcgggcccaccttggccccttttgcctccgagatgaccagtgagtacgtctcccagctgactcggtgcgc

SEQ ID NO: 344253 - DNA, 539 bp, Cannabis indica
tattgttttactgctggaaattgttaagttgttgaagatgaagctcttgtttaagagcttgagttttgttaagttggattgggtttggtgtgagctatagatgggattcttgaaatgttttctagcttgaatccatgtgtttgtatgttttggttgctggaaaataaggttgattcatgcctagagatttaaggttgcaagtatgaagttttgttgaattatgttcttgaatgaagcatgatgttcaaggatttgtaatctgaaattatgaagtttattgttggatttgatgcatgagtatgtgtttttgatcctctgatatatgctagcagctctatttcatgattctgagagatatgtatgtttggggtgagttttggtacttattttcgaagctgaaattgagttttcttggtttttaaatccagtggtcgcgactatcataggtctggtcgcgaccatggtaatggcagtttattaatttttatgagtttttgtttttgccataacttttgactcgggactccgtttgggacgtt

SEQ ID NO: 344254 - DNA, 886 bp, Cannabis indica
attacaaaaatacggttttatgaaattttaaatattttacaatttttctaattttatttacagaaaatatggtctttttatattgtactcttgttaatttgttgttaatgttttattatttgtatgttattttgtattgttattttgatgttatttaaatttattttcatgttacttttatgtagttttcttattgttttcatgttgtttctatagaaaaccgtaaaaatgtaaaacaaattctttaaacgtaaaaatataattgttttacaaaaaatagtgccttatgtaattatcccttactaaaaccttatcgggatattattagtttttttctacttagctaaatatatttttgaaaattaattaattatttaacaaatttatttacaaagggtataagtttaacttctataaaaaaaaaaaaaaaaaacaaaaaaaaaattataattaaatattcataatgataaaacaattataataaacaattaatataaaaaaaaaataataaaaaaaaaaaattaatgaaagagtattattaaaaaactttattaaaaaaattaatttattttaattatatacttattataactaatttaattctaaatataaaatatttaaatgttagaaatttattatagaagattattaatcagttacatctttaataatatatatttatataattctattgttaggcatgatgacatggcatcttttatgagctttcttttcatttctttgctcttttatttttttacattttcttaaatttttgttaattttaaggtgatgtgatatcatttatgaaagtgtttgttttcctttaatcttctatctaatatctattctatataaaatgtggctatataacagaattctcggt

SEQ ID NO: 344255 - DNA, 564 bp, Cannabis indica
tttcgagggtcattatgatccgtattctcatcttctgcccccctcccaacttttagatttcccaacctttggccttctagtcactagacttcgtgtataaaatggtggcttaagcttgccatattccacacacttatattttttttttcgatgagatccattttgagattggatcgttattctctcgtcaagatgtctcatctgagttcagaaatttattcctttagattcataacaccataattttccaactacctctcttttctatacgttcccaggaacttcaaatctcaatttgaattggaaatgaaggattccaaggttgaagagcttccaatcaatccaaaccgagggaaccccattgaatgttatggccgatcctcacaagtgattgttgagagtaagcattataccttgtaaatggcggtctgaactggattttttttcgctccattgatcccttatttttgattttttaaaaaaaatggacataaaccttacgagcgatcctagaggtcctcctcaggctgacaaggaatcaaagaggaaagttggcgtggtttc

SEQ ID NO: 344256 - DNA, 610 bp, Cannabis indica
ccactctaaatgtgtatcgttaccacataaaggacaactacaataccctttagttttacatccagcaaggttcccataggctggaaaatcttggatggtccacatcaaaattgctctcaatgtaaaagttttgtttacaaaagcatcatggagctcaactccctcattccataatgtattcaagtcctcgatgagtggttctaaatatacatcaatgtcattcccaggttgcttcggtcctagaattaacaatgacaataaaatattttcttttttcatgcataaccatgggggtaagttatacataacgatcatcacaggcgaaacactatgtttactactcaaattactaaaaggattaaaaccatcggtagaaagtccaagtcttagatttcgttcttctttggaaaaagcaggccatctctcattcactaattcccaagcaacagaatctaccgggtgacgcattttcccatcgttactcttattattgtgatgccatcgtaaatccttagccattctttcagatttaaacattcgtttgaaccttggaattataggaaatacctcaaaacttttgctggaataccttttcgaaccttgttagtaa

SEQ ID NO: 344257 - DNA, 886 bp, Cannabis indica
aattgaatgaaattaaacaaaagtctttaaatctaacaatctcaatagttcagggagaatttttaacggccagaaaagttcagggggcatgatttggtacatgttaaagtttataagataaaaatcttaattagcctttcaaaattgatgcaaaattttaaaatttactaacaacgttggtttatagggttgattgatgcaaatgtagctttttgtagtagtgaatacttaggttatgttcggaagttggaatttggtgatgaatgaaaaaagtagggaaaatgtaagaaaaaattgtagagaacaaaaattgaaatgacatttttcatgtttgatatgacattttttgttgaattgaatatttttctatacaatttttcttttcataccaaatattataatttattattattttttttactttctacttttttcctcaacattttccctatttttttcttttcttaccaaaatttaacttttaaacataaccttaatatttttttttttttgagaaacctgaacctttattaaaacaaacaaaacaaatacaaggaatcaggttacaaaggaaggtaaagaaccattccaaatatactcattgtctaatcctaaacccgcccttgcacacacatgagcaattttattaagctcacgaggaacatggactatgaccagattaggactgaacaacaatgagttcttaatacaagtgacaatatcattaacaacagaattatgacatttagtattataaactttatctactatgcttttacaatcagtttccaaaacattaacagaaagcttggtgtaaagcccgcttagttaatttggaaattagcagttggttatgattaattaagaaattatttatagctattta

SEQ ID NO: 344258 - DNA, 792 bp, Cannabis indica
ctagaataattactcattgaatagttggtataaatttatgtctttgactttatattttagattccaataaaaattttaaatttcagtttccataatacattaaacactacgttataactttcacaagttgttaatatctattttctatatgttgacctcgcttttagccaacgacagtgagtctaattttgtaagcgacaagtagtttattgcgattgatatatagtaaatcaatataaagacacaggaattttatagaggttcagccccgagcagttcggtaatagcctaatcctcgttatttgtattaactcaagaacaaggagaaaggttccttttcttatagctcttacaacaatatctctgaatatgaattctcagataatatctcttaagtagaatctttcgaccctttgcctagtgaacatgcatcactatttatagggctatgagcttggagagaaagtatttcccttctcgttacaatggatataagtagaaagattgcataataaatgtagaatacactgatcgtgggatttggatagcttgccatatctctgcaatctgatccccaagttatagggatttctttgatgattcacgatgccaaagttgaattcgctaagtgttggtcgctcttcgcggattgctgatcgctttgcttcgagcatgcatacgaggcatcttgtttggactatattctccgagcagatactcggagtcgattccacgtgtcaccatcatgagatgccacatcagagtgcaaaaattggggtaacatttgccccc

SEQ ID NO: 344259 - DNA, 1153 bp, Cannabis indica
gactatctttgtttgattgaaaaccagaatcagtatatccagcaagatttaactctccactggattatacaaggatgagatctctcattctccaaagatacttgagaatgtgctttacaactatcaagtgttccaaacctagattaggttgataatgactagtaatccctacaacgtaccatatgttaggccttgtacacaatattgcttacattaagctcccaactactgatccataagggtactttctcatgtcctcttcctctcaagatgtctttggacattgatccttacataggataactccatgtctagatggtaattgtcctttcttggaattctccattgagagatatatgttttgagaaagtgttaatgttctcctctttctatctctatagattttgatcccaaggacataacttgcttccccaaatctttcatttggaatttatcagctaaccacttccttacatttgataacctttctacattatttctagtaagtagaatgtcaccaaccttaagaactaggaataccactacattacctttaatgtatttgtatacacatgcttcttcttcattttgttcgaagccatactctttaataatcttattaaaggtgatattccaagatctagaggcttgcttcaatccataaatggatttaagaaccttacacaccttttaatcttcccttgttaacacatacccttctagttgttccatataaatgacttcatcaagatcaccatttagaaagacgttcttgacgtccattgccatatctcatagtcatatgtggcagttatggaaagaagaatgtgaatggatttaagcattgtcacaagagagaaggtttcatcatagtcgacgtcttctcattatatgtagcctttggccacaagcctagctttaagggtctctacctttccttcaacatttttcttcttcttgagaatccaattacatcttataggcgtaatatcctcaggtggagtttcatactcccaaactttgttggtgcgcatggaatccatttctgaatctatggcattattccacttgtctaactcagggtcatacattatttcgttgtaatttaatagatcatccttgtatgtgtcagagataagaacatgtgcttcat

SEQ ID NO: 344260 - DNA, 1276 bp, Cannabis indica
aacaatggaggagctgtagaagaccaggctaatggtcgcaaccacaatgactgtagcctgagggactatttgctaccaaatttaacaggggtcagatcctgtataaggccacctgccgttgatgctaataactttgagatcaagccggccctgcagatggtccaatcttcagtctagtttggggggctgccaatagaatacccaaacatgcatctcgctaacttcgaagagctttgttagacatttaaggtgaatggaattagtgacgatgccatcaagctaaatctgttcccattctcattaagggaacgaggcaagagttggttggtatctttgccacccaattctatcaacacctgggaggaattggccctaaaattcctttctaagttctttcttcctgcaaagattgccaagttgagatctgaaatcatcaacaacatccaacatgacaacgaatctctttatgaagcctgtgagagattcaaggacttattgagaaagtgccctaaccatgggattaaaaagaggctacaagtgcataacttctacaatggattggttagcaacacccaaacactcatagatgtcgcagctggtagggcttttatgaggaaaagtgcaaatgaggcttttaaactacttgaagagatggccatgactaaccaacaatggtcaatagaaagaagccaatctaaaaaagttgttgatatgcatgaagttgatgctataacaaagttgacaactcaggtggaggcattaacaaagttagtgactgctcaagcaaagtaagctcaagttatttgtgagctatgtggaggacatcgtacttatgatacttgcccggtagatgtaaatagttttccaatggagcaagcccaagccattagtaactatcagaacaataatcatggtttcaaccaagggggtcatcgacaaaattttcaatggcagtttctaaatcagcaacaacaagggttctaccaataaagaaatcaatcttaacagagccaacaacagaatcaacaaaaacaaggttctagtggagggtctaatcttcaggtagatatgttacttcagttcatgatagagattaaatcttccattaaggtcttaaaatctcatatggggcagttgactactcaaatggccaaccaaaatcaagataatttgcctagtactacagagattaatctgaaagagcgatgtcaagcaattttgtaacacctaactatcttaggcgtattacgtgattttttaaacgtactgtgcagct

SEQ ID NO: 344261 - DNA, 438 bp, Cannabis indica
gacatatcccaagtaatagaataacatagcatgctctaaaacaaaaatcaccattaaagagccaagcttgagttttaaaactcaaagcttgctcaaacctaacaacagcccataaaaccagcacaaatcaacctatctaaacataattcaaactcataaaactacaccaactaatagcagcagctacagaacttaaaaacacaaatcatgaaaacaaactcttacttaaagttcaagacaaagagggtgaagccaagaacttacctagagcttgagatcacttaaccttgcagtaaaatacttgaattgatgaaaaaaaaaatcaaaccctagttgcctagtgattttgagagagagagagagagagtagtagtagtagtagtagtagtagtagtagtagtagtagtagtagtagtagtagtagtagtagtagtagta

SEQ ID NO: 344262 - DNA, 476 bp, Cannabis indica
ttaatcacaaaaacaacaacaacaactaacagcagcaataacatcaaaaaccaacatgcaacaatcatctatttcatcaaaacttcccaaaacttaaaataaagctatagaaatcataacaatcaacttgtgaacactaaatcttgtcaaaaagagcttgaatcaccaagaaaacatccacttccttgctgctcaaggagggccgaaaagagagagggagaaagcttgagttttttctaaattttctaatttttctatttttattaaaaaatgagaaaacatgcatatgataaacctttacttcagccaaaataaacataacataacatccattttccacttactaagtccactaaaggacaaaaacataaaatggggcaaaatgaccattttgcccctccacacttaaaataacataaagggcacttagggtattttgggaaattctaaattcccgacactcccgacattcccaa

SEQ ID NO: 344263 - DNA, 965 bp, Cannabis indica
aaagaattatgcattcaaggtataatttggtttgactcgatgattagaatcgagatgaaccgttctaaggccttattataattagacgtgtgagcgtaacacgtgtgtctatgccacatagacataaataggtgtgtgagcgtaacacacaggtctatgtcaaatagacaataagtataatggcattgttatgtatgcaaaatgtttattgcgtttattgatacttatactgttttactgagcttggctcacgggtgctctactgtgtaggaaagggtaaatctgtctgtaatcagccatgagttcgagagcttggcggtgtttgtacatgttcgggccacactagaccaagcgggttgggtctaccagtgattgtattatgtaatctcggatttttccgcttaggcaggcatatgaaccaacttgtaatattttgtgaaaagttttgtgggatcccaaaacatgttatcttttggttgtttgtaaagtttaaaattattacaagttttcattgcattacaattaagtttaaattttttcgctcttatctttctagtaatctcaatttagcgagattagggttttaatattagtttttatagcgtgcctaatcgttagggcattacactttgtgtagccaaccgcgacctgccatgcctcagagctcatctgaaatcgtaacgctaaaagagctcaaaagagggaaagtcgtaatcaacattggtacaaaaattacaatagtctactatttaatttcttaaatataaatcataaattggccttaaagatatttattattttaaaaactaaaatgttatttcatctttataaaatcaatacaataatgatctaaattaataaacgacctacatattttttttattgaaaatattttttttttttgagaaaacaaatagcccgaaaatattttcttaactttattttttgtgattattccacaaaat

SEQ ID NO: 344264 - DNA, 810 bp, Cannabis indica
acagttctccatacaatcttgcaatctcttagatggaatgcattgggctctttttcctattctttcatctccattcattatctcattgaaatctcccaataaaaaccaaggcccaattttttttctttgccaattcctctaggtcagcccataactcttctctctttttctaatcattaaaagcatcaatcagtgacacaaagaactttcctacttgttgctgtgattgcacataacaatgcattatttggctagagcaatgtttaatatctattgaatagacatttggtggccaagctataactattcttcctttgtctaaccaaggatcattgtttgagaaacaccaaccttggaagaggcttgtataaggagttcccatattcttattctaaacctttatttctaagagactaacaaacccagcttgcttcgaatacatcaattgcttgatctcattatgcttattttggctgttaatcccctcacattccagcataaaaacctatccatttgaggaagaggaatctccctcccctcctgtgttctgcccaatttactattctgctataccacaatccatctcagtgcctactgcaatatcagtagtatcattaagagactcaaatatattctttgtcattgtcccttctgcctccttcattggcactacttttttccctttactgaccttctgaaacccttcatcatccagctgcttctctacattcattgctggtttcttaggcacccacacttgtttccctgttctttcttctcctcttttttcctgcaatctgaagttctatg

SEQ ID NO: 344265 - DNA, 1405 bp, Cannabis indica
aaataatgtataaatttttaacattattcaaaaatactagcatgctcttatttcaatgtgaatttaatgtgtgttcaaaaaaaaaatgtgaatttaatgcaacataatatctgtctaccatatcgttacctttcttttaagaattatcttgtttttatctgaaacgaaattggattagtgacgtggacgtggaactgataaaaaccccgttcttatctcttcatcattttattttaatttatccattttgtgccacttgtttaattaattaaagtaaactgatgtggtcaagggaggaccgatactatggtggggccacagagagagagtgggtgtgatttccatattagttggtcccataaagagattaaggttgtaaaatttaaatttgatattaaatcaacacttaaaaaattattatttttatattatttttttttcaattttaattacaactctaaaatttaattaaattttttattttttataattcttttattttattaatataataaaaatattttaatactaaatatatataatttttagttttttttcttaaaaatattatttaattattaaaaacaaaaaaaaaaaagtgtagtctacaatactcactaaatttagtaggatattatagatgttgaccgagattttcaacaaccaattaaatgagataatgatgaaagctttggagtaattaatgcaagtggtttttacgtggttcgagcattaatgaaccgtaatccacgagtcttttgtattaatgagagttcttgtacaaagaatgttcttggtgaattctctctcttgtttttcttttttgatccccctttcccattttgttcaagggtatttatagagtttggtaaagatcacttgtctttgagtgtcagccatgtatgtgcacaagttcctaagagatgtaaaatagggcatacatgacctatgtcgtaggtatcatagggattaggtgagagtaatctttcaccttctttgattgatgtgattcttcataatggagtcgtcactagaccctttgattatcgtgtaatcgccgtaaacgagacttacgccatctgtcatgtcctcttatgggcgttctaagacatttcctccatcctgcattaaatgtgaagtgactgttcgaacaggttctccttctcccggaggtgctttgttgtatttccagctcccagagaagaagggcatgctttatgtgcctctccgggggctcactccctgaagtgcacttgcccgtctatgtatgacttaactaatttcgtgggtaaggtgtccttgaggtccacgtgtcacatgtagccacggtcacatattttaggaaaaatctgaggcaacaatagataaaaaccatttatgagtttagtgttccattaaagtaaat

SEQ ID NO: 344266 - DNA, 805 bp, Cannabis indica
ggctctaataccatttgtaacgctcctacttcaagcctcctttgggccttccccacggattaatatttctctttacggataatgggactactaactgtcacaatcacccctaacgtcgaccacactcttgactggatcaagactctgatactatctgtaacgcccccgcttcaagcttacagtgggtctttccccacagattaatgactcttatacacaggtatgtcactctagctgctttttggactgatgactatccctatagaccaacacgagtattttcagtgtgctttgtcctaactcacacacttcttaggaaaatttctcaagagatcacccatcctgaaattactccaggtcaagcacgcttaaccgtagaattctttcgtgatgggctaccaaaaactaagatacaccttgttgatataggtagtaccaatcaatccatttaagtcatctttaactgtgtagtctcatatctacacagtctcagaatcatcctacttgaccttcctaggcgatgtgagattgtacaacttacccagtatttttcttacggattacgagactactgactgtcacaatattattttctctttctctctcattcttttaattatttatttattatttcatttactctttttttttatcatttttatttattttaattaataaaattatgtaaaaatataatatttaaatgatggagaaaaaatatagagaagttgatatgtatggtttaatataaatatatgaggtaaaataaaaaaaaaaattagatgagatattttaaaagatagaa

SEQ ID NO: 344267 - DNA, 875 bp, Cannabis indica
atttattgtctaaacgaaagatatgttttgtcaaattattaattacacaagtaaaaaactacataagtagataataaaattataacaccattaaacagtacacagaaattaaaaatgcaacttataacaatacatgaaacatctcaacaaaataatatatcaataaaatactaaattcatacattctaccattcaatcaagtaaaacaaaaactaatgaaaaaacttaaaaaaatactaagcctaaggttaagaagtaagtaaataagtatactaaattcatacattctaccattcaatcaactacatatgttttttcgaaaactgattataaaataaataaagttaagaagtaagtaaataagaaaaagataagtagatttttacatggtatgagtgttaataaattttagagtcaatgttgttgaggtagaaaaattttaaagtatttctttaagtgtttatgccttaattgaaaaaccctaattctcgtctcttctcccatgaattcaatttccaattctttgtatgaaggaataatgtattatttataggggagaatcggatatggatatgcctagattcggtagagttttaagtcttttgatgaggcaaaatttaatagggatttttacgaaaatataggattttggaaagaatttataattttactgtcacacggatatttttaaaaaaatactgtatttttataaaataatcgtaacaaaacaagaaaattaaaaaacaatcgttgaacaaccataaaaacttaacacgctattattgaaaaaaaagttgagaattttaatatgtaaatgtaaaaacttaaatatatatttgtaattaaaaattaaaataccctaaattacttaaaaa

SEQ ID NO: 344268 - DNA, 563 bp, Cannabis indica
ttttttttaaaaaaatacttatatatatcaacacaaaaaaaaatacaatattatcatatattcataataataatattcacatttctctctcacacacatagaatcatattcataatatcatctttgttttaattatataaccgtgtttttaggtgggttcgggtgggtctagattttttatttgtaaaatttctagaaccaaaacttgactcgatttggtactgggttaaactcgaacccgcactgtatttctttaaacctgatttttggattttttgggtctaggtgagtcgagtttgtcgggtgggtgaactttttgggtacaaatattctacctaaatcgtaattgtcctaattgtttgctcattgtttatttctcaattttttattattgttttactgttatttattttgctgaaattctgaaagaaaatttgatcaaggataattagtaatttttccccctgaactttgacatgtaccaaatcgtgctctttgaacttttttggccgttaaaaattccccccgaactattgagattgttaaatttaaggacttttgtc

SEQ ID NO: 344269 - DNA, 1002 bp, Cannabis indica
aatcaaaaatcaccattggaggttcaagattgagttcaaaactcaaaacttgactaatccctccaaacagccactaaatcatgcataattcaacatatttcaacatcatttaacaccagaaaacactacctaaccataacagcaaccacaacaacgaaaatcaagaatttgctttgaaaaccatagcttttgtactaaaatttcacaaacttaaacaagggtaacaagcatgcattacaacccctctaatccattcaattcaagcataaaaatcacagaaacaacctagaactacagcagcaacaacaacttcaaaattagacatgcaaccaattctttttccttaaaaaccaagaaaactaaagagcaagggacttaccaagaattgagatcacaagactttgataaatttagcttgaaacacacaaagaatccccccccaaacccagctgctcaaaaccgaaagagagaggaagaaagagagaaagagaggtttgagaaaattttggtttttccttgattttttctaactttgaaaataaaagataaatgaacatacccacactatattcagccaaaaataaatcaaataacatttaattctccaatttctaagtccactaaaggtgcaaaattatgaaaattactaattcacataaaatgcatttcagaattcaacaataacagtataaataattatttaaatagctataaatattttttgccataattaaacatgattaactgataatttccaaattaaactaagcagtctttacagatctgattggggcattacgcacagggcgaggaggagccaactacgcaatggtggctgcaaattctttaccaaatggatcgaggctgaacctctagtttccataacaggaaagaaaatccttgactttgttgtcaaaatatttgtctgcaggtttgaaattccaatgaagatagtattcagtaacgaaacttagtttgatggtgacctattcactgagttct

SEQ ID NO: 344270 - DNA, 718 bp, Cannabis indica
aacccaacccaaccaagttatgatctaaatggcttagattcttagaatgttcatgggacaaccttattagatcaaaatgagttaagcctaaattaatccaacccaactaggccaaacaacataatgtatgttttttatggttattttcttgggatttttttctataatatgcaattaaggagatcaatttatattttactcttgaaaagaaaaataaacaaaaatagaaaagaaaactttttatttttcaaaatacgatgtcaaaaaaaatcatgggagcaactcctctttcttcgtgacccagtcgaaccacacccatctcaaatctccacgatttttattcaaaacccaaaaaattcagctccaacaaaatgtagatctcaaccaaaaaataatctaattctaaaaaatccaaatacaaaaggtaaaacacgaaaaaaaataaaaaaaaataagagcacagagatttctaccttcattgataagaaaaaatacaaaaacaacctaaaatctaaaatccaaatcgtattggttagagaatttgaatacaaggagatcggataaacttcaaagttaactcaaaaacgaatgagagatcaaatacaaggtacaaaaatttataataactttcttcctaattaagttatttttaaaaaaattcttcatggttatatatattttttaaattgtaaaaatcagataaataattaatgatata

SEQ ID NO: 344271 - DNA, 557 bp, Cannabis indica
tgtcgttaaaggtgaatagcgagacaccgaagaagagtgacgcatacattagcttgcaataagcaaactaagggtaaaagtcggatcggctcgaagaacaagtatgcgagatgaccatctcgctatgagaagacttccaatagcttcatccaactaacaggagtgaggctcataatcctcgcaagtcaggagatttctttatacccgcgatcgacgtaagacatacattgtcgacctcagaaagaagaatggttccaggtcgccattgggatcactataatcaagttttatgtcgatccaaattcagaaattaaagacatgtttaatacacgatatttttgacccagtaaaagcgggaaaatctcagctatacgatttttaaaatcatacaccgcatttacattttgtgatatgtaatcagatcccacgattttagggataatggttgtaaacatactttggtcagttttgtaattaactgccactatgcaattataaatagtggcaaacaatctcaaaaaaggggcgaaaaaactcttatgaaagaggccctaaaa

SEQ ID NO: 344272 - DNA, 898 bp, Cannabis indica
cgatagacttaaatgatcattactctgtagctgcagagattgggggttgtgccgtcagactttattgcgtgtagcagtcccaacacgtttcctcccatgcggcattaaatgcgacttgattgctcaggggaagcctgacacctcgcggagatgtcttagtattacttgggcttccgggagcgtatggggctccctatgtcttctccgggaggcatgtcccggatgctgccttattacataaagacttagcaaataatttgaatgctaagttgtttgatccacgtgtccttgtctgattggtccacgtatattaggcgaaatcaggggcaacatctattatacggtatatcatttttaaaaattttattttctattgtacttttgttgacatgatatataactttattagcatcgtatatacttttatttttatttgttgttattatatatatttcgattgtaaggtatatatttttttgttgtatggtatataagttttattctatagtatatcattttattttagatcatgcatgtttaacttttatgttattatatataaatgtgatatataattttataagtatggtataattattttatggttgtatattattttgttaatatgatatatacaatttttttaataatattatattattttattttattttttattgtaggtatatatgttttgttatatggtatatgatttgtttttgtctatagtatatcatttattttagatgacatttaatttttattttatgatatataaactttttggtatgtatacataatttaatagtggtacatataattttgttagtatgatgtatatatattttgagtattaatttagtactgttataatttctttgtagtatataattttatt

SEQ ID NO: 344273 - DNA, 1047 bp, Cannabis indica
catacacattctcgacttgccacgtgaattacgagtatcccagaatgatttgaggaggtaaccaccagaatttactttgttgacctccaagatataccagtgtcaccgaaagtgaacaaagagcttgtttgagatctagccttatgtggatcagataaatatctcgcatttgtgtagccaatgagttgtaacccacaattaataaaatagcacagtcttttatcaatagtaccttgaagattgtgcttaatccctttccaatatctgtatgttggagcaaaactaaatattgctaacaaattgatagagaaagctatatcagatcttgtgcagttagcaagatatattaatggtccaattgcactatgatatggtacttgaggaccaagaagctcttcatgttcatatctaggttggaaatggtatttttccacatcaagtaatttaactaccattgggctactcaatgggtctgatttatccatataaaactgcttcaaaatcttttcaacataagttgactgatgaatgaaaatcccactttttaaatgttcaatttgtaaaccaagacaaaaaaaaatcctaaatatttcatttcgaactctttctttagatattctacagcttctgaaagtttttcaagagttttaataatattcaagtcatcaacatatacaataataataacaaactcaaaacttgaactttttataaaaatacatggacaaataggattatttgtatatccttcctttaaaaaatattcactaagtcaattataccacatgcattctgaatgttttagtccatacaaggatctttgtaatttaattgagcactttacacaaggagtttcatgtaaagtgatatctagtgattcatacaaataaattgtgattatatctattaatcgcgtattaagtttttcactaacagccttgctacccaaatatcttaatgttattgcattcaccacaagagaatatatctcttcataatcaatacatggtctttgagaaaaatattgtgctacaagtcttgctttgt

SEQ ID NO: 344274 - DNA, 546 bp, Cannabis indica
tttgcatttagtaagtgaattcaattctatttgaattttttctgtttgttttggccaatcttttctattttgacattctctgacagatttaggttctagatcctcatttttgtttataatttctagcgctaaattgtaagaaaaaaaaattatcgacaactacttcaagtcgaaaccattctttccctgtattgacataatttattgagatctcattatttctaatatttttaggtacatgaatctcttcaagagatttatttatatcaacatcttcctcaaaattatcaacccttcattaggatcatcttgattacttgctcattttcattttcgagaatgtttatctttggaaccaatggtctaccacattttaagtgtgctttagactcattagcaattgtccttctgggacttcaattcgagttggagcattttcagttagagtgtgtgattttgtaattttctttgggtcagtgaatgcatctggtaattgatttgtaatattttgcaaataaattattctttgaacttcaagttcacatt

SEQ ID NO: 344275 - DNA, 674 bp, Cannabis indica
ttatgattttgtaattttttttcgtaagggtatataatatttcaactactatctatgtataatgccacatcattaatttaacagtcaattttaacacaaattagatagaaagattatactattccaactgatgtatattagggggtatttttaactacacttatagattaaggggcataatagtatagtgtcataagtagagggggtaaaaaagttaattattctttactttattattctaaaaaagagacattaactttcactagagagagaaacaaggccatttgctaacatttctctagaataaacttgttttgggctaaaacccagcccagatgcacttttatccagatttggaccagtactatctctttcaaatattttttaacaataaataaagggattttataaaagggaaacttacaaaaatattagaattcgggttaatttttacaaaaatactgtcatacagaaaagttttcaaaaatattgtgtttttataaaacaccaataaaacaagcagaacaacttaaaacaacagtagaacaactaaaaaaataaccagtagaacaccagtgaaaacttaacacagtatactgcagtatgaaacttataaaaaaaatacagtaaaaaagtaaaaaatatttataaaaaaaagggcaaaaagttagtat

SEQ ID NO: 344276 - DNA, 543 bp, Cannabis indica
tatgtctactttatgaattttcactaagctagggcttaattgtgaagaaaatagattctagggtttatttcttaattaagagactttgttaagtctaattaatgaattatttaataattaattctaattattaaataattagatttggcatttaagtggttaaattggaaaaatgacattcttgagaaaataagatgaaaaattagaaaaatagtaaaatagtaaaattgcaaagtggggcccaggccggccacttggaaagcaatttgccactttatttttttattattttaatgctaattaaatctaacctaaccctaagtggtttcctataaataggtagtgatggcctcaaaggaaaagatgatgcagctcattccttcagtaaaattttgagccaccttcactctccctattcgaaacattttctctctctttctctcttcaaaaccgaagccctaaagggaaaagagtgagtgcccacacacatcaagtggtactcaatcatagtgtgtaaggctgtgaagaatccattttcaagag

SEQ ID NO: 344277 - DNA, 646 bp, Cannabis indica
tccgggtgtgggttcgggtccttgtcagggtttgggtccttggctgggtcccaaatccagacaccaactacgggttttgtccaagccgtggtccagattcggatcccaatatcgggtcccaatcttgttcaatttctggtgccgggtcacgagctgggtcctaggttcaagttcgggtatgggttgggtactagctcccggtccttatcctgattctgggtccaggtcctagttattgtgtgggtttgggtcttggtctagcttcaggttcgagtcctaatctcggtttgagtttaggtctctgtatgggttttgatcttggttcaggttttggtttagatcctggccctggtgctatgcctagttcggttctagttccatttgcgattctgagttcgagtttgggtttgagttcgtgtcgaagttccagaacttgtcttagtttgggttcgtgtccggatttctgtctaggtccagatcaggcttcgggtgtgggttcgcctcctgggtcttggtctaagttcggtccgagtcccaagttccaataccgatttgagtttggattgaattctgggttttagtccttggttctgatcctggtcagggttgagtttgggtctaggtccgggtgtagcttttggtctga

SEQ ID NO: 344278 - DNA, 517 bp, Cannabis indica
ttgtaatcccagttttttcggcccaattttttaaaatacacactctttgtacgtgtcacgtcattttattttcattttaaaaaaaatgtcatttttgtaaaaagttacttaatttagtatattcttaaaaaaatccctattttttaatgtttttattgttgagtgattttcttctgatagaaccagggcggacttaatcaatttgtgggccttgggtaaaaaattaaaattgagccttttattaaaatcattaatcagtacttcataaatttaactttaaaaaaaataccttataaattcatttacatttatttagtaaatttaaatattctaaataaaagtacaattaaaatattattcaaatttgttgatcgatctatcccaaaagtatatcttccttcttcaaatttgtcatatcgaacaatcttcaatctataaaacttaataataacattaatttattcaaaattattagaaaaaaaacacagattgactcatttaaaaatttatctttctt

SEQ ID NO: 344279 - DNA, 527 bp, Cannabis indica
tttcttttgcattaggtaaagaaaattgtatctagagaaatcgtcaatgaaagtgaaaaagtactcataacctcctatggcttttacatttagaggtccacagacatctgaatacactaactctagaggttctttggcacgctctccctttgcagagaaagaacgcatagtcatttttccttttaggcaagattcacaaactggtaattaacccaagatgacatttttcaatggatcatctttggttaacctgcaaagtctatcatagcctacatgacctaattgcaaatgccatagatatgtttcattattattattaatctctttccttttatggtttctaggtttagcaatattaaaaagttcgttattaagcgctatttgtatatctagtcataaaacataaagcacttgttctatgtaagcaacacatattgaaatcccttacgagaaatagtgcaaatagaactcaaaaaattcaattgttaaaattgtgtttgtaaacatgaaacactaatcaagtttct

SEQ ID NO: 344280 - DNA, 1198 bp, Cannabis indica
gagagaagctagagaaatagaggaagagagagagttggggtgttattatgtgagggttattcttggatttttgataaaagtatcatatattttttattttgaaatgtattggtttaagcataaaatattagggtttttaatgtatagtttttcaaattttcctttttaaggcccaattttttttttttttaaaaaatgcccatttatttattttttcctattatatatacataaataaaaaatttatgtacaaatcttttaaaaaaattagtaatagaattgtagttttaaataatgtacattggttttttttttttttttttttttttttttactttttaaggaccctaattttaaaattttgtagacaagacccccaaaactagtttgagttcgagtcctgattatagtatctcattgaattatatgtagtgtgaagccacactattttggtgttttacaggccggttggagatggcttgacaaacaattttataatttcgagaagagtaattggcgataaaatctctttatattttaatttttatacttaattcttcttttttcgtagcagattgtaaatttgaggcgtcagttaaatattatctttaaacaccaattgaatgatcattgtttacatttgtgtatacgtgaaagtaaaactttaaaatcaatacagtaataattcaattggtatttaacagtgatatttagttgacacatcaaatttgtaaaaaaaagtaaacataaagggtttactgtaaaaaaaaaaaaaagtaaatgtaaaatatcaaaacataaaagaatttttaatatgagtattggattttacataataaaaatttactaaaatttagttgtttaacactttcaaagttgaataatttatatgactttattttatgtttagatatttttgtcattcaatatgccatgtttgtataatctaagttttcaaaactcatatttaattttttttttgtttagaccttttttaaaggttagttagtaattcgttaatatttaaaagtttgaaaactgatgaattgttttttattattatttatttttatatttttttaaataaaaaatagtaattgtcttttcattttttctacaagtaatgagtatcttatttctcctaccccattttattgttttttttggaacaagtgctcttttttaattttttttctat

SEQ ID NO: 344281 - DNA, 1546 bp, Cannabis indica
ctggagctcaagctctggatttgggttcttctgagccgactggagcaggaggatctgttgtttgagcaagagaagcatcagcagcctggtcagaagcttgggcggaagttgaagcagccacctcttttccaccataggcaacttgggccgcgcagtacttgaggtacatgtccttggggtcgcctaactagtcgaagttggcctagggattagccttccaaaaatcaaagaagagctcgaggccggcagtctacaaagcatcaaccttctccctcaagcggttcgcctcgaccgtctgagcatccttatcatccttcagtcgaaggaggacctgccgcagagaagtcctctcatcttgaagacaatcaacctcagcagataaggacttgatggtttcctcaaagcgatcagcagcctcgaggtcctttgtcagcacggtgaccttcttttcggcgacaaaaagcttcttgttggcctcacccaactcatggagaacagctgcagtctccgccctggcctcctcagcttccttcttggccaagtccgcctccgccctcaaggtgtcggacagagccgtactcttggaagtagcagatttagcccgggagtaggtataagccaacttcaaaccggcctgcataaaggaaaaagtcagtataagaagctaactatgaaaatctaaaagtgaagtgtcgaaaaaaaaagactaaccctggtaaactccttcaagactccgcccaccaacacatccagggatgagtcgtcagcaccagccagctgctcaacgacttcaggaatcagtcggttcatatgatgagccatcacctccctgcccttcttgacctcaggcagcacgggcatggatggagttggtgcttgctcccgttcaggaatcctcctgaccagttcagacccagatgttggtggcccagactccttagacttggcagatatgggagtggaaggatttgcagtagtcagctcctcagaaagatcaatgacctctccagaaggcctcttctctgaagacccctctccgccttggacttcttggccggaggagaagcactagagcctccgctcatcctcttccttaaggcgtccatcatctgccgagacatgtctgcacagagcaaaaacagaatggttagcaaaaaccaacaaaaaatacaaagtatgaaagtcatgaagctgaaaaagaagtaaagcgcagattgactgtccgcccagaaagtcagaagtccatcatcacctgacatcgactttatctcagccataacggccttcccttttccaccataaggatgggatggcctaacaggtgaaatgggctcccttatgcgaatgtcgtgttctacgggcctgggcgtggctgggagtttcttcttcctcctcaaaggagtcacctgctcagcctcagcctcagcttcagcctcagcttcatcttcaggattcatggactcctgagcatactgctctgcccgagcacctcctttcaactaagcctcccgcttaagttgaatcagctcattctccttatgagctc

SEQ ID NO: 344282 - DNA, 981 bp, Cannabis indica
gctgcaaagtgtatctcgttgggaacttgaatagcaataataatcctggcagtgaactagagcttttcccatgtcttttcgagattgataatataaatcccgtcatttctgcgattgaagacataatgctccatctcacaattgcaattcttggtgacaaggtgaaccttagtagtcaacatcatttgaatgtcagcttctaactgagagagctaactcgacggagcattggatctcattaaaagatgtctggaactgattagtgaaggtaccatgagtatgccttccaacagcgagatggatgcctcgctatccgccacttaggttcttccagccatgatgcttagttagtacaaagtataatatatactaagtgttctgacagtcaacatgtctcgtcatcgctttttatacgtagcgaggttggtgcctcctttgtattactgatgttattcttgcgattgtgtcttctgacgcaaaatagtttctcgtcaatgcatgaatctatagtttgccattatattcgttgattcgtattctccaaggttgacacgtgtcctcctctgaagtgtcaaccaaattttgggtataataattgccccttaaaaagtactttttaaatgattacagagggtattattgtcataatctattttgaaaaaaatgcatgtcctctgattttggcggttttgtggtttcgaggcacatcagcatttaataaatatcttttccacttctttttttattttacccgttggatcaattgtctccttaatctgacagagatcaacccaagagtataaaacgaaaaaagaaaccacattttcattacctttgccgtttcaaaaattcaggaaatttttcgagcttatcttcaaaaaaccatatccagattatttcgaaaccttgcataccatctttgtcattgacattcttattgcgagttttctccgatttaatttttgacctcaagcattcaga

SEQ ID NO: 344283 - DNA, 1071 bp, Cannabis indica
agaacccttcatggacctctagcataatttgcctagcttcagggtccgatacacaccttaaataaggcagatcgggggttgtgtcgtcagactttattgcgtgtggcagttccaacacgcttcctcccatgcggcattaaatgcgagatgactgctcagaggaagcctgacatctcccggagatgcgttgataccacttaggcctccgggagcatagaggacttcgtatgccttctccgggaggcagatcccggataacgcctttctttacaaagacttagccattaatttgaatgttaagatcttcgtgtccacgtgtccctgtgtggttggtccacgtattttgggcaaaaccaggggcaacaatcttctatagatggtctacatcaattggggacaaaattatcattttacctttcaatatattttatcctttaaacacttagcaacttgtaaatgatatttcagtaaactaatataattactgaatgagtactccaccatgtaatctcgtttagccaaacttaaatgaaactatcgtttcacttctaaataatcataggagttataaatgtccatatgtatggttaacactcccactcaattgaactactgagttcccaatatgtaagtatgagctagtgtgacggataagctggtaacgaacaaatcaaataactctaataatacaattagcttaaagcttaatcatcttaggattgagatcaattgatgatctatgatcaactaagtgatattgaattagaaaagatataacgataagtttatgatattttttccactatcaatatcgatccagtccgatgtaaacttatacatctgattcttgtttagtttcacttagccaaatataagtaaatcttatcattaattatcatattagtgtaaatccaatacattgatgaatcatgagactcaaatagtttgaagcatataaccgcagttatttttcactgttgtaacaatactataattgtgaatatctatatgttcaaaatttaacaaaatttatatattaaataattaatcataaaataaacatgtgaacca

SEQ ID NO: 344284 - DNA, 559 bp, Cannabis indica
atcacatcctcgactttcgttgttatcctgaagttaaaataactacattagcatatttacaaagtctagtttaaaatttacgtttgaatctaagaagttaaaagtcttacatagtgtggacatccaaagaagcgacgaccaggatttgctctactactagatgtccaaacataagctagattaccacagtagcaatgggggtgtccgtcaagtgaatttttccatgacaggccatccctctcgaacccgtaggagtcctctccaccaccagccaccatgtgctttttctaaggtagtacaatttgtgaggcttcaaaaggagtatttcagtcgtcctaatggtggagatagtgtgtagtagtattgtaacgccttaatgctaaggcacggtacagtgctttttcaattacagtgttgtctttgctaatcaaagaattttcttgaaaaacgtgtcaaattaaaacttttatattaattactaaactttataatttataaaattatttacaagttccgggatcccatttccaaacttcttaaacataatacttcaaaatac

SEQ ID NO: 344285 - DNA, 1159 bp, Cannabis indica
aaatattttgtattgaatagcaaaattttgtaaagtatttttgtaaaaaggatcccgaaatattttgtatgtaatattataatttttaattaattagcaaaattttaattaatcacgattttcattaacctcgttgattagcaacgagctgcacagtacgtttaaaatcacgtcaacatgcttatgctagttagggtgttacaaaatgcatcacctaatcaggtgagcccgtgccacaacctggcactaatatatcacattgcctaatccaacaagcctgtacctatgcctggtacataattgcatcacctaattaggtgagcccttgccacaacctggcactaatatatcgcatcgcctaatcagacgagtccgtacctacgcctcgtacataattgcatcacctaatcaggtgagccagtatatcacatgcataatatcattacattatcaatactcaaccaatcaatcttttcattatataataatattaactatttctcaatataaattaattcataacaatactaattgtattacatacaatgtactatgcagcacaatatacttttcttacctcaagtttcggtttaggtatgttggccaacctacttggagagcgaccaatgatcccgggccctatgtcataaaaataataaaccaataagtgtttatctcaaaacactacttaacagttgcaaaggacaacctacggtttcctaccaaaccttgtagtttaaaaacactaaaatgaaacttacattttagttctaaaacatataccatatggtaaagctcatcgcaagctttgaaatggtacgtggaacgtccaaacgaacactcgagtgaaatgttatggaaaaaatacgattcccgagttcccgagattgcccgaaactgtaaaccagttggccagaattggttgaccggttcccaaccagttggccggtttgtcagaggcaaaaaatgtgattttccaagtttacgtactcaccgaaatgctaccagaactgtccaaaccaccccaaacttcatagggcacatatataccatacatactaccatacttatgcaatagaaactaaaattgagccctttattggcaaattttgggttttgtgccctaaataaaactccatttcaatgtaatctattttat

SEQ ID NO: 344286 - DNA, 771 bp, Cannabis indica
ccaagtcaatatattatttgtatttgtcccatcagtgagcaaagttaatgaataagaaccctagcactatatatataagaagacccattcatgcaaagggttggaatatcttttgctcaattgctcaggcaaaatctagggtttaaacacttatataaatcataaggcttttccagtcttattgtaataatattgactcgtggagtaaagctcgtcaacgcctcaatcacgtaaaaaacttggtcgtatctctccattatttatcaatttcattagctttcacatatattttattggtttcaaaaatctaaataaatatttagtactttcattgaaagttgaaaaaagcagtgatatcatcaaatgttatatacaataatcatggtactcatctaaaacaaaactagcagccgcgatggagacactcctatggacgacatagatcctgtagctaaggcaaagaaaagagtcgatggagatccaacagaaacaaccagatgtcctgctaaaagactcaatgtaatgacaaatacgttgatataaatcccatcaacaagaatcacttgtaagaatatatatactacaaagaagagactatagagataatattgtcctaagtaactatagaaaagataattaattgcaagcattgatggagagagtcatggagtcaggcccggccttgggcataggcgggctaggcctgtgcctagggcccacccagcccaggggcccaaaatttttttttcctcttttaaaattatacatttt

SEQ ID NO: 344287 - DNA, 561 bp, Cannabis indica
attgctcatttataacttcaactaaaatatttatttttacaagtagaaatgtcaaacctgcttgtatacaaagtacatgattgtactgactcatacatagtaaacctagagaacaaaactcacagctgtcaaaaatttgaatttgatgaaatgccttgctcacatctaatggttgtataaagctcaacacgtatcttcttctcagtaaactctgaactagattcatatccattcaactcctttctcataccatgcataaaaagctcaacacacatcttcttccgaataatattcatagggaaatttcattttaaatgcttaaaaaatatcctctaataaaatttagactcctaattaatttatacaattaaatgctattatttttaatttctacccaaaataccctccctttcattttccttctctctttgtctcattctattcctcactctctcttcctctttctcgcaccaccaagacacccaaatccaggcaccgagatcaccaaccaccaccactgaacctcctctcatccaccaccgaacctcctcatctaccaaa

SEQ ID NO: 344288 - DNA, 631 bp, Cannabis indica
aaaaatgggttgcagaccaacatcgtcaaactttcattgggtggttaatgaataccattgtagcaaagttgaacgaaccgaatcatggagtatctgatgtgttgagtcgtatttcccttggaccaacttttgcggtagcaaagcatgaagcgtacattgtcaggcgtaaacgttttcatacaaagtcaagagatgatgctcgagaggttcaaaatagtggcatatgtatcgtcgcataaactatgcactttgcaagtgcaaaagataaaaaccatgttttaggtactatgacgtattacggtcatggaagaaatatgggagctcaattattttgcgttctaaattctactttttaaatgttcttgggttgacaacaatgttggagtaaaaactgacgagcttggttttactttggttgatttaaataagagaggaagcaagaatgatccattcatcatggccagcaaagcagttcaagttttctacatttctgatccggctaatgataaatggtctattattttatcaacaccagagaggaggttcttagagactgaagaggatgaggagaatactgacttatgttatgatggctttattgttggacaaccaattcatgagcaagttatgg

SEQ ID NO: 344289 - DNA, 633 bp, Cannabis indica
cacgatggaatctgagtttatagcgttagataaatgtggcgaagaagcagaatggcttcgtcaatttttagaagatattccaaaatggccaaaacctgtgcctccaattagtatacattgtgatagtcaatctgcaattggtagagcacagagtaatttatataatggcaagtctagacatattcgtcgtagacataataccattagacaactactctcaactggaattatctctgttgactatgtaaagtcaaaagataatattgcggatccactaaccaaagggttaaatagagagttagttgaaaaatcatcaaggggaatggggctaaagcctatgaatgaataagtcaatacagttgatacccaacctagttgactggagatcccaagatctaggttcaaagggacaactaaaactgtaaagactatgatggatcactgtgggggttatcctcaagtccattcctatgatgcaacagtgatactcgtaaggaaaggttaagctatgcttttaatgattcttatgcgtcgaaacgtcgagcagagtaatacgagttactcttaaataagtaattacctatgtgagagagaagatgggccgcttctataggaattgattaaggcttaatt

SEQ ID NO: 344290 - DNA, 598 bp, Cannabis indica
aaagagttttatttagggcataaaacccaacagttttcccatgaagcgtgcgagtaaggaccaagcacactggaaacactcgtgttggtttgtagggtcagtcatcattccatgaaataaccagggtaacgtactcgtgtataagagccatcattctgtgggtgtaagggcccaatggaggcttaaagcgagatcgtttcgaataatatcagagccttaacccagccagaagtgtggtatacgaggacgtcagactccataagggggtgattgtaacaattagtagtcccgtgatccataaggagaaatactggtcaagctgtgcaatcccgcaccaccttgggaaggtcaagtataacgatcctgagactgtgtaggtatgggactacacagttgaagagggcttaaatggatttattggtactatctatattaacaaggtgcatcttgttttacagtagcccatcacaaaagaactccacagttaagcatgcttgacatggggtaattttagaatgggtgacctcttgggaagtgtgcgagtgaggacaaagcatgctggaaatacttgtgttggtctgtagggtcagtcatcagt

SEQ ID NO: 344291 - DNA, 789 bp, Cannabis indica
ctattattgatttatcttattatgtcttggtaatgataatttcttacaatatttttgatacctggggctaattttcttatttgttttaggtattgctagtgaagctaattaagtaaagaggttaaataacaaaatatatttgtgctcattgttttttgtcatatgtcagttaaggtttcttattattaaaataattagatcattattattagttgattcggtatcattccttttgtttgcagcatggagagaataacaattgtggttgttgggggccaagattcagccgagcctactaccaaagaagaattcagactaattttgtgaagtggacttattctctgtattgttattgctgatcataatcaggggtttttaggggaaggccatgctttatgctcctttacttgtctcaattctatcttgcattgtggtgatgacattgattgtggatactcaagtgatggtgactatatctgcggctggggctgggacggcactacagtgtttgttctatccaagttttgttgtgctccatttttatggccattaactatgataatgagagaaaacttttttagcatagaacaaatatcatgattatatgaccttaaagattgatcattatatggtgtggggttcgataaaacaaggattaatgtgtagattctagctaatttatctatttattgtacgcttgaaagcgatttggagttaactaacgaaaaaccaagtccactgagtctggttttcttttttgtaatatcttaagattggcataatcactct

SEQ ID NO: 344292 - DNA, 855 bp, Cannabis indica
gattgtgtgtattccaggaagaactgatcacatggaaattttttttaaaagtttttatcactaagctagtgattttgtcctattgtttctaaggtcgtcttcaaggcttaccttgaggactctgtgatcagagccatagaaaccaaggtgaaaaagagaaacaaaaaggaagagagacaaccagggattattggccacacacgaatcaaggcgctcaaaatgatttccatgcttccaagtaaacttgttaccaatatggttgagtgggagcatgtaatacttatttaggaaagagtggaaatcaaacatagcatggggagggggtctagtggtggtgtttctaacattaacagagagataatcattgaaatcacaagaaattagccacgtcaagttaggtgcagaatcaaaaatcttatctaagagagttcaggataaaaacttgttagtaggatagggcgaaccataaaaaccaatgaaatgccagttcatatcatcattaatattaataatacaatctatatgactaagggagaaagtaataatattaacattaataacattgttccacaaaagtaaaagacctactcctaaaacactcctaggaagtttaaagacattatcaaaacctaatttgttcttggtacaagttccatgtccaacactgagcttggtttccatcacaaaaaacaaaatgggttggtgttgcttcaccaatagggagagatttcggaatgcctgaggactccctaggcctctgttgtgatattttgcacacgcaagtgtacgtatcgttacaagtagtaaactcatcaggagtgaggtcaatcctacagggattgtagttaagtacgt

SEQ ID NO: 344293 - DNA, 1018 bp, Cannabis indica
ttggtagtcgttggtgggttggtagtcttcaattggaggcgcggtcattggcggtcgtgggttgctagggtcttcgtgtgcgtgagaagaagagagggagagagacaaagagagtagaggaagagagagaggatgggtaagttatgagaggagtatttttgggtttaatgaaaaggtgggatatctaactaattttaatatacttaggtttagtatactaattttgccctaatgtatgaatattaattcaaatttccctatataaaatgtggctatctaacaatttttcttagtttaatattttaataatataagaatattctgttagatttaacggtattagtagggttaattttataaatacatataaagattaatattatttattcttgattaatttaattatataaatataaataatatttgttttaggttaattgagcttatactaattttacattaatttatatatatatatataaaaataataatatatgatttgtattattatttttattattaaatatatataaatattaataatgtttatttttaattaatttaaatatatataaatattaatatattatttataatattattatttttaatattgggagtatgttcaatttttaatattcttaaactttatgtttattttctttaaattttaaaactttaaaatatcattttttttctaaaaaaaataaaaaaaaaataataagtagtttcctttaatttataatttttttaaaataaacataataaaaattaggataaattgctacaaaacttctaatacttttattttgtttgcatttaatccccaaaactcaaattttggcagtaaaagtctcaatactcgtattttgttagcaatttaatatttctattcattttaagtgttagtgccatgttggactgtccacgcgtatatctatgtggacatagtgtacacatgacacaatttcattggtccatgtaaaaaaattatttaaaaaattaaaaaattataaat

SEQ ID NO: 344294 - DNA, 1128 bp, Cannabis indica
ttttttcagttaagagggggagggctggggtggatggatgagctagggttttttttttagtactcaaaagaagaagtagaagaaaaggaaaagaaaaagaaaaaaaggaaaaaaatatatatttttataatttatttatttttataatttttaatttaatctttataatattataataattaatattacgtgtaccactaaaaatttaccatgtgtacaagtgtgtacacgtaggcagtctaatgtgacactaaattgtggtttttggacgaaggagtacagagcaaaacagaatgggagtttaggcaattttgccaccaaaaaattgattttttggttaagtgttgaaaaatataaagttcgagtagttttggtaccaatatcacttcttattattttatgtgatttttcatatttctttctttccctttataattttcatttatattttcttagcatctctatctacacaaaaatgatcatataattttttttatgatatttttaaatttgaaacacaaatttgaaaaaattcgatagaattcaatggaaacttgatacccaataagaatttaataataaaaaaaattttgctcgatgaaactcaatgactgctcgatgtcattcttaaaaaatacttactttttagaaatttttacactaaaaatacaaaaggctaactttattacatatatactacaacacggtaaaagcaacttttatacactttaagtttattttattacacttttaccacttgcacacacaatcttgtgggtatgtctggaaattattcatggcggaagtaacccagaagactccgactgctttaccgtgagacccattttcggtgaaatccactgccaccgccgccgtcgcagcatgtgggtcgggatcctccatagccggattttctgtggcgtcgcctgagagatacgttgcggagatcacctccaacggagaagaagacgatgggccaaagaagaaaacgccgctgaagacatcgccggagaagaaggaagacccgctgttagtgctagcgtcggaggaggctcgggttaaggtgtattttctgggttgagaaaaggctcggctggggtaaattttctgggctgagagtattaattt

SEQ ID NO: 344295 - DNA, 507 bp, Cannabis indica
aatggtatttacccttaaaaattccaacattcctaaagcaattgagtaccattgagctcactaaaattacttaatacctaatatagagtgaacaactatggaccaaacattaaaaagaaaaaattttaaaattacatttttttatatatattttatttataattgtacggactaaaattttttatttacacaaaaatacgtttataaagttttaaaattataaaaatatactttactcaacaataaataagaaaataacataaaaattaatttcttgataactataaataaactataaaataacaaaaaaaaaataataataatattataattattatacaattataaataaattataatacaatcaaaaactaactatttgaatgttgaaaagtcaaaatatatatatgtatatatatggtgcatcgaccccataatattttaggatacaatatattaatatgagagtcattactattcacttttataaaatctcaaaaaaaaaaa

SEQ ID NO: 344296 - DNA, 524 bp, Cannabis indica
ggtaagcttctatcaacccttcttttagtttcttgaagtttaaggaagtaaaatatttgcacgttgtgggattttagtgttgctgttattgttgatgtttgtcggttgattcagtagttaattcgtgattgtttaagtgtattcaagctgattttgttagtcggtagtaggttttatccaaggttgagttttgaactcaaaactttggatttcaatggtgaaatgttaaattagtttctgtgtatattgtttgtgtttggggatgttttctgcagttatattatggttgtttgagtagattaaattaggttttgatgcatgttagggagatttagccaagcttgagttttgaactgaaagcttggagctttaatggtaatttttgattctgtgcatgcttggttgttttattgctttggaattgttatttggggtatttagagcaggtctggaaagtttgatatggtttggggttgatttggttgagaaatgaatttttttaagtttcctgcactgaaccggaa

SEQ ID NO: 344297 - DNA, 987 bp, Cannabis indica
agtattaactcttccttttgataaggaaatgtttatcatttatgtgatgcctcaagacatgatctaggctgtgtatttatgcaaactagaacggtaatagcttatgcttctcggtagttaaaagagtatgagtagaggtactctactcatgatctagagctcgcagcagcagtatttgcgctaaaggtttggtggcattacttatatggcaacaaatgtgagatatacactgataatgagctgaatacttctttacctagaaagacctaaacatgaggcaaagacgttggctttagttggtaaaggattacgactgtgaaattctttatcaccctgagaaagccaatgttgtagttgatgccctaagtaaaaaaggtcagaatcagatgaatagaatgaagcagatctccaagcaactggtagaggaaatgacccgagctaacattgagtttgttgtcgggcagttggctaatattaccctacaatttactcatctagaaagaattaaagaagtggaatcacaagatccggacttatcgaaatcccgagacaaggtttcggttgggaagattagtgattttatagtggatagtactggaatgttacagtttatgaactgtgtctgtgttcctatggatgttgatattaagagagaaattctgaatgagtctcacatgactccttattctgttcatccggggacaataaaaatgtatcaagatcttaagctcatatactggtgacctggaatgaagaatgatatagtagagtacgttgcaaagtgtttaacttgtcagcaagtgaaagctaaacatcaaaggtctgcaagtttgctgcagccattgaagctttcgaaatggaaatgggaagatattgccatggacttcatggttggattgcctaggactacggggcagtactactctaagtgggtaatagttgacaagtttcaaagtcagggcacttttacctgtttggcgaaatttc

SEQ ID NO: 344298 - DNA, 734 bp, Cannabis indica
attaataaaataatttaattaactatatatttatcaattataaattaatatattttaattttagttataaaattattaataaaccaatatatattatttaatttgattctattttaatttaattttatattattaataaattgatgatatattatttttttaatataattctaattttatataaattaatagtatattaattttatataataaattaataatatattattttttagatagcaattaacagaatatttgaactactaaacaaaattataaaatacacacattatactttatattaaaatgtacattaggcatatgacattaattttaaccaaaaaaacaaataaatcagagtgaatacaaatccaaaacaaatcagaacatgtttagaaccaaaaaaacctaaaaaactaaaaacaaatcaaccataaatctggaaccaccaccttcggccattaacccaaaccaccatcctggcgaaaaaccccaagttccctcagtccacctacacagcaaaagagagagagagaaatagagagacaaacaaaatatcaaataatcatacatgtatataatatgtacgagtcgttcttcaatgaaccaagattgtagagtagatggatcaaaccaatgttcgatgctgacaagcctgccccaaatcaccaagcattgccatctagcctgagcaggagctccaccagaaggaaaaataaagagggggaagagaa

SEQ ID NO: 344299 - DNA, 539 bp, Cannabis indica
ttcaagccactttttaccattattatatttttttttcttggaagcagtttttctagcagtagtagtgttaattttagcaagtttaattactgtcattttaattttgaatcattgctcaaccattttcatgttatttcctcttactttaacttgtaattagttggttttacatcaaaatttgtttacaatccctgtggagacgatcttacttatcactttattacttgtttgactgcgtatacttgcatacataattttcacaataaatttttggcaccgttgtcggtgattgaaactaaaaattgtgtattatcaactattttgcaatttagtttctggtttgagattttaatcccattttgggtgcgctgaaattttctttttcaggtgtaatctagtacatgaacgagcaagaagaagactttgaacttgctcctattgacccctaaattgaacgcactttcaaacaaaggagaaaggaacaaaaggctaaaaaatgttgtactatggctgatgggtttgtgttgggttttatgccc

SEQ ID NO: 344300 - DNA, 700 bp, Cannabis indica
cgtccatttctccaccacgaccttagaccttaggccggacctcccacacactcaaccaacctccacattcatttttctcacctaaaagcattgggtaagtgcttttatggaaaatattattagtttttgttatacttagtgtaagttttatggatatgcacattcttggttgtattttgtccactttatgttctaatttgaaagtagactatgattcatttttttgcattttttctgggtttttcattttcttgcgatgtttaaacaataattggcaattttgtgcaattgtaaccaaagttagaggttagggatgaatctatgcgatatttgaacgatgctagtgcgattttgtgcaatttatgggcaatttttgtgcgatgtttgggtggtttcttacttgttgtgtttcttgtgcgacattatgtgatatcattgctttcttgtacgattattgtgcgatattatttacttgttgtttgtggtttttttggacatatttaattatatttgtgcctatacaatatgatgacgtttgggttgtagaaggtttcaagtgggtattcaatttcgcaacaagtaagacaatgatgtttgacagtgacactacactggaaaaggtgcgtgaagttttgtataaagagttggatgtgaaccctttggtgtatgaactgaaattagaagtttgttacatgtacat

SEQ ID NO: 344301 - DNA, 685 bp, Cannabis indica
ggtgaactagtgcaaaccggctaccggtttttccaaacctctaaaaccggctagctgattttggcaggatccccaaaacacttcatttcctcgattttcgtccatttcagtgtcgtggttgggtgtttccctaattccagagtttgagtaacctatagagagtataacagaacttagggttgtgggttcgggtttcccaggattaaggtttttgatcatgtaacttacccgatttcataatgtgattagggcatccatctagcacaagactttccgttcaggtcggctagcacacttgaatctagaaagaaggtaagaactgaatataatgtgtgatatcaatatctgagtgtatatatatgttatgtgtacatgcatgcttaaagtgttatgtgcactaccaacacttgtacagttatggtacaaagtgcagtggtataatgaatattggttagtgttaggttatttttagtattaattttagattaagtttagtatatttttaattaagttttaatcgtgtttggagcatttttacgcttgttatcttttatttttacagatttaaaatagaagaagattagaaaaatatcagagaaaaagatgggaaaaagataaaaaatatcatgatatttaaaatagagaaaattgtggaagccgaaacttcaagcctgaattcgacggt

SEQ ID NO: 344302 - DNA, 551 bp, Cannabis indica
accaactccaccttttcccgtgcatctacaggccaaaaaggaaggagatgctggcccactatatgaaccggctggttcccaaggtcagtaagcaactggctggtgctgatagtgactcatctctggatgtgttggtgggcggagtcctgaaggagttcaccagggtaagtcttttttgatacttccctttatctttcaacacttagctccatatactgattttttttactttgtgcaggcgggtctgaagttagcctacacttactcccgggctaaggctgttgcttccaagagcgcggctctgtccaacaggcggaggcggtcttgggcaaaaaggaagctatggaggccagggcagaaactagagctgttcggttggagttgggcaaggccaacaagaagctgttcgatgtcgagaagaagatctccgtgctgaaaaaggatctcgatgctgcttatcgttttgaggagaccatctagatcttatcttctctgcgagcagttcttcttcggatgaaggaagagaagaacgccaaggtaggggagcttac

SEQ ID NO: 344303 - DNA, 501 bp, Cannabis indica
attatattaaattatatatgaccgaatacttaattagactaatagcgatatcattgtatttttagcatttctctaatgtattgacacgagagagagagaggggtgggggtggggttgggtgacatggtatttactgggtaaggtgacagagaggtgaggtgagtgattactgaatgaatctgagatggatctgaaagagagagagtaatagtagtagtattagtagaaagtagtagaactgtagaagaagtatacatacccccgggattcaaggggagaaaatgtgagtgagtaagtgagcaagtcccaataagaaatagagaaaatgacaatttataataagattaattagatctcatcgtggccgacagctatagggtgtcccttaactccctcagttcttttcacttcccacaccgcacgtgatcccaccttcatatatatttacaccttcctatctatacacttaatatctccttcattttctaacacatatatata

SEQ ID NO: 344304 - DNA, 1314 bp, Cannabis indica
caaagatccaaagttcattggcttcgggctggggataaaaataccaaattttttcaccacaaggcttcttctcgtaagaaaactaatctcattaggaaacttactctggatgatggtagtgtaatttcaaacattgttgccattgaagctgaaatctgtaggttttactctaccctgttccattctcaaggtagtagcagggatgttgttaatctgatcctctctgctgtcaattctaggcttactgcccagcagtttgcctctcttgaatcccccttcacttctgaggaaattcggacaactttgtttcagctttctggagataaagctccgggctctgatggtctaaatgcttatttttatcaaaagaattggagcacgttagggggtgatttatgtgctgcactcttggatatcctaaataataatgctagtatggcttccataaataaaactctaattgtgcttattcctaaaaaatccaatgcctcttccctgaaagatttcagacctattagcttatgctcaaccttgtataaaatcgtctccaaaaccatagctaataggatgaagcccatcatggagaatattatctctcctactcaaagtgcattcttagctgacaggcttatttttgataatattctcattgctcaagaaatggttcatgccatcaaccatagaaaactggtaaggttggatgggtggggttgaagttggatatggaaaaagcttttgaccgtgtggagtgggattttcttcttgccatccttcatcatgtcaacttccctagcaaacttgtttctcttattcatcaatgtctttcctcggtttccactatgtttagtgtcaatgggaatattactaaggaaatctctccctctcgaggtttaaggcaaggagatcctctttctccttatcttttccttctttgttctgaaggtctggctgcagctcttcgtattcaagagcagcttggcaattttggtggtatctctatagccagatctgcacctgctgtttctcactttctttttgctgatgatactcttatttttgccaaagctaccttctcatcgtgcaatgcgcttcaagccgctcttcaactttataatcaagctactggacagtgtgttaactttggcaagtcgtccattttattttccccaaacacccctcctcagatctctgatcacttttatcatgcttttggtctttcaaacaggccttttttgtctaaataccttggagtgccccaatgttttggtaggtctaagaaaaacagtttcagctttatcttagatcgtgttagct

SEQ ID NO: 344305 - DNA, 567 bp, Cannabis indica
ttggtagtactcacactgtcactggcggtgtttatgggtcccgtgacacatagtacgtactcaggttacctttggtgtaccggagtcactatcctcctaacgaactcactgaacccagtccagctagggttgtactgagcggaagtcaactgttggtagtactgacactctcaccggcagtgtttataggtcccgttacacatagtaactactcatgttacctttggtgtaccagagtcactatcctcctaacgaactcactgaacccagtcgggctagggttctactgagcggcactcaaccgttggtagtactcacactgtcactggcggtgtttatgggtcccgtgacacatagtatgtactcaggttacctttggtgtaccggagtcactatcctcctaacgaactcactgaacccagtccagctacggttctactgagtggctgtctgttgggttttatgccctaaataaactcatttccatataatcagatttactattaatatagatcagaaataaaattaatgttgcatggttcacatgatttattaatgattatatgt

SEQ ID NO: 344306 - DNA, 821 bp, Cannabis indica
ctcttggtaagtctcttgtttgttcttgaagatttttttttaaggaaaatagtaggttgcatgcttggtttggtttgttgttgctgctgtgattttatgttgttttcagaggtttaagcatgcttgattgagtgaaatgaagctgttattgatgcatgtttggttggttttaaactagtttagaattttggcttaaaaactatgattttcaaagtgaaatgatgaaatctgttgctgcacttgttgcagatgcttgctgttgttttcagaggttataataggcatgtttgggtagattcaagcaggtttgaatgcatgttagaggggtttagccaagtttgagttttgaactcaaagcttggagctttaatggcatttttagtattgggatttctgggttgttttgatgctttgaaaatgttctttagggtttaaatagcaggtctagaagttttggtgtgatttggggttgattggaatgagatatgaatttttgagtgtttcctactcagatcggaattccggttgcggacggtgttccaggattcccagaaccggaattccggttgtggaaccggtctgccggttggaggatttttgggaaccctagttcttcccatttttatgatgtttagggtattgctatgctttttatcgatagggaaacttctagtttctagtttaagtccccgggaagtgatttagcgtatcacttatcagtgttgtggttgttatggtttaggagcctgtaaatcgctgtgcagttcgttccactcaggttgaccggcacacctgaattcggaatcgaggtaagattagta

SEQ ID NO: 344307 - DNA, 907 bp, Cannabis indica
tgaaagtagtgtagtaaaacctatgtttatttcatttattaaaaaaaaaatagaaaattggaaagtttggaaaattctctctctttcaacctctccctctctcacaaaatccctaagcagctagggttctggaattttgtcttcaatcttgccattttacagcaattcttagtgatttcaagctagggtaagcctcttgacaactttcctttagttttcttgagattcaaagttatgaaattatgcatgttttgagagtttgagtcctttacctgctgttgatgtttgaattaagtttctgcagctaagatatgttagaatatgttgatttcggcttgaattagtggttgtttgaagttttagacaagctttgagtttaagaactcaagcttgaagctttaatggtgaaaattgattctaagctttgattgttgttttattgcttggaaaacgtttattggggtgtaatatgcaggtttggaaagtttgtttgagtttggaaatgttttggttaggggtttgatttttgtaggttttctgggtaaaaccgactaaccggttttacactgcttgtaaaaccggttacccagattttgcagcagggggtgaaaaccagttttttcaactggtcgtttcgtgttagtttcaggttttcaggtagtttattccctgctagtttgggatatttttgtattaagttacagtaggttaagtgttggttttaaacctttgtccctgttgtgatttagcggatcacttatatgttttggaatcgatgtgatttaggagcctataattcgccgaacagttgttccacttagattgaccggcatacctgaattcggaattaaggtaagattagtataatatcatgcatatgttattacatgtttagcgtacatgtgtt

SEQ ID NO: 344308 - DNA, 622 bp, Cannabis indica
atataattactgaaatgaggcctcaatcatttatctctattcagccaagcttgaaggaaatcatcgtttcacttctaaatacttatagaagttatagattccatatctatgtttagctgtaaagacaacataagattaacattttgggttattaaataaattaggatttatacatgagatttaattattatttaaaaatggatattgtggaaaatttatttaagttaatatatgtttattatgctatatgtaattccttgtattatgtgattgtgttcggaagttgtggaaagcgacgttgggcctttagagagtcgcattttatatgtttagaatattattatcggggtaatattgttgggtattggaggtgttgtgaatttttcgagatttgtaaaatgactaaactacccttgggtgattttgaatatttgagttatattgaggggtaaaagggtcataatattgggaatcccttcttttgtcttatatgggtattataggttggttttaattagttttatttaaatagagtaatttttagttaatgttagtgaggataagagcaaacctagaaaagcttatcactctccatacccctttctttctttctctcgattct

SEQ ID NO: 344309 - DNA, 675 bp, Cannabis indica
acgtaatccaaagaaagagtataggtggagtacatgttgggaatattttaccaggatctagatttactaataagtatgttgattaacatcctaaatatgaatacttgacttgctatgtgtggatatgcctccttccattgtttgcagcggaatataatgactccttccgtttcgatctctagcccttgattcctttctgtagtagagcattaccaggatctaaacctggatctctttctctccttcgggtttggttaccaccgtcttactcattatgattgagtacttgacttgctatgtgtggacatgccactctttcactaagggttcgtatacggtgaagaacaatgaaggagactgaaatcactatggaaggaactctgcatgtcaagtaggttgaaggcaatagttaaattgtcaaaattggatgagtgagagcatcatggtcctttgaaacaagggcttaaggctgaattatatgtgttagaaaagtataaaatattggggaagacacacttaatggccgtgcactataatggaccactttctagttacaattttttcactttatttctatttctattatttatttattagaccatgcaaactctcttaattaataaattcactccaaaactttttttcttcacaattaagcccttacttagtgaaatt

SEQ ID NO: 344310 - DNA, 438 bp, Cannabis indica
aacctgttttgaagtgtaaaaatgaaaaagtcattttttcttttcatattaaatataaaaaaatatatttggtctgccccttggatcccttggcttgattgggattcctattgtgctgcctttactccaagatgtcaattccctaaagcttcttctctcagtgaacttcttgatgattcgggaaatttttatgctgatgcgatcgatcggtggttcaacccgaccttgactggccgattgggggaagtgataaaaatgccttgggaggaacaggaccatttgatttggataagtaatgaatcagggatcttctcggtcaaaggggcttataatgctcctgatatattgtggactcagatttggaacgctccggtccatgaaaggtccaagttcttcatttggaaggttgcaagggatcttctgttggaaattatttta

SEQ ID NO: 344311 - DNA, 446 bp, Cannabis indica
cctcatttattgtataaattgtccatactgataaacagcatattaactcaatatgtccagccgttactactcagtcaaaatcataagatcccacaatacatagttcataattgcatctttctgttcctcctataggacctcctaaactggtatactgacttaacttattaacaagttaagtattcgtttctgatagatattcaattagagcacttcttatttctacttattaacatatgcttatctcgatacctcgtaaatctttacttattaacacatccttttctcttaataatctctggaacgactattgattctgcatcctaatatgaatatttctaacgtactttgtcctcactcgtatgctttctgagatgaatccctaaaactatttcccatattttagattacccccaagttaacgtatgcttaactccaggtaaacg

SEQ ID NO: 344312 - DNA, 501 bp, Cannabis indica
attcgggtctaggtctgatttggagtacaggtcctcgtccgtttaccgttctggatctatgtccaattttagttatgattccaagtccaagtccttgttccagtcccggtcaactttcggttttggttccaattttgggtcacagggtacgggttcgggtcctcatcagggttggagtcatgggctggtcccaaatccagacaccgactacgagttttttccaagccctgggtccaaatccagaaaaccaatctcgggtcctagtctggttctatttctagtgtcagctcacgagcagggtcctacgttcaagtttgagtctgggtcgggtgctaggtccctatcataattctggatctaggtcctcgttattgtgtgggtttgggtcccggtctaggttcgggctcgagtcctagtctcggttcgggtttaagtctctttgtgggtttttatctaggtttcgagtttgggtttaggtcctggtcctggtcctagtcctag

SEQ ID NO: 344313 - DNA, 525 bp, Cannabis indica
ataaaaaaccttagatctaaaatattaattatcatcttcctaaacgcttataaaagtgttaatgcatattgaataaattttattttattagtggttttattatgagatcatgagaattaggttgaactaaactaattattatgagatcatgagaattaacttttaagatatgttttttactttttttatatattttttcttaaatcaacttaaatagtaactaaaatagattcgatagatccaattcaatctaatagaaaaccagtcaatgcctcaaatggttggaaccaatccaatccaataaatctattggatcggatcggatcggatgacacaatttgattggatcggatcagatgataaaatttaatatccaataaataatttgattggatcggttgggtccaaatccattagatgtgatccaacgaacacccttaaataccaccttgactcaacctttagaaacatgaccagaaattaggagctagagaactctgttcagatgagagagagagagagaga

SEQ ID NO: 344314 - DNA, 1586 bp, Cannabis indica
ggaaaaaggactgtaaatgtaaaaaggaaaaaaaagagagagagagagatagtaataaaagcaggtgatggttggcttaatcaatacggggtggaagacgaggcctcctgcgctcctccagcagggcatcaagtctcctcttcttctcccagaagcaaacaagaacttcctcaggctttagatagaagtcgagcttgaggttttggccattagtctgccaggccataaagacgccgtcatcaaagcgcttagtgcaatgattgcagacaacaggggctaagagctcatctcttttagccttcttctaggtccagtctttaaaatccctgagctctttcacctcaacggtcaaattggtcatcgtttgtgaacccgcctgatgcatctcctccatagacttcagcctagcagtcagatcctcgaccgcctccttggcctccctcagctcgcgccttgccttggccacgaccacgtcccgggtcttcagctcctccgccttggcctgtaacgcctcctaatgcctcctcttcgcctgtgcctccctctgttgagcttcctcccggaatgctttcctctcagccgccaggtctctcaaactcttcatggcctcgtccatgcccccgaactcggacataacgtacccatgatctattaaagtttttgagaggtgaccagtctctccagcgatctggtaaggaaaatgagttaagtgtgagagatcagatgccacagggtggagcacaaacgaaaagaaaaaaccatcaataaagacttaccgcggtcatggcaacgctaatatcctgaacttgatagatggaatttgtggaagcgcaggctgcgtatcttttagccgggagttgggtcaagttggaaacaaattggctagtcagttcggaggccaagggagcaagggcagggccgacgaagcggttgaaccagtcagtcaaaggatccatgttcagatcacaggcgttcctgaaggcctcctcgcgcaaggaattttgtcgagcctcctgtaacacctttttcagggcttccaccttgggatttcccctggtgtactcatccatggcgtatttatgtttggcaactcgaagctgctgcctctcctcatcggcagggaccggagtgaggatgatgccgagaggtacagtgtattcctctgcctcaggcgggatccccgagtccgagctgacggttggagtgtccttcctcctaggctttttagaagactcagcctccaccatcttgaccttgcacttccggtctagcggggccacaatctcgccttcctcctcctcctcgacctccccgtcctcgtcgatcaagacgattgtgcctaaggggacactggaagatgacctcttcggggtcactatttgggcgggtgccgaaggaagggaagggtccgggctgtaggtttcggcaagagttgccaagaggtcttccattggcctggctgcttcaaaaagaagaaaaaaacaaaagtgtcagaatgaccataagaaagtatgcacatgaaaacaaaacggtaaaactagtcctaccctgactatctaactcagccctagcaaagtcttgaacta

SEQ ID NO: 344315 - DNA, 737 bp, Cannabis indica
aggctgttcagactagatggacgccatgaaaaattctaggagtcagggaagttcggtcggatcaaatgaaggtcggggagctcagtttcccctaaatgctcgaggccgaggtagaggtcctagaggcagggcacgtggtcggggtgatgctaacccaccacaggctatccaggctgcccatgtttctcaggaagcccagaattgggaaaacaggtttgtagaaatgcaagccagaatcgaggaacaagataatgaaatccagtgattgagacagtagagtgctcctgcagtgcctgctctagaaattccagtgacacctgcccatgctgcctaggccgaactaatagttgcagcgaatcggatggaacgtctgtatgaaaggttccgtaagcaggcacttccagttttcctgggaggtccggatgttatgaaagtcgagcagtggctaactgtgatcaccaagatattgaatttcatgggcgtcaccgggaatgatagagtggtctgtgccacatttcagtttcaagaagatgcgttagtgtggtgggacatggtgtccatgatacacgatgttacaacgatgacctgggaaaagttcaaggaacttttcaatgccaagtactataatgaggtcgtcaaaagtgccaaaagaaaagagttcactcacttgacactacaagaaaaggtgtttttgccggcgcatttcgttacatgcgccggtaaaagttgtcgagact

SEQ ID NO: 344316 - DNA, 711 bp, Cannabis indica
tctctctctctctctctcttctcgcactctcactctttcactttctctctctttctcatttgctctctctctatcactaccgcctactgctgccgactgccaccaccaccatctcaacgtctcggccaactgctgcctacaccttcaccattttcaacctcaaggtccaccacactcaacaaagcaacgggtaagtatttttcttagtaaatagtgttgctttttgttatattgtgtggatctgaacgttgttagttgtaatttgtggcttttgtgtccttaaaatggaggtagagtttgttccgaacagtctgtgtttttctgggtttttacattttttgcgattttatgcgattcgttgtgcgatttcatgagaaatctgaggttaggggtgacatgattaattttgacgacattgtacgattgttatgcgattagtgtgcgattttgatgttaggcgatttgtgtgcgacattttgtgcagcattatgcgattttgtcatgtatgttttcttgtgcgactttatgcgatatttttccttttctgtgcgattattgtgcgactttatacttcaccatattattgttgtattaggcgacgttgcgcgacttctctagtaccttgtgcgatttatgtgcgatatgtatgctgatttttttttgtttatttttttgtatttttctttgggtacagatttcaatttgtatttg

SEQ ID NO: 344317 - DNA, 366 bp, Cannabis indica
aagaaaactatgcagttcaacgatcttttatatctaatgaactctggattatattcaactccacataatctctataacacttagagaatcatgatctttataacctttagggtggatcataatctctatatacttaggggtggactttaatccacaataccctatgtaacacatattttctttaaacatggaaataatataagttccagtttagttttactgctgtagtaaataatgataccgataaagttctttgataatgtaaaagcaaatctaaccattcatgtggatagaaataacttatcagaattatgagaataagatagaagaattcttgcatagtctattcgaatgacttgagccaag

SEQ ID NO: 344318 - DNA, 1007 bp, Cannabis indica
ttttaatcacctttctttgctaagtaagcttcagagcgaaaagagagattcttgacttcaaagttgccgaagcgccttcatacaaactgcttgttggattgatgttgctcgcacccaaacatctgaccccccgagtaagtctctggtttcctttatgcttatctttgcatgtttatatgtcaaatgcatcctctactttgctgtagaaaaatgtttaggaaaccctaggcccagaaacctatgcgattcttctttatcatgtcttcgtgcgattttacagtcataacacttgtttctgaactttgtaacgtctatctttcatcttgcttattctaagcttcatgaaccttttttgccctaactcgagaaattttttgacttcttgagctctaacttttcgtcaaacataatcgttctttaatctgttgagtactcctggtcggcatatttgcttgtttatcgttcgatattccgaccaaacactcatcttgtgcgttgtcttttgtagatgaactcaggtgagtcttgggaaaacggacatcggatcaaccaggacctgcttcaacttctgcacagaggatcatcctcgtctttgttctagtccaccttcctctagcaaaggacattcttcaaaccctgtacccagccatagaatgatggctcaaacaaagaaaactacgcgtctgtgtgacgcgtctgaccctcaagtggctcgacatgttgctttgcccagcgtcgaacaagatccagccttctagatggaggaggatcatgaaggggacgctaaggtccaggagattgaggggcatgaagatgtacatcctggcagttcctccaaggaggaggaagaggcagaggttgcaacgccaaactatggggagtacaacgaggctaaggagctagtcgatgctgacggagacatcctggttgagggcgtggactacatcagtgaggaacttgctgcggcggttcctcatagaaggcagggtgccttgggcgccaggtgg

SEQ ID NO: 344319 - DNA, 758 bp, Cannabis indica
gggtctggggggtgttgttctgatgcaggccgatcgggttattgcctatgcctcctgtcagttgaaagattatgaacagcgatacctgactcatgacctagaacttaccggagtagtgtttgctttaaagatttggcggcattatctctatggagagagatgtgaaatttataccgaccataaaagtctcaaatatttcttttctcagaaaagatttgaatatgagacagaggcattggtttgagttggttaaggattacgattgtgagatcctttaccatcctgggaaagccaatgtagtggttgatgccctgagcagaaagggtcccggacaggtagctagcatgatcgaaatttcacctcagatagcagaggatatggtcaaatcaagcatcgagtttgttgtaggcaaacttaataacttgacgctataatcagatctatcaaaacgtattaaagtggctcagctaactgatccaaagctaataaaagtcagaaaagaggtttcagctgggtaggcaaaagactttacagtgttaaatagtggaatattgttgtttaagactagagtctgtgttcctaatagtgtggaacttaaaaatgaaattctcgaagaggctcatgccactccatattccctgcatcccggcaccaccaagatgtatcaagatcttaaaccctacttctggtggagcgaaatgaagaagaatgtggtagaattcgtattgagatgcctaacttgtcaacagattaaggct

SEQ ID NO: 344320 - DNA, 804 bp, Cannabis indica
cctctcactgttgatcctaaagaattccatctttggtcattatcttttctagaatagttgaaactgttccttcgataaataaaatctatgtctaaaagtcaaagacttcctatagaatagccattagaaaaattctccaacatcttactaaagtaagttacttgtactagagtaagtaaattactaggtgtaccacaaggcataggtttagataatttcaaaccattaatactaggatcaagaagttttgttaagtccattgaatagacttataatcaaaaactttccgttcttatccttgtaatagaaaacttttggttactccatatgaattgttttaaccatagttctcttggctttacttcttcgttccttattctgactatccattacttgtctaaacttacaaaggattttatcatcagtgtcttccaagtcataacatggtgagttccttcaaattttctcactacaataaggcaccgtgactttttgtctaggaacataagtggtcttgtcctcatcatttgtatcaagataatagaggcagtagggccatcttatgtagaataagatgatagaacactttggaattgaaaatatctcctctactttgctactttatttttcagatttagtgatatacttagaaaagtagtaattgttgaaacaaacagtttcttatcttaatgaccataggatggttcacccccaattacttcagaatagctataaatcaaactcgcaaaccttagttaacagatctagctttttcttaagttcatgatcacgacatccatgaat

SEQ ID NO: 344321 - DNA, 618 bp, Cannabis indica
tagctattgttgtaggagaattcaattagaggcaagtacttactccaggaaccctcaaagtccatgacaaaggctcgcagtaaatctttcagtatttgaattattctttctgattgaccatccatctgagggtggaaaactgtgttaaacttcagctttgtacccatagctttctgaagactcacccaaaacgttgatgtaaactttggatctctgtgcgaaacaatgggtttaggagctccatggagacaaactatctcctttacatacagttcaacatactgacctactacataagtaactttcattggcagaaagtgagttgattttatgaatctatccactataacccatacttaagcatacattcctgtggttcaaggccaaccagttttaaaatctattgcaatgtcctcccacttccactcaagaagggctaatgattgcaataaccttgccggcctttgatgtttagctttaatttgctgccaggttaagcactggacacgaattctgccacatctcttttcatcccataccaccagaagtagggttttaaatcttgatatattttggtggttgccggatgcaatgaataaggtgttggaaattatttta

SEQ ID NO: 344322 - DNA, 538 bp, Cannabis indica
ttacccctttaatttgaatttactcttacagaaaatatcattgtggcctttccagtttaggttcgttaattgtactcaaaaaaaaaaagtttaggttcattaaagttgtaaataatttttggaaatactactgatgcgcacttttctaagtttgatatctatttttttcattttgaataattagcatttttactctttaaatttttggtactgcttgattttaccttttaaaatatacggcttattaaaaatttattttaaaatataacagttacataattataccccttttgttacattgcatttcttttactattaaaaattaacacttttacctcattaactttgaccaatacaaaattttgctcctttttattgaaaaaattaattttaaaaattataattttctatttttttaaaacaattatgatattatattaattttgaaaaataataataagcattattaaaatatttaataaaaatattaaattaattaaaaaaatattaatttaacttaaaaaaacttaaattattc

SEQ ID NO: 344323 - DNA, 331 bp, Cannabis indica
caatagctttgatatgttctaatatcatcatacagaagtgaagatgctttttgtttttttttttcattttattttcttgtaatgtttcttatcatatacattgtctctaaaatgaacaaagttttccaagttgatggcattggtcatagtagtagtagtattagatatatactttaattatatgatttctacatggaattcttctcctagaaaggaaattggtataaattgttctttcagattaattgtgatcttttttaatattatagtttgtttcttagttagtcttcttttatattaatatatataaaaatatgttggaaattatttt

SEQ ID NO: 344324 - DNA, 585 bp, Cannabis indica
ccaagcctagcaagacagtaaaatatcaataatcataaccatcatatcacatatacaataatgacattcatattagtctatttaatatagacccgcgtgttacgctcacaggcctatatatatctatgttgcatagactcacgtgttacactcacatgtctaaatacaataagaccttagaatagttcgtctcagttctagttaccgattccaacccaattatgcctttaatgcataattcttaatttcaatacatacataacatgacataacatttgcacattgataatcactagggtaataaccctaggcccttaaaccgctcatgttagggtaataaccctaatcccaatttctaattactcttaattatcatattcaatataagtgccaccgcgcataactctacgtgctatctactatcttacttgatgtcccgtaaatgtggagattccaaatccccaggtgctccggaccaagtactagtaatcctagtcacaaattctgagattcataagtatagggttaatccttaaatccacttccaacaaatataaaatttgcattcaaattatagataatcac

SEQ ID NO: 344325 - DNA, 628 bp, Cannabis indica
gtccacgtgcaaacaggaaggtcgtgcacaaacttagggagcaaatgttatcctatttttgcaccgtgatgtggcaatgagctagatgacacgtgtcttgaatttccctacctgggtagaaggaagtattcctagcagcccacaaaaggttgatataaatgtccatcgtcaacatatagcaggatatttgagcagcgtaatcaagggacatcaacatccgaccaaagtacaatctcgtgatcaacccacatgcactaggcaggatatgtgagttggcaattttagagataagtctcattgcctccaagacacgaagatagtctttatattcgtgggattaggtcaaataataaaggcaatacgccttagtttcctgttctttgcattgtacttatggaattaatatagtatcctattttatttgttatagattaacggttaccactcttcacgtaataagctcctataaatagtggcataatctcactattgaggggacgaaacacttagttcagaagaacactcgagagagaaaataccgatctaagagagaattactcagagatcaattgtaagagctttagagagaaagaacatttaattcttgttctcaagtcaatacaactaa

SEQ ID NO: 344326 - DNA, 541 bp, Cannabis indica
ttactaaaagatttgtcaaatctatagtaacaatcctgtgcaatatgaccaaatctgaagcagatttgacattgaggtttattgctcgatggagagaaccttcctcctcttgcaaaaccagatccacctccccttgatacacttccaaaagcacgatcattagagtaaaaggagttattttgggaaagattaggactattaccttgagagaaattacttctattgaagttgctattgtaattccctctttgaggatgaaactgattgtgatttccctgctggttttgtctgaagttcctgttgctggtgtaattagcttcaggatgaatgtcagtctcattagtgataatatgagagctgagatccacttcagagtcagttttctcaatacgagactcagaggcaaggagcaaagcctcgatctcagctacagagtagccttcgatccttgtattagcagaaatcacaaaagtatcatactcgctaggtagtcctttaaaaatagctccgatgtgatcgcgtgctgatagaacttctccaa

SEQ ID NO: 344327 - DNA, 958 bp, Cannabis indica
cacctcagccgaaagctccccctccttggcatccttctcctccttcatttgatgaagaactgctcgcagagtagtcctctcatctggaagactgtttacctcagcagataagatctcgatggtctcctcaaaacggtcagcaacctcgagatccttagtcaacacggtgattttcttctcaacggcaaacaacttcttgttggcttcgcccaactctaatcgaacagttcaggcttctgccctggcttcttcagcttccttcttggccaactccgcctcctccttcaagggttcggacaaagtcgcattcttagaagcagcagacttagcctgtgagtaagtgtagcccaacttcagactggcctgacagaggacaaactttagcatattgagctaagtgtggagaattaaagggaagtatcaaaagagactttccctggtgaactccttcaagactccgcccaccagcacatccaaagaagagtcattgtcagcaccagccagttgctcactgacctcaagaactagtcggttcatgtaatgggccagcatctccttgccctttttggccttctggaagcactagcaaaggtggagttgtgcctgcacccgttcaggatcactcctgaccagttcagacccaaccgttggtggtccagactccttggacttagctgttggaaatattttaccaggatctagatttactaccatgtatgtttccttaacatcctaatatgaattctaaaacaatgaaataaacacaaaagggttcaagaaaaccttacattgggtggagcggaatataatgactccttccggtcagatctctagcccttgattccttttctatagcagaacataatcaagatctaaacctggatctctttctctccttccttgatgttgattctccttcttgttggttggattctacacaatcttccacactatgatt

SEQ ID NO: 344328 - DNA, 690 bp, Cannabis indica
agtatcaaacgaaaaataagcaaatacgccgaccaggagtacccaatagattaaagaacgaccatgttcaaagaaaagtttaaactcaagaaggcagaaaatttttctcgagttagggcaaaaaagttcatgaagcttgaaacaagcaaaatggaaaacagacacaatgcagttctgaaataagccttacggctgaaagctaacacaaggacatggaaaagaagagttgcaaaagtttcaaaccctagggtttcctaaagtgttctttctacagtgaagttacattcaaagcataagcatgtaaaggaaaagcataaagggaaccagaaacttactcaaagattcgaatgtccgggttcaagcaagccaaaaattgtctgtatgcacttggacaactttgaagccagaaagttctctcttttcgctctgaagtttgcttaacaacgaagggtgatgaaatgaggtaatgtggcaatactccaagtatttataggcaaaagggtaactgtacgtaaaggaaccttagacgcctcggcttccagccttgaaagcgaatatgggaaatcaaataatcgagtgcaaccgtcagccgtggagagagaaatttggattttcaaaatattaattgtcagagcattaattagccgaaaaccgaacggacacccagtcagcttcacatcgagtctcgaa

SEQ ID NO: 344329 - DNA, 1229 bp, Cannabis indica
tacagtgcttttttcaattacagtgcaatcttcgctaatcgaagagttttcttgaaaaacgtgtcaaattcaaacttttatattaattaataaactttataatatattaaaatatttacaagtgtcgggatcccgttttcaaactttttaaaagtaatattccaaaatacacatttttcaggtcgcaaagcgactatcaaagtacaattcccagatgtcacgagaccgaacactcgaggtcgcgctgctttgacatgtacaatcccatccgagctcagattcactccagttcatttatcgcctttcctttacctacacatgaaagtagaactgtgagtcaacagactaagtaagaaaagcatataacatatcatataacttttgacttgtaactaggcacccatacacctatttacaaggcttaacagatgagtaagaacgttctaactagctgtgctattgaccatgataacatccactattagcactatcatcgcactgcgggaccggcactatgttcgtaccgctatgacagcataaatagcacccaagagtacaattagccatgatatcactcttaaccagtactgtgcccgtactgacgaaccgacacaattgctgtgccgctatgatagcgccaattaatacactctggggtgaatatcactcttaaccaatacgatgcctgtagtgccgaaccgacacaattgttgttccgttatgatatcacctaaaacatatacaatcatagttacaaaatgcatatatctcatataacatgctatgtacagttcttacctgatttctgaattcaagtgtgctggccgacgtgaacgaaaattgtcgcgctagatggatgccctaatcacattaattgtaacacagataagtgactcgctaaatcactttctggggatttaaacttaaaactaaaagttcccctatcaataaataacatggcaataccctaaatctctcaaaaatgggaaaaactagggttccaaaaattctcccaaccggcagaccggttcccaactggaaatctggttctgggtcaccaaccggtcgaccggttgacacaggtcctccagaatcaaaattccggttctctgctgggaaaacaaaaagttctccccttgatctcaaaatccatccaaacttcaccaaactttccagtatacctgtacagtacatttacaacctaaaccaaccagaaaatcacagaacaa

SEQ ID NO: 344330 - DNA, 767 bp, Cannabis indica
atctcaaaatccaattaaaaaccgatccaatccaattacatttatatatattaaaaattatttatataataaaaaatattgaaaaatataataaatatttattatatttttattagatttttttttgtatgttgaatttgtaacacttgattgtttagtgtatttattttcatgatgttttgttctattttattacttagaaatgttattgttttaattatttaaaacttttagctacaatacacttgtaagaatagtatatttatgaagtattaaacttaaataaaaagtgatacttagttttttacgtatttttctttatatttttaagctaatattgaaatttaggtgtgtaattggatatccaattaaaaaactgatccaatccaattagtaattggattggattggattggattttgaggtctaattggattggatcggatgatgatttttcaaatccaattactaattggattggatcggatgaggaaaaaaaggttggattggatcggatgcccacccctagtttcaagttccaactactttcaaaaccaatgtcatcatcataatttataccttgaaattcgtattttaaaattattagtttattatttaattaatttcttaattaaatgtgaaataataaaactgatactgaaatagttattctgtagctataggagacaactttgtaacttcagaataaactagagagaaacaaacagtgcagaaaagtaaaatcacacaaggtttttgtacgtgat

SEQ ID NO: 344331 - DNA, 823 bp, Cannabis indica
gatcttgggttaattgttaatttatataacagagaagtctttgatattgctgaaaatcaatattagtagtgaagatgaattagacatggtcaagatttatttgcttttcgacgaacttgtcataccttaacatgctagttgccctgagttttgtacattaaatcaaaccagttagactgcatagagcaaacagtggaatcaaaaacagattttgtgttttgcttctgtttggccaaaactcttctttgctttcttctttttctattcactactgtataattatatatatatttatattaattatgtagagaaggaggatagattgtaaataattcacttgtcttatgaccttttaatatgtgcaggcaatggtcaggtatgcttctcgagaagttaattgtctgtcattaacaggtatgttttcttttcacttttcacaatttgatcatttattatttcttagtttttaggtatatagtaggataaagatttgcactatttttataattatctagcttgtgaaattcgcaatgtccatttttatttgggagtattgagctgaactactcatgatattacgacatgttccctatatataattatataaatataaaaagaacatttgttatatttgttatctatgaactttattttgacaaagttgtaaaatgtttgaatgggcagataacgatgctatgttttctggaaacttcatgtttacaccaagaatgtgaaatcaaaacccgtttcgctgagatgatgcagattttttcttttttgtgtaatctttttaaagtttctgatacatatttgtttttttttt

SEQ ID NO: 344332 - DNA, 698 bp, Cannabis indica
ctagcagactcagtcatacaccgcactgcgcccttagctcgcagttctttttccaccatttcagcataggtggtttttccaccatccgaatacttttcctttttacggaaattggttggcacaattctcgaggccaacctcgccaaccgatcaaactgcgttgtgtactcagtaacgctcatattttctttctgggtcaagtgagtgaactctttcctcttggcacttctgacggcctcattgtagtacttggcattgaaaagttcctgaaacttttcccaggtcatcgttgtgacatcgtgtatcatggacaccatgtcccaccagaccaatgaaacttcttgaaactgaaaagtggcacagaccactctatcgttaccggtgacgcccatgaaatttaatatcttggtaatcacagttagccactgctcggccttcataacatccggacctccaagaaaaaccggaggtgcctgcttgtggaacctttcatacagaggttccatccgattcaccgctatcactggttcgacctggacaataggggcaggtgccactagaatttcttgtacaggcactgcagtagaaccctgctgtctaaatcgttggatttcattatcttgttcctcaattcttgcttgcatttctgcaaacctgttgtcccaattctgggcttcctgagtagcttgggcagcatg

SEQ ID NO: 344333 - DNA, 678 bp, Cannabis indica
ttttttttttttgattaaatacttacaacttgcaaacattcattctaaggtaataataatttttttttctcatcatcacttatacatgaccatgaatattttcttatcaacaaaactctcacacatttacatatataactaaaaggggagtaggtcattacccgctatcacaagggggccaaacctctataacaaatcccgttgtctattgctttttattcttatttatgcacacacttggcaagcatcagatctgcacgaccccgctgtcggttgataaattttcaaggtcaacacttattctcgtggtaaataattatttgaatcttattctcaatactataaactaggggtgttcatcaaactgctcaaaccgtccgcactgcaaaaaaatgtggtttgaaattctttgcggtgcagtcgtgctttgaatttttcctaaatcgcgcggtgcggtgcggtttgcggttttgaattgttaatatgcagttcaaaccgcactgcaccgaacattataaaaatactaatttttatatttatttaggtccaatatgtgaatgtccaacccaaagtctactaattattgtattattaaaacataattttttttcatatttattttcaagccttatggtatttttgataagtgttgctcaagatttgttatatttgtgatag

SEQ ID NO: 344334 - DNA, 697 bp, Cannabis indica
atataatacaatacaatacgacctaataagactatatacaatttgagtgtgtatctaactgttttgtctaaaaatggggtactttttgagtaatttgcggcataaatacctaagtttaaccaaataaatacctaaacctaagtttaatttttagcggttataatacctaagttatattttttgaactctgtaagtacctaaccgttaaatattaagtcattatccacgtgtcattttcttattggtatatttaaattaatttttttttaaaaaaataaaaatctaatgacttggacctaatctagaaaatgccacatggcaatttacttataaccgctaaaaattaaacttaagtatttataccgcaaagtactctacttttttttatcaagttttcagtcaagagtatttttagtggatttttttttcttctaggtcataatatatgattcttctacgtgaggctttgcccttttagtatggtacgttcttcgcatgcatagttgtgttgtctatcttctaatgcatgcagctgacacgcgtcctgactcaccttttagtgcttatgattgacacgcgtccttagtagttgttttcaattatattaagattaatgttttctttgttggaaatattttactagaatctaaatttacaaacaagtatgttgaattaacatcctaaatatgaatatctc

SEQ ID NO: 344335 - DNA, 832 bp, Cannabis indica
agaaaaaaaaaaaattgttttaagcattgtacatccctttataattccaagaaaatccaaactcttcaatcattagaatttcaactcaggataaattacttttcaaactcaattttttttgtgtgtatgtgtgcaatcaaatcatcatacactaacattcaaattaatccatgcctgtcgacaattaatttttgtctcaaaataaatgtgtatttcaatgaaaatctactccataagcttaattatcaaaccattctccactaatgtaattacacacaatctaaagatcaataggactttataggattataatgtaaggctagggtgaaaggtagataaagaaggttaatttgggctcaaatcacaccatagcatacatatacaacattctctcaaagaaattctatttggattcctcaatcacttccctcagtaatttcaattttatatctctctttctatataaaacttactattccctcacacttaaaactgttgcaagtattttttttttatttatttttcattgatttttttaatgaatacttacaacttgcaaatattcattctaagggaataataatttttttttcatcatcacatatacataaccatgaatattttctcatcaacaaaactctcacgcatttacaaatacataaaacatcaatatactatggtgtgaaaaaggatgaataagaattttttttttaggctcaaaggttattgataaggttaaaaagaaaaaatgagatgtcaacatttaggctcaaattgggtaaaactagggaattcacaaatagggtaggcttgaaaagctcaatcgatccaa

SEQ ID NO: 344336 - DNA, 945 bp, Cannabis indica
ctttagtggacttagtaattggaatttgatgttatattatgtttattttggctgaagtaaaggtttatcatatgcatgttttctcattttaatcaagttagaaaattagaaaatttaagagaaattcaagagctcttttcctctctctctctctctcgcgtcgcgtggtgtagttgctagggctgggatttctcttgattgtcagcttttcatcattagttgagttcagttgtgtagatcttgacttgtcttgttatttcttgagtttttgaagaaatggtaggttgcatgcttagtttggttgtgttgctgctgttagtttttgatgatgtttacagaagtttattcatgattatttgagtagaatagagctacttgtgatgcatgttagtggtgttgtttaaagttatggagtttttactcaaagctatggtttttcaaagtgaaattgtgaaatttgttgctgttgagattgtttgtgcttgaattcagtttctgcagtttttatatgcatggttgagtagatttaagcttgttttgatgcttgtaggtgagctttagccaagtttgagttttgaactcaaagcttggagctcacatggtattttttgtatctgtacttgctgggttgttttgatgctttgggaatgttctttggggtatattgaacaggtctggaaagtttggtatgatttggggttgtttggattgagttatgaatttttgatcgtttcctgcgaggaaccggaattccaaatgtgcaaccggaattccggatggggttcaggaattcccagaactagagttccggttgcataaccggtctaccggttggggattttgaggaaccctagtttttctcgtttttatgttatttggggtattgccatgctttttatcgatagggaaactttaagtttctagtttaagtccccgggaagtgat

SEQ ID NO: 344337 - DNA, 937 bp, Cannabis indica
ggtacctctcctgcttatgagctatggaaaggaagacccccaaacgttagccacatgcacattttcggatgtacgtgctatgttctgaatgatcgtgatcacttggccaagtttgatcctagaagtgatgaagggacatttctggggtactccatcaacagtcgtgcgtacaaggtattcaataaaaggactctctcagtggtcgaatcaatgaatgtcaaatttgatgacttagaaggacatgaagaagtatgtgttgaagatgatgcccctgtcctctctggacctagaccaatcatcactagaccgcctcaagtttatcctgacactcctacagagtctctaaatacagaaccaggtgtatcaggtgacaatcaagcaactgccagtgacccagagagaggaaatgaagttaatagtgccctgaccaaagaacctcaacaagccaaattgtataaaaatggacccccctcatgggttcagaaagctcatcctcaggccactgtcataggagatccaaatgacaccatggtcactagacgaaaactgcaaaacttgttagcctttgcatgctatctatcacaaattgagcccaaaagtgtccgagatgccctgttggataatggtccctccgccagatggtgcaaatgttataggaacaaaatggctctttaaaaacaagtctgatgaatttgggacagtgactcgaaataaagctaggcttgtggctcaaggatacagtcaggtagagggaatcgactttgatgaaacctttgcaccagtggcacgattagaatctataagactgctactcatcattgcatgcttcatgaagattaaactcttccaaatggacgtcaagagtgcttttctcaatggggtaattcaagaggaagtctatgtcaaacaaccacagggatttgaagatccacatcat

SEQ ID NO: 344338 - DNA, 529 bp, Cannabis indica
ttttttttttacttgttagtctaagtttaataataaaatattgagggcttacagaatactaacattagatgagttatgatactcttctcttcaaatatagaaaagagaagtgaaaagatgacaaaaaattagcttcatcaaatgagctatttcagtttcaaattttaaagaatactatagaagtaatagtttttcttcaaataatatttaatggctattttattcatgctctattattgtatattttatatacattctaaaataatatttaaatgaatgtagaaaaaaaaaatataatgtatgatacaatataaaagtgttaagtaaaataaaaaaaggtaaagtttgggtgaaatattttaaaaaataaaattgagaaaccgaggtaagtgctcttttatcattaattgaaatcctttgttaagaaccacttggggctagctcaagtggccataggtgggtgtgtgagtgttggaggtcctgggttcgagtcccaggtaaaacatgatgtaatatataaacgcttgaa

SEQ ID NO: 344339 - DNA, 1239 bp, Cannabis indica
cagcaacccgcagagaacgaaaaacacttagcgaattcagctttcgcatcgtgagtcatcaaggaaatccctataacttggcgatcagattacaatgatatggcaagctgtccaaatcccacgatcagtgtattctgtatttactatgcaatctttctgctatatcaattgtaacgagaagggaaatacttcctctccaagctcaaagccctataaatagtgatgcatgttcaattattaaaacaactatccaatttattgcatgtgtgtgttttatattgtttattattaaaacaagttttataaaacctattattgtttgatttaaatttccatggttaacttgttgacagatccaatgatctgattttaaccaatggttcaattgtcaataggtcaaataaataatttgtaacaggtaaattttacaatcttctttcatctgtgtataaacctagtaacatgataggatccatcaaagtcagtgtgtctgtgtgagcttatatgtttgctttgggcttagatgcatatagggagcccatttaattcttgtaatttaagtggacttggttgctaaataaaattatcacacttgatagattttatttaggtccaattagcatttgggcctattcaattaataatagtagtttaaattatggttaaattcttctcttttgggccttgtgtgagatttagggggccattattagtggggaagacatactgaacccaaccctccctcatatgaacaactctaattgtgaagacccattcgcctgatttgaataactctaataggttaattaaactagtttaacctaataaaattgattagcaacataattaatttcaaaatatatgaaattaatttttcatcatattattttaaaattaattaaagaaaaacacatttagtttaatgaaattcaaattccagataaactagatgtatttttctgtatttaattaaataaaagaagttataactaattagattcttctggatgcttaattatttaaattttcaaagaaaatatatttaagttgaaaataagttttcaaactaatttttgatcaacttaaattagaatattttgaaattaataattaagtagattcttcttgaaaattagttattccgatattctttaaaatatttttaagtcagaaatttgttaattttgtatcaacttaaatagggatactttttaaattaaggtgattagttcaagatac

SEQ ID NO: 344340 - DNA, 773 bp, Cannabis indica
tctataaaattcctgtgtcttactattgctttattatatattcattacgacatatcgtttatcgcttataaaaaagactcattgtcgttggctaaaaatgaagtcaatattttggttactttcattgagagaagaatcacaaatcgctcttttctacactcaaccgtcaacacaatggtgcaaactcgcagaggcctgtctgacccagaaaattcacagatgcgatccgacattacagaacccatgaagttcaagggttctgcctgctgtcaatcccggacagacgggaagcgtggtgaatggtgaaacaactcctgttactgaaactgcgcctggtgtgcaagagactgggaataacagttctgcacacagccagggcattcataacacgactgttctgcctggaaccaacacccagacgaccatcggagacgcaaccgaattgcaaaatctccgtttgcgcttggactcatgcagagtcataacaacactcttcatcatgatcaggatgaactgcgtgctacagtaaatctcgcgtttgacgaacaaaggcgtatcttcgctgattggagagacaaagagatgcaggcattgatggctcaccatgcagagattgaagatcgtagtcggcaagccaccgtgctgatacgaagagcctatcaaactgtaggctagcaaacgtcgaacgtcattcccctgagagaaatggaagatgacccgatgatgaatacttcccaaacactaatggtcagccgcccaatccccggttacga

SEQ ID NO: 344341 - DNA, 731 bp, Cannabis indica
atagaatttatacattaaataaaatcatgaaataaatcatgtgaatcatgcaacataaaatgttatttctaatctttattaactagtaaatctgattatattgaaatgggttttatttagggcacaaaacccaacaaaaactcagccatatttcatgctagtatcaaggagaggaggaaaatgaatagcattctgactattgaagatcatcagggggtgagaacagatgaccaaaagaagatttctgaagcctttatttcattttatcaccaattgcttggttctaaaatggagtacaggaagaaggtcaactcaaaagtcatgaagcttggttcgttggtctccaattcacaagaagaatacttactaaaagagttctccaaagaggaagtcaagaaggcattgtttgatattccaggaatcaaagctccggggccagatggttttacaagctgcttcttccaagacaattgggagatgctgggagatgacataagtgaagcagtcctttcattcctacaaccagggaagatgctcagggagatcaacactactgttcttacacttatacccaaatgtaagtgtcctaacacagttagtgaattcagacccattgcttgctgtaatgttttatacaaagtggctactaaacttatctgctccaggcttaaagttatcttacctgatttagttgctcagaatcagggaggatttattacagacaggtttat

SEQ ID NO: 344342 - DNA, 664 bp, Cannabis indica
agaaaaaacttatgaaacggaaagtcgccgcctgagacgccgtctggaagaggcgcaacgttgaaacactgagtttgaacgagaggcagcctcggccagggcggagcaggagacgaacgctcaaaatcaacctgaacttggagtgagaaaaccacaaggcagacctcgtggctcacgaaccaggagacgagaaaaggcccgggaagaacaacccggggaaaatgagacaccccctgagaatcaagatgaacagccagaaaggagacaatcggaaactgatgaacgagaaatccctcatgaaaaatgagaaggatcttggaactcagtcgggagaacggagatcacctactaagaatcagcaacgttcttcctaaacctatagagcgaggactcgtacgtatccttatgggggaaatacgacaaactgctctcgggaggaaagaacagagcgtgaagaagcgagtgtgacttcgaggcaatccagaacccatagtcgatcaactcgaagaggggaacgtactcaacgagctaatgatcgggaaagtatgggaacaagtaaatctacgagccacttaaagacaaagtctatgagtagaacgcgatctatgagtaagacgagatctgccaacaattactcccattcagatctgtgagagcacttgaa

SEQ ID NO: 344343 - DNA, 1278 bp, Cannabis indica
caagagtgagagagagaaaactttaaggtttttttttttagtttttttaattattaattaatttttttaaaaaataaaatatgtatttttttttataagaatctaattttttaaaggaataagagcttgatataatttttatttttcaaactttagtttttaaaataacttttataatttttaaataattaaattaggtgtaccaatataaatgtgacacatgtttaaaattgtattcataaccagctatgttggcagataacaaaagtaaatagatgacaccttaaatttgctaactactcaatagtttggcaggttttaccgttaaaatttgagcttagaaggttaaatacaagtgaaatattagtttggagggtttaactgcaaaaaaaactctttttaatattgaataatttatatatataaatatcaaaaaatttcttattcatatatgaggtcatgacttttattatacgaagaattgagatcacttagccatgaataaaacagtcagtaacatattaaagttttggaatctttaatcaacagttgctagtgcggttcactgatgtccattattcgatgcaagcaatcttaattcagattgctgatgtagtatgacatctaagtgaaggtattttatattataaagattatatattacaatgactgatatataattaagtttatctttatcaaagatgttgtttactataaagacctaattcatatcataaagatgatcattagtagattggcttgaatcctaagtaatcatgaactcatgttcatgttattagtttctttgatttagtcatgaaagtttctcagataagatgattcttacaacttttattttgggaatctaataatatcgatggttgggaacatgatctacaattatagaatcctgactttcttaatagatcgaatgttggttggttccctttaagtgttaattctagaactgaaaagttgtacaagcatttagattggatctaaattatactttcactagtgaattaacggtactaaaggataaagaagtaattagaagggccaaacggtaatttgaccaaaactaattatgaacctacacatggagggttaatcgctgaaattgataatattaatggacactacagtaaaaattagtaaatattattctataattaataagggttcaattttatatttacagtggagtatttatagcattaataaataggaatctttaattgataagatccaataaataatgtagtttattggagctta

SEQ ID NO: 344344 - DNA, 480 bp, Cannabis indica
gaagggttcgaataggatagagaggggctcaaattttttactgaaggaaagtgtgttcatcatcttttaatttaaagtcaccactatctatctagaggattccaactaggtttaggtttgaattattttgcattaaaaaattgataaaataaatggtaaaatagcctataagtggccggctatggatgtgggcccccgctttgtaattttgctattttttcaactatttatcttattttctcaaaatgccatttttccaattcagccacttaaatgccaaaactatttatttaataattaaaattaattatcaaataaaatgccaaaactatttatttaataattaaaattaattatcaaataaatttccatttaatatagttattaattagacataattaagtttcttaattaataaataagacctagaatctcttttcttcacatttaagccctttcttagtgaaaattcataaacta

SEQ ID NO: 344345 - DNA, 740 bp, Cannabis indica
aagcataacactatctatttatatgaatttttttagagttaggtttaaattatatgaaattaaaaaagataaataaatggctaaaaatacacttaagtggctgaccatacaatgggtcccactagttgcaattttgcaattttattcaataattcatctttttttttttttcactaatgtcatattttctaatttcaatcctttagatgtcaaaactatatatatatatatatatatttgataattatagttacttatcaaataaaatttctattgaacttttttgttaattagacctttcagtctcttaattaatgaataaaccctaaaatttcttttcttcacaattaagccctttcttagtgaaaattcataaatataaggcatagtctaatttagaattataattgatgaattaaaaccaattaactgagtctacaagtagtattatctcaactagtgtggggaccatgagcctatataatcaagcttccaattagtatagatctagaatttaccaagtaaattccataacttattaattcttcctgactccactataaatttagaattgcactcttaattatatagaacactctatatgttccaagatatagatacgctattagttatccattattatcagctgacattgtactttactttggagtataatataaaaatgttaaaattgttttacaaaaataaaaatccacaaaatgcaaagcaaataaataaaa

SEQ ID NO: 344346 - DNA, 589 bp, Cannabis indica
aaaataaccagttatttatacaaacagtactgtaactataaaaattattttaaaaaaaaacctacaaaagctaaaataatagtaatataattttgttaaggcaataaattaagtaacaatatctttcatataatcaaaaccattttcttaatgaaaaatccagctatacatataccaaaacttatataaattttacatgttttttataagctcaaaaacttggtcattaatacaatactaatattaaaaccagttacaaacttcttagaaaatctactactagaccatcaacccactaccaaaacattaattgttcactaaagcataatattaaccgcaaaagaagaagtagaaaatataataagagtatattcactagagttgttatcttaatgaaaaaaaaccagttacagataccaaaaattataaataaattatacatgcttgtattctatatactgtatgaaatattgaacaaatcgaatacaataccaaaataaaactagttacaaacttcttaaaagctctaagacttaaccgtcaacccactacactaccaaaaataatcattatatatccactaaaataa

SEQ ID NO: 344347 - DNA, 628 bp, Cannabis indica
aattgttattcattgaataagcccaatactaattgggcccaaataaaattaccttatgtgaaattttattttagcaatctaatccttttaattaataaaacttaaatgggcttcctatatgcatctaagcccaaaagcaaacatataggctcataggtcaaatgatttggatgtgccctatcatgttactagatttacacagatgaaagaaattgcaaaatttacctgttacaaattatatataagatctattgacaattggtggggactgtgtgcatgtggggactgtgtgcatgtggggactgtgtgcaagtgaagggagtgtgtgcaagtggagggtgtacatgcaagtggggggctcgcatgcgagcccatgggaggctcacatgtgtgcaagggaagagcgtacaatcatgccttttgtagacctgaccaagggtacactgcaaccactctcctacagtatgtactttgggaccaccacgtatgtacctagggaccaccacacatgtacccgaggaccaccacgcatgcaaccagggaccacgtgcgtgcacctggagccacacactgcaaccaccctcttgcaacctgcaactggggaccatctgacactagacaagggtac

SEQ ID NO: 344348 - DNA, 1088 bp, Cannabis indica
aagcagtatgctcaggagcctatgaaatcctgaagatgaagccgaggctgaggctgaggctgagcaggtgaccccattgaagaggaagaagaaaatcttaaccacgcccaggcctgttgaacatgcaattcgcataagggagcccatttcacctgttcggccatcctatccctttgctggaaaagggaaggctgttatgtctgagataaactcgatgtcaggtgatgatgaacttttcactttctgggcgggcagtcactctgcgttttacttcttttttagcttcttgactttcatgctttgtattttctgctggttttttctaaccacgctgtttttgttctgtgcagacatgtctcggcagatgcttgatgctctaaggaagaggatgggcagaagctctagcgcctcccctccggccaagaagcttaagggcggagagggatcctcggagaagagaccttctagagaggttattgatctttccgaggagctgactgctgcaaatccttctactcccaaatctgccaagtctaaggagtctggaccaccaacaactgggtctgaactggtcaggaggatccctgagcgggtgcaggcaccaactccacccgtgcccgtgctgccggaggccaagaagggcaaggagatgttggcccactacatgaaccggctggttcctgaggtcagtgagcaactggctggcgctgataacgactcatctctagatgtgttggtgggcggagtcttgaagaagctcaccagggttagtcttttttgatactttccttttaacttttcatacttagctccatatgctgacttttttcctttatgcaggccagtttgaagttggcttacacttactcgcgggctaaatctgctacttccaagagtgcggctctgtccgacaccttgagggcggaggcggacatggccaagaaggaagctgaggaggccagggcagaaactggagctgttcggcatgagttgggtgaagccaacaagaagctgtttgctggcgagaagaagatctccgtactaacaaaggcctcgaggctgctgatcgctttgaggaaaccatcgag

SEQ ID NO: 344349 - DNA, 951 bp, Cannabis indica
gttcaggctgccaagactggaaagcgccaacaaggtacccgagttacgatcatttcctggtctactgaattactatcgacggttcattgagagctactctgcaagagcaaccccctcttactgaactgactgaaaaagataaaagatgggattgggatgcttcttgccatagggcattcgaagacctgaaggctgcggttgccaaagaacctgtgatggttctttctgattgtttgaagccatttgaagtgcatacttatgcgtctaattttgctataggcgggtgcctatgcaagatggccaccctgtggcgttcgaaagtcggaaattgaatgagacagagagaaggtatacagtccaagaaaaagagatgactgccatcattcgttgtttgagagtttggcggcattatcttttgggatctacctttgtggtgatgagtgacaatataacaacaagctattttcagactcagaagaagttgattcccaaacaggctcggtggcaagactttcttgctaagtttgattacaagcctgagaaagcaaatgttgttgctgatgctttgagcaggaaggttgaattggcagttttgagtaggccactttgtccattaactgaaagaataagggagggattggctagtgatgcgctaggccagaccctggttacaatggctaaggagggaaggtcgaagagatttgggctgcaagatgggctgctgtatgctaaaggtagtcgcctatatgtcccaaaggttgctggtttaagaagggaaattattaaggactgtcatgactcactgtgggccaggcatcctggaatgaaacgcaccttggcacttattaaggcaatgtattactggccacaactcagagaagatgtggaagcttatgttcgcacctgccttgtttgtcaacaagacaaacctcttcaacaagcacctgctgg

SEQ ID NO: 344350 - DNA, 550 bp, Cannabis indica
ttgctgatgatagcatggtcttttctcctgtccactctcaagccagtaattcccttaatagtattctcgatctgtaccacaaagctactggtcaattggtgaaccgtgagaaatcctccattctcttctcccccaataccacttctctggcccaagatcttttccgccacgatctccagcttatgggagaaggcttcatcagcaagtatcttggtgctccccattgtgttggcagggtttcaacctcaatgtttcactacttgcttcaaaaggtttcctcaaaacttaattcctggaatgaaaaactcttctctaaagctggtaaagagatccttattaaagcggtagtccaagctattccctcttttgcaatgtcaagtttcaaaattcccaaatccatttgttcaaaaatccaaagcatgattgccaaattctggtggggatctcagggcacaaaaaaagtgcattggaaaaactgggactctatttctgtttccaaattctttgggggtctggggtttcgaatcctttcttctcataaccaagctct

SEQ ID NO: 344351 - DNA, 823 bp, Cannabis indica
cagaatcatctcacatgaatgaaaaggaaaggcagcctcgactagggaactagggaatccctcgccataatgagaaaaaccctagaaattaaccaaggtcaagtggacttcctccaagacatcctcaacgtccttctcaagaagatagagaaaatgtacacacgtacttgaatagaggacgtgtttataatctcttccaaaggagaaggccagtgcgagatgaagcaagctcgagcacaggaaaatcaaggtctcaaggacatagtctgtcatgtagacaaacgtgagaaggaagtagatcttgatgttattatgctgaccgagaaagtataagtaactcacgaagttatcaatctgagagttactcggagacaatatctataagcaactatgaacgaaggcagcctgaccttcgcgagcacctaaatcgaagacagtctgaccttcacgagcgtctaagccaaaatgcacctgatttgcgccatcaactttaccaaaatacaaatcagcaacaagtggatcccatccagctatgaataattgaactagaggagaaattagaaaatatcaagatggagaacatggtaaattgccaggctacgactcggatgaagaaatcgagccattccatccagatatcttaaattcaaaatttcctcatggatttaagaatccacatgtctcgcagtactatgggaccatagacccgatcgttcatttaacaacgttacactatatgcgaccaagtaatgtttgaataacttgcgttgtatttattccatcctccttacaggggctgggagtagctggttcgataatttca

SEQ ID NO: 344352 - DNA, 616 bp, Cannabis indica
gatgagaccgaattgactagccacgacatcacaatgttattacagcaaagccaagagtttaggagattgttaccaggttcaggccgtgggagggagccatcgatgaattgaagcttgttcttcacagccagggcaattgtgattccacgtttccacgactagtaattggtaccgttgaggactgtagagacaagaacaagaacaggatggtcacctgagcttaggaagaaggggctggagacatcatcgttgatatggcgattgttactggttctctgatcttgagctggaagctggggttcgattcttggagattggttctcgatatcatcatgaagctgagatctggatagtgcaatagttgcttgacgatttgttggtatagattgggcaagaggggctgaggtaacatcaagaggagcatcagagttgatgttgtcgtttgttgatggaggaacaccatcttgagatcttgtggaaggtcttgccatggaagctgtgggcaaggttacttctgataccatatgagaaacatagacttgagaggtgaagaagacagagtcttattaatctttgttcacttaaatgatttttacaagagccaaggtatatataa

SEQ ID NO: 344353 - DNA, 773 bp, Cannabis indica
gttgttctgttgcttgggtattatttttattggggtataatatgcaggtctgaaaggtttggtaaggtttggaatcaatttggttaggtttttgaattttttgaggttttttgttgtaaaccgggtaacaggttttacaggccctgtaaaaccgattaaccagatcggctgctaggttcctcaaattttttgtgttgtcgattcgtgttattttgagagttttggatagttaattccctattagtttagggtattgccatgttaaatttcaatagatagatttttggtttaaaacctaagtacccggttgtgatttagcgtgtcacttatccatgttatgagcgatgtgatttaggggcctgtaatttaccgagcaattatttcactcaggttggccgacacacctgaattcggaaacaatgtaagattagtataatgttatgcatatgtatttacatgtttagcgttcatgtcgtttatgcctgttagagtacattgatagtagtaatagtatacatagaattgtactgattactgataaatgtatgttgactgaaatactgatcgatgctatcacatcaatatgactagagcatgattggcatattgagtataggttgacattatggtcgatagtattttcgtatgaacgttctagactcagtaccgcgtgggacacagggatagggttatggttgggtgtataggcgcctgattataacccgggatgttattatgttttatgttatacttttcttgctgagtctgttgac

SEQ ID NO: 344354 - DNA, 1563 bp, Cannabis indica
tcatactaatgtgagagtcgagtcaagatgaggtagcggcccgacaaggtggaagaatggggcccaacaagtttgaataggtactcactattaaaataattatataaaaatgttaaaatttaatattttaacaaagataaaaaaaatgataaacttcaagcgcagcaaaataacaaagaaacgcagcaaagtaatttactcattttggtaaaactaccaaacccacaaagagatatatatttcacttatcacttcaaaataacatatactctctatctcaatctctccacctaaatctcaatacaccatttgcttcttcctcactctcaccacatgataaactcacacacacttctcttttgacaactcactatttttctccacacacacacctctctcacacacaaaatatatatttgtaaggttacaaaacttgggcatcaagataacttagagaccaagacattccaaagcttccttaagaagacttttcaaaacttggtcaccaagactttcttttcccataattaatagttatcaaaaagaaattgcaacttaaaaaatatagataaataaataatttgagtcaaactccaacaatctccaccttgactcaaattctctaaactcataactcaaaccatcaataaaagtatatatgtactgaattcatactctcattgaacttcacttgagcacttgtcttcacattcttcaatctttcactgatgtcttctttcttcaaacaacttttaactgaaattagagtcttctccaccttgtcacattcctcatactaatcgaatgccttttgtgacttgactccacattcacaactccacctaaaatagtcttcctgactagcttatacaaattttgctctttcttacccttcacaacaaccaagccacctttcttgatagttatttcaccatcttttgcggaatagacacaacctcgagtattcaaagctcccaaagagattaaactcttccttaatgttagaacatgtctcacatcagttagtgtcctcacaacaccatcaaacattttcaccttaatagttcatattccaacaactttagagctagaatcatttcccatcaaaacagtacaacaaacatatgccttataagtgtcaaagtactccttatacggggacatgtggaacgaacaaccagaattcaaaatccaagagttagaaaagtttgcactagctatgatagagagaacatcagagtcactttcaaagccttcgccaacaacattagtggaatttgatgtgtctttgcattcttgattcctcattgcttcaagatgcttggtcaactcttcacaatttcatctaacatgtccctttttgtgacaatagtagcactccatttcctttgaagagcatgaatgagcgcgattgtctcttctgtcatcatatcttcctctcgatgtactcctaccacgacttgattctaaccttgtcataagagcttgatcagtatgggacacaccacttggtttcttgatattatctgtctccaaaagagcagttgacacctcatctacagt

SEQ ID NO: 344355 - DNA, 614 bp, Cannabis indica
ttctacttcatttttgtgattaaaaaattagaaaacataattgttaccaaacgacacctaaatttttccaggatgtcttaaataactataacatacacaacaataaaaaaaattaggctaataaattcttttaaatgccgaaacagataaacggtgcatcaataaaccattttttaaagaatgtacattgtacaagcacccaaaaaaataagagtgctaattacaacctcttagttaactttcacacccaaaatcacatgctgaaatatattttttttcaactttttacagcaataatcgttatagttatagtatcattcctgtaaattttaaaaaaaattatgaataatttacaatatcgaaaacagagtttatgatataccaactaccacacgcgttcaaaagtacttttagcactataaactggggtaaataccattttggaccctgtgttttgtaaaagttacagattggaccatgtattttgttaaatgacaaaatggaccctgtattttctaaaatagtaaaaagaaccttgagcttaatttttgataactttttttttttttttatttccaccaacttggagacaatgcttaatacgaacagataca

SEQ ID NO: 344356 - DNA, 623 bp, Cannabis indica
tgtgatggatgtctagggtttcttgtcatggtattagacaccaattggccagactctgttcggcgagaagacattaaggtggtttaggaatttctagatgtttttcctgatgaactctcgggtttataacctctgcgagaaattgattttataattgatttggcacctggagcagaaccggtctctaaagccccataaagaatggctacagttgagcttaaagaattgaaaattcaactccaggggttacttgacattgggtttatttagcctagtgtgtcaccctggggagctccggtattgtttctcaagaagaaagatgggtctctaagaatgtgcatcgactatcgggagttaaataggctaacaatcaagaataaatatcctttacctaggatcgatgatctttttgatcagcttcagtggaagacggtcttttcaaagatagatctccgatcgagctatcatcagttgagaatccgagaggaggacattccaaagacgactttccgtactaggtatggacattattaatttttggttatgtcgtttggactaaccaatgctcctgcgacatttattgacttgatgaatagagtattcaaggatttcctcgatatctg

SEQ ID NO: 344357 - DNA, 766 bp, Cannabis indica
atattctaaatgtaaaattttttcttaacactcatctttggttttaagtaaataggtccaaacacatcttttaaaatcatcaacaatagataggaagtagtgtttacctaaatgtgttgggattctacttggcccccaaaggtcagcatgcacatactctaggactctctttgtgttatgagttgctgttgtaaacttgatcttatgttgcttgccataaacacaagtctcacagaatggtaatgcacatgtctgaagcttttcaataactcccttcttgtgcaattctctcatgcattgctcactcatatgttcgagcttttgatgccatagctacatatcactttctaaaccttttactgtatctgcctcggccacaggtacagtttcaccctcgagtacatacaacccgtgtactctctttcctttcatcacaagcattgaaccttttgtgatccttaggctcccatttaaggacttatagccataaccttcatcttccaatgttccaagcgatatcagattcctccttaattctagaatgtgcctcacattatgcaaaatcttcacttcacaattgaattgccttataaccaccttaccaattccaacaatcctgcaagaaacatcattacccattagtactctaccaccattattggtttctaagttgggacacatatgataagtgcatccagaatcaaggatccactctttactgttattatttctgaaatagaaaataattccccatctgaacttccat

SEQ ID NO: 344358 - DNA, 836 bp, Cannabis indica
ttgtttttctctatttcaggtttccagatttttagatgaaaatttgtcaaatatcgaaaaatggtggcctataaaatagagaaaattttgcaggaaaataaagctgaaacttcaagcctaaatttaactatgttatgtttagattttggaaaaagtgaaaacatagaagttttagatctctttttttagctttccaacgcattcagaatcaactcgtgtgcattttattgagagaggtcaaagtagaaaaaaaaacgtgttgtcgtcgtaacgaggtttgtggtggtcgcgacgagggactacaaaaacaccattttttcacttttctacagccgtcgcaacgaggctattggccaccgtggagtcggctctgtacgagtcaaggagaactacatcttttcccaattttaggccaaaaaacactattttaatgaaagggggttgtgatttttgatggattatttagaattagtgacctagaagcaaaggagagacttcaagagcaacgtggaggcaatccagaatgattatgccaattagttcttctcttctcttaatctttctatgctattttctattttgattttaattttagatttgttaatggagatgatgaactaaactcatatttggggagatgatgaatgctctgtacgagtcaaggagaacttcgtcttttctcaattttaggccgaaaaacactattttaatgaaaggggtttgtgatttttttgatggattattcagaattagagacctagaagcaaaggagagacttcaagagcaacgtggaggcaatccagaatgattctgccaattagttcttctcttctctt

SEQ ID NO: 344359 - DNA, 904 bp, Cannabis indica
atcgagcttccaataagtagatattgaatttgccaagtaaattccctaatttattaatttcgccttgcgccactacagatttggaatagcatagcactctcaattatatagaacgatctatatgtactaagatatagatacattatgatcatccattgttacaatcctaatatcaaatatcctctatagatgatctacactaaatagggacaaatttatcgttctacccttcaatgtattttatctttaaaatacttagctacctataaatgatatttcatttcactaatataattagtgaaatttatattagtgaaatgaggcctcaatcatttatgtctatcaagccaagctcgaagaaaattatcgttcacttcttaatacttacaaaagctataaattctatatctatgattagcactcccattcaattgaactatcatgttcctaagatgaaaatatctaccaaaaccatttgtttgctttcacgaacacctctaagaatataaataatacaactaagctgaacctaaccatatcaggattaagatccatagacctaagatcaaccagtgatattgtcttagaaaaatataatggtaagtttatgatatcttatccaggttcaatatcggtccaatccaatgtatactccatacatccaatactagcaaactttaccaatgccctagaaaagacataacacttatccaaggtgtaagtataccttattatcgattatcatgtcagtctaaaaccagtgaactgacaaattatggaaattaaacttttgaacatataatcatgattatattcaactgtgctgacgacactataatcatgatcaaatatatatatatatatgttttgaacttaatagaatttatacattaagtataatcat

SEQ ID NO: 344360 - DNA, 817 bp, Cannabis indica
ttttttttaacaactcagcatgtaattatgcttgtccataactgtcacaactataaatacctactccctaactcgatctagacaatgaggtagagaacaactacgactacaagactaagttggtagtgtccaagattgagatagagtcttctatagtaaagagagaaactagagaaaacaaagtgaatcaccatgattatttctccaattcttagttagttctttaagtggattgagggttgtaaaaagagattattcactcttgaagtgacttctctaattatgagcttatttgtaatcttgtgtacttatgattggtgattccaatggtgatcttgatctggttattatataaacataaactaacatgaagacatccaaattatcaaagtcatcgttttaaatccatatttcatgaaattaaatcattaccatgcttctgaggcaagttattggatgttattttactaggatctagattcactaacaaacatgttagattacattttataatctaacaccctaaatatgaatcttctcaatcaatgaattatacacatataaagttatagaaaaccttacatagcagcagaataatataggtccttccgctcagatttctaagtcttcttcctttctatcgcagagtaattacacgatctgagtatggatctccttcaactgttggaattcttcataatcttccacactacgattgagtactgacttgatatgagtgggcaaggtactttatcactatagaggttcaaaattgatgaataaagagagggagatgtattgagagagagagagagag

SEQ ID NO: 344361 - DNA, 516 bp, Cannabis indica
agagtaacacttgatattttttttaaaaaaataataatattattgttaattatgacttttttatacaatataaaattaattaaaaaaataataaataagtgtggagttttcaaaattatgatttttctatatatttattattatttgtcctattttttaaaaatatttaaaaaaatgtgcactatatacttttgaaatttttacatgaaaaaaccattttacacaatttattacaaaattactcacacacgcctatgactacatttttacttacaaagttgcttttattacacaaacaccacttactcatcattccatgcatacacgtgtgctctccccatccatcatcaatcaaatcctactctcttccctctcttttttcattttcttttcatttcattttcgattcttcatttctgttttctaagttcatttgaattcaagtaacctccattaaccacccataatttatcacgtttttccctcttctttttggttcatccacgaattttcaac

SEQ ID NO: 344362 - DNA, 813 bp, Cannabis indica
gtcggttacggttttattttacgaaaaccgtaaccaaccgtttataaattataagagtataaaactgaccgtatgatttttggcagtttttagtgatttttcaatttagcggttttggatggtttttggcggtaaaataaatggcctctgaattttaaagtacacattatattggcatgcaaagctatgtgtattaatcttattatctttacttaataacaaaaaacaaaatgtgcattaagtagtacaagataaacttggatgagaagtagtattattaccaagtataagactacaataaaataataatagtgataaattcattctttttcttaccttcttttacactcttctattttaatagtttttaattgacatgtgtacattactaataatttataatatatatttgaataatatttacatgatttagtatcgtaatataaatcttaccatttttgttttcatttgtagtgagacgatcaagtaccaaaatgtgtataaaacgagattaagggtgtttttagaagtaattgtgtaatttatatagtttagaatagtaattatatcgtttagtaattatattatattttaaaatacaaaatgtatttagatatgaggcaacaattatatatgaattcttaatattttatttagcaaaatttataatagttacacatgaaaacaatatttttagtagttagtatttaaaattaaaagtttttagtaattacataatgtaattatacttaggaagcgtttggttgggaggaatgaaaatataggaataggaataggaataggaatgggaat

SEQ ID NO: 344363 - DNA, 768 bp, Cannabis indica
ccccaaataacataaaaacgagaaaatccagggtttctgaaaatcacccaaccgacagaccggttgcccaaccggaattccggttctgggaaatttcagaaccccatccggaattccggatgcacaaccggaattccggatgcacaaccggaattccggttcctcacagaattcaaccaaaaaaataataacttgctcaaatccaaaccaaatcaaacaaaaccatccagacctgctatttagaccctaaggaacaattctaaagcataaaaaccgagcttcatgcaaacaaaccaaaatcaccattaaagcttcaagctttgagctccaaactcaaacttgattaaacaacaccaacatgcaatcaattcagcccaaacctacttaaacgcataacttaacctctgaaaaccacaacaaacatcaacaaaacaacagcaacagatttcaacacttctctttgaaaaccatagtttttgagccaaaatttcatatctcaataaaatcaagtaatcaccaatcctaacatgcttgaatcaacattttaaattataaataaacctctgaaatcaacatcaaaacacagcagcaagaacaattcaaacaagcatgcaaacatcatcttttcatcaaaatttcaagaaactaaaagaagagaagctagacaaggattaccttcactaaaatcactctaaacttgaggaaaacacttgaattttgcaaagaatcacagccctagcagccccccaagcttggccgaaaagagag

SEQ ID NO: 344364 - DNA, 428 bp, Cannabis indica
agggcataaaacccaacacaagaagcagggactgaaacaggagttcctactcctatcattactagaaacccacagcaaatcatcgatcaaagtggccagaatactcagttgcagggatcaagaaatccacttgaagacccctcggatccatactacctccatcatggtgataatcctggaaacattcttgtctctcagccacttacgggacaagataattatatttcatggagtcgtacgatgcaactggccatttcagtcaagaacaagctgggattcttagacgcttctattcctaaacctcctcctactgaattcaatctttataatgcttggatcaggaataataacattgttatatcttggatccttaactctatgtctaaagaaatctcctctagtttgttgtatgatgaatctgcagctgc

SEQ ID NO: 344365 - DNA, 780 bp, Cannabis indica
ccactaatgatttggatgattattttaatgatagaaaggaaaagttgcttgataatgaagattttgacattctagattggtggaaaaggaatagtagtaagtatcctattgtctctcacattgctaaagatgttttggctgttcaaatatctagtgttgcttctgaatcagctttttctattagaggacagatacttgatccatttagaagttctttgtctccaaagacagttgaagcattaatttgctcgaagaattggttgacttgtgagtatgctgctcctgctgtgttgagacaatacatgaatgaagttgaagatttggagatctctgaactagttgaattgggtaaaataaatttatcatttcctatatatattatatatagtttaatattcttatcttacaaataatttgtttctaatatattttaatttgatttttcttctagaggaatcatgtattacaagcacaggaacagagacaactaccacaactactagtggcgctttatagttagtcccatgaaattgttttactggactagtttatgatattttgaactatgcatgatgtcttattttgttatgttttttttttaacttttagattaatgtttatttctcttgtatttcttattttgaatgtttggactttggacttttgtgttttattatggtgatgtgaatttggatttggacaattgaatttagatttggaatattatgtatttaatgttattaatttttattttagttgaatctgaaaaaaaaaaaaaaa

SEQ ID NO: 344366 - DNA, 575 bp, Cannabis indica
ttgcccctctccaacttcatttatggctgacgacgctttcttttcactatttaatgaagttatagtcaactcctgattcttttttgctctacctcgtcgcttccatcttcccaaccatcatttttagtaatactcagtttttgatgatgattattctctattcatgcttcaacaaatgcaggaagaggctctgcatgcggaggaactcaacatcttcccactttccaaggcgatccttcatctctaggtattactatctccattgttggttttgctatttaaggaaatgctggctaatatgttgcaccacgtacgtactctattttcctctatacttactatccatctgttgggctttgtgccctaaataaaactctatttcaatttaatcttttctattcaattatcaataaagaaacagatttattttcattacttatttagtatgtcatttggttcatatgatcatttatatgtttttctgatttataaattcatctaaatccttatcacattgatattcttgtttattgtgtcgtcagcacaatggaaagtaatcaagattatgtgattaa

SEQ ID NO: 344367 - DNA, 852 bp, Cannabis indica
caacaatggcttcaggttagtgctttcgctcatcttttatcatcatcttcttctttaatttagcaaaggctttatagatttattatttagggttttctatattaaagcacttttaggaatatgtttggatctgtgatttatatatttcttaagtgttttataaaccctatcagctttcaatcggggtcatgtagggagggttcaacctgaagttgctgagatggttggcatcaaagaagcattaagttggattgatcatcacaattggggacaagtaattttggaatcagattgatggcagctgcccttgctagcctagtttacaatgtttggagaagcataaacgaattgatatggcaaaacaaaatccccaatgctgaacaggtggtaattcagattaaaaggagtgtcaaacaaaggctacttcttatttggccaaggaaagtatgtaaggaagatgtaatgtggtttaatattttgtaaatttgtatagatacacaccgaggcctcccttattgggtgtggtgctcttagtttgtatagaatttggattttgtacaatgaatgactgattttccaaaaaaaaaaaatttggaattagacagcttggtatatgtacaagctattgaaagtaaagtctctatgtcatcttcttttggtcttttagtgcatgatgttcgtgcattgcttttatctttaaacaatgttgaattgcattttgccaaatgatctgcaaataagctggctcactgtttagcgagagattcttgtttgtctccatgtcgtgtgcttcagttagaagattgttcctctgaagcacgttctattgtttttaacgatttgattagttaa

SEQ ID NO: 344368 - DNA, 1784 bp, Cannabis indica
gtcccaaatccaaacacaaaccacatgtcgagtctagttttgagttttggtacgggttcgagttctggtctgggtctaggtccaagcctaggtctaattaccagatttagacaccaaacatgggtcaggtccaagcctcgggtcttgggtcaagtcccgggtctaaatccagatcttggtccagttctagctcatgtcttgggtcctggtttgggtcttatgtccaagtttgtgtctaggtttgggtcttgggcctgagtcatgggttcgggtcccaattcaggtcagggtcctaggtcccgatctaggttagggtcccagtccgagtgcaggtcccggtccatgttcggaactggtccttgtatcgggtcttggcctcgtctgggtttatttaacggttcggttatgaggtcccgcgtttgagtatcgggtcccggtcctggtcccagtctgagttctagtcctagtccaagttcaggtctcggtcctagtctgggtctaagtccgagtcctgatctatgtccgggtcaaagtccagagtttgagtccgagttttggtacgagtctgggtctgggtccaggtctaggtctgggtttgggtctgggcccagttttcagtccgtgtctgtgtccgggtcttggtttgggtctgggtctgggtctatatttgaaatctggtacaggaatgggttcttgtccaggtctcgtgtcacgggtcctaggtctcaggtcgtggcttgctctgggtccccgttcgggcctgggtccttgtattgatcccagtctgggttcgggtctgtgttcggttctgtgtcttgattcgattttggatcaaggtccaattcctgttccagggtccttattcttgtcctggttcctatttcgggtctcggtgtccgagtttgggtttgggtcctggtctaaaaattgttccaggttcgggtcttggtatgattgcaagatctagacacaaactacgggtcaggtccaagccccaggtcgtgggtcaagatccggatcccaatcttgggtcccggtctcatttccatttggatcctgggtcccagtctatgtctgtgtctgggtctgggtctgagaccggggttgggtctttggtctcagtcctagtcctgagtcttgattctggttctaattttgagtttggttccccaatctaggtctgggtcctgggtgcaagtcagagtctcctatcctgttccgggtcctgggttcgagtctaggagcaagtccgtgtctcggttcgagttcgtgacccgagtcccgatctcagttttgattcagatccgcgtcctgatctgggtcagcgtcccgatccgggtctgggtttgggtcctagttagattctagttcccggattcaaacccagactcggacttagaccctggtcaggggtacgggtctgggctagggtcttgttccgactccgagtctgggtttgagtccggatatgggtcctagatccaaaaactgactacgggttaggtccaagccctgggtctagatctggatcacagtctcgagtcctagtgtagttccacatggggtcccaggtcccggtctgggtcctaggtcatggtccagatccaagttcgtatcgtgggtctcagtcccagttctgatgcccgtgtcccgggtctagttctgagtcttaggtcttggtctgagtccaggagccgactggggttcaagtcttggtccgagtctagattcaggttccgatatcggtctgggtcgagatcagtctgggttcggtccaggtctga

SEQ ID NO: 344369 - DNA, 1005 bp, Cannabis indica
tctctctctctctctcttcgagcctagcaagaaacttgggattttagagtgattttgaggaggtgttagctgaatccaagtggtgtaaattaaaggtaaccctagagttttaatctttgtgtagcttaaagctttaattttgatttgattgtgcaattttgagatgtagtggttgctagggttataatggtttatggttcagtttctaggttcatttaaagttgaaattgagttcttgtagttggttttaatgtgttgtatggtgaatgaacaagtttgagtttaactcagacttgggtcattaatggcatgtttggattttgtgtgttttttttgcttttattgcttgaaaattgttgtttgaggttgttacaggtgttttggaaggtttggcttggtttggacacgaatttgacaagtttcgaacttgtttgggttacctagtgcaaaccgattaaccagttttacaagacctgtaaaattggttaaccggatcaggagcaagtttctcgaattgcttgatttgttaattcgtgttatttcagagccttagttagttaattccttgatacttagggtattgttatattagttaccaatagaagaacccttagttgggagtttgggtttcctgaattaggttttggcgtgttatttacctgtttatgtaaatgtgactaaggcatccatccagcacgaggtttttcattcaagtcggccaactcacttgaatttgaaaacgaggtaagaatagcatagaacatgttatatatgcgattatgtgtatatgtaatatatgcatggtgtgtatgtgatttgcgtaaagttatgaattgatatcacagcggtacaaccatcgtgttgggtcagcagtgcgagcatagtactcggtttgactgagtctgattctagaaagtattaattgttgctatcatagcggtacgagcatagtactaggtcggcagtacgagcatagtattgattaagagtgatattatggtcaat

SEQ ID NO: 344370 - DNA, 821 bp, Cannabis indica
agaaacacaaagatgtctagagcttaaccgtgaaggttgctgccctgagcctttttatctcccggtccatagacaaatgcattcccttcttcaacatcctgaagaaatgtcagaaatttgaatggaccgacgagtgcgaggaggcattcaaaaaactgaaagagcacatggccaaactaccaatcctatcaaagcccgttctcggagaggacttgttcctatacttggctgtctccgagaatgcggttagcgcagccttagtacgggaagaggagaaaactcagcatcccgtgtacgatgtcagcaagcgcatgataggagcagaaacgcaatacccagtgatcgaaaaactagttttttgccttctgatggcctcgagaaagttgagaccctacttacaagctcacccaatcaaggtattaaccaaccacccgctctagcaagtcttacgaaagccagaagcatccggaaggctcctcaattgggcaatggaattaagccaatttgacctacactacattccacgaatttccataaaaggacaggcgctagcagacttcatcacggagtgcaatgaagctgaagctaccgcaaacatacccacaccgtcagtcccggcatagaaggtattcgtggatggagcctccaatgagaacggatccggagcaggggtcgcaatgatttcccgagcggacttcgactccaagcagccctacggtttgacttctcagcttcgaacaatgaggtcgaatacgaagccctgatagcagggctgagattagcaaaaaaccgtcggaactaagagagtagaagtctacagc

SEQ ID NO: 344371 - DNA, 1267 bp, Cannabis indica
gattgggcgactctaggcattccgattgccacgtgtcgtgatcccaattaatgagggatttgggtatttaaatcctctgattcgaatcaaaatccccattttccctcattttccttaactcccttaatttctttgtttccctctctttcagagactccatcaaagacttccataaatttcccagactttcgctcttcttttgtgggatttttctcaattctccagtgctgtcgagggcaatcgtgggaacagattaccagaactaaaggttagttttcaaagttcactgcattttgttttttgtttgagaaaaaaaaaatgttttctgggttttaaaatttatgaagggggttcaggaatatatgtttgtagggaatacatatgaggctacatttttttaggcaagaaactgggtaatttcagaaaaaatgacctaaaattggcataaccgtgtatttgtagaaaaaatgtttgaacagacgctacttcatattttgaatacacgcgggtattcggacgaacacttcgaatactcccatgcctgcgagacttaattacttctgattgtcgcttagaactttaggattttgtattcggtaaatctggttgtgagaacattggttaagtctttcaaatggtggatgtatcacagtattctaatgttcatatatgaggttatatgttccttgagatactgagatacacccagccatttgcgacatgtgccaatgttctattgagcgcattctttggctggtagatatcctcgaaacggtgggagtacctcagtaacttcagggccatgcttaagaacgcatgccccttgagtcactgagtttctcccagccgtttttggaggtatatcgtttagctagagatgcgtgacatattcgcaggttgtgattttagttggactccttgaaatggtgagtgtctcctcgtcacttcagggtcatgccgaaagatgcatgtcgctgtggttactaggacactcctaaccattttttgggacgtttttctattcgcacatctatctgctcacatattgatagggtggttagtattcgcgagaattcaaaccatcctctcaatgcgatttttatagtttatatgcgggtgagatcacttattttgtttttcacacattcaccacgctgaaaagatcttctatctttcagatgagtgacctgtcggatagtcaactgcttggctcgggagtcaatgcatttgatggtgacgaggaccaaagggaagatagctttatccc

SEQ ID NO: 344372 - DNA, 518 bp, Cannabis indica
gtttactttaccttcttttatcttaaaatgtttttcattttttttttaattttcaagaaacattcaaagtaatgtatctgtatataaaagtaatctggtattagatttgtattagaattgtgaataaaattcttatgccattcttaaaaattaataccaaatctgtcacaccaaaacaccatcaacaaaaactaataccagatctgaaatcaacttccacaaagaagccaagccttatcagaataagcgactgggttccaatggagactgggttccaatggagaattcggtgcgaaaatggaaaaagtggggaaatggagaatttggtgaactagtttttttgatgtgatctgatgaaaaattagagttttattttattttttcttttaaaaaatataaggttaattttagttgatgacatctacttaatttgtttaataaccaataaaagttttaatttttgtgtcagattttttttttaatttatgaaaataaaaaattgaatatgctacatacaa

SEQ ID NO: 344373 - DNA, 946 bp, Cannabis indica
gtgtgcttatgatatcttgagccaaaactgtttttcgatttccaaatatctaagccatatgttctaaacctcgaaaagacctattgatttcgaaaggatgttgtcaacattagtggagagaggtaagcatgcaagcttatgagctatcgggctgtggaacagttggaaagagtaaaacttttataacaatgtttcatttgtgaatatattttgtggtattgcatagcgttatgaattgagcatctgaattaattgttagagttagtaggattgaaattctagtttgtgcaaggaagaaagcagagcatgaggtagtagtatagcgattatctgatcgcgtcgtttcttttctattgtctttatctcactcgagggcgagtaagaatctaatttgggggaattttgttaggttataattagcctatgttacgggtttaataagtaagcattttctcggttattggtgtcttttggagcggttttacgcttgattttccttgtttcaggttcccggggtatcaaagttcaaatttagttaattgatgaaaagtcgggacaaactggtgaaaaatcagaaaaatctgctcattgggtgtcagtagtcacgactagccagaagctaggtcgcgaccatgctcgcgacttggaagatttggcagaacctcggtatttcgagatttgcctgtagtcgcgaccaacctttaagttggtcgcgaccaggtacgataaaacgcagttttgacctaatttagattttttctcaattggaggcacacctttcatccctatataaggaatacgactcagaaggtcaaagtaagcaagaacagacctgaaaagtggatgaaagaggagaggaagcgatcttgaagacccggagcgatatcaccatctagtttctttctttcaccctctatctatcttttatgtctagttttgtttcaga

SEQ ID NO: 344374 - DNA, 631 bp, Cannabis indica
ttttcccttgtctgggctctggctggaggatatttccttcttagccttggccactgcaaggttgtaacattcccgagcagattgctggttccctctaagacaccctaccccattctttattgggaacttcaggcacgagtgaaatattgatgtgacagctttgaggtcatacagggctggtcggccaagcattacgttaaaggctgaaggaacatccaatattaggaactatgccatgatagttatgctcgttgaagcttgtccaacagtgaggggtagccggatttgtcctagaggagcaactccttgactagagaaatcatagacaggctagaggcatggagttaaatccttgagttggagtcccatcttttcgtaagcagtcttgaacaaaatgtttgaagaagctccattgtcgatcatggttttggccaccattttatttgctatctggacttccacgactgacgggtcattgtgcggaaatctaattttgacagcatcttcatcgttgaaagttatggtcggccctcctgctcgtggaactttgggcttcctttcttccacggccaggatgacttcttcttgctcgtgctgtgctgtctaggcatacatgttgggttttatgccc

SEQ ID NO: 344375 - DNA, 699 bp, Cannabis indica
gcgttcatggtgttcgacaaaaagttttacatctttggtggtgttgtttggagaatacgtcgattatggaggagatctaggattttttggaggtgattcatgttcatgttgatttcagatctaaaatttttgggagaaactatttaaaatttttgggataaactattttgggaaagtctcatgtagagaccgtatttttgaaaaaagaaagtttacttttctatttttgtttatttttgtaagataaaaatgtaaagtttagatgtaataaaggtataatagaaaaaagcccttattattaaagatatattaggattattaagcttaagcttttattttttattaaacatttaaaaaaaaaaaaaaaaagtaaggctttaacttggatttatacgtggatacattatcacaactcatagaatgttagtcattgagaggtctaaaacataagattagatatttaatctgtaaaaaaatatgatatttaagtatataatatttatgaagctctttttttttcataatattgataataaaaagaattgtgtgttttattataagtttttccctttcttcttttcaaagcaatgataaacgtaagacgtaacccaaattatcttcaagctgtattttatattcatttcaaaaactataaaaaaaactgtcttttatataaatatatttatattattagatata

SEQ ID NO: 344376 - DNA, 631 bp, Cannabis indica
gacccttcagtgtgggtcactaatcccttttagagttgctcactatacgtcactataagcttttagagtcacaccttgttagactgtaaacgtaatagctacacaaaaaacgtgtcactatattagtttatttatttattctaattatttttctgataacaactacactcaaagtgtcactatatccttcctttttcaataaaaaatgttaatttcctaattttagcttatatattataaaatttacaataatcatttaattaactatattttcataatattttaattaaccacatatattaattatgaattaatatattttagtttaactataaatttaataaaaaattaatgtaaaaaaattcattaaatgaacgaattatgagcaaatcatacaacaaaaaatgagccccaattctaaaaagacaatggaaatattctacatttcataaaaaaaattaacagcctccagaaacaaaaaattcaattgacaccatcttcaacttggtcttgcccaatgcatcttcatcttcagattaggttgggaaagggtgtgactgaaaacctgttgaatggagggctacaagaacagccaacattcaagaatcaatttatatatacatatatttat

SEQ ID NO: 344377 - DNA, 1004 bp, Cannabis indica
gttaagggggcaaaatagtcatttttctgtagagcccttattttgtcttttgtgggcattagtattcttattatttagttagaattacttattattaggtaatattaatcttttgaggagaagtgggaaaaatcaccgaaccaatcttcatgttaaggaacctgtctgacggttgggacaaatttaagaaccctagtttttcccatttttgtgatgttttagaggattgccatgttattcatcagtagggaaatttctagttttgattttaagtccccaaaaattgttttagcgtgcctctcatcagaattatgaatattgtgatatagggccatgtaattcgttgagctgctgttccactcaggttgaccggcacacctgaactcggaaacaaggtaagattagcatagaacatatcatgtatgcatgatgtgtttgtgattgtatatgttttaggtgatatcatagcgacacgaccattgtgtcggtttggcaatacaagcaccataatggttaagagtgatattcaccccagaaagtattaattggtgctatcatagcagcacaaccattatgtcagtttggcagtacaggcaccatattggttaagagtgatatcatggccaattgtacttttgggtgctattgatgctatcatagcggtacgaacatagtgctggtcccgcagcgcgatcatagtgctggtagtgggtgatattatggtcaatagcaccaactgttaaggatgttcttaaacatctgatagccttgcaaataggtgtatgggtgcctagatgcaagtcggtattatagtatctgttgtatgctttttctacatggtcttttgactcacagattctactttcatgtgtaggcgatggaaaggcagagctgaatgggagtgaggttccgagctcgggtgatgattgtacatatcgagatggtgcgacctggagtgtttgatctcgggacatcttgggatatattttgtagtcgttgtgtga

SEQ ID NO: 344378 - DNA, 1229 bp, Cannabis indica
cctagttgaaacactataaaaggaatatgatgctctcactcatccacttgattttcaacatgccaaaaatctagttttctctctcgaaaaactagtagatgagagacaccttctatagttattcaaaccctccttcattgttcttcaccatattcgaaccttgagtgatagagtgtcatgcccatacatagcaagtcaagtactcaatcatagtgagtaagacggcggtaaccaaacccgaaggagagaaggagatccaggctcagatcttgatactctacgacaaaaaggaacaagcgttagagatctgagcggaaggagtcattatattctgctgcaaccaatgttaaggttttttaaactcttatgtgtttaatttcattattttagagatattcatatttaggatgttaatcaacatacttgttagtaaatctatcatggtaaaatattcccaacaactagtctcagagtcatagtaatgatttattttcatttaatatggattttaaacgatgaatattattaattgtgttgattttgatgtgttcatgttggtttatgtgttgtttcatgatgttatgtgaattacaaaaattttccatgaaaattaattttattttcattctgaaagtattttgtttggatttcttgtgaaaaaataagtaattttggtttttacggaactcgattccgataaaaaaaatgaaaaagttatgaaggtttgaatttcggggttcaatggtatcgagattgggtgcttacccacaccagcatctcggacaagacactaaatacgcgagcggaaaggggataatttttgtctgaaactcgttgatgctgcacattcagacacgcacagctcgcccatgtgcatgtccagaccctgcattcgctgagctttctcagcagctaaccctgcaagtatcaccctgcgcacgcgaaacaggctgcttgccaacctgtttctcgacagcaagcgtgttttcaccccaaaatgcaatttttgcagattttttccacaaattttgaatttttccaatttcaaaccttaaaaataaaaataaaatattattttttattatatttaaacttaaatttcaattttgcaaattaatatatttttttaatagattattattaatttttaatattttgaggtttaaatttaaaaattgattattttatttttggattatggtcagattttaaaatttattaattttctt

SEQ ID NO: 344379 - DNA, 692 bp, Cannabis indica
tattataattatattttaatagttgccgaaaatctcggtcaacagtaagaaagatggttcactaagtatctgatccaattcacacttaattatatatattttttaagaaaatataatatataatatatattgactttctagtaatattaaaaaaaaggacacaaacttttaatttcttaattttttttagtaatatattgagtttgtatattttatttgttttataataaaaaacaccaaaaaaatattcttattcacataggcacatacacataaatatatactaatttatttattttagtaatgaatacatatattttaatgtaaatctaaaaatgagtacatatatgttgacatatatatatcggtttgatttatatataaatgttgatggaaatagattattattggagattaagaaataatagtctttttttaattttttctataatatattaaataatttatcattaaaaaaaaaaaaaataatttcacaaatacacaaaaacaacaaaaaaaattacaaaaatacggtttcacagaattttaaacattgttacgatatttttgaatttatttacaaaaaatacggtatttttatgttgtactcttgttaatttgttgttgattttttgttatctgcatgttattttttgttgttgtttttgattgttattttagatgttattttt

SEQ ID NO: 344380 - DNA, 545 bp, Cannabis indica
ataccattcacttatctctcattcccttgctcgaattgtctccaactctaagtagctacaattttacattgaacaagatgaggcactaacaaattgaagacaaacaatacacttgtcttgaaaatcactgatgtaacaaaccctcatcaaaacaaaattacttttagatatattcagtctaactacttatgccgacccaatcattcttgatctaaaattacgctacaggcactctgagtcaatcatgcacacctacgagtaatgctctttaatttgagtataactcaacttaaagagcaagggacaaactgtagtggccgaaaattgctctaagcccaacgaaagggcctaatgatcgaagtacttacaaagcccacttataagtcagaaacgaggaacccgtaagcccaatggctcacatgggccacacccaatccatgtcgtttggctcatacccatattcgaatgtccaaccaacaataaagcttgatcttgaagtgtaatgttagggttgacacgtggaggaagaagaatgttaagtttcc

SEQ ID NO: 344381 - DNA, 718 bp, Cannabis indica
caactaataacacacaaacacaacatacaaacaactgaaaaactgaaaaaatcttaaaactactaaataatacctcaacatcatcactaatgtcatctaggttacggggactatcaacgccaccaccaccaccgtcatcctcatcttcatcctcattactctacaaaaacaaaatcacataaaaatcattgcatattaacaaataaaactaaaaataaacaatatcaatcataaaagaaaccaaaatacctcacctgtggtacaacattcgcaatactatctttaatcaaatctttcaattctgaaaacttcgtatcaaaataaaaagttaaatcctctccaactttacgatcaatgtaacccttcaaattttcctcaagtaatgcaaatttttcatcaacttccttacgaaattctttcaaaacacactccaatccaacttgcctaactacaagccccaacaccgaatctttaagctcatccaacacagcaagacttatagtagcttttttctcaactccagaactaccagtcttgtcaacatctactcttggctgtctcacatcctcaaaatcatcatcagattctgacccataagaaaactcaaacccagcaatatctaacttttgattttcctcagctgaaggaaacatgcgggtaacagaaaactgtaacaaaataaaataaaaataacaaaattagtaacataaccaacaaa

SEQ ID NO: 344382 - DNA, 890 bp, Cannabis indica
aaaaaatcattgaaaacacaaaaaaaaaggattgcaattaaagttatcagggggaagaaatgtcagtaactagctcagacagtgatgatatggaagagttgggaggggtcgaagagaaagaagtcagtgaagaaatggaagatattctatgtgaaataaacatgaggataacatcatggtgaatcgaggggatgaattgtggcatgaagaaagaggaaaagaatgtgttagtgaggcagaacagcaacataaactgcctataaagatagatagcagaaatgatggagttgataaaggggaatctaaattgagcaagtcctcttggcataatagtggcaactttgacaaacatgggaatgacaatagtatctaatgaggaagcagaggtagtggaggagggaatgagaaggaagtgaaaaagaaaagcagggaattaaaaatttgaattttaacataaactatgataaaagtcagaagaagtccagggttccaaaaaaagattacaattaagattcttacatggatattaggggcagtggggatagagagaaacgaagagccggatttaattattttacaagtaaaaagagaagcagtggacagaagctttattgggagtatttggaggtctcgtttcaaagcttggattcttatcccagctatagggagctcgggtggtactttgatagtgtgggacactagaagcatcacgattttagactcgatggtaggtgatttttcgatttcaactttgattcaagttgatggcaaagacccttggtggttttgaggggtctatgggccttgttcttataagattagagctgatttttgggatgaattggcgggattgagttcaatatgtggcgaatcatggtgtttaggggggg

SEQ ID NO: 344383 - DNA, 691 bp, Cannabis indica
ctaatcttttattgataacaaaagaaattgtattggaatggattttatttaaggcataaaatcccaacacttgaaagggtacaacttacaaaaagaatcaaggataccctgataggcttcacaaggtatatatttctttcaaataaattatgctttgatttaatgtatatacatctagagatccttgagactatggcacaatgataattagatatacaaatcttctgctacgtacctgatttagtaccaaaaaatcaacaattggtatcaagagcagttccatgaatgtatatacattaaatattgtgtgggttttatgtatttataagtgtgatacgtatgtgaattgatggttatattattgtgaatgtatgagaggtgatgaatcatcaattatatggtaaaatcgagtgtaggcttcgttattattttttttctagaaaataatgtaagctaataatggggcatagaaatttttatgtaattttcattttctaaaattatttttatgtaaaattttacaatgtagtgttcatagcatgtgagctcggtttctaatcttgaaactcggccatgcacatcaaaaatattgttggaattattttactaggatcttagatttactaacaagtatgttgtttaacatcctaaatatgaacttctaaaacaatatgaaataaacacatataaa

SEQ ID NO: 344384 - DNA, 566 bp, Cannabis indica
taaaattatatatgaaattatatgtatatatatggtacgatacaattatgccaactctattttagtttaagttgagggctttttatatatgattataaatttttttgaggggatttctaaccgtgagtgtatttgtatgattatatatctatctctaacatgtcaaatatatataagctttagaaattcaggggggaccacggcccctgttggggtatatgtggctccgcccctgtttataatgggttagtaaccaataaatattagagactccaataattatagagtaatttgcggttaaattctctcaattatcattttacttgcacttaacttttcaatctcaaattttgatggtaaaaccctccaaactactaaattgtttgtaaatttaaggtgttatctatttatctcagttaactactgacatggtctgcctacgtataccatcatgtacatgtggcatatttatattggtctacctaatatgattatttaaattataaaaaaaatattttttgaatttattttaaaattaaaaagaataatttaaatttataaaatta

SEQ ID NO: 344385 - DNA, 561 bp, Cannabis indica
aagaaaaaaaaaaacaacaacaacaacaatagagagatgctaactctcaatggttgggtggtgggtaagtaaaataaaatggttgagtttcggtacacgtttattaatttattagaaagagttcgtttattaatttattagaaagagttcaggtattgacagcaataaaatatatgagcatattttcataaatattttcaaaagtatgtattgtgatgtcattatttctgaaaaatttaggaattatcttatataccaattttttctagtaattgcttcaaatcacactcataactcagcacatgagtgggatctgaaacatattttcgtaacatagagacatgaaacacgttgtgattgctgaaagtgttggaagcaaggctagacgatatgctaccagtccaaccttctcgagaatctcgagaggccctataaacttagggcataacttgtcctttttcccgaaacatttgatccccttcatcggagacacttgacagaatacatgatctcctacctaaaattctacattcttgcgtttcagatttgcataactctttt

SEQ ID NO: 344386 - DNA, 961 bp, Cannabis indica
tgatatttccaaattaactaagcgggctttgcatgtaaccttccacgtcggcaataaccatctaaaggataaaactaaaaaacaattggacagttatttagtattatctcacgattgatttaaatgaaacgtggggattgtccatgtttcatttacaattatatttaaatctaccctaaaaataataattgccaacctatactcctataaataggggcatattccatgggaaagggaagacaaatttgatagagaatcattattattcaaaatcagaaattgtattctgtattctaaaagtatccctaagaagaactcatggagtatgtagattttaactacaaaaccacataaaaatatctggtgttattatatcttttactacttattaaattctttagaatatttattactgaaaggctaattaattttggttaacaaaaatctgcgttaacaactggtgctatagccaaaagtaaaaagcctcgaagctacaagagaacaaacacatagaaaggaaataccacatcatcagggaatatgtggcaagtggggacatactggtggagaaagttgacactgaagacaacttagttgatccattcaccaaagttttgactataactacatttgaaaagtacagactgaatctaggattaattgaaatatactgattgtttatgttagtgaaaagtgagagtttgttgggcattacccattgggtgaggaagagctaagtatgtggtggtagcagtcgacttcttcactaaatggacggaggccaagcccctcgtctccataacatgcaataaagtccttgattttgtcgtcaagaataggtttggaattcccatgaagatagtatccgataatggaacccaatttgatggaaacttgttcactgaattctacgagaggaataaaattatcaaaagcttctcatcagtatctaggcctcagg

SEQ ID NO: 344387 - DNA, 750 bp, Cannabis indica
tatatatatttatatataaaaaatatgtctttaagtatggttattttttgataccaacagaaaaatatatgttttccacacattttaaaatgaccaccttaaaaagtaacacaaatataaactaattagtatctaaatgtctcatttttttatgagtaattagcgacgaaatccccttatgttttaatttttatacacttaatccccttatcttttatttaatttggtggcaaaaccctttatgtttatttttctttgcaaattcgacatgcaagttaaatattatccttaaatatcaactagatgaccactatatacacatgagtacagtaaaacagtaatatcaaactgaaactttaaatttgcaaagaagagtaaatttaaagggattttgccacaaaaaaaaaaataagaggttaagtgtaaaagttaaaacataaaagggttttgacgtaaatttctctttttttaataacatctggtaattttttttgttaacaacatataaaataaaataaaagattatttttaattataaatatatattttctacatattaataatcaaacaattaataatataatttttttatatatatataattatagaaaagaaaataaaggtatcaaaattcctcattcacagcacgcataaaaaaaaatttacatacatttttacgtttaaagaatgttttttacatttttacggttttccaaaaaataacacgaaaacaacataaaatcaacaaga

SEQ ID NO: 344388 - DNA, 827 bp, Cannabis indica
aaacataacaaacataaattaaagagttattaaaaaaaataaacattaaaactcacaacaaaccataaactaacaaattaaaattgtttggcttgtgggtgagacttgcaatacttgtggctcaagggcaaaggaaagaagtcattcactcaaagtcagtcgacggtgcctcctccgccaactactgaaatgatgagtattgtggcagaaatattctcaactatgcgtgccacatggagggtaatttgacgcctgaacaacgtgctcatttatataacccacgatttgagaactttattcaaaagtatagtcagccgcagtcgtctgatggttcatcttctcagagttatgtcgctcctccacaacaacaacaacaaccttctttcgtagcagcaattccaaaatttgtcacaatagcaattcgaaaattttttgcagcagcaaccccaatcttttcctcaacagcaacaacagtctggtccgccattggaaaatcagttcttatatagaacaccatcagagtctcctccgctcggctcaaattttaccgattttggattatttgagagttcattgcaggagcaacaattttattcaactccaatttttaaccaagctgagctcgggaatttaacactgggtttatcatcagatcaagcatatgtgccttctccgccacgggcttcgggaactcgtaacgataataatccggatcaagactttataattggagaccttaatgaagatgtcatagaataatttgtttatgttttttaataatttagtttaattttgcgacaatattgtaataggattaatgttaaagt

SEQ ID NO: 344389 - DNA, 524 bp, Cannabis indica
ctctcataggtgaaaatgccctgtttgtgctaactgaagaggctccttagcagccaggtgagaacgcaactaaggcagtcaaggaaaagtttgagtgttggtaaaatgataacaataaagctcgatactttatgctgtctagcatggtcgacaccttgaagacaaggtttgctaatacatggttgcggatatcatgaaccagttaactgaactgttcgtgatggtgtcaaatcaagctcgatttgaggcgaccaagaatttcatcaatgcacggatgaagcctcatcagaacatgcgtgatcacctgctccaaatggcaagttacttccaaatgcacggatgaagcctcattagaaacctgctccaaatggcaagttacttccaggaagccgagaatcatggagctattttagatcaggaaactcaagtgagtttgatcttgaatagtttgaccccagcttttctgcccttcacctcaaattatgtcatgaacaaattgacttttgactttcacgagttaatca

SEQ ID NO: 344390 - DNA, 582 bp, Cannabis indica
taatagaaaatattcacaactcgttgactttgtactcttaaacgagataaggataaaataacttgttataaaggtttaatagaaaatattcacaactcgttgactatgtagtcttaaacgagataaggataaaactattaaagattgataataaagttatatcattaaatacaagataaaataacttgttataaaggtttaatagaaaatattcacaactcgttgactatgtagttttaaacaagataaggataaaaaactaataaaaattgaaattgatgagacacacgcctacctcggagtagatagtcaaagaagatatttattcattcgagtagaataaatataatcacacagcgacctcagattacatatagcggaacagtcacctcgcaatcttaactcaaataaagagacataacgaggcaaaccatccgctaacactttgtattttttccacatcaagatggaaaaggaggatagctcatgttaagagagatacaaccgtccaaatcagcgttaaccatcgaaaggataaaaacaaaggatgttgagatatggaaattgtccacgtttcatgaa

SEQ ID NO: 344391 - DNA, 1414 bp, Cannabis indica
  modified_base (1304)..(1304): a, c, t, g, unknown or other
atacataaaaattaaaactagaataatttagaaacctgatttttggtgaactgctactaaagtagtaaacaacatgtatatttataaaggctctggaatgctttcttagggtttttccattttcttctagactattctagctcttcttccttgtgatgatgtgtaaccgtcgattagttttcccctctaattatgttattttctcatcatttctaattaaatttaggcatttaatgcacttcagtgaatctcaaaagatctatttttatttaatactcttgcaggccttttttaaatctcatttgcttcccttctttctctctgctcagcgcgccgtcagtagaagaactcagagaatttgggtgattattacctcttatatcgagggatcacgccagtttctaattaatgttgagatggatttggcatcttccattccttctcagatgacttctgttttcaggtattctctttttctatatatatctttctatgttttgcctaaattgctaagtttttctctgggtattattctctctgtctgctctattacttctgtctgcaaactcttttccctctgtgttatggcgagttctagtagcagtctgcctcgtcatcttgctttgaatgacgaggaagctcttattcatgactttgatggagtttctctgggtaatggcccatcttctgagtcttattgcttagttgttaagatcctcaccttgaaaaaccttaaacctgattggcttgacaaagctatgagggaagcttggactttaagataccctatcaatttcaccgaataccattctggtctctttcttgctcactttgggtgtgatggagacaggcgcaaggttattgaaaaccagccttgacattttgatcattgcctgatggtttttgctaaccttgaggggcttgatcttcttcaaccagatcaacttaggttcgtccctttctggatgcaaatccattatatccctttcggctttagatctcctagtcttgctaagttggttgctgatgatgttggagatctcattgaaatccataaatctaccctgctggaaatctcaaggtcattcctgcgcattcgggttctgcttgatgtttctaagcctattcgaagggggatgcaagtgtctttcgaagtcttggtaagctaaatggctcctgtttaaatatgagggtcttcagaattattgctattttgtgggaaatttgatcatgtttctctaattgtggttccttctgcaacgttgtgatgagggttgcatccctcctgtcctgcctttcaaggngaatatcagagctcctttaaagtcacattttaaacgagaccctttttgattttggccaattctattctgttcgaggaatgcaacctgatcctttacacaaaatcatgatc

SEQ ID NO: 344392 - DNA, 736 bp, Cannabis indica
tgttgtgtttgctttaataccttgtaccttgactatttgtggtatccaacttgttgtaaatagggcctaacacgcttgttcaagctatcaagctcgctcatctggtattcaaatttcctctttgtgtatggttttactgttacaaagaatggtttatcgagtttgctgacattcttcttaaaggttgcttttaggttgcttaataggtggtatacacagtacccgtgagttatgtctagaaatacatgagaagcagccttaattatgctctcatttctttctgggatcaagcacttttcttctcttaccccatatgcttccctcaattttgtaaaaaactattccgacgagttgttattttttgaattcacaatagagaatgctaggggaaaaatgtgtccatttgcatcttgtgtacaaactgagagcaatgtcccttcatatgttgattcaggaaagttccatcaaccacaattataggtttgcacttgttccatccttttattgaagcatctagtggtacaaacaagtacaagaagttgttatcttcttcagtttgcatgtgtactatggttccaggattggttttttgcagcatgtgcaaaaaacttggaagcagattgtatgattctctatcttttctgtgcaattcttgttgtgcgtgctctttacttctcctctgatgtcttgtgacatttgagttgtttttatgctggtgaaccttggcttgatgtag

SEQ ID NO: 344393 - DNA, 503 bp, Cannabis indica
ataatacgcttattattcaaaaagaacttttctggtcgttaaatttttttttctaaactattgagattgttagatttaagaacttttgtttaattttattcaattttactattttagtgattatttatgtattaaataatgtttatcagactttgatatctaccaaataatattttttgaattttgatatgtattaaatcatgctctttgaattttcatccatgctagactttttttactaaaattgaataaaagtttttaaattcaacaatttcaatagttcaggaagcatttttaatgaccttaaaagttcaggagtataatttagtacatgtcaaattcaaaggtagaaatcttaattagctttaaatttatatttatataatatataggttagtaataattataagtataggatataatgctttaataaaggtatagttagagtcacgaaaaatgtctgtacatacagacattttttttattatgtgtcactctcatat

SEQ ID NO: 344394 - DNA, 584 bp, Cannabis indica
ttttcatgttgttatatccagaatagtgaatgaatgacataagctcgtgcccagcagttgcatccactaactggtcgatctttggaagtgggaaacaatcttttggacaggccttattcagatcagagaagtcaatacaagttctccaacttctgttaggcttcgagacgagaataggattggcgatccatgagggataaaacacctctcgtataaagtcgttgactaacaacttgtcaacttcctattttagtgcccctcgcctctcggaatccaagggcctccttttctgtctcttcgatgggtagtttggataaacatttaaatgatggcagataatattaggatcgatccctatcatattcacatggctccaggcgaacatatcctggttcgccttcaaaaagcttattagctactcgtccaggttcttcccaatgtatacacactttgtgggatttcctgggtcgagaataacctcttccaattcctcaattggtttcaataggtttctctcatcttgaactcgggggtcaagatcttcgtctttcttctcgtttacttctaccaagatcgccatcaac

SEQ ID NO: 344395 - DNA, 1132 bp, Cannabis indica
ttgttgttggtgtatgatttgtatttctaaagttagattatggttagatatgttgaattgagctagtattggtggttgttagtaggtttgagcaagctttgagttttagaactcaagcttggctctttaatgatggtttttgattctaagcttggttagtttgttttgttccttggaatatgtctattagggtataatatgtaggtctggaaggtttggtaagaattagaatcgatttggttatgttttggatttttgggggttttttggtgtaaactggttaaccggttttacaagacctgtaaaaccggttaactggatttgctgctgggttcccccgaagattcgtgttggtttcagagctttggttggttaattccctgtcagtttagggtattaccatgtcaacttatagtaggtaggtttttggtttaaaacctaagtcctcggttgtgatttagtgtgtcacttaaccatcttatgatcgatgtgatttaggggcctgtaattcgccgagcagttgttccactcagattggtcggcacacctgaattcgaaattaaggtaagactagtataatgttatgcatatgtaattacatgtttagcatacatgttgtttatgcatgttagagtacattgataacagtaatagtatgcatagagttgtattgattactaataaacgtatgttgactgaaatactgattgatgttgtcacatcaatatggctagagtatgactggcatattgagtatagggtgatattatggtcgatagttgaacgttctagactcagtaccgtgtgggacacggggataggattatggttgggtgtatgggcgcctgattataacccaggatattattatgttatatgttgtgcttttcttactgaggttgtcgactcacagtgctatttccatgtgtaggtaacgacaaggctaaggctgagcagccgtgagagcgagcaaatgaagattgtacatgtcgaggcggttaggcctggagcctacaatctttgggacatcaaggcttttgtgtatagtcgctaggcgacaaacttttgtatatgtacagttaaaattttgtaaatgttttttttgtaaacgggatcccagaattttataagt

SEQ ID NO: 344396 - DNA, 1069 bp, Cannabis indica
ctttttccttaatattttatttattttattgacaaacaattactaacctaagcctagtggttacctataaatagatagtgatagctcacaccaaaataagagttttcaagtgtaacaagagattgccttcagaattttgagccactcactatccttctatagccgaccccctctctctctcttttcttcttctaattttgaatacctttagtgatagagtagtgcccacacacatcaagtggtacctcaatcatagtccagaagatcatgaagaatcaaaattgaagagaaggacattcggactcaaatctttgtgatactctgcgatagaaaggatacaagggttagagctctgagtggaaggagagatattattccgctgcaaccaatgtaaggtttcctaaactttatatgtatttattatcgttttagaagttcatatttaggatgttaaacaacatacttgtgagtagatctaagatcctggtaaaataaaatccaactactggcctgaaagccatggtaattgatttactttcaagaaatttggacttaaaacgatttgtgtgtcatttggatggtttcatgttgatctatgtgttatatgatgattgattgatgtttgttagattttgtgaaaaataattaaattttcgtttctgtaattatttttattggatagttttgaaaaaattaagcaattcacttttttacagaacttcattttgattttatttgaattagttatgaattttttaaaatcggaaaaatcgaggtcgcattacccaccctacgcgcgcggacgagggtgatttgctcggatgcacgcgctcagacaagcttgtgtccgagttttctcggtcaggacatgggcaccttgtctgatgacctcctgggcacgcgcggaaaggctgcatgcagcctcttgcgccgtgtcctctcggtcaagcaccccagtttgtgcgtgtggaatgcatactgtgttgggttttatgccctaaataaaactcatttcatatattcagctttacttattaataaatatcagaaataacatttttatgttgca

SEQ ID NO: 344397 - DNA, 621 bp, Cannabis indica
ggagaagtcataccagatggttctaacccgatccatggtgccattccacctgtcaaccaagcaaatcaatcggtgaggcagccaggcgcttctgtattcgaaaggttgggggcgacccatgacctaaggaatgatctgaacagaaggaggggagtagacgatcagaatgttacgacgatcgtgcatcccggagctcgtgctcaaatcctcgctcagaaagatgctgacgtaattcaaattgactagaatgttgagcaggttagcccagccgtgcaggtacagctagacgaactgaaaaatatgtgtcacgacatggctggacaaagaaacaatgatcttgagctggaccgagcacgcggaactcctttctcacccgagatcaatctcctggcgctgccccacaagttcaaaatgccaacatggaaaatgtacacagggacagaagatcccctttcccatctcaagtacttcgaaatgcaaatggatttgcaaggggtacgaggagatgtatgttgcagaatttttcctgctaccctatcggaagccgctcaacaatggtatttcaagttggctcctagaaagtctagttcatggaaaaccttctctttagaattccatgca

SEQ ID NO: 344398 - DNA, 772 bp, Cannabis indica
cctcatattttggtagagaaatcctctaaagtactgtttcgtttacattttttgtctaccaaaatatgtagatttgatagttttttgcaagtaaattaatcgttgaggggattttgtcgcaaattactcgtctaatataatttaatataataatttttagccaattacaaaatgacctttagaaagtactatctaatagcaacatatattttttttatatataagtagtaatatagattaactccatataggcatggcaaaaaggtctattcattcggatccgatccgacggatcattactgatccgaaatattcggatagttattggatctaccgccccgcttaatttttttacggatcggatctgacccgatccgttttaaatatatatatattttttttaaaaaaaaaattttaactttttcatatatttttttaaggtgtaaggctagtggaataccattaggcatatatgatctgtccatagaccacactatatcttattattttaattaattactctcttaatttaattcttatatatatgcgtacatatatatatatatatatataaaataaaaatatatatgcatactgaccactgtatattttaattatttgattataataattattattatttgtgaaattccttataataagaaagtaaagtaataaatgttatacagaatagatcgatttatgtataggcactgttaaatatattaatttgtacaacaacttacacttttatattatatcacttttatat

SEQ ID NO: 344399 - DNA, 823 bp, Cannabis indica
gcttgagggaaggtctcccttttgtttacaatgtctataattggtaagattacacatcacatatatagagtacgctgattcagagatttggacagcttgccatatctctgtgatacgatcccaaatttataggtattgcttttatgcttcacgatgcaagtgctgaagttgctaagtgttgatatgttgttcggattgtccactgctcgactaggaggacctcgtccgtgcaggtatatgtagtgttttgtttgaaatatctccttcgggcaaatatggggagtcgactccacgtatcaccagcgtgtgatgccacgttagagtgcaaaaattgggataacatttgcccctaagtctgcacgggacttctaaagttgtgtggagactttatccgagttgcctttacatttgaatgggtgacacgtgttaggtgcatctattcgtgattcgatgtgagtctgaccaggcgtctctttggttttcggctaattaatgctctaacttaattagtgcctcgaaacacggttttcttcgcatgctttgacggttacacttgattgtttttaatttcctaatatttacttttgggggaaatcgaaacgtctgaggtatttcgaaatgattacctctttttaccaatttgcctataaataaggttggaacatcctcagaaatcactttcaccattttatctacgaagcaaacccaaagtaaaaaaggaattttcttcaagtttgtcgtgaggtttttatcagaggcatccgagtagcttcatctggactacgtttaggcttcaaacagtgagtaagttttcaatcctctc

SEQ ID NO: 344400 - DNA, 721 bp, Cannabis indica
gcaaacctagaaaaaattcaagctctcctgagcatgccatccccaaagaaacccaaagatgtgcagagcctaaccggaaaggttgctgccctgagccgttttatctcccggttcacagacaagtgaatttctttcttcaacatcttgaagaagtgtcagaaatttgagtggtccgacgagtgcgaggaggcattcaaaaaactgaaagaacagatggccaaacctccgatcctgtcaaagcccgttctcggagaggacttgttcctatatttggccgtctccgagcatgcggtgagcgcagccttagtttgggaagaggagaaaactcagcatcccgtgtactatgtcagcaagcgaatgataaaagcggagacgcgatatccagtcattgaaaaactagttttttgcctcctaatggcctcgagaaagctgagaccctacttccaggcttacctaatcaaggtgctgaccaaccacccactccggcaagtcctacaaaagccagaggcatccggaaggctcctcaaatgggcaatggaattgagccaatttgacctacactacattccccgcatctcccataaaagggaccaaagagttagcagacttcatcacagagtgcaatgaagtcgaagctactgcaaacatacccacaccatcagtcccaacgtggaaagtatttgtagacagagcctccaacgagaatggatccggagcgggg

SEQ ID NO: 344401 - DNA, 743 bp, Cannabis indica
atatactctaaaaattattctaatttaagttgatctgaaatagaaaaatttccagcttaaatatattttctatttaattaaattcattaaaatagaaacaaataattaagtatcttgaataaaatcaacttaattatcaattctaatttaatatataagaaaatattctaatttaagttggtgtaaaattacttaaacaaattaattttcatcttaaatgtattttgctatttaattaaatttcttgaaatagaaataaataattaagtatcttgaataaaatcaacttaattattaattctatttttaaattctaagaaaaatatcctaattgaagttggtctaaaattaattaataaatcaattttcaacttaaatatatttttctcttaattaaatgttagaaaatattacttagttactataaatcactatctaggttcttctcttttaacttgttatacccgaagttcggtaagcacatcaaatgaggacacgtgtcgagctgggaagaactcaaacatgcaaacgataagtatgcttagcatggaataactcgttggaaatataattcgcaaggtatgttcataactcggcaagctggatagccttctgctagacagaaacgtacaaactgctaacttatgtattgatgagaaaccatatggtgcacatgttaacaatgatgcctcaacctcgctgcgtgaaaaagaaagcgacaacactaaaaatacttagcatat

SEQ ID NO: 344402 - DNA, 633 bp, Cannabis indica
aaaagatggaataccaccgattaaaatattcaacaatgtgagccttttcttttacttgcaattgaagatcaagaaactaatttcaccacatatccattgtgcgtcaacaaatagaacaacaacataacaactgctgcaatacatatattcgaatcaagaacagcacaagttcaacaaaatgtgggaatgcttgagaacaatgcaccaataactgaatcatgcacactgaaacaaccaatagaagaagaagaagaaattgaaatagaagtaggtgacaacaaccaattcgacatggttgactatgaaaatcttattgctgaagaaatggtagaaaagctggaaaacaattgtaaaaaaaactgattcaaaggttgacatcaacaacgcaagctcataacagataaattctaccctgaagttgtaaaagggcaggcatacaaggacaaagaagcactcaagagggtcctgagttactatgtaataaaaaacaacttccaattcaaggtatggaggtcgtgctctcaaaaatgtagtctgaagtgtgtttatgaaaactgtaattggtctctatgagcatcaaaaaaatgggccaactaatacatttataatcaggaggttctcgaacatccacac

SEQ ID NO: 344403 - DNA, 697 bp, Cannabis indica
tgtcccgagaccgaacactccaggtcacgtcgtctcgacatgtataattatcattcgagctcagaactcacacttatccagccttcatctttcctttacctacacaggaaagtagtattgtgagtcaacagactcagtaagaaaaatacgtacataacatataatataatgccaactcgcatcaaggcgcccatacacctatccacaaggcttatcagataagtaagaacgttcttaacatttggtactattgaccatcatattagccactaccagcataatgattgcacttcatgttgggctttgtgccctaaataaaactctattttaatgtaatcttttctattcaattatcaataaagaaacatattaaatttcattgcttgtttaatgtgttatttggttcatgtgatcatttgttcacttatttgatttataaattcatccaaatccttatcacactaatattcttattttttgttttgtcaacattgtggaaagtaattaagattgtgtgattaaatgtattcctatgatttatcagtacacaagatttaactgataggataatcaacaatgtagcttacttacaccttggataagtgctatgtcctttccaaggcattagttaaagtatgcttgggttggatgtatggagtatgcatcgaaagggatcgatattgaacttggattagat

SEQ ID NO: 344404 - DNA, 713 bp, Cannabis indica
aatatagtctgaagtgtgtttataaaaactgtaattggtctctatgagcataaaaaaaaatgggtcaactaatacatttataatcaggaggttctcgaacatccacacctgtccaataaatgttagatatgaagaccaaaggcaagcaacaacaaaattcataggagaatgcattaaacctaagtttctgagcataaagacaaaagcaacgccactagatataaaaggagaattaaaacacatgtacaaaataaagatgaactacatgaaagcttggagaagtaaagatcatgttgtaaatgacttaaaagaaaatgctaagaaatcatacacagccttatactaagtttcttgcacatggtgcacaaaaacaaccctggatcagttgtggatttgaaaacaatagaagacaacagattgaagtttgtttttatgtctttggatgctttgataaaagggtggaaaacatgcaggccgataatagtggtcgatgttacattcctaaaaacagcttatggaggagcattattgtctgcatgcacacaagatgcagtaggtcacatatttctgcttgcactctgtgtcgctgatttcgaaaatgacgaatcttggaaaataatttttacaaaaaaattaaaagaagcatatggcttcagagaaaaacagtttctaatttcagacagacatgagtgtctagattaaagcagcaagag

SEQ ID NO: 344405 - DNA, 648 bp, Cannabis indica
atatacttaaatagttataacgtacatagaataataagaaaaaaaaacagaacttaaaaaatttctagatgaccgaagagagtgcatcatacattcctttaagtgagtgcattgtagaatcaccctataatatatattaataataaataaaacaatttttttttcaaacattaataataaataaaattttaaaaaatatttttaaattgtatgtagtataaggttttcaaattccgaagatattttttgtttcttaaatgtaaccatagtgcctaataaataatataggaaaattctttaatagacacccataaaaacacccataaaagagactcattaatagtttcactatcatgtagtataatttgtccacataagtaaattttagaaagttattgtagattgtagtctattgaattaaaattggatttgaattagtcaaagtaggatataatgatagacactttattattattatttagttgatttggtcaatataaaagcattcatatatacccttaattattaattcattggtccacttagctaaacataaagaattaaaaagaattaaaatgtaaaattagttcagggaaaagaaaacgagaagtcattctcttcagttccgcccagaccgtcttctccggt

SEQ ID NO: 344406 - DNA, 625 bp, Cannabis indica
tgggacaatgttctccaatatcctccctcaagatggtggctatttttgctcactaatcttgaatcaccttatcacaggccatgccatttgctcgcttgttcggatctcaggcgtctttgcaccatctggatctcgtacggatggctaaccatctggacaggtgtggatcgaaagcccgcgagggatatggctctgataccatgttgagaatcatggggttccatctcaaaaccaattggcaatgagtggagtaacccatgttcttatatatggctcaatacttttacatttaatccatgtgggacaatgttctccaataatcagcaatccttgcagattgctactagttcatggggccacgtcctgagataaaattcattagtcgaatttcaacaactacaaagtaattaacttaaacaaaatatagactccttctaatgattttgtctcaagcttgatgtacttctatttgctgaatgaatctctttaagacaccaaggcttgaattctatttaaattacttgatgaatgcttgcttcctcccgatgcaagacttgtagaaattttctcccgaatatagcgatgcttgattcttcctagatgaaagacttgtagaaatcttctc

SEQ ID NO: 344407 - DNA, 598 bp, Cannabis indica
attgcagaacacattaatctcttaaaaaatatttcgaaaaaacaaaaagaaattttaaaatccagatttgaagaacctgaaaaaaaaaaagaaacaaaaactaaaagataagaaacataaaacccaaatttctgagccaaaagattgagttccctgcggagagtactcgtcctcctcttcttcttcttcctcgttgttgctctcttctacgtcacttttctccgagtcagaaatcaacgcggctgagctacatattcaactcagaggcgactcggaaagcagcaactgaaacgacaccgtatcggtgaaagtactcgaattcggagcagttcgtgatgatgacgatcaacaggggatgagcgacttatgtgttgttatctgatattttgtgtcattttcctaaaaactttaatagaagtttctatattttattcttaaagtttctaaaaaaaaacacatttgctgggttagcgcaaatgcagcagtgggtttcacttaatcacgataatgtacatgattcgttaatagccctagcatcagaggttcaaaagcatgaaaagaggtacttattattttctttaaactgcttgattttact

SEQ ID NO: 344408 - DNA, 605 bp, Cannabis indica
aatcacaaaagttccacaataatccacaacaataatatttcacaaatattcaacaatttctccaaaataatccacaaatttccaaatgcttctagaaaactattcaactttcggaaaaactcgcttaactaatcaaagttttgacaagaaagagacttactaagcgagaatgtcgttcatccaccaccattgttgcacatccatggagaactcaaggttgaagatgatgaatagtggaaaattcggatttgggtgaaaaagtggaaattgtggtgtgatttttgaagaaaatagaagatttatgagagaaatttgtgtttttggtgttttggatggaagatttgaagagaatgagaagaaatttgaggattaatggtggaatgaggttgaataggctgagaaaaggggaaaatcgggttggggttgaaattaggttaaatggtgaaattgggtgaaattggggttttaaaagctgaaattcgtggtccagtcgcgacgggctatatgccccgtcgcgactagaataggcagagggatctgttattttcgtactgtccagtagtcgcgactggcagttccttagtcgcgactactggagcctcctg

SEQ ID NO: 344409 - DNA, 565 bp, Cannabis indica
tcgcttagtaagtctctttcttgtacaaactttgattagttaagcgtagttttccgaaagtttgaataattttctagagctatttaggaatttgtggatttatcttggagaaattgttgaatatttgtgaaatattattgttgttggattattgtggtattattgtgatttttgggaagtgaagaaattaaggggaggtgctgccgaatttttccaaaaaaaattttgtgtggtaattgtgaagtgtgtcatggattccaagcgtactagaacaggacaatcgggtgcttcatcatcgaaaccgccaacaccggcgtcaaagtccaattatgaaaaagatagatttgtgagtttgaaagcgcaagaaagatactttgaattgcaaaagagagctttcattatagatcgaggtatcgaatatgatggaaaccccaccccgaatagcccattattcgagaccatgaggcaacaaattcagacccgccaatgggagcaattagtgcgaattccagagagaatcaatcaaactctggctcttgaatttttagccaattggcctgaagca

SEQ ID NO: 344410 - DNA, 600 bp, Cannabis indica
gaatgctaaatatgtgattattaaaattgaattttgggattaatcctatttgtgaatctcgagaattgtgactaggattaccggtatttgttcaggagcacttggggatttggaatctccacgtacttgggaaatcaagtaagatagtagttagcacgtagagttaagcgcagatgagctcatgttgaatattataaatgtgattaattaagatccgggattagggttattaccctaaagtgagcggttatatggtctaggattattaccctagtgattatagatttttaaatgctatgccattctttataaattgatttaaagaattatgcgttcaaggcataatttggttggactcggtaattagaaccgagatgaactgatctaaggccttattgtaaatagacgtgtgagcgtaacacgtgggtctatgctacatagacgtaattaggcgtgtgagtgtaagacgcaggtttatgtcaaataggcaataagtataatggcattattattacatatgtgaaatgtatattgtgattattgatatttatactgtcttgttggacttggctcacgggtgctctactgtgcaggaaaggg

SEQ ID NO: 344411 - DNA, 493 bp, Cannabis indica
actaaacataaaatttatccaattattaaagttgtaaataaacaaactaacaatgccgtgaataatgacactatataacataacatgtatagtgagttttttattcactactataaaagaggccataattaaaaaaatcaatatataaagaaaaagtataatggagtgacgtaaaaataagtgagatacaatgatacaacaagtgagatacaataataacaatagttttaaatgatcgagatatgaaaataatgcatgatgggcaacaccgtaatttttttctacaccaccctatttatttatttttataaaaataatttcttttaacaaagtaatttaaaatactacatataataattactaaaattgtatatttagtttttaataaataaaattattaataataatatgaaataaaatagtatatttataattttactatacattagaattatattttattttaagtaactatttattataatattaaaaa

SEQ ID NO: 344412 - DNA, 529 bp, Cannabis indica
tgtaactttatctatttcagtattcgcaaacaaaaagattattcaaaatttttttcatagtcatgtttgttgagttatttaaaacatctggtaaatttttgagaaaataaaaaaaatttaacacgccgaaaactggatttatatagacagttgcacgcgtgatttttttattttatacacgtttaaaatagactatttgagcatttgtttttatattgtattttttttttttttttgaatttcttaaaattttataaaatatcttaaataactataacgtacacgactataaaaaaattagactaaaaaattattctagttgccaaaacaaataagaggacatcaaagcattttctttttaagtaaaatttacaaaaatactaaaatttagggtaacttttacaaaaatactatcatacgatttttttaaaaaaattactgtatttttataaaacaataatggaacacaaaacagaacaaccgtagaacaataattatacttaacacagtatacagtataaaatttaca

SEQ ID NO: 344413 - DNA, 2034 bp, Cannabis indica
aagatctaacttacttttgagttctatcaatcagattctcaaaaacatttcaaaaagctctggtacataggccttcctactcaactacattagaaccaatgatcaaacaatggaagaggaaattaatgactactggtggaggcacaaactaaaaaaaaaatcagaggatataaaatggataattatatttgagaatatagatttataagaaaatgaaatttacataactttgatattgtataaagaatgatgcacaggtacgaaatcgccagtggtgatgttggaacgaaggtagggagggcgacgaaggaggagtgctgaaatcgtagggtgcaaggggctctggcgatgttgaatggaggaacgaaggtggtgaggaagatggctactgttcaggtgagaaaggttcttagataagggtatattgggaatataacaaataaaagaaggtataaataaaatatatagaaaaggagggtaaaaatgaaagtagttaatccaaaatgggtataggatgcaatttcctcttatatctcactctacacgtgtgggctaggccatattttaaggtccaataaatattttctcaattttacaataaataagatttattatattttttttaataaataaaaattaattaattctcattaacctcttatttcataaggattaagctgagtattattttttactaaaataatatatttctctcttaatattattttaagaagaatattatatttaacaagttaatatagttttatcaaataaaactaaatagttaaatactatttaattattcaattcataattatcataactattcaaaataacaagtttcataaattactattttgcctttaagaattatttctcatagaaattaattatcactcaaatttactcatcaaataaaacacccctatacagtgttgtatagaggtgacttggggactatggacccatattttgaagctccaataaatacttgattattatcaatctcatcaatagaataatctagttactaatttcattattaatccactataatatgaaattgcactctttgataatatagaattatatttatagaattcttactagtagtctattgatataatcattataagtagtttgccctccaattattagcataattagagttggtcaaattaatattttacctttctaattatctttttcattctttatataccattaattcaatgtgaacagttaatctataacttattatagatttaaatccacctgttagcactatcagaattaacactatgaggaaactgatatttgattcgttaggaaagtttggattccattatagtataatatgttcccaactactcatgttattaagctcccaaaatagaagttgtaagaattattttctttgagaaaccataacgagtgaatcaaagaactcaataagcacaaataagagttcatgtatactcagaattcaagctaatctaataatgatcatctttgtgatatgaataattcttggtaaacgacatgttaatgaaagatgttattacatattggtccagtcatgtataatcaaattatacacaacacatttaccacatgtctatccacatatgtgattcgaatcaaaattacacacactagagtatagtgcatagtaaatcgtacttagtagttatatattaaaaattcatttactttgatacattactgactagttttatttatattgtataatcttaattctcttgtacattcttaaacagggccagctctaagaatatatgggcctaagacgaattatatttttgggtcctcactctcaaaaatatataaaaaatattaaaaatagtgtcatgggattcaaacccatgacattatacaatatatcatataccccaactaactaaacaatatttattatttataatacatttaatttttcttaaataaaagcctaataaaatttttattttttattttgggccgccgaaatgtatgggccctaggcacgagcct

SEQ ID NO: 344414 - DNA, 574 bp, Cannabis indica
aattatttatggcttagtatagactataaactgtgttagaatagttagatttggttttcgatcaatttttatatttttcattgaatttatttagttgattcctaatttaattttaaaaaaatagttaagttttgttaaaatagtaaaatgtatttttgtaataccatttactgtctatgatataaaatgaaatagattttataatttattagttgatgtatgtatttattataattaattatgattaattaactatttaattgtgttttaattagaataaatagtattttagtaaaattttacataaaaagtgtttgcatgaattcatgttttacgttaaaaatatttatttgagtacatgcaatgtgtttgtgtgaatcaaaatgataagcgattatgtatgttatgacatgcaagtgaaattagcttatgtattacgtatttttacgtgaaattctgtatgagtttagagtatcatacttgaatgtatttttgagtgtattgttgtgttaatgaatatttaggatcttgttctcaacaaggaaacacattgaggtgctcgaggtagcaagtg

SEQ ID NO: 344415 - DNA, 790 bp, Cannabis indica
ggagccaagtacgcggtggtagcagttgatttcttcactaaatggactgaggttgaacctcttgtctccataacctgcaagaaagtcctcaattttgttgtcaaaaacattatttgcaggtttagaattccaatgaaaatagtgtccgataacagaactcagttcgatgatgacttattcactgagttctgcgagaggagcaaaataattaagagcttctcgtcagtatccaagccttaggtgaatggacaggtggaagctgttaacaaaaccttaaaggataatatcaagaagaagttagatgatgccaaaggtagattggtcgacgaactacctcaagtactttgggctcacagaactacagaaaagatagcaacgggacatactccactctcgctagcatttggctcagaagcaatgttacctgtggaagtaaacatctcgactcatagatgagagttttataatcaagaagaaaaccaagaacttttaaaactgtccttagatatagttgatgaaaaatgtattgggtcgcaagttactaatgtagcgtttcaacaccgagtaacaagatacctcaacaaaagggtcaaaaagaggctattcaatgttggaaacttggtgctaagacgagtatttgcaaaagtgagagatgcatctgcaggagtattcaacccaaactgggagggtccttatgtgattgaagcgatagtaggaactagggtttacaaattggctcagctgaatggctcgctgataaagaactactggaacgtggaacatttacgac

SEQ ID NO: 344416 - DNA, 588 bp, Cannabis indica
ctgggccttggctcacggttgcactattgtgtaagaaagtgtaaaacagtatcgagtcagccatgagttcgagggttttaaagatgaattgtaaatgttctggccaagttagacgagagttgagcccaacaaggaattgtacaaaaattctatttagtcacttcggcttgtatgaaataatttgtaatattttgaaaatacttttatgagatccctgacatgactttaatattttattttaaagtaatgtttgtttttattacaagttatctgtttaattaagtgaaatttattttaaatcacttcgtttatggactccgattaacgagattagtatattttcattttgacacgtgacgttcctctagacgttataatatttatttatcttaaatatattttagttttgaactctcgtccacatgtcgtgaccatatttgttgctcgaaatgtgtgcataataactttttatgatttttttcgcacataaataataaggtagcctattaaaatatagagtaaataccattttggactctgtgttttgcaaaagttacagattgggccctgtgttttgttaaatgacaa

SEQ ID NO: 344417 - DNA, 794 bp, Cannabis indica
acaaatcggggaattaaactttcgaacatataaacatgattatattccactgtgctgacaacactataatcacaaaaaatacatatgttctgggcttagaatttatacataaaatcatgaaataaatcatgtgaaccatgcaacataaaatgtgattttatatctttattaattagtaaatctgattatattgaaatggattttatttagggcacaaaacccaacaatatagtgcgatggcacaattatatacgtagatgaataatgtatgaaatgtgactattataattgttcaaatactattttattattttgtcttactgggccttggctcacgagtgctctattgtgtaagcaagggtaaaacagtatcgagtcaaccatgagttcgagagctttaaagatgaattgtacatgttctggccaagctaaaccatgagagttgggtccaacaagaaattgtataaaaaatttattttgccacttaggtcggcttgtatgaaataacttgtaatatttctaaaataattttacgggatcccagacatgtaactttaatattttattttaaagtaatgtatgtttttattataagttatttgtttaattaagtaaaatttattttaaatcactaggcttatggaccccggttaacgagattagcatattttaatcttggcacgtggtgttcctctagacgttacaatatttatttctctaaaatacattttatttttaaactctcattcacgtgtcgtgaccatatttgttgctcgaaatatgtgcataataac

SEQ ID NO: 344418 - DNA, 643 bp, Cannabis indica
aaaaagtcagtactttatttttatatatgttttttgtaaatctatgaggagtcattgttattacacaatgaaataaaaaaattgatatttttatgatgaaggttgcaagtttgagctgttatgaaaattactatcattaaaatgaaaagtatcatctcatttgtaaagatagaacccattttatttaaaatagaaaactaaacttattttaaagaaatttttacatgaaaaatccattttacacaatttattacaaaaatactcctacacgcctatatcaacttttttacttaccatgtttgttttattacaaaaataccacttagtcatcatttcatgcacatacacgtgtgctatccccatcactcatcaatcaaatcccactctcttccctctcttttttcattttctttcaatttcattttcgatttttcatttctgtttctaacttgatttgaatacaagtaacctcccttcataagattaaccacccattattgatcacgtttttccctcttctttttgttcatccacgaaatttcaactccctctaagcccacgatttatcaactgttattccctctctgtttcatttttttttcaaatttatttataagatggcaatcactcgttcatcatcatc

SEQ ID NO: 344419 - DNA, 575 bp, Cannabis indica
aagttcgcatacaggcaactcaaaatacagactcaaaatagaaaagaccaaaacccttcaggttgcactgacgcgatatatacaatcactgctaagctccatctcactgttcctccagcttcgctttccctttacctacacaaggtagcaaactgatgagtcaacagactaagtaagatatgcaaaacatatatataagtaatgtgattccgactttgtgctgaagccgccctaagctcaataatcaagctcaccaaatggataagaacgttcttaagcgaagtacgaccactataccaaatgcactaaagtaccaaccctgtactcgtgttggtagagccataattgtactcccagaaattactaagtgttgtaccacatgcacgacgtaccccctggtactcgtgttggtaacaccacaaccacactaatataccacactatactaacactctttaatcacattcatattagtgctagtagtgcaaacatccaatttaagcatacattcatatatacaatctaatgctatcttacctcgttccgtgctcaagtgtgccggtcagcctgagtgg

SEQ ID NO: 344420 - DNA, 873 bp, Cannabis indica
atttattaaaagttgagtggggtgatgtgcccccacatgactccattcccctctgcctctgatacctaacaaaaatttatttattttagtatttttttaattttattttgttttacatttttatttcccgactaaaatccaactaatgcttcgcctatcccttcaaccccattcttgcctaattttcataagagcgaggtggaacaataaatccatattagaatttagaatttgtgatctcacaagaccttaattaaataaataaagatcttatatatatttttctccacaagatgtttagaaaaatttgaaattttgtacataggtatatatatataatatatgcatcgatattgttaggtcattttttagaaatttagttgtcaaaataatttttttaattaatgtgcatttttatagagtatttaaattgtttttattacattgattttgtgcatttaattactcttttcttctaaggaaagattctttttcagctgatctttttgggtttaggaaacttcttgtaagataaagaattctcttatagaaagttgtctaactttgggaaaacttgactttccctttttctaattgatgatttcaatttttttaacagatcaaagaaactttatttggcaggtttgaattccaaattcgtgatcttggatcaatttgaaaaatttcctttctagtcctgatctgctgttgcaaaacgcgattctgatgctacaaattaggaatttttttaagaatattttgtacagctggaaaattgtttttgtggttgtctctacggttgctatattaatattatataaataggacctagagaacagccaaacgattttatctttctttgtgagaagagtg

SEQ ID NO: 344421 - DNA, 602 bp, Cannabis indica
aaaaaaaataaaaaaaataattgttagaattattagcgggtataaaaactcaatgattgtgctaaagaattaaatgtctcaagcatacgattaattatagaattttttattacatacaaacacatactttattataagatagaatttatttaagatttagttcataaaaataataataattttttttttatagaatttgttataaataatttaaatttttaaaataattataagtaattaatattatatattttgaattttacacttaattataatatttttttttaattttaacatattgaattgtaatcgggtcgttagttagggttgaaataccctgtagatcgttaatgtaagtataaactacaatatttgggtgatatgaagtgatcgataccaatctaagccttttacatgtggtatgtttatattgttatacctaatatttttatttcaaaatttattttaaaattaaataaaatgataaaaataaaaaataaaatatttaaaaaaatattataaattttaaaataatttttataatttttaaataataatattaggtgtaccaatataaatgtgctatgtgtacaagagtgtac

SEQ ID NO: 344422 - DNA, 565 bp, Cannabis indica
gagcccatgaggcatgtgaggaaaaaaagcgatcctaacaggtactgtaaatatcatagggacattgggcacacgaccaaagaatgtcaccagttgaaggatgagatagaaagtctcatcgctcgaggccacttctaacagtatgtgaaaagaaagagcaatggacacaaccaacctagtgtgccaaacaacccaaacaatcaggtgttacaagctcttcctgttaaaggagaggacatcttggttattttgggaggactgcatattgtaggggagagcaataacgcccaaaagagatatgtgaaagagataaggaacgagcagtcagcattttccccagaaccttccaagaaggtgaaaactgaataacctccaattatattcaaagtggaagacgagaaaagcgtgagatatcctcatgtcgatctattggtgattaccattcaactcaccataaaaggataaagaggtgcaaatagacaacaaaagctcagtaaacaccctttataaggaaacactgaggaagatggggcttgaaaaagccgaaattgaggccttgtatggt

SEQ ID NO: 344423 - DNA, 606 bp, Cannabis indica
aatggtaggagtggaggtattgcgttattatggaaaattgaggaagaagtgtctttgcttgggtatactgatgcttatatagatgtgagagttgcttctgaaggtgtacaggaatgacgtttcactggtgtgtatggggaaccaaataggagtaggtgtgcttctacttggaatatgttacgtactcttgctaatcggtctaatctaccaaggtgtgtgatgggtgatcttaacaatgttttatctcatgatgacaaaaggggcggtaataggtaccctgactttttaatccaaggttttcaacagtctttggttgacagtggacttcaagacatggagttatgtggttattcgtttacttgggagcgtgggcggggtactaatcattggatagaagtgcgtttggataggggacttgctaatcttgcttggttgaacatgttcacttttgctaagctccataatcttgaaatttcaacttcagaccatgctccgcttcttatggtcatggttcctgctgcaggccacaattttgttaagcaatttcggtttgaaaatgcatggttaagggaacctctttgttatcagattgtaaaggatagctgg

SEQ ID NO: 344424 - DNA, 1128 bp, Cannabis indica
ccgggtatttcgggccgaaccggttcggggccgcaatacaagtttgggatgatttattggcatttttatttatatgtgactaatctcaaattaattagagaatatttgtgatgagattgacaaaatttcccttaaatgcttttacgtgtgtaatttggcccttgggggtattttggtaaattgggaaattagtgtatttgtaataaagtgaattgtttgcaaaaatgaaaaacaatttatgcttttgttctcagcccttgtaaccgaccccctccctctctcaaaactcatcttttcaagttttgatttttgttgagaaatatcttggattcaagcttgaggtgtgataatctttggagctagggtgatttgggatcttgaggtagtttctatctcttgttgccttttaattgttgctgaaattgaagtgagttaagcatgttttagcgtgtttattatcttgagatgcatgttgatgatagttgggttgttcttgttgttgtgagcatgctttgtgcttggatcttttgagtttatttttgtttaggtttataatgaatttaaaagattttattactgtttttattctgttatttagctctgaaataagttgcttgaagatgttcttgatgttcttgtgatttaatggtgcatgttgatgattataaggtgaaatattggatgttgttgattaatgttggaattgatgttattagctctttgttgtgatgatttttatctgtaataggttaattttgggtatggtatgattgaggttcaaatttatggaaaaattggcatgtttaggccttaaaaatagagttttttggtgttctaaacccaatcaccgcgatgggatttttggtcgtcgcgactgggttcggcagtgagaaagtctgtttttcccaattttattttggccataacgttttactcgggactttgtttgggacgttctttatatcgttggaaagctcgttccaagctctatttgattatttgtgttttacatgccatgtttatactatgtgaaagtgaaatcaaggattaaccctatttgtgaaatctcgggttgtgcgactaggattaccggcacttgatcaagagcacccaagggtttggaatctc

SEQ ID NO: 344425 - DNA, 517 bp, Cannabis indica
gttgagagaaaaagtaattttagccaataacaatcattttaatccaaatagtaaaaatcttatatttctaatagtgatacccctttgtgaattgtggcccgaacccatctcgaaatattttttcccacttgtccaattaatttttactactaagaagtgaatatgaagattagttttgcgttaaatttggttaaaatagcccgctaattcaaaaattaaaaatactttttatttcagagtaaattttaacaaatttttccttactcttacactcgttagtgttctattaaaatcttaccatacacatcttgaaaaatcgtgaaatttcataggacaaagccaagatcgttgtgcagcagttttctattagacacgttaagagaaaaagtagtattcaagcactaacaatcattttaatcaaagtagtaaaaatcttatatttttaataatggtatgcctttctaaaatgtggcccagacccatctcgaaatatttttctccactagtcacaatgaat

SEQ ID NO: 344426 - DNA, 684 bp, Cannabis indica
tgccttgatatgctaatctgatggcaataggtttgcctattctgatggcaactaacatgtataaacatatgtataacattatactaatcttacctcaattctgaattcatgtgtgcaaaccaaacagaaacctaaaaactagaacgaatcgaaaacctaaattttttgggaatcccaactgcaaaacccggtttactggttttacaggtccctgtaaaactgattgctcgattttccccagaaaacccaaacaagttcaaagctcaaccaaatcgactccaaaccttaacaaatcttccaaacctccatattatacccaaataaacataatccaagcaataaaactagtacccaaactcataatcaaatttcacaattaaagctccaagtttgagttctaaaactcaaaacttggttaaatctatttacagccataacaactagctcaaatcaacatatctaaacataaataatcttctgaacacaaaatcaaacactaacaggagctacataactcaatctttcaaaatcatgcaaaaaatctcaacttaaagctctttaaacagaagaaagagaatctaggaaccttatcatgacttgaatacacttaaagcttgctaaaacctccatcaattgttgaaaaacaatcacaagccatagttgttctagggagctctagaaaga

SEQ ID NO: 344427 - DNA, 710 bp, Cannabis indica
actgtcacacgaattttttttttcaaaaatactgtatagtttttataaaactcaagtaaaacacaaaagcagaataattcaaaacaacagtagaacaactaaaaaacaccagtagaacaccagtaaaaacttaacacagtatactgtagcataaaacttataaaaaaatatactagaaaaagaaaaaaaaaatcatctgctagtatttttgtaaaaaaaataacaaaagttagcataacatgtaaattttccttttaggatggggcatgagttagggcggaatttaaaataaggtcttttcaatgagggtgtgttgagacgaatttcgaaacaaggcctaggcccggtctaaatcactctaagaacaaatcacaaattatatgggtttttatacaaactccataaaaatgtggcatttttaaaaaggaaaaaaatagtcatttttatatgaaaaatatggaaattaaaaagtagagataatcatttgttataagagggtaatcagttaggtaatactattttttttttaactttttcttaaatttttctaaaaaattaaaatatatatatatatatttatagatagatatatttagaggcttgtaccttaaacccgtggaaaataaaaattaagaaaaatgaaaattctaagaataggggaatgagaatttagtacttggactatgaaccatgatgaataagcaagggtg

SEQ ID NO: 344428 - DNA, 721 bp, Cannabis indica
tcacaagagttaggctatttgaagtttgcaaaaggatctgcccaaaaagaaatgagtgcgccacggcgtgctaaataccatgccacggcacatgggttcaaaacccagaaaaccagcagcaaaactcgaattttcagcctccaatcaccaccaaatcattccaaattacaaccaaacttccaaaccatcaaatagggttgctagcaaataatagatgctcaaataagcatatttcatgcatcaaaatcccacaattaacccttaacttcagattgtaaaaaccaacttaaactcatgttcaaactccaaaacttcaagttcaaaacttgggattagaatccttcaatccctaacattttcagcagcaagtaaataaatagagatcaaattcaagtattaaacctctcctagggttacttccatagatcaaaagaatcaacacaaatcaagagattaacactcaaattatcaagattaaacatccatttcactaaatatgcaaaccaagataaaacaacctaaagcatgcttttagcacaataatttcagcaagaattcaacaataaattttacataaacttagcaagaagctgttgggttttgtgccctaaataaaatccatttaaatataatcagatttacttattaataaagatcagaaataacattttatattgcatggttcacatgatttatttcatgattatatatatataatgta

SEQ ID NO: 344429 - DNA, 505 bp, Cannabis indica
gttgattgtcaacctaggtgctgggttcagcaccaggctaacctgggcgatgggccttgtttctagggacttcagtttgtggttttctcgtcgagtttacttgaatctttgttatttgtgatgacagtaaaaatgttcaacacactttttgctgaactgaattggaaacagcccagtttgacaaaatgtcaacctgggcgcaagacccggccctaggtgtcaacctgagctctaggtcgtactttttgcctttcgaaatttttgtttggtccccaaaaatagttgaatctcaatattttttgaagacagagatgatgctcgaaaaaattcttgaaaaactcgattttttgtggcccaagttggcaaattgtcaacttaggcgtagggccagccccaggtgtcaacctaggtgctgggccctatttttatgcttaggaattgttcttttcctctaaaaggatctatttcctaatttttgatggagatagtgttggaaatattttac

SEQ ID NO: 344430 - DNA, 742 bp, Cannabis indica
aaatagaggggtgatggcattttcgttcttgttttggtgttttcttgacctaaactgagactggtgctggtctttctaccgtgataagttgaacttctatttatcatactttgttgatagctttaattgattccggtgcaacgtattcctatatttcgagaagggtgattggaaagtttgtataagataatgatgtgttaccaggtggttccggtaccctactgtttactggagaactagttattttccagcaggtggtttaatcccttcccgagttatgggggaaaggggatggttggttgttttagttgagctaaacttagaagattttgaggtaatgttgggaattggattgacttgtaaagtataatacaaacattaattgtgaatataaggtggtataacgccctaatgctaaggcacactacagagctttttcaattacagtgttgtctttgctaatcaaagaattttcttgaaaaaaaaaacgtgttaaattaaaacttttatattaattaataaactttataatttacaaattatttacaagtaacgggatcctgttttcaaactttttaaacataacactctaaaatacataacatccaggtcgcacagcgactataaaatataaccccagatgtcacgagaccgaacactccaggtcgcgctgcctcgacatgtacaatcccatccaagccaggcacactcctgttcagccttcgcctttcctttacctaca

SEQ ID NO: 344431 - DNA, 858 bp, Cannabis indica
gcactgcaattataaacagagaatgaaattcattaaggataacaagagcatatagttaccgggattaaaagctagcccagccagcccgttgtccaaaaactgaaaaataattccaagtttaaagaccacttggccggtcatgatgttttaaaggccttgaggccatatataatatatatatatataaaaacatgagaaaaaaaaagatcagtgtttaaacagctggagtccgaggatcttggttcggttcttctgagccaactggagcaggaggatctgttgtttgagcaggagaagcatcagcagcctagtcagaagcttggccgaaagttgaagcagccacctctttcccaccataggcaacttgggccacacagtactcgaggtacatgtccttcgcgttgcccaagtagtcgaagttggcctggggattagccttccaaaagtcaaagaagagctcgaggccgacagtctccaaagcattgaccttctccttcgaacggtccgcctcggccacctgagcgtccttatcttcctttagccgaagaaggacctgccgcagagaactcctctcatcctaaagacaatcaacttgagcagataaggtcttgatggtttcctcaaagcgatcagcagcctcgaggtcctttgttagcacggtgatcttcttctcggcggcaaacagtcttcttgttggcctgacctaactcatgacgaagtgttgcagtctccgccctggcctcttcagcttccttcttggccgagtccacctccgccctcagatgtcggcagagctgcactctggagtagcagatttgcccggagtaggtgtagccaacttcaaaccggcctgcataa

SEQ ID NO: 344432 - DNA, 505 bp, Cannabis indica
gttcaattaggtgatgttaagtggaatacatgtatgtttaatttattttaattaggtaatgcatttttttttaaaaaaaaaattaaatggggtttgagattttgatctttaagaaaaaaaaatagatattgctacattagtgtgtcatttggatatgattatatatatacgtattttgttaattttttaaaattttctaaattaggtaacgtatactatatttttaaccaaaacttacataattaaatttgagtgtgtctatataggctggattcgtaaatttaatataaaggttttttattcccaaactttacgaaaaatatggtgtgtgaatcgatttaccctagctaaaatagaaagcaatcaatttcttattacaaccatttcaatttaaaatataaaattaaaaatatggttaaaaatatttataatattttaaatttaaatttctttatataaaatatttacataattttttattttaattcaaaattaaactaataaa

SEQ ID NO: 344433 - DNA, 885 bp, Cannabis indica
aaaaaaaatagataccttaagaggatttttttaggtatgtcaaagtcttcaaacttctctaagctcttaggatggacctgaaagtgggaataacaataaaaatcataagaaacaaatttgaacaactaaataaataatatgcaagcaacaagaaaaagacaaataaaatctaagcaatcaggaaaaaatcaaaaaataacatttaaaaaacaactccaacatgctcagcctaaaagatgaacaacttccaaacaacatattaagaacactatgcagaaaatgaaattacaatagtaattgtcaaccgtaaaattaaattaagcaacatgaaaacaactgaaaacaaacatttaaacaattgttcagaacaagccaataaaacactaaaagaccaataatgctataaacattttaatagtagaaacaaaacaaaaaataactgaaaaacaacacaaaaacaacatcaacaaaaatacataaaaaaaatacacaaaagaatgagacaaaacataaaaccgtcattataaacaggtaaaacaaaaacaaaaagaaaacaaatggtgattaaaaattttaaacttaagaaaataaaaaaattcaaggtaaaaataccttggatttaactttaggctttacttccaaatcaaggacttcatcctcaaaattagaattggagataacctaaaacaacaagggagaaacatttaaaacacaaaacatcatacgaaaaatacagcaacaagaaaaaaactaaaaagaaaaaaattaaaaaacaacataacccaacttacatcgttggtagattttaaagattttgttctctttgccttacgagactcaatcttatctggaatatgtctttttttagaaccagatggctctgca

SEQ ID NO: 344434 - DNA, 741 bp, Cannabis indica
ttgggcacaaattcttcacttgaatcggacaagccctctgaatcatgatcctcctcagtttcttcttcaggttcagaatccgaggatgagacggaagggggattctccttgagatttttggcctttgaagatgaagacaccacctttttccctttggatacatttttaggttgaaccacttcgggcttttgaggagtggaaaccttggaccttgttcgagaactcaccgtgggcaaagtcaccatagctttgtcgacattaggagcaccattcgaagaagaggacttcgacaatgtgtgatcggatgaatgagattcatcatgatcaccaaacccaggtgttgaagaagcaattggagaagcaacgacaggtggagaggcgagattgatcactgatttttgagcttgggtcttcgattttctggcagatttcgtcggagcagaggacgaaccaggagctccggtcgctggtgcaggcggcgcaggaggggtgatcggagatgcagaggcagagccacgagagggcttcttggacggttgagcattcttagttttggccatttctctttgaaaccctagaacacaaacacactctcacacttgaaaaagattagacttttgaaaaaataaaaagagaagagagagtggtgatcgtgggtgagtgggtagttgagaatatatacactttgattttacttacccaaaatcagaaaaaaaaaaattgaaaaggaaagtaacttcc

SEQ ID NO: 344435 - DNA, 664 bp, Cannabis indica
gcataattgtacttggctatccgaagctcctgccttgcctcatctccgggaatcagagtcagcacaatgttgggaggcactatgaattcctctacctcgggagggatcccgaaatcgtggctcggggccggagtgtccaccctccgcggccgtttaggtgtctcctcagctaccatcttgcctttgcgcttgcggaccagagcaaccattgctcttcttgaccttctttagcttcctcaggaagtacctcctcctcatccactaagtcaatagtgtttggaggggcactggaagaagccgtcacgggggtgaccatctgggaaaaatttggaggaagggaagcatcaggactgtgggctccggaaagggtggccaagatcgcctccatgggattagctgctgcaacaagaaaagagagctaagtgtcagaatatctgtgaaagcagtaaacacttaaaaagcaatcaagctagtcctacctcgactctctaattcggccctagcaaagttctgaatcttagcactggatgcatcatccccgagatagctgtccgagggacggaacccgctagaagaaagataggccgaaggatccaagggaacgggcaccggaggtccagaacccatccgggaccgacctaataatctcctaagttggagaaat

SEQ ID NO: 344436 - DNA, 577 bp, Cannabis indica
atatataaagtgatttcccattaaataatttatatacacattgataatatatttcataaaatatattatataaaaaaatagaggaattacttcatatactattttttaaccttctttttcaaatttacggtttgggttgctctgatagttgctccaatagtttttatgttagttgttatgtaaattttgattgcgatttaaattgctcccttgattactatgtgagcttctatgtgaattttcacaaaaatataaaaaataattattttaaagtttaaaatttaaaaaaaaaactcaaaaaaatatgtatatagaaaaagttaagttcatgtcagtagcattagaaaatcaaatggaagttaagtgatattgatgacctcaaaaagtgatcaaccgacagcggatttgtgcacattagatgtttgccacatatgtgcacaaatatgaatgaagcgttgtaatatcttttaccaaaacctagatttactaacaagtatgtttttaatatcctaaatatgaatctctaaaaagatgaaaataaacacatataaaatatgagaaaccttacattggtcgc

SEQ ID NO: 344437 - DNA, 685 bp, Cannabis indica
gggagcaaagtaatgtgattttgggccaggaaaagggtgctcaatcaaaaaacgattcaatggcgggctcgttcgattaggttcgccaatcattatgagtatattgagctggaattgccatgggcttgggaacccagagacttttcaattccttaaagatatggtttatcaaaagaaacccacgtttatttttctttgtgaaacattaagcttgaaacctcggttggagttactttcttctcaacttgggtatgaaggtgtgttctcggtggatgcgcaaggtaggggaggaggtttagctatgttgtggaaagaacaaactgacgttgaggttagaggtttttctcagaatcacattgatttgattattcatcataataatttatttgattggaggctcacgggtgttaatggtgaaccgcaccgggctcttagaagaaacacatggaaccttatgagaattttgaaagaagaatcggctcttccatggtgtattattggtgatttgaataatgtgttgagtcaagtggataaacgaggtggaaatccctatccaaattggcttcttgaaggttttcaacaagcggttgctgattgtgatttagtggatttagagttggttggtcatcagttcacttgggagaagggtagggattcggaaaatttaattgaggttcggttggat

SEQ ID NO: 344438 - DNA, 1276 bp, Cannabis indica
ataacaaaaaatcttgtcagtgtatcccaacttacaaaagataacaatgtttttctagaattttactctatacttgttgttttattaaggacaagataatagggaaaatcttgctcaaagggagggttaaaaatggcttgtacttgctgaccaagtctcctatccagctccagtgtcatttagcaactaaggcctctaattcgtgtacacctactgtttgtacttttgagtgtaataatgaggttatttccacaacctcctcctcttgtaacaattctattagtaataaaagtttccatgtttcaacatctttatctaagacttttaatgttaatttaatcaagatataaatgtctggcagtctaaattgggacaccttgccccaaacactacacttgcaaaggtgttacataaactaaatatcatctactccttaaagaatctcaagttctgtgatgcctgtaaactaggcaaaacacacaaactcccctattctctatcaacttctagggcttctatacccttggaattggttcacactaatgtgtaggggccatcccatgggccatctaaggaaggctttcaatattacatccactttgtggatgactttagccgttttacttggattttcccaatgtcccttacgtctcaagccttccttatttttctgcagtttaaaaccctagttgaaaaacagtttaattttcccataaaaaaatgtccaatctgactgggggagtgagtatagaacctttgcatcctttctagctacacatggaatccattttcagcattcatgtcctcatgaccctgagcaaaatgggagagttgaacgcaaacatcgacacatcaatgaaataggaatgactcttcttgcccaatctagtttacaactttcttactggtggcatgcttttcaacatgctacctatgtgatcaatagactaccataaccagttattgagaatgcaacaccatatcagtgtctatttcccaaagaaccagattatggtttttttaaaccatttggatgtgcttgcttcccatttctcagaccttatcagacctcaagcaaaatatatcaaccaaaatgctcaattcaatgaaactgagtttcctgttaactcaaacttttagatctccttgttttgatgattaacaaatatttgattattatttgttactaatgatttattgattttgtagcaaatttaaaatagaaaataaatattttggtatttttaccaaacttttgaaagcaacactaaatgga

SEQ ID NO: 344439 - DNA, 1326 bp, Cannabis indica
aaacctgagccttctcttctaagccctagccgccaccttcatactcttctctccttgaataatttcgaaccacttagtgtagagtagagcccacacacagcaagtgatacctcaatcatagtgaggaagatcgtgaagaaagatattcaacaagaaggattttcagcactaaagaaggagagaaagagatccaagttcagatcttgataatactctgcgacagaaaggatacaagggttagagatctgaacggaaggagacataatatttcgcttcacccaatgtaaggtttctcatactttatatgtgtttcttttataatcgttttagaagttcatatttagggtgttaatcaacatacttgtgagtagatctaagatcctggtaaaataatttccaacaggataatcataacatatctttatcgttgtacatatagaacgttctatataattgagagtgctattcaattctaaatctatagtggtgcaagccggaattaataagttagagaatttacgttttgaattttagatctacttattgaaagcattatataggcccatggtcccctcactggtttagataatactgcttgcagactcaattaattgattttaattaatcaattattaattctacaattagactatgtcttatttaggaattttcactaaccaatggctttattgtgaagacaagaggatttggggtaaatttgttaattaagattctttgtatggtctaattaaaaaataatataaatgacaattttatttagtaattaattataattatgaaataaatagttttggcatttacaagattgaattggaaaatatggtattattgaaaaaagaataagtagttgaaaaagttgaaaaattataactagagattggtcctatagtggccagccctagtgtgtatttttgcttaatattttattcttttttaatccatataatccagccctaagccctagttgaaaaactataaaaggaacatgatggtctcactcatccaattttgataatttgactattgccttcaaccttgatgagagagtcctttccatagtgatttcagcctcgttcattgttcttccatatttgaaccttgagtgaaagagtgtcatgcccacacatagcaaatcaagtactcaatcatagtgagcaagacggtagtaaccaaactcgaaggagagaaagagatgcaagttcagatcttgataatgctctgctacataatggaataaaggactatagatcttgaacggaaggagtcattatattctgttgcgatcaatgtaacgttttctaaact

SEQ ID NO: 344440 - DNA, 613 bp, Cannabis indica
atttaaagaaaataatttttaaaaatattattaagtaaccgtgattcattacctataaaaaataatagttaccaataatgcttaataacaatgctcttacataaattacttgatgaagtccttgatgagtttgaaccattaatttagaatattacaattggacactatcttttataggtgatgcgtatgattagttaataatattttataaaaattattttttaaaattatataattaattaattataattataaattacttaattaagcacatacataaaatacaaaacacaaactgagaaagagagataaaaagaacattattattattgggtactagaatactttttataaatggtgctctattattattagttagtaataatttttaaaaactattttcttaacttatataaaatttgatacttaataacagcaaataatatgataacaaaatgagtgcaccaacaatatatttttaacaattctctttatttatattagagaaatgctaaagggcactagtatcactatttgtccaactaaatatcgggtcctatataccattttggaccatctattttacaaaagttaccaattggaccctgtgttt

SEQ ID NO: 344441 - DNA, 1162 bp, Cannabis indica
taaaaagataagtaaaagaaagcaaaaacatgaacaccatattttaaaatggtttggccccgaaagtatggaaatagcctactccccttatatttgtattgacttgagagaaggaatgaagtattcttcctctcaaaagcttttacaattgatctctgagtaaatttctctcttgaatgtatttctgaagtaattttctcgatcccttttcatggccaaattaggccactatttatagggacttaatacatgaataatggtttcccttttgcctatatgagtaaaatatgaaactatattaattctataaatacaattcaagaaataggaaactaagatgtgttgcctttattctctgactcaatcccgtaattatagggattgtcttcgtgctctggaaacaacgagattgatctccggaattttcatctttcatgctttgcttagcataaacatgtatgcatcttggtcagacatcttcttgaccaccctgcttggtggtccgagtgttatagatgttgaccaaccataatgctgctaggaatactttccttcgcccaggtattagaaatatgggatacgtgtcatctatttctattgccacgtcaaggtgcaaaaaataggataacagtcactaagaagacctcttccactgtaaagtcgaggagataatgaagacctctttcgctgtaaagccgagaagataatgaagacctcctccgctatgaagccgaggaaatgatgaagacctcctcggtgtaaagttgagaaaatgatgaaggcctccttcgctgcaaagccaaggggatgttgaaggcctcctatattgtaaagctaaggagttgatgaaggcctcctttgctatcaaaccaaggagatgaacaagactacaacttaagagaagacaaagactagatcaattttcacataaatagacactgttataagagagccaatgctaagacaacaaccaaagatcagagtaagtgtttatagtccaatgttgacacatttcataagtgtctcaaaatcgaaggaaatcactcaaggtgtcatcaacttaaaattttgaaatccactatcaacaggtatggagattcaagatcctactctcagtcaaaattcttgaagaacagaacaattgtccaagattgtcaaaatt

SEQ ID NO: 344442 - DNA, 502 bp, Cannabis indica
agtatttgtcgaccctcaacaaaagccgactgagtttcaaggatagtctcccccaacacacccctgagtcgaatagagagcatcttggcaataatcttgtaaacacttgttatcagactgattggtctgtaatctctaaccctgcaactgcccagcttcttaggaattaggcaaatgaaagtttcgttgatgcttccctgaatactgccatctctttcaaacgacttaaccactttcatcaaatcttctttgattacctcccattgagactgaaacaaggccaaactgaatccatccgggcccggggctttactgccttcacaactgaaaactgcctctctgacttcactctcagcaaacggtctctctaagtgcctagcagagtcatctggtattgcgtgccagtctattccttcaatgctattacccgctcttctttcagaagtatacaaacttgagaaaaaagaaattatctccttgactatttcttccttctcctcaa

SEQ ID NO: 344443 - DNA, 1350 bp, Cannabis indica
ttttttttcctttcttctttcttcttcctaaactcatctctttctatctcttctgatttctctcaccactatccacgaaccaccatgcccaccactcaccactcaccactgccaccgtcaaaaccaccactatccatcaccaagctcaaaacaagacctagaacaccacagaccatggctggccaagagctccaccaaagcatcgtcgtgcagggtggttatttccggtaaatgattttgtatggggaaaggaacacgggatctaaatgttctagagaagggaaacataaaatagcaactcacttggcccaaagaggcccggagttggttggatagaatctgagagcctccgctctggcaagctcttcacgttggcaaaacaacaatgacccccgagaaccacgggtcttggggttttggggcatggcatggcttgaggtgggactgggtcgggtcatcggtgatcagaggggactcatgttggaatatcttttaccaggatctagatttactaacaagtatgtttttaacatcctaatatgaatttctaaaatgatgaaaataaacacataaaaggtatgagaaaccttacattggttgcaatggaattaaatgactcattccgctcagatctctaacccttgtatcctttctatcgcagagtatcaccaagatctgagccggaaactccttaaattgtttggattcttcatagccttacatactatgattaaggactaacttgcaatgggcgggcactgggcacacactcaatcactaatggttgattttttttttttgtgaagaacactaaggattcgaaaatttagagaaacaaagaacaagaagaagtctctaaaacctagagagaaagaaagctaggtttattgcatttttagcattagttggataatgagagtttcttttctttttatactacttctcttagggttagggttgatttatttggaatcaaaaatgataaaaatggagcaaaataacccgtaagtggccgaccaatagtgagcccaacgctagttagatttttgccattttctcaaccatttatctattttttacaaataccactttttgcaattttaaccctataaatgccaaaactatttatttaataattaaaataattatcaaataaaattgtcatttatataatttattaattagactccacaaagtctcttaattaataaataccctaaaatcctatttcttcattatcaagccataacatagtgaaaattcataaactagacatagtctaattttagaattaaaattgattaactaaaattaaataactgagtcttacaagcagtttgtctcaactag

SEQ ID NO: 344444 - DNA, 785 bp, Cannabis indica
tttgttcgtattttttatttttttattaaaaattattttcaaattttgatatatagaattagttcaattttaaatattattttgatagtttaaccagatgagcattttcattaattccgaagataaatttaagacaaataatatatttttttaattactattacaaagtataatagtaatttttggttttatttaaattactattatgcttttaaatttcaatgattatcactacattgaatattattaattttaaaattatgatattaaaaaaattaaaaactaaaataaaattaatatacgtgacttggcacgtaacatctatctagtctatatacatacacttattcatttatataaagtttgatttaaaatatctttttgagaaaaaaagtactaaaaatatttatataaagagcgatagaaatataatgaagaataaagagtatcacatgagaataaggaagaaaaagttacaatagttttttcatcacttttcatgaatttatcattaaaagatcacttttttacattaataattcatactaatgagtaaattatgaataattcgaagacatcgatgacattgaagttgtcgacataaagaaaaaagtctatatgtctctaaattatgaaaaaaaatattaaaaatcgagatcttaatgctatttattgatattactgtcgaggtgttatgcatatataaaaaattaatagttacttaaacttaaagcaaataaaagaaaaaagagaaaaataaacaaataggattagagatagatgga

SEQ ID NO: 344445 - DNA, 626 bp, Cannabis indica
accaccgacccatctatttcaacttttgactagctagcaggctaaacagcccctttcttggactaatttgatactgcattaaactaaaggaaatggcttaaaataacattttgatctgagtttgaaatgaaatgtgcatgttcgaggtattgcccagatatgtgcaagcaaactatcagtctcgtcgtctcaggataaacagccagttaacacattgatcataactttattgtacaatagagaactgtcgaaataccatacccaaaaaaccgattacagctcggaatatatatgtaatataatcgtatgtatatatcgtatatgtttttcagtgagaaagagagatgtgtttctcccgttggctctgatgcattacatagacaatgcattgaaggtagtagcgggaagaaagacgttactgaagggaacgttagaatgtgagatcgtgggaacgatgctaaaaattagaaagcctctgtttaccaattaattaaacatgttttaaaaaaactgttttaattaaataaataaataaataataataaaaatttaataaataaattgtaacgtccccgcttcaagcctccattaggcccttactgttgggaattattttaccaggatct

SEQ ID NO: 344446 - DNA, 635 bp, Cannabis indica
caaaattttaagaaaatttggaataatttacaaaatttaatgaaattggaaaaagtccttaaatctaaccatttcaataattcatggggattttttaaagacctaaaaagttcagggggcatgatttggtacatgtcaaagttcagggggcaaaagacttaattagccttttactaatatgacgattgtccatatactaaatcccgccccttgaacttcgatatctactaaatcacgctcttcggtctttcaaaagtacaaaattgtatcccctaaattttcatccacatcagactttgtttagtaaaattagacaaaagtctttaaatccaacaatctcaatagttcagggggaatttttaacgacctgaaaagtttagagggtatgatttggtgcacgtcaaagtttaggggacaaaaatctaaattatccatatatattgttaacgcagatttttattatctaaatatataaccttttacgtaataaatatactacaaaatttaataataataataataataataataataataataataataataataataataataataataataaatgaacataagatattttacgtagttttgtagttaaaatctacatactccacgagtccttctta

SEQ ID NO: 344447 - DNA, 592 bp, Cannabis indica
aaaaatatatataaatatataattgttaaatgataactactttttttgtcagtcatcaaccaattttgtatacatactgatgcttctagtgtataaggatgaagcctcgatcgatgtggactcacgtgtctaccaccagtgctaaatgtagattctgaagcaacagtgctgacaggcacaacaaatatatccttggcaatcatactcaacaaagggtatttgaggtccgtcaccttccaataattgcatatatcaaataactcttcagtcataggtaccaagttttcctctaaatataaatccagttcagatttcacattctctactcgataggaagctctaacaaatctatcaaagttagaaagggcatccaatcaccgtgttgaagaaagatgttgatatatttttcacctgaacccttctttctctcaaatgagaaaacttagacccgtactcctcgagtagctcgcaacaaagctcacgaacattcgccatttcagttacatattgctcatctccatagattacatggaaataatattcgagaaacataaatttgtacctcgggcctaaaacaaccgccacacacata

SEQ ID NO: 344448 - DNA, 1158 bp, Cannabis indica
tttttatatgcttggtgatagttttggttttgttttagccaatataaagaaagatatgtatataatgtgcgatgaaattttgtcttcactgaatgcggctgaattgtatatatacatacaattcgtttatgttgttgataacttatatatgggccggatgatatgaaagttttgcacagcatttataatgctttgcgattagaaaattttgccaagattaatatgtatatgcgtctgtgttgcaattgaagttctttcatgtatatattagtcatgtaatatgcaattaagttcctgttttgtatatatatacataataaagttaaatcataattttattatctgactaaagataaattcaaatcttttgtttgatatgcaattaagttttagtgtgtacggtgtatgtatatggattcattttggctatattttacttttgttttctgtttactcctgcgaaaatgcatcacatgcttgcattagagaattgcattctgttatgatttttcttttgttttattatgattattattattattattttattaaaataataattttaaaataataataataattcagtaacaattaattcaaattttggtttaaaaaatttattaaggatatctaatatttagttaaattaattgaaacaaaatatcaccaaagtgatctttttttgtgtagattaatttaataaaaatattatgataattgtgtgtatgtgattcataaatttattaactaacccaaaggtaagttaatatttagttgaattgcatgcatgtttgtggtgataaatgtgtgacaattataaggtattttgtgtaaataatatgttagtccaaagattgcatattatttgacataatttattgtcaatgtttgatcactacaacaagagtaccgcttacaattaatattactgtccaaagacttaatattaaggttgtgtttggtatcttgagatgggattaaccattatttgaatttattgttttatttagattcttatatgagcatgttatttatgtaattgtattgttcttttcagctgttgctagtgtatctgctaaccttaattcggtaccggtccttaatggtaataactttaaggactggaaggagaacatttttattgttcttggctgcatg

SEQ ID NO: 344449 - DNA, 669 bp, Cannabis indica
ttccaattgacaaaacgaggcacgaaaactttattcgggaaaattatatataaggggctattcgatgcctctcctatagtgtgttcttcccgtagaagcaaacgacatcattagagaaatccatgaagtcttttgtggggactatgcaggttggcaaagcttgtcaaaaaagattattcgacaaggatttactggccaaccacaaacaaggacacccatgaatttatcaagaagtttgataagtgtcaaagattctcgcatatacctcgcgtaccaccaacgaaactaagaatgatgacctcgccttacccatttccaatatgggggattgatttgattggggcacttcccacagggcgaggaggagcaaagtacacagtggtggttgtcgacttttttacaaagtggacagatgctgaacctctagtatccataacctgcaaaaaagttctcgactttgtcataaagaacataatttttaggtttggagtacccattaagatagtatctaataacggaactcagttcgatggtgacttattcactgagttctgcgaaaggaacaagattattaagagcttctcgtcagtatccaagcctcaaacgaatggacaactagaagttgttaataaaaccttgaaggatactattaaaaagaagttagacgct

SEQ ID NO: 344450 - DNA, 743 bp, Cannabis indica
gttgttgggttgggaagtagaggcaatgtttgcctcaaccttagccgccccattagcattcccagaattaggagctttagctcctcctttccgtggtcctccaatcaaattttcaaatgtctgaaggttgttgattaactcgtgaaagtcaagctccaacttgtttatgacatagtttgaagtgaagggcggaaaggctagagtcagactgtttaagatcaaactcacttaagttgtctgatctataacagctccatgattctcagcttcctgaaagtaactagtcatctggagaaggtgatcacacatgctctgatgaggtttcatccgtgcgttgatgaaattcttagtcgcttcaaagagagcttaaattgatgcaatcctgaacagttcagttattggtgcatgatttctgcagcggtgagagtgttagcaaaccttgtattcacggtgttaacaatgctagataacataaagtatcaagctttgttgttggcattctgccaacgctcgaacttttctttcactgccttggttgcattctcaccacgctgctcaggagcctctttagtcaacacaaaccgggcattctcaccaatgagagaaatgttaattatctctccctatttgataaagttagctccattgagcttattatcagtcaatagtgtaatacccgaaattaagaaaaaggattaccaaaaccctaattagataattatgagttaattgaggaattatat

SEQ ID NO: 344451 - DNA, 685 bp, Cannabis indica
gatcttcagatcaagtgtagtatatttgactcaattcaaatttctggaaccatgttcataaaacattatgcaacatcctttactatatgcattactcatcaagggatactgaaatctttactgcttattaaggacatctgttaatacagaagatatatctctcattctaaaaaaaaaatgaaatagagataatgcagtgtagaaatttcttcagctgaataactttctggtattttaaatttgcaaagttatgtatcttcattgatggagcttgaattattatagatggtttttcacactcttctagaataactcctcctccccttgagtaaccaccctctcgaatttttaatgagttggtgtagatataaagactactaatatacagttccttattatctaacacataggtcactttcataaatctttcttgactattccttaatgttccttgtttgattacgtctcagatggctcccactcaacaatagatgtctggttaaattatacataaaagtacatttaacctcttactattgttttgagggatatctagttgtgacaaattgtcttagtttgaaacttctagactaagtcatcaacatagcaatttagtattttaaatgaagtataaaatacttgctagagattaagtaatcaaattaagataccataaaattttatg

SEQ ID NO: 344452 - DNA, 779 bp, Cannabis indica
aacttttattcattgttaatttctttactgatttcctgcttcttactttcactgtttttctgatttaaatttccttttaaaattttatttaaatagaaataagaatttaatttaaacgtacttaactacaatcctcgtgggattgacctcactctttgtgattattacatgttaaaatgatgcgtatacttgagtgtttcaaattaccactataagtttttggtgccgttgccggagattgttagttatattattaaaaattaaattttgttctaatttgatttttcttttcaattttagtactaattctatttgttttaaaaaatttctcttttctcaggttcaactagtttatgagacgttaaggagaaactgctaaattacctattgatcctgaaattgagaagacttgcagacaaaacagaagaaggaaaagattggaaaaagctataatagagattgaacacgaagtaaatatggctgacaacgccaacgtcaacaacaattataacaatggaggagccgtagaagaccaggctaatggtcgtagcattagggactatttgctacataatttgacaagggccagatcctgtataaggccacatgcagttgatgctaacaactttatttgcaatcccgttgccaaaaacttgatgtgagaattgtgtacgcaagtatacgtagtcaaacaagtaataaagtgataagtaagatcgtctcaacagggattgcaaacaaagtttgatgtaaaaccaactaattacaacttaaagtaa

SEQ ID NO: 344453 - DNA, 502 bp, Cannabis indica
ggcgttccaaacgagcccataaatatatatattattctataaatactctttatctttttctttcttcttcttttctattctctatctttctaatccatgtgcttgctcttcccatatctatacaatacaaacattttgttaaaaataaaataaatgattttatttataacggccgacaaggtcacaggggtatttgggtccatgtgattctggttgtcttaatttatttaagcaatttttatttgcaccataaaattataagcccaccacaatattaggaaagaattacttaaattaattttcaaaaattacttttaatatttttttaaaaaaaatttcacattattttctttaaaaatcaatagttaattagttttattttatttttgcattttttaaaatcatgcataattttttggagaattattatcccatatactatttttaaccttttttttttaattttacagtttaagtttctccggtaatttttatatgggtt

SEQ ID NO: 344454 - DNA, 983 bp, Cannabis indica
gtttttcattttagcattttgtttggttttttagggcttctatttttttagtttaacttatttattctttttatgggtttttcattttcgtttgtttagtcttaatttctgtttcattttgttgtcttaatttcgtttgttttttgatctgcttggattttagaagaataggtcccatgttcgtgatttaggttctgaccctaaagctcctctaagagttgtggagattgctggtctgccatctcaacaaaaaagggagttgttgtttttaagtttattttatgttgtataatagttgtttaacttttttgttttcctttctaggtaatagtgattgcggagcatttgtggctgcatttgccgagttcttcatccatgggaaagatgttcctagtgattttaacattgaagtttatcgcactcaacatgctgccctcttcttctcgtacagtcaaaggaaaaattatgaaagtgttgagagcggggatgagaagcaaagcaagtcttccaagccttctaaattgaaaaagtagggtcatttttagggaaactttattgttcttggttgattttcatttcagacaatttttaatttttttttatgtttgtaggtactctatgcgttttatattctggaactggttataaacttttaagatatttgacattaaccattataatatgtttattttttttaaatattttaacaacaatagtgttatgattttatatttaatcatgtttgtttttttaaagtcgtccaactatagataaactattatgcaactgtatacaaactatttttagtattcaacatacttgttattttatttgtgacatcttatctcaatatattccttactgttatgcaactttttccttctccttattatacaacttataaaaaatcatatctgactttaaaagatttttatattgaaattctttttgtaataaatccttaataagtgtcaaaactgtcc

SEQ ID NO: 344455 - DNA, 561 bp, Cannabis indica
atataattaattctagtgattagatctccttatgttagttcgtaattagttttggtcaaattactatttacccttctataaccttctttatgctttagtacctttaattcactagtgaaagtgtaatttagatccaatctgaacttgcgcacaactttttagttccaaaattaacacttaaagggaaccaacattcaatctattagaaaagtcaagattctataattgtagatcatgttcttagccatccatattactagattcccaatagagagttgtaagagtcatcttctttgagaaactttaacgagtgaatcaaagaaactgataatatgatacatagttcatgattactcaggattcaggctgatcttatattgattatctttgtgatatgagttaggtcattatagtaaataacatacttgatatgagttaggtcattacatatcgatccaagtcatatataatctttattgtatacaacatcttcacttagatgcctgttgctatatttataaacgctacgcaagcatacgcaatcaagtagtaaatctcaca

SEQ ID NO: 344456 - DNA, 658 bp, Cannabis indica
atacccgagccccctgcaatcttggcttggcaaacattctcccatgccactagtcctgctccctgcatcatatattggcctttccaaagaaaggctctacaaatagattcaagctcacggattacctgttttggtagtctgaggatctggcaccaataagagtgtattgcggtaagaactgaattgatgagtacaactcttcccgcaaaagagatatgcctggtgctccaagatcgaattcttgcagtcatcttttctgtcaacactgtacattcttgctttgtaattcttttgcaacatataggtatacccaaatatctgaatggtatctattgtttcgagaacccagaagcctccaaaattctagtgatatcagattcaggcatgttgctgcaataaattgcagactttgccttgttgggttgcaaaccagatgatgctgaaaagagtttcaatccttgtagcaaaaggatgatgcttttgtaatcgcctcgacagaaaagtagaacatcatcagcaaagctcaagtggttgagctttaaggcatcacatctatcatggaaagcaaaatctctcttatctcctactcttttcaggattcgggataagtattccatgccaataacaaataataaaggtgagaggggatcaccttgtc

SEQ ID NO: 344457 - DNA, 466 bp, Cannabis indica
acacgtgtataccatctctaggctagtgttccgacgtgacctcttatacattgaagaagacaacgagtctctaatttccactgttcattatccatggtcagattcgccgcataccagtgcgcagcactctcggtattcaataggggtatcaccatctgcaacaaagtaaaacaaacaacgccataaaaaaagttaactaaagaaatttgataaaacacaaaagtatcaagaaaatgcaaattacattgtgacataaattcaaatctgcatcgtaataaagagtggaccactcttgctccctcgccatcctctttacactcatcgttcttccaagtaactcgctctccacaataagcacacacaatagattacattttaaatgaaagcatagtcgaaattgtattaaagcacaaatacaaaaggttcatgtcgatttttaaatataaaagtgttggaaatattttac

SEQ ID NO: 344458 - DNA, 1124 bp, Cannabis indica
agcatttacttcccatttatttcaatatcttacccaaaaataaaataaataaaacaaatattctcaattcacaaaaatgtccttacctccaattaattacaaaatcccacatttataatttatatatcaaaattaatattatattatttataatattatctcatctataataaactcatatttataaattatatacctaaaattaatgttatgttatccataataaactaataaggcaataatttcataattacataccataattgttagctattaaattttataaaattttataattaatgatatcttgtaattttaacaaaattaccctaaataattagggaccatccataaatcaggcgggaaaaccttaaaaagcaccaaagccataaacaatggcgcagctcatccatcaaatttgtacttccataaaaaaaactaataccactcatccagaaattatttaaaaatacaaataatgtaataattttggtacattcccataatattgagaacaaatcaaaattctataataatttgacttcccaaatatatctgaagcaatatattctcattagaccattaatgttcccacctccctttattacaagatcctcaaaattcttattcttcaatttatttaattaattataatattagaatctgaatactaaattctaaacacgaaaattcctaaaaaatataaaccaaaatatatctaataggaattagcgtttaaagtaaaccctcttaaactttatttcagtttaaaatattctttaaatcatacctcaaccaaaataatcattttattccgactaataaatctgtatagtgcataactttaactttaaaatattattctgtcaaaattttcttatacattcaatacaaaaaacgtgaaaatttaaacaaactaccctaaataattaggggcccaaccatataataggtgctaaagccttgtaaggcgccaaagccataaataatggcgcaaaatagaacaaaatcaatataaaataaacctataacaaaattaacagtatatcccattataccagctcacccaaaaaagaacaaaatcaataacaaacaacaagatgaaatcaactatccaccatttc

SEQ ID NO: 344459 - DNA, 1310 bp, Cannabis indica
actactgaatcattcatggcaccactgaagctttcaaggaagctatttcgctacaaggaatattgcaagagctgctgctgctcaaagacaaagggacagtctattctgatagtctgtcatctattcacctgtgcaagaatcatgtatatcatgagaagagcaaacacattgacattagattgtattggattcgagagaagattgagaacagggttctggaattggaaaaggtgcacacaagtgacaaccctgttgacatgggaacaaaggttcttacattcagcaaactaatgcattgtctcagtttgctgaacattggttcttgctgaacatttcgagataacacatcatcaaggcttcagtgaaaatattctggtaggtttctttagagaatcaaggtggaaatttgtggaagttgatcctctaaaccaacttattatccaactcacctaaaccaactaacttaactaactttctgttatgttagttagttagttggtgctatccttgtttgagttgggcctatatatatgtctagtcttttcactttaagaaagaggtcaagatagagaataagagagaggatgagagagagttgctaagctgtgattctgttcttgaagagggtcaagaacaagggatgtactcgggttggtagagagaaaactgtgactgttttctctggtgtgtttcgagtaccacagggctgagattgctctgaatcttgtaattgtatcgatactctcctattccacatattaatgaagaattggtgatgtttctcagctggagtatggccagggatcatgttgatctctaggaccgaaaccaggataaattcttgtgttgttctttgttggatttctggttttgattcattatgtgttaattagtttgtgttcattatttctgtcaaagttgtgagtttattgcaggttttatgattgaattcttgatgttattgttgctagaattacaacaaagtgcatgggtatgcagtacttggaggctattcgtcgattgaaaacttttgggtttcagccccttcattcggcttacctttcttttgttcttgatgaggagattggtggccatgatgggactgagaagtttgctgagtctaatattttttggaacgtggatattgtgcttgatgaagagattatgtattgatgatggcaacttacatgcaatcaaagtggatttcaggtaccatttatatttttgtgtctgtgtagcctttgtgtgcaaaacatatatatatatatatatgtaacaccctaactagcataggcgtattaagtgatttt

SEQ ID NO: 344460 - DNA, 546 bp, Cannabis indica
ttgtatttttttttttctgcttaaaacacataaaaacaataacataattctatctaacacttactaacacacacacttccatttattacaaatacacaacaaactaaacacaattacacaatatagacattaattgctccacaattcacattaaattcaagcttaaagatatgaaaataactctaaatcttagagttatcaacgcccttgctcaaatacacagtcctgagaccaacctgcccgagcaatgcaacgtgaggtggtcttgattgatgaggaagaagaagtcgtccctcctcctgattggaagcgcaaaaatgtatagaactttccatagactgaataagtatatttcctgcaactttaacattcagtctcactagtagacttagagacttcgtataggtttttacacttctccaaaatcactactccgcccccagagtaatcaccatctcatcagcagactttctagcactaaagcaagtctagaaatctaatttggtgtagtctaagagtattaaaatactacccttattgactaac

SEQ ID NO: 344461 - DNA, 813 bp, Cannabis indica
ttgccaagagagttcaaaccattagtaattgtggtaaagtgagtatacatgttagcaatggtttcatccgctttcatcttaaagttctcatattaagtgtaataaatttgaattttagtctttttcatagcactagttctttgatgactaactttaagcattttccacatatcaaaagtggtagaagcttgtttaatatttttaaacacatctctattcaaaccacatagaagtgcatatttagctctagcatttttagaaaatattttcttatcattctcatcatatgcctcataagttttaacagcttctacaccatttataatatgtttgggaataaaagaaccattatatataatcaatagattgaaggtaataagtttccattataattttttgaataaggaaaatctacaccattgaagtatggtgctatatttgcgcttaaaccttctaacatggtattttgtgaattacttagaaacgccatgcactagattgtgaaatctaattaaataaatgagccattgttctgataccaattgttaatccaagatatgtttccaagagggggtaaattagaaatttaaactaattttgaaaatttaaaactttcaacacaaaaccatgcaattaatcaaattaatcaagtgaatccaaatagtatggcaagaaaatatactgagcaaataatcaagcatgtaaagtaaagaatttaagggtaagaaatttcaaactcttgtttttacaaggttcagtagaacaaagtcacctatgtccttagtcttcaaagctatggacctagctttgagt

SEQ ID NO: 344462 - DNA, 1182 bp, Cannabis indica
gcactgtagaggctttcattgtctgaattgacatggaaggttctcaaagaattcgctgaccctactagatagtggaagaaacccatccttaacacccacttgttttggatataaaaatcgtttaggtgttaatagttgttgagcgcaacataagggtttcatgctcaccttaacaaagcatggataattgatcataatatgcgaaagtactagattgatcggctacgagatcaccataaccattgatgcaacaacttggttatatagaacaatggaatggacacggaagtatggaggattgatcagaatacgccaaagtatgaagtgtaggtgctttcattgtccgaattgacatggaaggttctctaagaattctcttgccctactagctagtgcaagaaacctatccttaacacccactggttttggatataaaaatcgttttggatatttggaattgccctaaattgaagtggttgcctgagaagatgacttctctctcatctctagagtcattgacaatctgtagtcgtccattgatagagacttttcctgaaagtggtctgcctgttagtttgtgtgagctttatacatcctgtgatgtacttttgaggatgaaatggaattggcaaacattgtcccatcttattgttaatggatatggtaatgaagaagatgtggaatcatttccaaaggaagggctactgcctactactattttttttttgaaaaagagaaggaggtcagtgttcagactatctccaaccccgatatggataaaaacctcacttgtggcggaggaaaaccgtggttacaaaaatagagtaggtttcacatctttaaccaaaactagggaaattaagacaaaactcactgccctatcttaaaacaaataaagcttctaactccctaggggacaatcgcgagactgactccctcaccaaattaagtacttttgagactgcaccatttccgcttatagcagagatctccaatctctgattaggtctaagaatgaaatgtcttcaaaatgcttagtcttgtatacccatgtagctgtccagaatttgattttatcccatagggtctcaggtgagctttccgagccttcaaagattctattatttcgttctaaccacaacacccaaagaacagacaataccgccgttctccataagcttg

SEQ ID NO: 344463 - DNA, 721 bp, Cannabis indica
caaatttttacctctacaataataaagggctattttatattagtttaataacgtatttaccaccattaaaatatcgttatgtatatgaaaatagattaaatatcaactaaaaataatatattattaaaaaaaaatataccgcaaaataaaatagatatactaacaacttataaaagataaaatataactttaaaataatattaaatgaaccaaaattaatataggtatagtagaatatttcagtcatatgcttctaaatgataataataatttaaaaaaatgcttagaaatataattaaaaaaaaataattagacataaaaaatattaaaaaatgactaatttttttaggtaaattgcggtataaatgcctaatgtttcaaattttatacacttaaatacctaatgtttatttttggaggtaaaaatacctaatgttataattctcttacaccgttactaccactttcgttatcaactcataaatatggacacgtggagggccaaaatgcattacatttatttattttattttaaaatttaatattcttaatatcaaaaactaaatactacttgtttttttaaaaaaaaaaaataaagagaaatgcaatactaaattaccatagctgagtgaaccagtgtagtatatggaacatgattatcgaattgaagtgtcaatatcatgtgaaaattgttatgagaacaagtttttttttttatttt

SEQ ID NO: 344464 - DNA, 723 bp, Cannabis indica
ttgacaaaataccgaagcgaacaatatcaatcgtgttggagctaaaaaatatagaagacttatttagatttaccttctggcccgaagcctcttcaaattttttcagcaattccagaacacgttgagcctcctctatagtggcggagcaataaagaaagctatcattagcaaatagcatatgagtgacataaggggctctacgagccacacgacacccatggatccatttcttctcttcataaagccgaagaagagctgagaccttctgcacagataataaagagatatggagatcgaaataggatctcccatggacaatgttataagagattgttctcagacattccattaccttcataacccagtcaaccgagaatcccatacgaagtaagatagcatgcaggaaagaccactctattctatcataagctttgcgcatatccaacttaagagccatacatccttgttttccttgttgttttcatctcaaatagtggagaatctcaaaagagacaagaacattattcgtaatgagacgactaggaataaacgcactctgaaactcagaaataaccttggacaatagacccttgagctggttagccaaaactttagaaattactttgtaaagcacattacacagagcaataggtctcaaatctcccatgactacaggcattttcttttttggaataagcacaagattagtagcattaagatctt

SEQ ID NO: 344465 - DNA, 707 bp, Cannabis indica
cttacaaaaaaaaaaaaatcaatctttatatttatctcattatcacaataactaaaatataacaattgaatgtgaaaaaaaataaacattagtgcctagtttggacgggttaacccgactaaatcgacgaatttattggagggttgaaactttttttttcttaattgtgcgggttacacttagatttttgtaacccgatctttacactgctttaaataaaatataacgtaaactgaccaaaccgaccgacgtacacccctagtaccaacaatagtttgaaactattaatttatagaaataataaatatgcatatattaatttacttctaacactactaatatatgtaaaatctatattctttaaaatagaatttcatgtctattaggaatgatatttaaatattctaaatgtacaataaatttgagatatactaaaatatatgtacaattcacattttattcgataattaaatataattttatcttgattataagtgtgcccgtattacaggtacgtgactgctattattcaattccatacatgatatatagatttcatgcaccttaattgtatgtcgtattttatcttttggttgtttccaattttttctagaaatatttgagtagtaaacaatgtcattgattatttaaaattattgtattcacttcaagaaatgacgttaaacaagtagaacattattataaat

SEQ ID NO: 344466 - DNA, 1532 bp, Cannabis indica
ttttaggtctcggtcccagtttcagggctcattttcggatcgaagtccctcatctggctctggatccttagtacaagtcttggtccaggttcaggtgtggggcgaggtcccccatctatgttcggatccttggtcctggtctaggtcaaaatttagattcgggtttggatctcgagttttggtgcgagtctaggtcctagtacgagttcggctttgagtccgggtccggttgttggtcgaagtccaggtccctgttcgggtccgggtcggggtcccgatccgggtcctagtcaaggtctaggtccaagaccaggttttggtctgggtttgggtccgggttcaggtcctgagtttgggtctaggttcgggtctcaattcaggtctgggtctggcttctaggttctgatctcggtatgggtatgggtctaggcccgtgtcaaggttagggtttagggatttcggtttagtgtttatggatttagggcttagggtttaggggtaagtgtaaagagtttaggatttaaggtttaaggtgtagggtttagggtttaagggttcccttccagttctgattccaattttcggtcacagggtacgatttaaggttcaggtgtgggtctgggtttgagtcctggtctgggtctaggtccgtattcgggtccaagcctctggtcttgggtcctgggtcgcaggtccaaatccagatcctggtcaagatctagctcatgtcttgggtcgcagtttgggtctcaaatcaaggtttaggtctaggtttaggtcttgggtcctgggtcaagggtccgggtccccaattcaggttaaggtcttagttccttgtctgggttagggtcccagtcccagtgcgggtccctgtccgtgtttggtactggtccttgtctcgggtctttgcctggtctcggccttggtcacggttccattctcaggtcctaggtccgagtatcgggtccaaggtcccactcccggtcccggttccagtataggttctgttcttagtctaggttcaggtctcggttgtagtccgggtctgggtcccaatcctaatctcggttcgagtcctagtctttagttttagtctgagttttggtatgagtgtggttctaggtccaggtcccgagtcacgggtcctttgttccaggttcttggtcgtaggtcctggtgcaagtttgcgtctgggttatatcgatcccggtctaggtccgggtcagagtccgtgttctgttccacgtctagatcaagttttttgtcaaggtcaattcctgttccatagtccttattccgattcttcttccgattttgggtctcgggtccgagtttgggtttggatgctttgtctagaaattgttctagatttgggtcttggtatgattcgaagatctagacgccgaatacgggttgggtccaagcctcgggtcatgggtcaagatccagatcccaatctttggtcccgatcacgttccacttcggatcttgggtctcggtccgtgtccgtgtccgggtcctggtctaagacc

SEQ ID NO: 344467 - DNA, 523 bp, Cannabis indica
tattaattatttaatgtaaataattaagattgttttaggatatttatttgaatttagattttaaataaatatcatgattattatttcaattctaaattcaaataataactatcttaattattaactaataaataataaaatagttttattatttttttaataattatactaaaatatcaaagtgtatatggatatttatttattaaaatttatatttaaattaaataaatataattgattttagatttaaaatttaaattcaaacttaaaatcaaattaagacaaaaattatcttaacccaaaataaataataaatgttattattttaagactgctgaaacccatttattaagaaattaggataccaattccctccctttttatcctcatgagcacacacattattcatgttgcccattacgcaccaaggtaagcttaagttagcagccaaggagcgcaaaagattccaagttgtcatacgaagccctctatttggttccccatacagccccgtaaacctcca

SEQ ID NO: 344468 - DNA, 753 bp, Cannabis indica
aaaattctaaactcaacctagaagaaaaactaagtgtataactagatatatacgtacattgtacgtaactttatgctagtatatatatatatatatatatttaatgtgataggtagattgtaacaagtaaaaaaagtaaaatataaaaaaactgtacacataaacagtataaaaaatacagtaaaaatgtaatattttccttataacagtaaaattgaaataaaatagaaaaaaaaaacagtatatagtgtaaatttcccatttagtttagagaaatgcaagtaaatggtcctatttttaactttatagatagttaatgtcctttttttaaaataataaagcaaatgtccttttttactttttaatacctaaaatacccttcattatataaaaggtattatatgttttattcctttaatagaaattatgaaaaacaatagatcaaaacctctctactgaatttttgtcaactattttttcattatataaaaggtgttatatgttttattcttttagattttgctgttgttgtagctgtctaatatgttatttaagcatataattagattttttattaatatatcgtatgatatacaaacaatataccttaaaccaatatacatatatcacaaacttaaactaatatactattaaatgaattattttccacaatatacagtagcatacaaaaacttataccacaatcataagcagatataccatagtcaaaaattaatataccaccagcatagt

SEQ ID NO: 344469 - DNA, 713 bp, Cannabis indica
ttccattgttataaaatctctaacatttttcacattcataaaagagcccataatgttagatcatatctctctaaaaatatagagttcttgccttagttattcataagcaatacaaattcgaagtagacgtagctttattaccgtcgcgacacagaggtaactataaatcttgtgtgtgtctctctcatttattctacttaacttctatttcctattgccaatctagcaatatgatcgtataaaaaaattataaagataattttaaaatataaatttagaaatatatagacatataattttatatatatggaaaaagtaaaaaattatgtatattaagatttacgtttaaaaaaattaggtatataattgtaattttattttattttttgaaattaaactcttattaacaataatcaaagtttaatacattaatgagaaaagaaagaaaatcctcaatccaagccaattcaccatccaccctaggagtgttcatccagtccaattcgcactattttgctcatagtgcatccgatctgcactaagtgcagatttcatattttggatccaattcaatctgcacagtagcgtaaatctaatccaatccaattcgcaaaaattacggattggaacgattattttggattggttactttttaatatttatgaaaaaaaatattttttcacataactagcaataaaataaaataaattat

SEQ ID NO: 344470 - DNA, 738 bp, Cannabis indica
tttaaaaccaataatgtattaaaagtaataacgatgtattaaattaacattttctacctgtaaaagttcacagaaaaaattaaataaatcaaattaatactctcaatagctaattgcttggttatgaagtgtcttctagttgtgacttttttggctacatttgcatttgctgcacctatttttttttttccatgcacctaaaaatcatcttttccttggtcttctggatcacacataatggatatcttgtgaagtcgtgttctttcaattttagttgtatgtacgtacaagaattgttagacctctgttaaccaattttatatcaactaatttagtatattaataaaactaaccatcttataaaagtttctttaaagagctttgtattatattgacgatatgaaacacatgtaaatgtgataaatctattgtatcattatcagtttgtaataattgatatgtcatgtttcaaaacgttagcgaaacggttatgtaactttgatgcaacttttctaaaacataaataaccagtttaatgtttgtacgtacgtgactctatctacatgtgaattcactattctattcgtgatttaatatgaataaatttacaattcaaaatttagaaaataacgaaaaatgcaatgggataaacttttagttatggtattgatgcatctttttttcttttttggattatatctaatttggattggttgagtgctccaaatctatttgtta

SEQ ID NO: 344471 - DNA, 564 bp, Cannabis indica
agataagactcacttgagttgtctgatccattccagctccatgattctgggctacctggaaataacttgccatctggagaaggtgatcacgcacattctgatggggttccatccgtgcattgataaatttctttgtcgcatcaaagcgagactgaattgatggcattccgaatagctcggttcacttcgtcatgatttctgcagccgtgacaatgtctacaaactttattttcaaggtgtcaaccatgctggaaagcatgaagtatcgagttttgtttttagcattctgccaacgctcgtacttctctttaacagctttggttgcattgtcacccggctgtttaggcgacggttcagttaacacaaacaaggcactttcacctatgagagcaatgttaatgttaactttccattttgggaagttagatccattcagcttattatcagtcaacagtgataacatgggattaatcatggtcatattggatactacaaaaaaacattaaatagaaagcaattaagctttaacacaaaatcccattcagaaattattagcacatagca

SEQ ID NO: 344472 - DNA, 1280 bp, Cannabis indica
ttaattctctccctctatttctttgttgttttttttctcttttcagttcatttttatttctctctttgtcacccacgatttgatttttcaaacctgatatagttagaattttccacctagaaactcgagaccaggctcccataaaaatgacacatggactcactatcctcgaaggagggatgagatgtcagcaagagacctcttaagtgtacacctcgcctgaaccaaactcagcgagatgatgtgaccttgacagagtctagtcgcatccctatacctcgcacaaagcaggaccaaagatcaggttttagactcgcacatatcaagatatatgcgaggactataaagatcttcctgcgtagtggtaaagatcgattctctactcagcgagctggttcggatgacccaacgtcctcgataacccgataaggactaacatgtcctaagttattgacctgttacaggatgtccgtatatgcgactcaaacaggatgcagacatcctagactcgattagtcttgtacgcatcttgagcctgcgagcttatgcgagaatatgaacagacaacttgtaccatgaaggtcgcatacgttactgtatttagtgaattgggccgaaactgttcttcatttattgtatttacgtttttatgaatttaaatgttatattcaatgtacaaacggattgataattaatcaatctctatgtaatcaaatgacacttgctttgtatataaaagagtgatccaataggaaataaacaagacataaaaccttcacaacagtggactaagcagaccgtgatctgactgaaccactatattctctttgtgttatttatatttccagtacgtctgtgtatccataacttgaatactcgccattctaggtagagtaatcatataatattattcatattttaaatatattattttatttggtgttgacttcgcttttagccaacgacaatgagtctttttgataagaataaacgatatgtcgtaatgaatatataataaagcaataataagacacatgaattttatagaggtttagccccgaacagttcggtaatagcctaatcctcgttatttgtattgactcaagaacaaggaagaagattccttttctaattgctcttacaacagtatctctaaatatataattcttaaataataatatagtcttagcttagctgcgtatcgactttcaatctctcggtccccttgcacagtgaacatcccacactatttatagggctgggaaacttgaggaggaaga

SEQ ID NO: 344473 - DNA, 662 bp, Cannabis indica
ttttttggagtgcgaatttattctcaccgcccactcagcagtgttgcccagccgccaatctacaaaacgtcgaagtccggtcaccgaattcctcgcgcgtggggctcacgtaccgcctgaagtttctgcacgtcttcccacgcgcgacgcatggaggtgcgtgtgacagtgtcttcgatggcgttcttttgccgtttctttagtccactcgcatctctttaaggttgtaattcagtattttcttgccttcttcgtgtttgggtgttcattctttggtgttcgttttctctgtcaattgtgtttgcttttgagattatgacaaagataaaatcagattcaaaatcagttgttgtttttgatttggttcatgtcgaaaattacggaccataagttgattggttcgaattatttggaatggagtaagacaattcgactgtatttgaggagtattgacaaggatgatcacttgactgacgatcctcccaaagaaacatacgcttcaaggaaaatatggctccgtgaggatgctcgcttgttccttcaaattcgaaattctatctataatgaggtaattggtttgattaatcattgtgaattggttaaagacctaatggattacttggagtttttgtattctggcaaagacaacatatctcgcatat

SEQ ID NO: 344474 - DNA, 864 bp, Cannabis indica
tttttaaaaaaaaagtggggaatcaattctaaaaaatattgagacataaatatgaaaagaatcggttccataacaaaataaataaatacaaataatataacacacaataacttaaatgtaatataacaaatttgtatatttatcaactagttagatatttgagataaaaaaaatgattttgtaaagtaattaagataaaaattcacacaaaaaataattaaataataaaaaattaattttcaaaataattaattaaaaaaccaatttttaaaataaataattcaaaaattattttttgagttggacaggggacccagtactctatcctggcgtagtgcttgggaagagtgtaacctaaatagcacaaatcaaattgaacatttaacattgtgaatttcattcaattttactgtttttatgtactaaaccatgctccccagactttgatatctaccaaatcatgctcctcaaattttgatatgtactaaatcatgccccttgaactttcttacatgttagaatttttttactaaaattagacaaaaatccttaaatttaacaatctcaatagttcgggaggaatttttaacgactaaaaaagttcaggggcacgatttagtatatgtaaattactaattagcctttttttttgtgataattggagtttccattgattgaaaagtgaaaacctttcacctgctttaataagtgctcttatattcattgccttttttaaaaaattatggtggcgtttggttgggagagatgaaaatataaaaaaaaggaataaaaatacgaatgaaatggaataaaatttaaaatgcataaaaaattaaataaaaaattaaattaaatttttaattt

SEQ ID NO: 344475 - DNA, 903 bp, Cannabis indica
ctactgcgagtgtacatcggcacgactaagtagaactatatttcgatatcggctagtgattttgttacgaaattggtgacttcaataccctatacctaacttgattacatactttgtgtcatgggacccgtaaacatcaaaagttatagtgtcactactgcgagtttacattgacaccacaaagtagaaccctatttcggtatcggttagttgtttcgttacgaaactagtgactccgatacagtacacctaactttattacagactgttcaccaaacgtgtgtacatcggtaccactaagtagaaccctagttcggtatcggttagtgggtgactctgatacactacacctaacttgattacagactttgtgtcacgggacccctaaacacctctagtgatagtgtcaatactgcgagtgtacatcggcaccactaagtagaactatacttttatatcggttagtgatttcgattacgaaaagttggtgactcgaatagtaccctacacctaacttgatcacatactttgtgtcacgagacacctaaaacatttacagtgatagcgtcactactgcgagtgtacatcgacactgcttagtaaatcctatttcggtatcggttagttatttcgttaggaaactggtaactttgatacactacagctaacttgatgacatacattgtgtcactggacccctaaatatctacagtgatagtgtcactactgcgagtatacatcggcactcctaagtaaaccctatttttgtatcggttattgatttcgttacgaaactggtgatgctaatacactacacctaacttgattacatactttgtgtcacgggacccacaaacatctaatagtgatagtgtcactactgcgagtgtacatcgacaccaa

SEQ ID NO: 344476 - DNA, 560 bp, Cannabis indica
ataatcatgattatatttcactgtgctgacgatactataatcatgaacaaatatatatatatatttatatatatgttatggacttaatagaattcatacattaaatataatcatgtgaaccatgtaacataaaagcgatttctgatcttatattaattagtaaatctgattatattgaaatgagttttatatagggtacaaaacccaacaagtatgtggtgtaaaaccccattataatttaggagtgtagttataattttggggtttttataaaaatactgaattttgggtaaaagtttacaattttactcacacggattttttttacaaaaatactgtctttttataaaacaatcattaaacaacaaaactaaacatttaaaataatagtggaacaactaaaaaataactatgaaacaactataactgaacacagtattttttgaaaaaaattctgccctacagtaaaaaaaatgttgaaattttcagtatgtagtgtaaaaattttacaatttttagaggtgtaaatataagggtttattttacaaatacacaaaaat

SEQ ID NO: 344477 - DNA, 652 bp, Cannabis indica
caatgttttggttatcttaatttatattattaaattttttaaaatatataggatccccactaaaagaaactacctctctagaattcttactgtcatcgatgacataattttgatgctgaatttgtggacattactgattgaggaacaaaattacgcctaggccctattatatttgacaccctcacacatgaaacttcccaaacaagaacaaaataataacttcacaaacatagcaattctacatgtaaatttcttttttaacttagataatagtccgagtaagctttacatttatcaattattagatatatcaagctcaaacttccttcaataaaatgaagaaaaaaaaacactagcagagatattttagagaagcatacagaaattaatagagttaccgataaggtcgcaaagtttaaaggcagcttgaaaatatcagagaaataaagctagtgagggagtacttactaatattaatagaattaccgataaggttagaatgaaatacttctgatttgatttccatacatcttttccttttttgtccaacgataaatcaagctctatctgaaacttacctcccataatatgaacatagtgagatagaacaaaatatatgcatgagtgcatttacttatagagtcatatatca

SEQ ID NO: 344478 - DNA, 695 bp, Cannabis indica
aaaagaatcaaatggtctatttttaactaagtctgcctatcttgttcaagcccttgaccgggctcccttgtgcaacattgctccggcactatggaacaacctttggaactcaaagattttggagcgacacaaggtccattggtggagtatcctttctaatgctctacccttacgagcccctattgctaagagaatgggttttgaggaggtttcctgccctatttgtggggaggctgaggagaccacaaagcacttgttcctgtattgtaactttgcattccatctttggcgatcttctccttgggtggttatgcatgttttggattcaggagcccgaatgtgagactgggttacttttctttggaatcttaaatccagaggagttgatactgatgagcttttcctttatgcctcgattgtggtagatacggtttggagggcccgtaacgacaatgtacataataaatcaatgggtaacattaaacactatgttgactctatttcttcttgttacacagattatggctcttgccttctttcccctccacagtctgttgggactcaggattggtctccgccgccggaagattgggttaaaatcaactacgatgtcaaagttggagttgaaactatgtgtgttgtggcgattgcgagagaccataacgaattagtattgtgggtggcagttaaaaggc

SEQ ID NO: 344479 - DNA, 574 bp, Cannabis indica
ccatgatagttatgctcgttggagcttgtccaactatgaggggtagctggatttgtcccaaaggcgcaactccttggccggagaaaccatacacgggctgaaggcatggagttaagtccttgagctggagccccatcttcttgtaagcagtcttaaacaaaatgtttgaagaagccccattatcgataatggttatggacaccattttttttgctatctggacttccacgactagcgggtcgttgtgcagaaatcttatctggacagcatcttcgtcgttgaatgttatagttggctctcgttcgcatggaactttgggcttcctctcttccatggccaggatgacctcttcctgcttgtattgagctgtgcgggaatatcgttctcgagctttgcccgtgtctctagcgatgtgcgggcctccaatgatgacttgcaagtgtccatctattggcggaggcatcagatcctagttattctgaccttgcttggcattgacgtacttctgtaagtgcaggttgtttttcttgattacaagttctatttcttgtttcaagttgtagcattcattggt

SEQ ID NO: 344480 - DNA, 683 bp, Cannabis indica
atatataattctttataaaattttaaaagtaagaaaaaaaaattaataaggattacaatgaagtgatgatatgttgatgtgtttcacttattatttattattgaattttcattaatattattagtaaaaaaattcaaagaaccgcttgcgaagcgcgacatgtttcctagtatatatataaaggagaagtattaggcggtgacgtgacagtctaaaattacttgtaagtattaaatgattaattaatttaaaatattaatctataaattactctacgttattttcttgaaatcactttaaatatatattttattaggtttattaggtttataagtattaaatgattaagtaatttaaaatattaatctataaattactataggttattttcttgaaatcactttaaatacatattttaatattctatatattttttttattaattctcttattttttaattattctaattaaaaaaatcgtatacactcatttgttttttttaaaaaaaaataagtcgtatacactcatttttttttaaaacggtagacatgctaatacaactaacaataaacatataactttctctctttttatttaatattattatatttttttaaaattatttaatattattttattgctcaattaatatttatatataatttaaaaattaataaaataa

SEQ ID NO: 344481 - DNA, 531 bp, Cannabis indica
taaggtgaagaattttctttggcgaggtcttactagttgtctccctactcttgtgtctttgcggtctaaaagggtgcacgcgagcggattgtgtccgatgtgtaatcgagaggatgagacaatttttcatataatggttagctgcgcttttactaagagttacctgaacaaggggctgggggggacggttggagggggtgaagctgctgtgtttggcagttggtttgataatgtttgtaaggttcagcctatggattagattgagaggcttgctatgcttctttagggagtttggggagctcgtaatgacttggtttggagtaataaggctttgtcggtagagagggtaatgaatgctgcaattacaaatgctcagctgaaaagtagagttgtgtcgccaatttctggcctgaatactttcaggtgtgagcaatgggctaaaccttgttttggtgagataaaggttaattgtgatgctactgtctttgaggatgacaatagtctcggtttggggtggattgctcgggatca

SEQ ID NO: 344482 - DNA, 596 bp, Cannabis indica
actatatatatatatatatatatatatatatatattcctcaaaacacaatctttgatatattttttctcaaaaaaaaaaaatactaaaaagtataattcctcaaaagaaaatcttctctaaattattaacttgcatatttcatcaaaaactcaagaatactctcatccacatctttactttattcatcaaaatacattattacaagttttttttattattattttaccttaaactcaagaattctcccatccacatcattcagcttcttttggcacctgggttgatgcattattgcacattggtgggtggtgtggaaagctcgaaaccataccgtttggaaaaaaagaacctctactgtgaatgatgttattgtttctgcttcaactcactactacaatgttagcctttagaggcagttttttcaaccacatttataaaaagggaagctaaagggtgtgaaaatacccggtatgttcgaaattgacatttagaggctgttttttgataaaaaccgtaggtataaaattgcattataccatttagaggcggttagaaattaaatataattttttttttggacgaccctatggcgtcg

SEQ ID NO: 344483 - DNA, 804 bp, Cannabis indica
tatatcatatttttatataatactatattaaactttaatttatactaaaatattatatatttaggtatacataaagttaatactacatatagttttacataaatatattgcataaaatacaatttaatgtaatacttacaatacaatacagtgtaatacagtgtaccaaacgaactctattagtacattttaatcgagagtatgatgaaaggaaaggatagaagaatagatagtaggaaggatggggtagaaagtaactcttctttatgttgtttggtatttactataaaaaaaactgctacttttagtcataactttttagccacaatataattttttttgtgactaaatttagtttttagtcacaatgaaatgttacttgtgactaaaacatagtatttagatacaagttgtcactaatttaattttagttacaacaagtattgtaactaaaaatacatttagtcacaacacaacaaattataatttttgtaactaatacatttagctacggaccttttaatcacaacatagaactgataatttataattaatcacaattttttttacttttagtcacaagtttttttgtgactaaaaataagcttttttataatgataagaagtgaaattgaaagaataaacgtgtattaattattaaaattacaattctatcattcataacacaattatttattatttttttctttttttttttcttcagataaataccattttggactatatattttgtaaaaattattaattggatcatctgttttgttaaatgataaaatagatcct

SEQ ID NO: 344484 - DNA, 790 bp, Cannabis indica
tttctaaaatggtataaataaaattatgaattgaccttttctcaaaataaaatttaataataatccgatctaaaggtattatgacataactgtttacattttttatatctgttcgtattaggaattgttttcaagttggctatattaaaaaaaaaaatatcgaaaattaaactaaagatcatatttttatcattttaaattataaatggtccattttatcatttaacaaaatatagagtccgatcaataacatttacaaaatacaaagtccaaaatagtaattatccattttagacaaatgtgtaaaccgtgtatgaattgtattttataaaagaaaatttttacataatatattaaaatattaaaaaaaaattacagaaatacgttaatataagaaaaataatgtttacattttgaaattttttatttattagagatacgtatttagtaaaaataattaaattaattttttatatattaatttatttataggtgtattattatttatcaagtagtttttgtttttctgtgtagtttttttttttatagttatcgtgagagtgatttctcgttgttgtttcaaagccataacattcattttatacgatctctctaagtttagggttagaataaaatgaactttctagaaaaagataaggaaaaattacataagacactattttttgtaaaacatttacatttttacgttcaaagaatgttttctttttacatttttacggttttccaaaaattaacacgaaaacaacataaaatcaacaagaaaactaca

SEQ ID NO: 344485 - DNA, 964 bp, Cannabis indica
attaattaagagactttgtatggtctgattaataaataatataaatggaaattttatttaataattaattataattattaaataaatagttttgacatttataggattgaattagaaaatataatattattgaaagaagaataactagttgaaataaagtggcaaaattgtaactagagaatggtcccattatatggccggccttaatgttatttttgcccaatattttattcttttttaatccatataattcagtcctaagccctagttgaaatactataaaaggaacatgatgctcccactcatccccttttgacgatttaactatggccttcaacctagatgagagagttccttctataaagatttcacctccttcattgttcttcaccatattcaaaaccttgagtgatagagtgccatgcccacacatagcaagtcaagtactcaatcataatgagtaagacaggggtaacaaaacccgaagcagaaaaagagatcgaggttcagatcttgataatgctctgctacataaaggaatcaaaggctagagatcttgaacggaaggagtcattatattccactgcaattaatgtatggttttcttaacccttatgtgtttatttcatagttatagagatattcatatttaggatgttaattcaacatacttgttagtaaatctatatcctggtaaaatattcccaacagtgcgcgcacctcatccacctttattctagacggttattccaggcctctacttttaaaggttggaaaattttagcgacacgtgtccactaagtacaaatggtccccaattgtccagctactgcaatgcacgggcacaattctttccaagcggcccaatagtcaactctctttttgcatgtattttaccctattagtgggctttttacagaattctttggcaggtcattggcatgtgctgttgggttttatgccc

SEQ ID NO: 344486 - DNA, 1055 bp, Cannabis indica
cacggcatgtggacaaagaaacaatgatcttgagctggaccgagcacgcgaaactcctttctcacctgagatcaatctcctagcgttgccccacaagtttaaaatgccaacatggaagatgtacaaagggagagaagatccattttcccatctcatgtacttcgaaatgcaaatggatttgtaaggggtacgaggagatgtatgctgtagaattttccctgctaccctgtcgaaagccaatcagcaatggtatttcaagttggctcttggaaagtttagttaatggaaaaccttctcttcagaattccatgcgcaattctcctcctcgcgccagctcccattgcatttggagatttggtcaaagtaaagcaacgaccaggcgagccagtccgggaatacatcagcatattcatgacggaagcgaccaaagtttcgcgggtaaccgaggatggaaagttatccgcgatactgggggcattgaagtcctcagtgaactttagaaagatataaggaagaacgggccggtagactcaatgagtgatttcctcaaccgagctgaaggcttcatcaagctcgaggaagccattgaacgagcagaaggtgaacaaaagctgagcaagtcgaaggctccttccactggaacattcgcccagcttcccaactattccaataattcaagctcaagtggcaagcgttcaagcaacaaccacaatcaaggaaacagaaagaaaggaaagttcgctgataaatccggacagactcccagagagaatcatgccaaatacactgcattcactattttgactgaagatatagagagtgtatacatggcgactcagtcgttgatcccgtacaagaagcctggacccatgaagaaagataccaacaaaagggacatgatgaagttttgtcggttccacggagactacggccacgacactaacgaatgttacaatctgaagcaggaaattgaatttctaataaagaagaacaatccgcacctgcaaaagtatgtcaagaccaacgaaggtcagagcaaccaagatttgctacct

SEQ ID NO: 344487 - DNA, 571 bp, Cannabis indica
tttgcaaaacacggtttttcagtttccctttctttacccatcattggtaatttttcaaatggaagcaaagacaatatttctcagtttgaattgatcccttcaagtgcaagtataagtttcacaagtaaaaacaaatgcttggatggtttctaatgctttaaagagatgctttgatggtttctaatactttaagtgtccatttttttgcaatttcatctttcaatgatttaattattgatatttttagtcttccctcatttcttcctagtgtgcatgttgttcatgtcaagcgtacaattaatatggctgctcatggcttgactagatatgttttagaattggatgaagcttgctattggttggagtatattcctttatctatatactctcatattataaataaatttcttatttgatttataataacaaaatattgggtgattctacaatacaccctcttaaaaggagtgtactgatacatccttacttatttcggcatttaaaaaaaaactagtctatgttatagttatttaagatatcctaaaaaattttgagaaattcggaataattt

SEQ ID NO: 344488 - DNA, 903 bp, Cannabis indica
ctctgatgtaagttactacggtaacaaacatattttcgatcaataaatgaataaagatgtttatttcaaaattcaaattgagtcgaaattactaacatgttgctaatttacaatccagtacgtacaaaacgtttggtcaaacccaaaacccccaacagataaaaaagaatacttgtaaaaaacaagtgaccaagagtcatacgtctgctcggtcacttgggggcacctatacctgtacaaagcatttggtaaagataaaacagacacaattgcacgattattataaacagagaatgaaattcattaaagatagcaaaagcatgtactactgtgattaaaagctgcccggtcagcctgttgtctataaaataaaaaataattccaagtttaaagaccgcttcgccggtcatgatgtcttaaaaaaggttttatggccgaataagatatataaaaaaagaaagataaaaagatatgtatttaaacagctggagttccaggctctcagtttgggttttttggaccggtaagagctggagaattttttgtctgagcggaaggtacctcaacattcttgccagaagtagaagtagtcgcctcgctttcaccataagccacttgagaagcacagtactcaagatacatgtctttggcctcgcccaagtaatcaaaatttgcatgagggttagccttccaaaagtgataaaaaatctcgagaccagctaaggcatgtactttctcttccagcctcgccacctccgatttatgcttctcgacctcagctgtaagctcctcctccttcgtcttcttctcttcgtccagccgacggaagactatctaaagaactcccctttcctcttgaagactattcacttctgccgacaaggtgccgatggtagcttcaag

SEQ ID NO: 344489 - DNA, 861 bp, Cannabis indica
acttcctccgcttcgcgccaaagaagagccactccaccacttttcccttgcgcatcaacactcactgccccttcgaaaccaagtgaaattcgaagcttctcaacagcatctttcttagccaacgtctcacaaagaaacaacacaatgggcttcttttggataacaatatcctttatgaattggatggcccatgggttcccaagcccatggcaattccatgttataatactcataatgataggtgggcttgggaaccaagacccacctttattaagttttttggcccaacatcaatatttccatcattttccatcataatacactcaccatctgccacctcattactttcaccagaaattccactttccatgcgcctccttttggagtctatgataattttggaaatatcttctccctccacctcagcattaattttgtcaacatgttgcatggatgactcattccccaatcgtggactagatacactatcaatctgagcatttacattctttccttttataactctccaggaatgatactattgccattaaccatagaatcaatctccatgattttagccactgaatcagcctccccatctgtcgccacacagtcagccgatttcttctccaatgttgccaccgtcgccaccgtcgcctgctgctcgggaccagaacgcagccactgtgtaccgatttggtggtgtcgccttctcagctgtgccttcatgccaatgccataaggcttaacaatttgatcaatatcttgatcgaatcgtttagcacaaaacctctcagagtggcctataatgccacaaataaaacaaaacgttgggagatgttcgtattgaaacatagccca

SEQ ID NO: 344490 - DNA, 1265 bp, Cannabis indica
ataaattatttaaatagcgataaataattttcataaataaacatgtttaactgataatttccaaattaaactaagcggtctttacagcgtaagtttgacgcatctgaccctcaagtggctcggcacgccactttgcccaccgccaaacaagatcaagccgtccaggaggaggtggatcctgaaggggacactgaggtccaggagattgaggagcaggacgatgtccgtcctagcagtccctccgaggcggaggaagaggaagaggttgcacccccaaactatggggagtataatgaggctggggagccagtcgatgctgatggcgacgtcctggttgagggcgtggactacgtcagtaaggaacttactgccatggttcctcatagaaggtaaggtacctttggtgctaggtggttgagccctccgtccaaggttattgacgcgcgcttgcggttctcgaccaggatggctacctgggcgaattggactgttacgttcccgcccacaataatcgagccacaaaccctgaaagggggatgtgcacctggttggatgctcgtgcccaacaaggggcattgttgcctttgcacccgtactttaagaatgtggcagacttcttccgcctctgtccgacccaatcactcccaagggcattaagtatttgtctgccctcttccttctctatgcctcccagaagtgggatatgccttctccccacgaggttagctggttttttgatttgaagtccacccctaagaaagggaggtcgaggtacttctatttctctcaaccacacttcaagtggttgacgggcaccagggattcggccatcagcgaaattgagcgttttgttgatgagtacttcatggtggatggcatgggcaccacccacactcggtttcagtagattcctacataaacgggaaagatagaatccgtcagggaatttccaagaccaaaaaaagtgacagaattcagaagcttcttgggtttagcaggttattatcatcggtttgtagaagggttttctaaaatctcaacacccttaaccgagcttactaaaaagaatcagggttttgtatggtcagacaagtgtgaagttagtttttaggagctgaagcagaggttgattacagctccagtgttggctttaccttccgacaaagaaaacttcgtagtttattgtgatgcatccagacagggtttgagatgcgtcctgatgcaaggcgattgggttatcgcttatgcctcccgccagttaaaag

SEQ ID NO: 344491 - DNA, 1086 bp, Cannabis indica
ttgttaacaggagcccaaatttataaaccctaagacaccttatgaaatgtggtacaaccgaacccccaacctaacgcatttaagaatatttagttgtacaacatatgtataccaatctattgacaagctagaacctaggtcagtgaagggaaccttcctaggttatgccttaggaaccaaggggttagaatatatatttccaggaagggtaaactaaaggttgtgattgctaaaaatattttttcaatgagttaaaatatcctcacttgaactccgggaaggatagtgtttctctgtgtgttacagaataggaaacaaagacaccccaagtgtggaagtggagtacagaacgaagctcccaaaagaaggttcacatgtggaagatagtgtggaaccaaaacacaatgcaccatcggaagttgttgtggagccaaaaaaaacaagataacgaaggcctaatagtggtgccgaaagggttcgaacagacaggtttggaaggttatcagttggctcgggatagaacccagagagagtttcatcctccagcaaggttcgcataagcagacataatagcatttgcactggcagtagtccaataaactaaaattgaagagcccagaagttatgaagaggcaattttaggaggaaacaagtacaaatggcttcagaccatggacaaggagatggattcactacgaaagaaccagacttgggtagttgtgttgaagccagagaacaagaagattgtggagtgcaaatagattctcaaggtgaaaaaggtaatcaataaggatgaacccgtgaggttcaaagccactctagtggctaagggttttacttaggtggaagatcttctcacctgtgataaactacaagacaataaggttgatgttgtccttggcagcacatttggagtttaaagttgaacagcttgatgtcaacactgtttttctaaattgattctaggatgaagagatctatatgaagcaaccacctgggtttgaggttgtaacgccataaataattaggcacgctacccaaaatgcttatgaaaccctaatcccctaatcgggattactaattaaa

SEQ ID NO: 344492 - DNA, 1351 bp, Cannabis indica
cacatataacatatataatgcacctaatattcaaatatatctccgtaattgaaaatgtacttttaaaggcctatttctgacaataagctctaatttttactaagagacacataatcataaattaatatttaaatctttaataatctactaatttccataatttaattatgcggtcattacaatcattcaatccaataatgggcttggtgaagaactcacaccagatcttccagatcagtctcaacactcaggataagagtgaacttatagacttaatatgaagaatacattatttgatcacagtgtgttctcaactcatgagatactataatggagattgggaaaaataccaactccccttgtagagagagaggcgtgaggtagaagagagagatgcgtgtgtgtgtgtgtgagagagagagagattaaatttcagtttcaactctgttctgtttcttagttgttgtatcgtactctcatactatatatcatatatatatttaacttattttaaattataaaatattataatatttaaacccattttaatcattttaaaataaaaagataatgttatgttaactacacgtggagctaagctcaaaattgatttcttaattttgacacaaataaaatttattatttattttgtaataaataataattaattaattctcattaatttttattttattaggattaaaataaatattatttatactaaaataatattttctctttctctctctttgttattatttaagaataatattatatttaattaattaatatagtttcatcaaataaaactaaacagttaaaataccactttaattattcaattcataattgatataattattcaataaatacttaattattatttaactcttcaataggataatctaatttattaatttttttattacactcactataaatataaaattgcactctttgacaatataaaattgtatttatataattcttacatgtagctcattgatataatcaatataagtagttcattctttatatcaatcttaaaaaattgattttatttttttttattcgacacattctttttcttcactaaaatctaacttctagacatagtcttaatgaattggtattccataaaaaaaaaaaaattgttgcttaaaaaccaaactaacaaaatgtgtattgctttttaattaaagtgattgttttgacattctagaaagattttttttagggtaacacattctaattcattggctttgtctataatataaaggaaatttgaatttgtatgcttaataagtaataaaattggaaacctaatagaatagtagatataatttgtaaa

SEQ ID NO: 344493 - DNA, 931 bp, Cannabis indica
tctctctctctctctctttcaacctctctctctcgaaatccctagaccagctagggtttgttgtagtttctcttcatttcaagcttgttgttgcaaggattaagtgtcttcaagttcaagtaagttttaagcttcaatcttcctaatttcttaaattgtaagaaaatagaatttttgcatgaaattgtgattttgctactgttgttgctgtttatgtttgatggttttttttttttttttcagagggttaattatgattgattatgatagttttagcatgaattaagggctgttagtaagtttaatcaagttttgagttttagaactcaaacttagagctttaatggtgaaatttgattttgagctttgattgttattttattgcttggaaaatatttattcggatataatatgcaggtatgaaatgtttggttgagtttggaaatgatttggttagggtttgaagttgtttggtttttctgggtaaaaccggctaaccggttaccttgattttgcagtagggaattccgaaaatttagcttgtcgtttcgcatcagtttcaggtttttagttggttaattccctgctagtttagggtattgccatattaagatgttgtagatagggttttggttttaaacctaagtcccggttgtgatttagcgggtcactcacccatgttgttatcgatgttatttaggagcctataatttgccgagcagttgttccactcaggttgaccggcacacctgaaaaaagaattgaggtaagattagtataatatcatgcatatgttattacatgtttagcgtacatgttgttttatgcctgttagattacattgataggcatattgagtaaaggctgacattatggtcgatagtattgtcgtatgaacgttctagactcagtaccatgtgggacacgggga

SEQ ID NO: 344494 - DNA, 433 bp, Cannabis indica
gaaaaaataggaggctcaacttttcatctgacagaattaacaaagttaagtgtgaatgagagccatcaatatctatttataggtaaccacctagctttaagttagaattatttggcattaaaataatgaaaaaataaatgataaaagcctacaatagtggccggcaagggcttcggataatgagccccacttatgcaattttgctgttttatcatttttgcatctcattttctcaaaaacgcaaattttcaaattcaaccatttaaatgccaattctaattatttaagaactaaaaattaattattaaattatattgtcatttaatatattttatgttcgaccatatagacacgccattagatcaatgatcctctatatagaggatctacattgtaaagggattagaatatcgtacaccctacggtgcatttt

SEQ ID NO: 344495 - DNA, 739 bp, Cannabis indica
ggcaaagctaacaccggtgttgttatcaatctctgtttcaattcttgaaaacttgcttcacacttgtctgaccatatgaaacgttgatttttcttagtgaactcggttagtggcatagagatcctagagaatcctttgacgaaacatcgataataccctgctaaaccgagaaaacttcaaacttctgtcatagattttggcctcgaccaattcttcactgattcaatctttcccgagtcagccataattccatctttttcgacaatatgccctagaaagatacctctgacaaccagaattcacacttcttgaactttgcatacaacttatgatccctgagtcattgtaataccattcgaagatgatggtcatgctcgtcttctgactgagagtatacgaggatgttatcgataaacactataacacagttatcgaggaaatcccagaataccctattcatgagatccatgaaggtcgttagagcatttgtcaagccgaatgacattactaaaaactcatagtgcttgtgtatggttcgaaatgcagtctttggtatatcttcttcccgaattttgagctgatgataaccggatcgtaggttaatctttgaaaacacagtcgttccttgaagctgatcgaacaaatcatcaatttagggtaacatatacttgttcttaatagtaagcttgttcagttcctgatagcaacacacattctgagggaaccatccttctttttc

SEQ ID NO: 344496 - DNA, 500 bp, Cannabis indica
aacctaagtcccggttgtgatttggcaagtcacttattcatgttgttatcgatgtgatttaggagcctataattcgtcgagcaattgttctactcaggttggtcggcacacctgaatttggaaacgaggtgagattagtataatgatatgcatatgtaattacatgtttagtgtgcatgttagttaggcctgttagattacattagaaatgtatgttggcttaggtactattcgaccgtatcacatcggtacgcctagggtatgactagcgtaccgagtataggctgatattatggtcgatagtactgtactacttgacagtatcacattggtacggctagaggatgactagcgtaccgagtataagttgatattatggtcaatagtattgttgttcgaacgttctagactcagcaccatgttggacacggagataaagttataattgggggtatgggcgtctgatcataatctgggttattgctatgatattatttatg

SEQ ID NO: 344497 - DNA, 291 bp, Cannabis indica
ctatgcaatttttttttaattttttttaattaattagtgatcttttaattaaataaaataaaatgaaaaacatagaaaaataataaagataaaaaaaataaatatataaatagataaaaatatttgaagcaaatttaaatagatagatttataaatatctagggaatttaaattaaaattcaaatgatttatgttattaaaaatgagaaaataaattaaaacagtagatttgattatgaaactctaaaataaatataattatacttatataattttattactatatatata

SEQ ID NO: 344498 - DNA, 524 bp, Cannabis indica
ttattattatatatataacgaaacttatcaatttcgtttaagattatatatatatattatgttctatatataaagtacgaacgaaccctcttctcccttctttgatcaaattttctttccttatatttatttttttcgattttcaacccgaaacttagcgatctaaactccggtagtagcatgataacaaatccttgaagagggaaagcttaaggtatggtttaattttgttttaagtttcaaaacaattggtttcgtataggggttttgtgaattataatggttatgaaggttctgaccttataggattgttcttgcgtagtcatgggactagttctgatgttttcttgttgaatttgaggagattttgggttagaaatcgagtttagaactttttaaagcttagtccgaacgttaatagcgtatttcatttaagggctcgatcttaatttttactatgcaaggatggtaatatttatggtatatatgtgccctgtagagtttggagtgatttggataagttt

SEQ ID NO: 344499 - DNA, 563 bp, Cannabis indica
attactacaaactaaaaaaaaagacaaatcaaataccaaaccacaatcgccgaccatgcagtttaataaaaatataaaccacaataatactgcaaaagattttaaatcgcaattttatgtagtgtggtgtgggcggttcgataaacaattttagtcatattattattttatgctacgtgtgataaaatttgataaaataattaattaacaacactatgaaatatgaataattgaagggaaatttgaattaatatgcttaaattatctaatatttttttccctaaatgtaaagttaataaaattggtcatatatgaccactttaccaattttcctaaactacccctctcatttgaaaccctctctcttcctctctcttcctctctcttcctctctctcagccgaacaaacccaacacccaaaacaacccagccaccacggttagcacacaacccacgcaacccactccgacgaactcgcaacccactccgacgaactcgcaacccatctcagcccccttctctcttcatctctttctaaccgaaagaaaaaaaaaaaaaaaaaa

SEQ ID NO: 344500 - DNA, 528 bp, Cannabis indica
aaaaaagagtattgttataagtcaccaggagtgcctagcatcacttagaggtggggcctagtaattggttagtgatatttttaaatggttattaaattataaattatgtgggacttgatacttaatcacactaatagcgatatgatacctctagatggtgttagcactactgatgccttttagcatttgtctttaagaaaatattgtcacatcaagtgttgtgtgtggtgtagtgctagggttgcatttgttggcatgcttttttatttgggctaagggttcgaattccaccataaccgatgaggtacatatcgaggatgaggtatgagtcctctatagctagcacgtggttccagatttttctaagctacccagggacgaaaaatactcttttcataatggtggccatcactacaagaaatatcatttttgccaacacatttttgtgctggtaaaagtttggtattgcactggtaaaatagaatttacttctgatgtgttggtaaaaagagttggcaagtattagaa

SEQ ID NO: 344501 - DNA, 558 bp, Cannabis indica
gatagggaaactgtttcaagtttaagaccccggaaagtgatttagtgtgtcactcacctatgttatgattgatgttgtttaggagcctgtaattcgccgagcagttgttccactcaggttgacctgcacacctgaattcggaatcaaggtaagattagtataatgtcatgcatatgcttatacatgtttagcgtacatgttagttgccgtcagaaatggcaaatctatagctgtcggattagcatatcagggcaacagtgaggtgtacatagagttgcaccgagatgccatcagatatatgctaggctatcagacagtatggattaactgctgccacatcagtgcgattagagtactgagtataggctgaattcgaagttagtcatacttgtcaagatcgatcctgattcaggtagggttatggttaggtgtatgggcgcctaattataacacaaaatagtagtatgtttattatgttatgcttttcttactgagtctgtcgactcacagtgttattgctatgtgttggtaagggcaaggctaaagctgaggagtcgt

SEQ ID NO: 344502 - DNA, 966 bp, Cannabis indica
ttttttgacacacatcttcttataatccggtcagcacaatgcttatagaggataggctcctcccagtagtagtgtttgacttcctaatagaatttcttcaattgttgccttgtcaaatctagtggtgtaatgtttgcagctaagaagttcacataatctgcaaaccaaggtaccattgaatctaagagaaacagctgctcttcaggaaagtcttcattaatctgtacctctcttatgttctggctctcttcaagttccaaccttggcagatgatctgctaccaaattctctgtgcccttcttatcttctatttctaaatcaaattcttgtcgaatcagtcggaatttgttacatgcaaacactatggctagcatctcctgttctgtagtggcaaaatttagttgggcatcattcaaggttctacttgcatagtacatagtctgaaataccttgtcgaccctttgttccaatactacaccaatagcataatcactggcatcacacataattttaagaggtagctcccaatctggtgtagtgacaatcgatgttgaaattaacttctccttgagaatttgaaaggctttaaggcaatcattcccaaactcaaaaggcactccattagcaataagattatataagggtttggcaaccttagagaagtctttgataaatcttttgtaaaactcgacatgccccaagaagcttcaaactcccttaactcatactgtagggggtaagttctcaatggttgatactttggccttgtcgacctcaataccacttttggaaattttgtgtcccaatactatcccctcttttaccatgtgacatttttcctgattgaccaccaaattggaatcttcacatctcattagtaccagttccaagttgcttagacattgatcaaaagatgaatcgaataccgaaaagtcatccatgaacacctcgatgcacttctcaatt

SEQ ID NO: 344503 - DNA, 882 bp, Cannabis indica
atgcaaccttcggccaaccactcagcaaccaattagaaactttcgtctgatgcaacattcggccaaccacctagccactaccctgcaatcatcgtctgatttgaaaccttcatctgatgcaaccaccgcgcaactacgcagcaaccaacctgcaaccattgtctgattgtgtaagtgatagtgtaagtggtattttggtaattaaaatcacataaaggtataaatattgtctttaccttatgaaagtatttttgtaaataaagtgttaatttatattttctatgtaattaaaaaataagagaaataataagaaaatctattgagtatattttttttattagaataataatgaaatgaaagaattaaagagcgaataaataaatatatttagagtaattttatactgtcatttacaccgtctcatatattttttatctctttatatctattctatataaagtgtgtctatataacagaattctttgtttatgagaaattcataggtgactttttatttatattaaaaataaactaatttctaaaaaattattgtaacaaaattattgtaatatgcatgtgaatacatcataataattaagtaatacgaataaaatacgaatctgtaaatacaaaatacaaaatacaatatacaaaatagtcacagtaatacgaatctgcaaatatgtatacgaacccttttccaaactatacaaatcttcacgacagacacaaatttatcaatcatcagatcccttggttaccccgaacacaatagccagtgtggcaagaataggctgcacaaaaccagtctatggtaactaaatcttaatagcaaaatcaattcaaaaaaacatactaaaacattggatttgataagtgtct

SEQ ID NO: 344504 - DNA, 962 bp, Cannabis indica
cccttcaactttcatccatgttagaatttttttattaaaattagacaaaagtccttaaatctaacaatctcaatagttcagggaaaatttttaacggacaaaaaagttcaggagacatgatttggtacatgtcaaagttcgaagaaaaaaattaattattagccaaaaaatattggcacataggttgaacaaaacgcattaaattaaaataataaaataataataatattttttaaaaagcaatagaccagaaaaatatttgcaggaaggcacgttaaaaatttacattaaatactccacagataagatttcttcttaatgcctcgctttggaaatattctatacaaatagccctaatgaaaagacatattattgtacaactttgatgatgggtcgtgggctaagtgaggatgatgagaagaaaagtcgtttgaaaagggggaatagttacctattatttaacagaatgtttttaatgtgataatatatatttagtccatacaaaaacatatagatacctctattaatttgtatataagtatatataaaacagtatcatcgtatactatattttgtaattctttagaaattagtctttttttagaactttacgcactatgattaactattcaacaacaatttaatccaacaatattatttggtatctaagactcctctatctttttctcttataggaaccatatatgagtagataaaataatttcactactacaatatgggcctttagcttccctttttttaacccattttataaaaagggaagctaaagggtgtgagaacacccaccagattcgaaattgacatttagaggcggttttttggtaaaaaccgtaggtatatatattactaaaccctatcccgtcggttgaaaattgggattttttaagggtttttgggagaccctatgccgtcggttcctagcaaagaaccgacggcatagg

SEQ ID NO: 344505 - DNA, 823 bp, Cannabis indica
cacaacccaaaccttgtcttgaggcatcacagtatatcacaaacttttcatcactgactggcaggcttagaactggtgcagtaatcaatctcttctttaattcttgaaagctattctcgcatttatcagtccacataagcttataactctttcgggtcagcttggtcaaaggagtagcaatcttggcaaaaccttctacaaatcttctatagtacctggccaatcctaagaaatttctaacttcagttgctgtcttaggtcgtggccaatctcaaacagcttgaatgttcactggatctaccagaatcccatccttacttaccacgtgtcctaagaaactcacttgggacaaccagaactcacacttcttaaactttgcataaagcttgtattctcggagacgttgtaataccatacgaaggtgttgttcatgagcttctttctatttagaatagactagaatgtcatcaataaacacaatcacaaaattattgaggaaatccttaaatacatgattcattaaatccataaatgttgatggtgcatcagtcgagccgaaggacatcactaaaaactcatagtgcccatatcgagtacgaaaataagttttaggaacatcctcttctcgaatcctcaactggtggtaaccagatcgaaggtcaatcttagagaagatggtctttccctgtaactaatcaaacaagtcatctatccttggcaaaggatatttgttctttattgtcaacttgttcaattcacaataatcaatgcacatacataacaacccatctttcatcttgacaaacaaaactggtgcacccca

SEQ ID NO: 344506 - DNA, 480 bp, Cannabis indica
tcataaaaaatagaaacaactaacattgaaattagaaagaatttaatctcgaaagatggaaacaatataacatcaaaatagaaactatagtttctgaaacggaaacaactagcatttaacctcatttatgttaaatagaaacaactagcatttaatctcgaaatagaaactatagtttatgaaatggaaacaaccggagggtgggctaaggcagggggatcctctatccccgtatctctatatttgggctgcggatgtcttgtctcgaattcttgagaaggcattagactctggcactattggagggatcaaattaagcagaaatggtcctaaactcacacatcttttctttgctgatgatcttatcctggtaggaaaggcgacgattactgaggccaagggagtttggcaatgccttgaataattttgtgattggtctgggcaaagtgtcaacaagctaaaaactgttgggttttatgc

SEQ ID NO: 344507 - DNA, 616 bp, Cannabis indica
gttaaaaataggttagttttaccgaaatgtacttaattatctatattcattgtattattatgttattgtcagcgccactaatgctaatttttggtttttttttttctgtgtcacttttttttttcttttaacatcaattttatttttccaattattatttattttccaattactttaatgatttgagaataatactattgtaatctgtttttaatgtaaccatttcaataagtgaaaaaatatatttaaaattcaaagcaacttgttattaatcaaaaaaaaattatttaaaattatgagatgttattaataaaaacaataacactctaaaatactaaatagtttgtgaaataatattatctcatatacatatttttgttatttattctagttggttaactttaaaaatcataattttattttcattaacttatatattattgatcattatgttacttttttgtttgttattttatagcaacttttacgttacctttaaatatatttaaaatttaataaaatacaaaaaattactaagtagcttatactagtaaaataagcgtaatttttttttaaaaaaaataaatataatcattgtataatatttattgaaata

SEQ ID NO: 344508 - DNA, 507 bp, Cannabis indica
ggcagaaaatcgagaaaaacaaaagtcttctctatgcccttgaaggccatcacacacagagaatgagtgagccctcataaaaaataacgataatgtgtaaaaaaaagtgaccctaacatcagagaagggaaatctagacgtgttatgtaaatcctcagggtgaaacattcccagaaacttcaaacgctaaacccagaaaaacaagtaaatagtaaagcatgccatgaacacaacagtaaagttagggatgcgagaaacttacacgaagtgttagaattgggggtttgctgttgatcacacaaagaaatgtaaactgacagtggtgagcaaaggttagcaaagaaatctgtaaagtgtttgaaggttttctggtctgaggatttctttctctctggaaaactcgaagaaagttggcgaaaaaaggaaagtaaccaaatgaaggaaaggtgatggcttttataggccaaagtgcatgaggaacaggcgcaatcacctaccaatcgaacg

SEQ ID NO: 344509 - DNA, 625 bp, Cannabis indica
tataggattattaattattgggattataacaatggataatcaatagcatatctatatcgtggaacatatagagcatactatctaaatgagagtgcaattccaagttctatagttgttcaacgaggaattaataagttagagaatttacttggtaaattctagatctgcttattgggagctcggttatataggcccatggtctccatactagttgagacaaactacttgtaacactcacttaattgactttagttataattaattttaattctaaaattagactatgtctagtttatgaatttctcactaagatatgacttgattgtgaagaaatagtattttagggtttatttgttaattatgagactttatggagtctaattagtaaatattacaaatgacaattttagttgataattattttaattattaaataagtagttttagcatttataaggttgatggtgcaaaaagtggtatttgtgaaaaatagatataatagctgagaaaaatggcaaacaccaaactagtgtagggcccactatgtaaccggccactaggtgccaattttactctattttatcaattttttattccaaataattcaaccctaaccctagtggaa

SEQ ID NO: 344510 - DNA, 820 bp, Cannabis indica
tggtctccacaaaacccttcatggacctcctgcatgatctgactggcttcagggtctgacacacaccttaagtacggcatactgagccctctccgataaaggatattgtccatcattacgtatcgatgtgcctgatactgtaacctcctggatattgtcattttctgaggtaattctccttgtgttacgtatttgatgatggggtccatccaactcggtccttactcaaatttgaattgtaatagactcttgatgagcgcaacaagttggttgtggagcatgcttgaacatctatatatcaccattgggccactgcccgattgtttgaagagttaggggcagtgagaattgtctttctctcttggaatggaaagtaatatggtagcctagacgtttccatccgggacatggaaaataattgaatttgatgcaactatttctagtggggagcggaaactggggtagggagaagaacctgagagattctttgaatgagcttcttcgtaagaaggccttgtattggcggcaaaggtctcgtgtgtcttagatcaaggatataagtgttctaaattcttctttgtctcgaccactatcaatatctgtcaaaatgctattaaaactatccttgataagaatggaatctggatcagttctagagcctttattgatggtgaattcaagtattattttgatagtatcttttgttggaaattattttaccaggatcttagatctactcacaagtatgtttgttaacaccctaaatatgaactttctaaaacgatgaaataaacacgtataaagtataagaaaccttaca

SEQ ID NO: 344511 - DNA, 565 bp, Cannabis indica
ggctgctgcacaataaaataagtcaagtcttagaacattcgcgagaacagtatacacttagcaaaaaaggcaataaagctagtcctaccctgactctctaattcagccctagcaaagtcccgaatcatagcactggcttcatcatccccaagaaagctgcccgagggaaggaaccaactagaggacaaatgggctgaatggtccaagggaatgggcgccgaaggtccagaacccatccgggactgacctaaataatggcctaaatgggagaaataatactccttggcatgattcccccaccgggtggaaggcatcctaaacttacggagacgttcatcgaaccctataggcctaaggcgggtatactcacggacaggaggaacatagtgtattattaaaggggacttaccagaactcgaagtgttggcatcgggagctccagtatttggtactgggaccacgggcttgggtctgggggtcctccgctccacggagccccaatacgaagggcctttcctgcagttgcctgggccttaatgtaagccagctcctgttcccccttgaa

SEQ ID NO: 344512 - DNA, 399 bp, Cannabis indica
gtaaaataatttccaacactgcaaactacgtttaatatcacgcaaacttagttagggtgttacatagatgttctattaattaagtaggctgcagtagcaacacaatctccccaatgcaccaaaggtatgtaagactgtaaaagtaaagccctagcaacattgagaaaatgctggtgctttctctcaagaacaaagttttgttgaggtctttgcacacatgagtgataatgcataattccatgttcattcaagtctttgaactgtaattcttttgcattaccagacctcataccgttaatggtcttaccaaactgattttgaacaagcttgatgaactggggtacagtgtaatatccccgaaaataaataatatttaaatggacatattttattaaatat

SEQ ID NO: 344513 - DNA, 508 bp, Cannabis indica
gagttgataaatataaaacataccatttctggtcacaacaaggacgacatgagaaagtacccttatgcatcaatagttgggagctcaatctacgcaatgttctgttcaaggtcctacatatgctatgttgtagggatttttagttaccaatagaagtgaagcacattctcaagaatcttaggagaatgagagatctcattcatgtatattctagtggagagttaaatcctactgagtatactaattccaattttcaatcaaacaaagattatgaaaaatcaacatctgggtcagtattcactcttggtgggggagctatagtctaaagaagcattaagcaaactagtattgcttatttaactatggaagctgcatatatatatcacaacttgcaaacagataaggaagcgatttggttgaagaaattctacctagatctcgaagtagttctagaagttaaaaaacaactagtgctctactgtgataacagtagagcagtggccaactc

SEQ ID NO: 344514 - DNA, 598 bp, Cannabis indica
agtaaagagccttgaagctacaagaggagtaaacacattgagagaaaataccacatcatcagagaatatgtggtaagaggagacgtactggtaaaacaaaattgatactaaagacaacctagtcgactcattcaccaaaactttgacagagactgcatttaaaaagcagagagagaaatgatccaattggtcaactttaacgaacaagtcaaagaacacaaataatataattgaaccagaacctaaccatctcaggattgagattattgatctaagatcaactaagtgatattgacttaggaagatataacggtaagtttatgatatcttatccaagttcaatatcggtcaagtccgatgtataacaatacatctaatccaagcttactttaccaatgcattggaaaagacataacactatctaagtgtaagtaaactacattgttgattatcatatcacagtgaaaatcatgtgtattgataaatcgtgagactttatttaatcacataatcgtgagaatttatatgactatttaaaaaatataaagttcaaactaatatattttttatggtggttgatttaaattttgaattcaat

SEQ ID NO: 344515 - DNA, 502 bp, Cannabis indica
attttctaggaatttgtttttttgtaacttaaataatagataaaaaagatgtaaatatctctattttaaagggatatctttgcctatgtattaggatcttttgtaagccctacactatatagaaggctttagttcactctcgaagcctaagtcattccacaagcactaaagggtctctacaaagtcttctatcatgctcccttaagcctcatacacgtgtgaagcatctccctctcaagtctcatattccatctatgcctcctagagactaagtcaagtatcatcttacgtccttcacaagatcttatcagtatttatctataacacattgttctcaaaattgtagtactgaagagagccatagctagaaatcataaagttttaacttatgatttgcatagtattatctcaagaatgaatacagctaaaaggggagtatgtcattactgttggaattattttatcagcatctagatttactaccaagtatgtttcattaaca

SEQ ID NO: 344516 - DNA, 514 bp, Cannabis indica
aactgaacatccaaactgatgcatttattgtacattaggctgaaacaaaggttggtgaagaacaacctattgtagatgactttgaacttgaagaggaagagtttttttaataattatttatgttgttatttgaattcagaatgcatttagtcaaagtaaatttcataatttttcatttccggtgcccggcaacatggaactcgctgtttggctcagtagaatcgcaatttagtatgttagtatattggggcagtttattaaacattgggaatgtcgggattggtcgggaatttagaatttcccaaaatacccctttagtacccttttatgttacttgccccaatgatattttgtcctttagtggactaagtgtaatgtgattatgtgatttatgtgttgtgtgttggctgaaataagaagggaattatcttttattttttttcttcattttattcaaagttagaaaaattggaaaattggtgaaattcaagctctcttcctctctctctctctc

SEQ ID NO: 344517 - DNA, 541 bp, Cannabis indica
ttcgtgttcttggtggttggtttttgggtttgcaacccaggtgccacggcatgctctgagcatgccgcggcccgccccttgttggtggaacctgggatttgtcccaggtgttgcggcatggcttgggcatgccgcggcccgcccttgtgtttttgggcagttttgagttcgaactttgaaactccatatcttttgattgcgaacttcgatttgggagttctttatatcgtttgaaagctttttccgagtctctttgtgattatttgaatttttattgccatggaaatatgttatgagtttgaaataaggggttagccctagtattgaaaatcccggatttgtgtgactaggattaccagcacctgatcaagagtacccgaggatttggaatctctgctattgcgagacaacaggtaagacagtggttagtacgtaaaagtatgcgcagtggctcttatattgaaaagtgatatgcatgattgtttagtaaccgggattagggttatactctaataagaacggtctaatagcctagggttat

SEQ ID NO: 344518 - DNA, 795 bp, Cannabis indica
gactgctacattcctgcccacaataatcgagccacaaaccctgaaaggggggtgtgcgcttggtcgggttctcatgcccagcaaggggcattgatgcctttgcattaatacttcaagaatgtggcggacttcttcggcctctgcccagcccagttcactcctaagggcattaactatctgtcagccatttttcgtcctttacgcctcccaagaagtgggatatgccttctccccacaaggtcagctagttctttgatttgaagtccaccctcaagcaaggcaggtcgagatacttctatttctctcaaccagacttcaagtggttgatgggcactgatgactcgaccatcagcaaaattgggcgttctgttgatgagtacttcttggtggatggcgcgggcatcactcgtactcgattccagcatattccaacatatcaccgtcctcccctcactcttgctcttaggaataaagctcaaaagcttgctcaactgccaggggaagaccggaatatcatccggttgacctctgaggataatcttgtgaggtacgggctctatctaaaggatttcattcccaagacagtgagtgagaggaagaggaaatctcatgctggatgggtaaacgagctcatccagagaatgagttgattcaactaaagcacgaggctaagttgaagggaggtgcaagggccaagcaatatgctcaggagcccttgaatcttgaagatgaggctgaggaagagcaggtgactccactcaaaaggaggaaaaaacttccagcccagcccaggcc

SEQ ID NO: 344519 - DNA, 1140 bp, Cannabis indica
tagggattgtgctgatgactcacgatgcgaaagttgaattcgctaagtgtttggccattctgtgcggattgctgaatactttactctgggcatgccagtgaggcatcctgctcggactgtgcttcccgagcagatgttccaagtagactccacgtgtcaccattcatttgatgccacatcagatggcaaaatttttggataacaatgcagtcattgacaatcgtagtcggcaagccgctgtgctaatacgaaaagcctatcaatctgtcgggcagcaacccccgaatgtcatccccctaggtgaaacagacgaagatccagcgatgaatacctctcacactattaatggtcagctgccaaatctccggtcacaggttccacttgtgggcctagtggtaggtgggcagaccttgtctagtaattcatcgggagaagtcataccaaacaattccaaccaggttaattgtgccggttagcacattagccaaaccaaccaatcactaagacagccaggcactttcgtattcgataggttggggacgactcatgatctcagaaatgatctgaataggaggagaggagtagacaatcaacttgacacgccgatcctgtaccctagaacccgcgctcaaattcttgctcagaaagatactgacgtgactctgatcggccgaaatgccaaacaggttagtctagctgtgcaggcatagctcgacaaactaaagaatatgttccaaggcatggccggtcagagaaacaatgatctcgagttggaccgagcacgtggaacccctttctcccccgagatcaacctcctagcatttgtcacacaagtttaaaatgccaacctagaagatgtacactggaaaagaagatcttctttcccacctcaaatatttcgagatgcaaatggatctgcagggactacgaggagatgtatgttgcagaatttttcctgccacctctcgaaagccgcctagcaatggtacttcaagctggcacctagaaagttcaactcatggaaagctttctccacagaattccatgcataattttcctcctctagccaactttcgttgcacctaggagacctggtccatgtcaagcaaagaccaggagagcctctctgagcctacatta

SEQ ID NO: 344520 - DNA, 580 bp, Cannabis indica
ggattttgaaaattagggttttaatttttgtttgaataatattgtgccttaatattttatggattctgtatatatatctaagtttacgatttattgatatatgttcagtaccattatatttttcctctggcttcagttttcgtgattcgactattattgtatatatgtatatatatatataatttttgttgttgttgattgtcgttgatgtgactgctatgactttatttgtttaattttttttacggcttcagtaatgcatcatacatatatatataaataaaatatgtttgtaagtttatgattatatagatttgtcttttgagattggtgattcatcttggggttgtgtacggcggctgagtttttctataatcacagaaatatataatcttttcttagcttacctattttatatacatatacagttttatttttattattatatattacagtatatatgctaaggtacaatttatttaattaagatattttggaaacaattaaatttaaattttggtgttggtttatgactaatattttgagtaaattaattaaaacaatatgtcgccaaagtgac

SEQ ID NO: 344521 - DNA, 573 bp, Cannabis indica
tcgcacatagaatcgcacaataacctaaaaaccccaaaaaaagctattgttcgaaacccatattcatcccacagttttattgcacaatttatcccaaaaaaacatacaaaataacaactttcaattcaataccagattcaaccacaaatgtatgcattttaaaggagaaattcaaagaaaaattccacaaaaactaacctggattgctgcgattggggttcgtgggattcgattgagtctccttgttcgctcgggcgttcgtcgatggggtcgattagagtgggtttgagggttcgtctgggttgtcgtgggttcaagggttcggttcgtggtctggtcatctggtggccgtgggttcgtgggttcgtcgtcgtcgtgggtttgtgggtttgtgggtttgtggtcgtctggtggtcgtctgcgattggggttcgtgggttttggtagttgtttgcaccgtgggtggggagagggaaataagagagagaatgtaaaagagagagaatggagttagagggaatgtgagaagtttgaaaagacaggggtatttttggaagaaaattgaaagattgg

SEQ ID NO: 344522 - DNA, 894 bp, Cannabis indica
ctacccttgattgagttttcatataataacagctatcagaataccattagtatggcaccttacgagatgctgtgtggtaggaaatgtcgattcctataaactgggatgaggctggagagagacgttatcttggacctaaattggtccaaaggaccagtgaagccattgagaagattcgatctcatatgcttgcttcacaaagtagacagaaaagctatgtagatccaaagcatatgaatatagaattttaagtgggagactctgtatttcttcgagtatcacctatgaaaagggtacgtagatttgggaagaaaggaaagctgagtcctagattcattagtccttttgagatactggagctgataggctaggtcgcctatcaattagccttaccatctgtgtcatctggggtgcataatgtcttccacatctttatgttgagaaagtacgtgtcagatccaacacatattttgagttacgatgatattgagctctagatagacttatcttacgaagaacaacctgtctagattttagactgaaaggagaaagtactctgaaataagacgatccctccggttaaagtattgtggaggaatagtaaagttgaggaagcgacttggtagttagagtcgtagatacgggagatgtatcttgagttattcaagtaaattttgaggatgaaatttctataaggaatggaggattgtaatatcttgataaacctaatggtaaataattagggtttatatttatattatgggttaatcaggtaataagtgagattatgatcctactaatctatttcagcataaaatttaaatttgttataagtgagtaaataagcataatttattaattacggagatttatatagcatgtgtgaatgtaata

SEQ ID NO: 344523 - DNA, 727 bp, Cannabis indica
tttttgaaaaattataataaataaaatttagtgagagagtgtaaaagtagttaaaaaaataagatataataatttacacttattataaatatatttttatatatagtatactaatacaaaagatttaaaaaaaaaaatagtttagaagaaaaaaaattaaaaaaaaagagagagaattagaaaaaaaaaaatgaaaaagaaaaataaagagagagaagagagaaaaaaaaaggtcacacttaagaaaaaaattaaccaaagctgactagaaaaacgatataaagaaaaaaaatttaataaataaaaactagcaaaaaaaaattaggtagtaaaagtataaatataaaaaatcacttgtcaaaatataatataaattttggtgtagatatctttttttaattacaataatatatataccaattttcttttactgttggaagcttaattttttattttttttttataattactcactaataattatttatttttcaaactagttgttcttctatgtcttgaaatcgaaagagatgcttactttttttttttttttttcaatctcagcttttgatttttctgagcagctagaagaacacgaagaagaaaaagaggaaaaagaaaagaaaatagtaaaaaaattagttttataaaaaacagaaaaatacaaaaaaggaaaaaaattacaaaatactttgggccggcccattaaacatttatacagtccaca

SEQ ID NO: 344524 - DNA, 556 bp, Cannabis indica
cccttcttgtcaaaaaggtttgaccaaaaacttataaaaaaatttaaagttatgggtttgcattatatcatgcattttcaaatgaatcccggttaatcatacacaaatgcccctttggtaattttaaagagtgaagctttgtaattacttaaataaaagaaatgattctctttattcataactgaagtaaaaaaatttcatcagcaatgtgggttagatcattaatttattggtagtatagttgcaaatgttccacgttccaatagttctttattagcgagccatctagccgagccaatttgtatactttgactcctactactgcttcgattacatatggacgctcccagttcgagttgaacactcctacatacgcatctctcgtgtttgcaaatactcgccttagtaccaagtctctgacattgaatagtcttttcatgactcttttgttgaagtatcttgtaactcggagttgatacgctgcattagtgatttgtgactcagttcgtttttcatcaagtagatccaaggacaattttaggagttcttggttttc

SEQ ID NO: 344525 - DNA, 886 bp, Cannabis indica
aagcagaagatggtgatctttcaacctaagggtgaagaatcatttgtttttgggggatcttttcagggatcccgagtcctagtgatcttagtgttgaaagccaggacttattacgagaggggtgcatagggttcttagtagtggtgttagataccactcaacgtgaattagttcagcctgaagatatcaaagttagaatttttagatgtgtttccagaaaaacttccaggattaccaccgcagcgaaaaatatattttgtgattgatttagcacttggagcgaagccagtttctaaggcaccctatagaatggctcctacaaaaatcaaagaattaaagttacaacctcaacggatgcttgacttagggttttctcgaccaagtgtgtcaccctagggagctctggtattgtttgttaaaaagaaggatggattactttgcatgtgaattgactattgagaactactcaagttgacaagcaagaataagtaccctctgtctaggatcgatgatttgttaatcatctttaaggaaagacaattttctctaagattgatctccactcgagctatcatgagttgagaatctgagaggaggacattccaaagactaccactcatactaagcatggccactataaattctcggttatgtctttcggactaacgatgctccagcagcttttatggatatgataaataaggtattcaaggatttcctcagtatttgtgttatagtatattttgacgatatccttgtatactcccaattagaagtagagcacaagcaccatctacggatggttttacaacaattacggaaacataaactttatgctaaatttaagaatgtgaattttggcaatcttgagttgcctttttagggc

SEQ ID NO: 344526 - DNA, 776 bp, Cannabis indica
gcagtgacatatccaggaactgaaggcttgctgttggagacggtaagaaattctaataatcttagacttaatattgtccttcatgttcctggaataacaaaaaacttggttagtgtatctcaactaactaatgacaattgtgtgttcttgaattccacaaaacttgttgctttgtcaaggacaagcaaacagggaaggtactgctcaaggggacccttaaagatggcttatatgtgctagagcaattctctcaagaatcaaaagaggcaaggttgcagcagtgtgtgcccagtggttatagtcctactgtgctatgagttgtagtagtcatttttcattacacaatgtaataaatgacaatccatgtaatactactcatatcaataaagacaatgttgttcctctaaatgtctataaccctactgttctgcaaactaataccaaaaatcatattaatgtatggcacaccaaattgggacatcattcccccactgtcctagccaaaatattaccacaagttcctcacactggcacaattcatcaacttgtgttttgtcatgcgtgtcaacttggtaaaagccataaacaaccatttcctagcacagataccaaagccacacaacccattgaacttgtccatgctgatctatggggaccatctcacatcaaatccaaagatggatgtatttactacattcattttcttgatgactatagcagatacacatggatttacctctcactcaaaaatctcaagctcttgacatgttcctaaa

SEQ ID NO: 344527 - DNA, 877 bp, Cannabis indica
gagcggggtcgcttttaagttcggaaatgaataagaagtcaggcgagtacgtccgaactagggctttgatctccagaactgtagaggtctgccccaaccctctacagttccaagctatgcccctcatggcacctgtggaggagggctgtccacctcctccacaggggaaaaattgttgtaaggagagcccaccgccgagcccgcatcctcaataataccaatatccttctcagggatagcaatatccgtcaacctggctcttgccttccaagccgtgagtctcaaggattgaccggcagagattggtttgacaatcagactggattgaccagcagagacgtccgtaggagagctcccatcacccgaagacggttcctcagaatcaccaggcaactcactagatccatccggctcattgcctctggggccaacaccacggggaaaatcccttaccacacccttcactcttcttaaattccatttaggctccgtctttaatgagtgagactcaacatctagtctacgcttcttcaccggagtggttctctcattaatttccgaagttggttgaaccccaatatcacaaaaacccgcttttcttttgattgggccatgagaagcaaattccgccaactcatgaaggtatccttcttgagcttgaaaaaattttgaaagagctcttttttcatcaaggtgctcagagtattcttggcccaaaactgatgtagtagtgttgttgttctcttctttttccttggcaaaaatagtcacgggcgaagatagtaaatcattgttattaaccggcccatcaccaaacgtccctggcccaccaatcttcctttgaatggacttaaccccacttccgtcaccaatttca

SEQ ID NO: 344528 - DNA, 686 bp, Cannabis indica
gcatattctacttgcttaacaaattaaggtcaattttagagtacacagggaagatcttacaataaactttgttaaagccgaaaaaacatacaacatgaaatcatttgaagtttacatgtcagaatttgacaaaatagacaaaagaataagaccttatctggaaagaataggatacaaatattggagtagatgccactgcccgaccagaatgtacacaatgatgacatccaacatagctgagttgataaattcaacaattcttgctataagaagactgcccatggaacatggaacattcacatggaacattcacaaaagtttcaatagtgacagaaaaaatactcagagaaaactttattcaaacaagaaaatatgaggtaacacactaaacataaatatatatacagacaatatatattagagatattcaataacaatataaaataaccagttataaactaatactccaccaagtgaatgtgctcgagaaagagaaattccttgtcaatttattggacatgcaaaacatgtgaatgtaaccggttccagcaagatgaaatcctatgtgctcatgcaatagttgtattctcgaaaagaggactgcgagtttatgactatgttgcggaatactacaaaacagacgaaatgaaagcaacatatgacacaacagcaaactcaattccaaa

SEQ ID NO: 344529 - DNA, 880 bp, Cannabis indica
taaacctattatttatttgattttaatgaacatgattaacttattgatgaatataatgatccaaattaatcatagttaattgtcaataaattaaataaataatttctaatagataattttataatgttctttcatctgtgtcataaacttaataacatgataaggcccatccaaattagtatatatgtgagcctatatattttttattcgacttaagtgcatataggagcccattttaaattttaaaattaatggattaggttgctaaaaaataataagatcactttgatagttttatttaggctcaattaatattagatttattcaattactagcaattatttatttaaatattaaatttttctcttttggaccttgtgcaagagttggggagccatagtagtgggtacgacatactgaacccaaccctccccatctcacataaactagcccaactgtgaaggcccatttgtcttatttaaataattgtattaagctaaatataatagtttaatcaaattgaaattgattagtaccataattaattttaaaatatgtgaaattaatttttcattaggttattttaaaattaatttaagataattaatttctagaaaaactaatttgtatttttctgatatttaattcaataataaaattaataattaagttgatttattctagatattcatgttcattttcttaaaaaaaatatatatttaagttgaagattacttgattaattttagaccaatttaaattagaatattttttaaatataaattaataatttagttgatttattcaagatacttaattaattaaatttatttaatatattaaatttaataaaaaaaaattatatttaagtttaaaattt

SEQ ID NO: 344530 - DNA, 1940 bp, Cannabis indica
aatcacgtaatacgcctatgttagttagggtgttacagtttgagtcttggtccagggcccggtttgagtctaggtccctgtttgggtctgggtcggggtcccgatctgggtcctagtcaaggtccgggttatattggcttcaggttctggtctgggtttgggtccgggactgggtcccagatctagacaatgactacgggtttggtccaaaagccccgggtccagatctggatcccgatctcgggtcttggtctggttccattttgggtgtcgggtcacgagctgggtcctaggttcacttccaggttttgggtcgggtcttggttcctggtcctaattccattccccaggtccctatcccaattctaggtccaggtcttggtttttgtctgggtttgggtcccgatttaggttctggtttgggtcctagtcgcggttcgggtttgggtctcggtctggctttttatttggattagggttcaggtctaggtcctggtcctggtcctagtcctagtcctagtccaattccagttctagttgcaattctgagtttgagtttgggttcgagtttgggttggggtttgagtttgggtttgggttcgagtcctggtctaagtgtgggttcgggtctggatctcggtctaggtccagatcgggctccatgtgtgggttagggtcctgggttttggtgtaggttcgggtccaagtaccacgtttcaatctcgatttgagtcggagtcccaggtttcaatctcgatttgagtccgagtttagttccgagtctaagtcctcagttccgatcccggtctagctttgagtttgggtccgggtgcaggcttatgtttgggtctgattttgggtttgagttcgggtcccgtgttcgagtttgattttgggttcgagtccgggttcgggtttggtcctggtatggatttgtgtcttgattcctttcatggtttgggtccggggcaagtttctggtccgcgtctgggtctgactttggattcttaggtctaggtcaggtccttgtttgagttcgagtcctagatttagatctgggtctgggttccgggccctaggtccctggtctaggttccccatccaaatccggttcctaggtcctggtctgggtccaggttcgagtttgggccccgggtcttggttttagtccaagtcccagtctggattcaggtccaggtctcagtcccagtctttgtccgagttcaggtttgggtccttgtcaaggtctgaatcctggtataggtcgcgggtctcaggtcccaatgagggtttaggactaggtcaggtccaggtcccaatctgggtccctgtccaagttcaggtcctaggtctcaggtcccagtcctagtcaaggtctcattacaggttctggttttagtttgggttatggttagggttcggttctggtctcaggtccgggtcctagtcacagttctagttctatttccgggtccgaggtttgttctgggtccgagtctgggtctaggttggggtcagggttagagtcttagtccgagtctgggtactggttttttggatcctggtctgggtctaggtctgagtctgggtccaagtttgggtcctaggtttgggtcccaggtttgtgtcaaggtctgcgtctaggtccgagtccagtcccgtgtcgatcccagtttgggtctgggtcggtattcgggtcagggtcttggttcgtgtccatgtccaagtccgaatcccagtttaggttaggggcttagtttaggtccaggatcgagtcccgagtttgggttcgggttaaggttcttgtctcaatcctagtctaggtccgagaccgggtctgggactgggtgttggaaattattttaccaggatctagatttactaacaagtatgtatatgaattctaaaacaatgaaaataaacacatataaagttagaaa

SEQ ID NO: 344531 - DNA, 1516 bp, Cannabis indica
ctttaacttggtacccatagcctttggaagactcacccaaaactttgaagtaaactttggatccctgtctgagacaatggatttaggagctccatggagacgaactatctcctttacatacagttcagtgtactaatccactgaatatgtaactttcactggcagaaagggagccgattttgtaaatctatccactatgacccatactaaatcatacattcatgtggttctaggcaaacaagttacaaaatccattgcaatgtcctccgacttctactcaggaagaactaatggttgcaataaccctaccggcctttgatcttcagccttgatttgctggcaggttaagcatttggacacgtagtccaccacttctcttttcatcccgtaccaccagaagaagggttttaaatcttgatacatcttggtggttcctggatgcagtgaataaggtgtggtgtgagcttcatctaggatcactttcttaagttcatcaacattacgaatacaaactcgagctttatacaacaacattccattatttgagactgaaaagtctttaggccgaccaaccattacctcatcccgaattttgactagctcaggaccttctagatgtgcctttctgattctttctaacagatcagactgaagtatcaagttgtgcagctttctaactataaactctatccctgcactaaccatttcagaagctagttgaggggctatcatcaccgcagtggaaatctgcctgggaccttttctactcagtgcatcagccacaacattagctttcccggggtggtacaaaatctcacagtcgtagtccttaacaagttctagccacctcctctgcctcatattcaaatctttctgggtgaaaaagtacttgagacttttatgatcagtataaatctcactttttcaccataaagataatgcccccatatcttcagagcaaaaaccacagcaggaagctctaaatcatgagttggataacgatgatcataatccttaaattgacgagaggcataggctatgactttgtcagcctgcattagaacacatcccagaccctgtctggatgcatcatagtaaacaacaaacttttctcaatctaaaggcaaagctaacaccggtgctgttatcaaacgttgcttcaactcctgaaaacttgcttcacatttgtctgacctcacaaatcgctgatttttcttagttaactcagtcagtggcatagagattttagaaaatccctcaacaaaatgtcgataatacccagctaaatcgaggaaactttggacttctgtcactgattttggcctcagtcaattcttcattgactcaatcttacttggatcaaccataatcccattctttccgacaatatgccctagaaaagatacatctgacaaccagaattcacactttttgaactttgcataaacttgtgatctctaggtcgctgcaataccatttgaagatgatactcgtgctcctcctctaattgagagta

SEQ ID NO: 344532 - DNA, 861 bp, Cannabis indica
ttatggcgcgtttactaaactgtaattggaatcagaataatcaatatcgatttaaaatagaaaataatcggaaacaatattttattatgatgtttactaaactgttcggaaagaaaaccagaatcatattattttgtttacataactaggataagtaatcggaatgctttaatttgataaaattgccattattagaacatgtaattattttctgtttatagatttttaagaagtatatttgtctttttcatttttaattaataaaattaaaattaaaataaattaagtaaggaaagggaaagacattccttacaaaaatgggggagaacctttccctttgttttcttcctaatttgtgtgggtcccactaattttctcctttccaaaatttagtaaacaattgtatgggaatcaataccataccattcattcccattcgagaaaaagagggaggagaagaagagagaagtgaatgataattttttttaaagagaatgatagtgtttttaagtaaaaaaataaaggctaattaggatttttgccccctgaactttgacatttaccaaatcatgccccctgaacttttaaggtcgttaaaaatgctccctgaactattgaaattgttggatttaaggacttttttctaattttagtaaaaaagtctaacatggatgaaagttcagaggacatgatttggtagatatcaaaatctggggagcatggtttagtacacaagcaataactgaaatagtaaaattgaatgaaattagacaaaagtccttaaatccaacaatctcaatagtttagggggcattttcaacaacctcaaaaagtttagggcatgattggtacatgtcaaag

SEQ ID NO: 344533 - DNA, 502 bp, Cannabis indica
aaaatttataaataaattcggaattttccactttttttttttgaaaatggcactgcctaaacgacatgtcgtttttgcaaaaagcaaaacgacatgtcgttttccattctggaggtggttgaaaatgcatgtataaaacgacacgtcattttttcaccctgaagggctgccaaaactacgaaaaacgacgtgtagttttccacaggggaaaaacgacacgtcgtttgggcaaacgacagcagccaaatataacttggaaaacgacacgtcgtttgggaaaacgacagtagccacatatgaaaaacgacatgtcgttgtgccacactgtggaaaacgacacgttgtttggggttgacttcttcagccaaccgggtcattttgacccgtttttctgcacgtgggttcgacggacacgacccaaacccgattggaaaagagaattccgacgataaaattacgtgttttcaaatctaaaatgttctaaatcgaataataaagagat

SEQ ID NO: 344534 - DNA, 513 bp, Cannabis indica
ataagcctaatgatagataattatgatttatatttatattatgggttaatcaggtaatatcctactaatctatttcagtataaaatttaaatttttgttataagtgagtaaataagcgtaacgtaatttataaattacggagatttatatagcatgtgtgaatgtaatatgagttatgtgtggaataaaaatattttcaagttcggcaaccctgaagactcgataagtggataaataagcgtaatttattaattacagagatctatttaaaatacatggatataatatgagttatttgtgaaataaattttttttcaggttttacaatcttggagacccgattggaggccaaaaatatcacaacggttttagttagaaatattgacgggattattaggataagttgattttagaaatattgaaatattttaagatactcggagttgaccaaataccctaaaaatataaatttcttagtgactaaaaaataataagataattatcaataataaa

SEQ ID NO: 344535 - DNA, 653 bp, Cannabis indica
tgagattattgtaggattggctagcataaatgttgggctttgtgccctaaataaaattctatttcaatgtaatcatttatcaataaagaaataaatttatttttattacttatttaatgtgttatttggttcgtgtaatcatttatttatttatttgatttataaattcatccaaatctttatcacattgatattcttgtttattgtgttgtcaacacagtgaaaagtaatcaagattgtgtgattaaacgtattcctatgatttatcaatacacaggatttaactgataggataatctacaatgtagtttacttgcaccttggataagtgctatactctttacatggcattggttgaagtaaacttgggttggatgtatagagtatgcatcagaatgaaccgatattgaacttggataagatataataaacataccgtaatatctattcaattcaatatcacctagttgatcttagatcaaatgatctcgatcctaagattgctaggttttagttcaaatatatatttataaatatatatatgttctggacttaatagaacatatatatatatatatatttgttcatgattatagtgtcgtcatcacaatgaaatataatcatgattatatgttcaaaagtttaattcccat

SEQ ID NO: 344536 - DNA, 676 bp, Cannabis indica
ctagggatcaccccataaaaacactataaataccccccaaacttattaaagcaggggtcgacaattctgagtttcataagaattagaagaggaaaaatccaccaagaacattctctgtaataaatactatcataaatacacagactcgtggactaaggctcattaatgccccaaccacgtaaaaatctctctcttaattccttaaagctttcttaattattattattatatttgttgccgaaaacctcggtcaacattttggtgctttcattgagagctgaaggaagcatcaaaaagtagacagtacattacaacaaaacaacaatggtggagactcgaagcccatgtcaacctcgccctcttcaagatgctcaagatccaaatgatgaggaagtggcctcaagagcatttgtgggctctgaggaagaagaaggaacccctgatgacgagtatgaaggaaacttcgacgagtacgacgcctacgatgaaggcagctactcagagttggtactcttaaggcaaaaggctgccgatcatgaggctgaaatcaagcgaaaccaaaaaatgcaagaggttatgctgtccatgcaaaaagccatggaggcagcaggaatccacttgcaccctaaggccatccctgctgacttggaaaggagccagaggaatcctcgccaag

SEQ ID NO: 344537 - DNA, 1762 bp, Cannabis indica
atgtggaaccgcgacccaatgcttagttaagcatgaaccttggtatgaaggaagacgccacaaaaggtggtggaaatccgtttgataagtcaggttgaacgccacaaggaatactccttgataagttcgaatagttctctcaagaactcaagaaaaaaacctctcaaaattttattccaaaatattttgatttttcaaagtgtttacaaggctttatatagccaacttacaaccaagaaaaaaggaaactaaaagaaagacaacttttcaaataaaacaaagacaaaataaaggaaacaaagttaaaaaagcaaagctgccaattgccttggaaaacgtgataagcttaacttgggtctaaattgagtccactttgatgagaaacacaaattttcgctctccttcagtgttgactgcggtatcctcttgttttaaaattctgttgactaagttgttgagttcttctttgaatctcttggcttgcacccttgtcaccgcgccaactggaactttacttgtaactttagccttagtattctcatcaataactcacgttaagcgtgatacaaccttccaagtcagcaataatcatcaaggggataaaaacaaaagaactttagcagttatcaaatatcagatattatccgacttgcgattaaatgaaacgtgggaattttgtccacgttacatgaatagttacatttaaacgaatcccaagaaaataactgccaacttatattcctataaataggagcagattacacaaaaaaaagggacgagaaaattgtgagaaaaatactatcattctgatattgtatttagcactcaaaaaaataccattaataaaaaagactagtggagtatgtagattttaactgtgaaaccatgtaaaactatctggagttattaatttctatattatttaatattatttttgtaaagtatttattacgtaaaggcttattaatttttgtcaacgaaaattttcgttaacaatatttttataatttttattaactaatttattatatttggaaattttcttaatttttataaaaaggagatatttactaacttaatttttaaatttaagactattttgcatcttagcccattaattaatgagtatgatgattaagctaattgtatcacttttttattattattattattattattattatttattgagatttttgaaaacagaatataaataataagaactgaagaataaataatcaaaagagaaagagtgaaaatagacaaacaattttttacgtggttggggcgttaactagccttagtccaagagtcagtattatttcgtaagtgtattacttgaaaatgcctttgggaataataagaatgtatgttctcgagtttgcctgaacaaagtttgtaagagagttcaacccataatccttaagattcatggggtatttatactagtttgagaattatatcacgtttctcatttctctctactgggaagtttcctgtaaataattgtaatattctagaaaataatatggtatttaattagacatattttattaaatatgtaattattctggtaatgaagttagattacgatcttacttaggttaattagtgtaaatttaataaataattaaataaagcgtaatttattaattacagatattttattgaaatatgtgggtatcatggataccatttctggaataatatgttttcgggcccggcgactgtgggaacttggcggagtggtcagaaatgtcac

SEQ ID NO: 344538 - DNA, 702 bp, Cannabis indica
agataatcctactgatgttgggactaaggtcttaaccttaaacgagttcaagcattgcttaaacttgatcaatcttaaaagttagtatactgagattcctagaacaccaactaataatggctgaattctttcttcatcgtcatcatttttttaatttaaagtaactaggtggaatttgtagtatagttcctccaaatgaaaaagtctccattttcgtcagtttactcgtggtaccaaaaggagtctcgtagaatgatagtcccggaaggaagttcttggatgtctatcatgtccactctgagtccagtcttcatgatagctagtccttccctagaaaggagttccagctagctagttatccctcttagaatgatagatctggatagtcgttttcagtgaacttatatcctatccgaaagtgtcttcagtaagtgtctttggtccgtgagtctggaagctcgttcatgatcccggaggccttagtacttacgttgacatagagactttgctaaatgaggagttggttaagttagttatttctaactaacttaaacaaccttgtttcttgcagtcaccgactttaggatcctgatcctaaggctataaataccaccttaactcaacacttggaaatacgactaaaaattaggacttggagaactctatttagatgagattgagattttgagagagagagagaga

SEQ ID NO: 344539 - DNA, 759 bp, Cannabis indica
tatatcttcatttttccattccatactttgtcattcctagccttccatatgtgatagactaagcttgccattgcagccaagagagtgtgttttttgaatttgttgcatttgcacctttcaatccacctcataagccttgataaagattgagtagaagctttccaccccaaccaatctttaatcttatgaaggcattgctgagaaaaaggacatgagaagaatagatgatcacacgtttcttcccgagcattgcataacacacatcctggatcattgatgatcccaaatctatgcaatcgttctcttgtccttaatcctccccgcatagcaatccacaaaataaagctgcattttgggatgttaaacctcccccaaactttcttactccaatgcaatttaggttgtggagggactaatagtttatatccaatagaaagatcatacctggattgtgtgagctgttgaacattcaccaaggttttaatctgattcttggcctctgccaactttttctagtaccaactcccttggatggggcattgtagccccaccaatcaatttatttaattttagatcaacataaattagaataatttttccagttttattttatattactttaatggtgatttcaaaaatgtatctttatacattggatttcaaattcaattatatatttttagaaaattaaatttgagttgaaaattaatgatttaattaattttggacaaacttaaattaagtaattttttataatat

SEQ ID NO: 344540 - DNA, 569 bp, Cannabis indica
gaatagttatgaaggttttgaccttataaaattgttctcggacaatcatgggactagtttcaatgttttcttgctgaaactgatgtgatttttgaaaatttatttatcaatattttagtgtctttttataatttttgaaaaatcagtatttggtttattcattccaaacattatctatgtgatcatcacaacatattttatgcacatatatatatatatatatatatctatatatgcatgcataatactaataacatcatgaatcacatcccatttttattataccctttgatcaaaataaatcaatttcattgtaaaaaaaattaaaatattaatatacttgatatcaagtccacaaataatattattgacaaaaaataataataaataaaatccacaaataataaaaaaaagaaaaatttaaaaaataaggtcaaaaatttgaaaaaaaaaattacgaaaatatttcaaaacacagaaaaaactttatttttactttttgaatttttttatttacaaaaatacatcttcagtaaaaataataaatttgtttatagttgtattaaagt

SEQ ID NO: 344541 - DNA, 572 bp, Cannabis indica
agggtgatgatcgacgacggagcatcttaaacatcttgttcaagcaagcccttattagaatggatttgtccttagaagacctggaacaaagcgagcagcttatatatggttttagtggagccgacatcgctccatgtgtaaagatcaaactgccactcactgtcgtcacaacccctaagcaaaccaccatcatggccatgttcatagtggtggatgtgaagtctttgtacaacgtgatgctcggaaggcctgccctctacgaccttcgagccatctcctcagtgtaccatttgtccatcaagttcccaacgacagctgatatcggttgtctccttggcaatcaaggaactgcccacgagtgttataacactttgttatcactcgccaagaagacctcttttgttgctttggcttcagaggggatgaacaagacctcccctgctgctatggcaccagcagggatgagcaaggcctctctcgcaaaggccagagagacgacgaagacctccagagaccaaactataaagaagatggagacgacacctaaaaccacttgaaggtgcacccaagat

SEQ ID NO: 344542 - DNA, 591 bp, Cannabis indica
taaaatagtacaaataggattttaaactcttatttttttaatataaccaattaggaatttttgtaaaatttaagattcaaaataatatttatcattaaaatatgtaatactaatttatacacatacacacgttataaaataaacaataaatagtgattttctacatgtgaaaaaaaatactatttattgcttttaaaaaaatgtaaaataactcactaatatatgccattttttaatcattctcttctctatttgaaataaaatctcattttgaaggagctagtatgagtgctctataatatttgatcaagtgatacttttggggtgaaagtcacaataatccaaatttggagatcaaaaataaaatacgaaattttatttgcaccccataaaataataattaaactttattattaaaaaaataaattaaaataatatttacaaattacagttaatatttttgtaaaattttattttcatttattttatgttaattttaagagtaatttgcggcataaatacttaagttcaacttctagttgcaaataaatacctaagtttaatttttggcagtaataatacttaagttat

SEQ ID NO: 344543 - DNA, 789 bp, Cannabis indica
atctaacaattaatataacgtattaataaaattatagatcacaaaaaaattataattatactaaataaattcataaaattatatatatcaactaccaaaaatatatatatatatatcactattaaattatgtatacatatcaaaaaatttatatataataaaatagaaactcaatatcatcttaaaataaatgatatactatacacaacaaaaactatataccatacaacaaaatatatatacttataataataaaaaataaaacaaaataatataatattaattaaaaaaaattgtatgtactatattcataaaattacatacaaccataaaataattataccgtagttacaaaattatatatcacatttatatataataaaattaaaactaaacaacgcatgatctaaacaaaatgatataccatacaataaaatttatataccatataacaaaaaatagaaatatatataataacaataaaaaaaaaaagagtaatttgcggcgtaatacctaagtttatctcaaagttgcagataaatacctaagtaaaaattttggtggtaaaaataccttctgttaggattctggaacttccgtaagtacctttcagttaagtgacatgtaagtgtccatgtcatcttcgcattggtccgcatcatttaattattattcattatttaaaattcattaaaatatttagaaatcattttaaaattaaaaaaattaaattaaataaaaattaaaattaaaccgattataaatttcaatatataataataataataa

SEQ ID NO: 344544 - DNA, 591 bp, Cannabis indica
aaaaaaaaagaggtatattaattaaattttatttagagataaatttagctaatgcatagaaaatgagagtatttttcaacttctttgatagattttcttgggaagacaaatatacttaattatttatttttttaatgattatacttaattatttgtgattgaaattttttttactttaatttttttgtgtttaattttcttccgaagacatattttaatttttatatatcttacgtagttgaaaaaaaaaatggttgaatttatgagcatgttgttattattttaaagttttgacaaaatataataattgtttatgtaaacatggttttttttttctcaacttaaaaattgtaacgtccccgcttcaagcctccattgggcccttacacccacggactaatggctcttatacacgagtacgccactctagctgcttcctggattgacgactgaccctacagaccaacacgagtgtttccagcgtgctttgtcctcactcacacgcttcctaggaaaacttcccaggaggtcacccatcatgaaattactcccaggtcaagctcgcttaactgtggagttctttcgtgatgg

SEQ ID NO: 344545 - DNA, 567 bp, Cannabis indica
atacttgtgagtagatctaagttcctggtaaaataatttccaacagaaggtgttttaggccatgaagaaacggtctggtgatagttcgggtcagacccctttgcccaaatgaccaagaggcgacgagataccatccaaagagaagggtctgaccaagaaaattatcgacctctccaaagaggtggtgcttgaggtggagcctccagcctagagggcatctaaatcccaaggtgccaaggggggtagttcggatggatctggtctgaccaagccctctaaactgccatagtgctgagctccgaagccaagaaaggcaaggaaatgctgttaagattttatgtcctaaataaaacccgtttcaatctaatctgatttggttcactacaagattagaaatcatttatgcttacatgtagttctcatgtttatggttcaatgtgtacaaaatctgttaagtccagaatatatagttattcacaattatagtgatgtcaacacagtaaaatgtgattgtgattatatgcttgaaaagataatgtccctcattcatcagtgcactagatttac

SEQ ID NO: 344546 - DNA, 627 bp, Cannabis indica
ttcttcttcctcctttgaatttttcatacccaaagtttcatggggggtttatcacacaactcattgaccaaaagctcaaattgactctccgattttctcaaggatgaagcttggctttaaattaaggcatcattttttgccatgaactccatcatcaacacctcaagtgaacttggttgagccatttgataaggctcttcttctatgttgaactcttgaaaatccctcaatttctcatcatttggtctttgagtgtaagtgtcaaaatttagctctaaattgttgtagttgtcctcccaaacatggtcattgtttggacaattacaacaccattcgttgtactccgccatgtcttcgaacatctaatggacttcatcgattgatagttggtagaaattggtggtaccatatcctctttctaccttagattcaacctatttaggaatatttctaattgacactctttggacaacccatgatatggaaacctcattagaaatgccttgtatttccaccatgcttcatacaagggctccaagtcatgttgaacaaaattcataaggatttgtcaatgagacatctcaagcaccttgcaaaagaaaccaaaacaagacaaacaaagcgtaa

SEQ ID NO: 344547 - DNA, 1642 bp, Cannabis indica
caaaaatgccactaggggcaaagcatgaatcaacttcctaaacaaagaatgtaaggggaaggtcggttaacttgagaaagaccgtctacacatagcttggagaaagaccagctacacgtagctcgagaaagaccgcctacatgtagaaggtctcaacctctgcatagaactcattccccctcattataagatcccatttcttaagccgagaccttactcccagccacaagaaattcctcgacatcagagaaaggttgtcacaaggtcttctagtgcaggtttgggtcttaggtttgttggatcctctgaaagaaaccacgccaacttccctctcagattcattcaaaacaacggaaactttcccacgggattccttgttagcctgaggaggaccattaagaacactcataagatctatgtccattgctgcggatacataaaaaaaagggggtcaatggagcaaataataatatgtatgatccgactcaaaccaccattcacaagggataatacttaacctcaagaatcacttgtaaagatcgctcataacgatctatggggttctcttggtttggatagctcagaagctcctcagccttggaatctgtcgtttctggttccaattgagttttgaatcccatgggaatgaacaaagaaaaaaaatggttggtgcatcctggtgttatgaatttgggcgggtgaaattctgaactcagatggaacattttagcaagaaagagataatcaaatctcaagatggatctcaccaaaaaaccagacgtttgtgaaagatggcaagcctaagccgcccttttatacaaaaagtccagtgacaagaaggccaaagattgggaaatctaatggatgggagtagggttgactatgaagagatgattcataattaccctccaaaccgtacaaccgccagaatcaaaggacgtgtctttccaaaaaaagggattatgacgaaaatgccctctataaatattaaaaagcactttttagtaaaaaagaactttttatggggccattgttatacccaaaattaggctaccatctcagtgggggacacgtgtcgagataaaaggaatatggatagatacaatcgctttttatggaataaatcattaattacgtaagtatcagagtataattgtaataagtatcagagtataattgtaacttgctgactataaggtcttatgcgatgaataaatatacaaaatgttgcgtagtatattaacgagaaaccatatgtcgctaaatgtgtatagcgagggatcaagtacgttacatttatggagacgaaagcgacacatatcgactttagtgtataatgtacaaactaagtataacagtcgggttggctcaagacctaataagcgaggtgcctatcttgctatgggaaggcttcctataacttcacccagttaacttcagacatcttcttagtgaggctcataatcttgacgagtccgaagctaacattcgaacgagcctcaaagaactctttgtaaataagaaccacgatcatcacaagacgtgcatcatcggccttggaaggaaaaatggccctagctcgctattatgatcacttgaacaaagcttctgttgagacatccctggatacaacaattaaaga

SEQ ID NO: 344548 - DNA, 588 bp, Cannabis indica
aacagaaataaaatagcactttcattattttacaagcagagagattaatagactactcattacaattacatagtatttatagaagctaatacacaactactacaactaactaaaccgacacatgtataggttttaactaacttgattagttaattaaaacagttgcttatgtggcatattacatagtcacactaaatctaacattaggtcgtgcttcgtgattctccatctggtggtttgttggatgggggaaaaagattgtctcttaatcttccaccaaaggttagattttttactttgcagtggcaattgtctacttctcggttagaacagcctttggctttaatctttattgattcacacttggtgttacaatggtgataatcacgaacaacaatgaactcataagaggatacatttctatagctttatttctgtacagagagaatttagaagaggaggaaatagaagttaaaaaaaataactctgactgtagaagaagttgatatttaaaggcaatgtccaagagtgttggaaagacagtattgtcttcaactaacttaactgtcgaaaatgaagctttaaaaa

SEQ ID NO: 344549 - DNA, 779 bp, Cannabis indica
agaaagggagagagagaacttgaaaattataaaggaaaaagaaagaatataaagctcatgggagacttgatattcataaatctgttctgaattaaaggttgtaaagtttttgggaataataaaccaataatttgtggaaaaaagtttgtattaaatggtgttttgaggtctggtgttgcctgagtatggtggactcaataaagaaggggatggaaataatatagtattcttggcaattgtcaagtgaacttcaaggggagggtcacgatgaggaagatccaaaaaagggaaagatctcaaaaggaagaatccaaaaagaagccagatagaagaagaaccccttttccatcctcctacttggtgtatatataggctagagggtttgttattgattcctcacacatcgggatattttactaacaaatcctgtataccactattttttatgaatcaaatattacaagtaaataaatatcaataacaatctcgttatatcttgataaatatcctacaaatattggacaattggttattttcggttgaggatgcaccaatttgaaatagagtgctgaacacatgcattttggattgtcgatgcttgcgcacaacgccacataggctgtgacagtgtgctccaccaaacctcgcttagctgcatttcccaattttcgagtaaaaggcaccaactttccttgtaagctaattttggacctgataacttcagaattgagtcatggctgtgagacacactttgatccgtctcgaaattatctttccaa

SEQ ID NO: 344550 - DNA, 847 bp, Cannabis indica
ctattactaataaatagtatattatttttttttaaaaaaaagtaatgtcagctaatgtatcaacttatcatggtggagacgacggtggtacatatccaccagaccctagtagggtaccgtcgacatgtgagtcagctctaccgccaagaaggaaggggtgtggccttgctactaaccttaatgttgaacaacaaaagcgggatgcaggaaaactattaccactaacacttgatgaagtgacaggtaaagtggttggtacggagaactaagattttatacgtcaactgggtgttgaagtcacaatcttgttgccaggacactacttgaattttaaagatttacctcaacactttaaagaccaagttgcacaaaaaataaaggtaaaacaaattaacaagtttaatattgtaaatttttaattttaatgaatacaaaattctttaacaaatactatttgtttgtagtatttgtacgatattgatggtcatccagagcctgaaaggtgatacaaactctctaccatgaaatgaaaataatgtattatgagataaagaatatcaggcacactcactttcaagaacattattctggggatccaaataatttggaaagtgttatcaatgttgtacttgatcactgctctacacagagttggaagcaacttgttgaattatttctgagcccaaaatttattacgcgatctaatcaaaataaggaaaatagaaaggaaatgaagtatatgtccacgtaaggcacaaagtcaattgcagcgactcgtaatgaatttgtaagtaaaattattaactttctattagtaaatttttttttacacattacacaaactaac

SEQ ID NO: 344551 - DNA, 667 bp, Cannabis indica
aattattactttctattagtaaattttttttacacattacacaaactaactctacttctgaacataacgtccttaaagactatgcaatttatgtttggaaaaaagccagcttaaaaaaggaacaaaagacacttgggttagcgagacatgttgagaactacatgtaagtttcaaattttcattttataatatttttaaaatgaattaatgaaggtaatattgtatttttaacattttatttgatcaggagcaaatgaatgaagagattgccagcatgacgggaacagaaaatgattccaacgatggttcttctaccaaatacaagcaatttcaagctattaataaagttcttgggaatcattcggactatcaaagaggagtgggttataaattgaaagacaaatcggtaacaagttctcgtactcaaagtcaagttcaattacaaggcccttctccatccattagtcaagaagatatgagagtctttgctgagtttatgttaaaaatgcatgataagattgattaatctggcacctctagtgacccttctctgagtttatgttaccatcacaacaacaagttagtgcatctacttcaaccccacgtccaatgtcaatgccacaacaacaagtttttcatcaaccacaaaatatgtctcctaacatgt

SEQ ID NO: 344552 - DNA, 563 bp, Cannabis indica
catgaagcctttgcacacaaccaaaaaacaaataaataataaaaaaaaaagagtaaaatatagcaaaaaaaaaaaaatatgcaagaaactagtttggtggagggccaaagcgatccatgtatgccctccattgtgccatctcctcttgaacatttgcaaacccatgaaccatgtcactcctcatggtgttgatatcattgttgagattggtgagttgagagttgatatcattcctcaaggtttgaaattgattgtcaaccgatgtgtgaagacgagtaaaagcttcctcaaggttgaattggggaaagtgaggcatgggaggagcttgaggaggcatttcttcttcttcttcttcactttcacttgcgggcaagttaatgtcctcatcttggtcttcatcatcactttccaaatcaatttgcattctttgccctctctttggtgtgaacacccattcattgttaataaatttgtaacccatagccttgaaagttttggatcctagaatgtcactagaggtaggatcatttttcttttcatgtaaggtagggattcctaagaga

SEQ ID NO: 344553 - DNA, 662 bp, Cannabis indica
aggaaattggctggaagaacttcttgaagttcttcatggtcatatcgaacaactgagaaaacggcaaccggacataccccatttgctattgcatatgggtatgaagctatgctacctgtagagctcgagccaccatcccacagaagattcacgtacaaccaagaagtaaatcacgtactcctggccgaatcacttgatgaaatcgaagagaagtgaaccacagcaaacttaaagttgatagcacatcaacaaaaagtagctcagtatttcaataaacaagtgaaggctcggaaattatttgtgggagatatggtcctaagaagagtttctaaacaccaaagacagtacaataggtgtactcggacctaactgggaaggaccatatcaggtggtcaaagctctcgaatcaggagcatacaaattgggtaagtatgataaaaaaatacaacttgttctagtaccacggtattggaatggggaacatttaaaaaaatactaccaataaagaacctggtcggacgaccatattaagtactgaatgtacatttactttcaagtgaatggcctgcttggcagaccacggtcaaaggtttcgacataaatgaaaaagtactcaggttagatgaccaccatttaaagtacaatttctaatttctacaatt

SEQ ID NO: 344554 - DNA, 777 bp, Cannabis indica
ttttcagtcacaacaaaaataatttgttactaaaaagtaatattacttgttattaatattgtgttgtggctaaaataaattgtaatttttataattgatacttttaatcacgaacttttaatgataacatatgaatgataatttatatttagtcacaatttttttacttttaattataaattttattgtgtaaaagtaactattttttttttttaatagtaatagtgaagatttttttttttttttttacaagtgattttaattcccatgacatgataattttctttcaattatttcatgatcatctgtcttttttttttttttccccaatgtaatagctaaattataagtagctatttatttatttatttattttgaagaaaaaactagccaaaatgctaacctaacttgtttgtcagctataaggagaacaaaacaatatttataatttcctttgaaaaattggaccattatttttgcaagtgatgtgtcataagcataaatgtcatttcaatcctcaagtacaattatagcctcaaaaaatattgtgaatcttcgattaggacaaaaataaaatgaaaatatcattttagatgtgataaagtttgttattgaaattctaattggaaaaccagaatctaactttgtatgacacgagaaacttagagcactcccaacagtttctctactctattttttaaaatacaccactaaaatttcattttatcgattttaccttaaatttttacattatatcatacatcaatttctctattt

SEQ ID NO: 344555 - DNA, 585 bp, Cannabis indica
acagtcatgtttccaaaagataattttaataaaccattatgacagttgataattgcattacatgtagctaaaaatagtctacctaaaatgaggggtagttgagcatgggatttttaacaagttgagtatcaagaacaataaatcaacactaaaatagaatttatccactttaattaaaacatcttctataatacctctaggaattttaacaaaacaatcagctgattgaagtgttattgaagttggttttaattctcctataccaagctgcttataaatagaataaggcaattgtttaccgagatttttggaaactaaaatatttaagagctaaagaaataataaatggcgagaaataagagaggaaggttttttatatggttcaggtattaataaaccctagtccacgagtcagtctattggcctcgcttaggtaaaattgatgaatttataatgtgatgcaggaaacactaacactttttccttaatttcttttctaaaaagaagaagaagatcaaggataatttgagcaaagttttcgctatgtgtttttttggcttgacccctttgcatgaaaataaaggg

SEQ ID NO: 344556 - DNA, 1635 bp, Cannabis indica
tgatctcaatctccaatgctcatactttagtagagagagtccaagatcatagtgagtgtgtggaggggtgtaaaaagggagtataactcttgaagtaatttccatcaatgtgaggcatttctttgtaattacttactgtgttgagttgtaatcttggactcattctatggtgtactactgaccattcctattcaataaagatccactattaatccattattgagttaagttttcttcatcttatttcaattaatttcaagttttgattttgtgattggttttagttttgatttgtgtttcttggacattgttactgctgtaataatttattttgagggtgaggattcatcacaaatggtatcagagctcagggtatagagttcaagaatcacattcaaccaatcaagactcatcttcatcattcaagaatcaaactcgaactttcaagaaccagattcaaacaatcaataattggttttaatggcttcagcaaggtttgaggtggacaagttcaatggttcgaatgatttcagcctatggagaatgaaaatgaaggtctttctagttcaccaagggatttataaggcacttgatgatgaagccatgaaattaattgaagacaacaagaagaaacttgagattgaagccaaagcacatagtgccatcctcctcaatcttggtgatgaggtattgagagaattttcagatgaagacaaggcattgggtctttggaacaagttggcatcgatctacatgaagaaatcttttgcaaacaagttgtatcttaagaagaggttgtacacacttcgaatggatgagtcaaaggaattaagaagacatctagatgattttaacagaatcattcttgatctaaataatcttggagtgaaaatcgatgatgaagaccaggctataatcctgctgagttcacttcccaagatgtatgagcactttgttgatacaatcttgtatggcaaagaaactctgactatgacagaggttaaggctacattgaattcgaaagaaattcagaagaagggagatgagaaagatgagatcaatggggaaggattactcattgttaagggaaaattccccaagaaggaattcaagggaaatcagaactcaaatggctacagaggtaaccattcaagatccaattctagaaactccacaggagggccaagctctaatggagctgcaggaaagcaatgttattattgcaagaagggtggccactttagatatgagtgtttggctttgaaggctaaactgaagagggaaaatcatcacaagtctaggaagcaaggagttgctgatgtagctgatggctatgggtcgtctgatgcacttacagtgtcatctgatgttcttgtgatgtctagttcagattcaggtggagattggattctagattcagggtgttcatttcatatgacaccaaacaaaggactgttcaggactctttcagagagtcatgggggctcagttcttcttgggaacaacaaagcgtgtgagatcaaaggtgtgggaacaatcttgttaaagaatcatgatgaagtcatgttgaccttgcagcaggtcaggtatgttccagatctcaaaagaaatcttctctctattggtatgtttgat

SEQ ID NO: 344557 - DNA, 656 bp, Cannabis indica
attctcgacccctgccttaatgagtttgggggtatttatagtgtttttgtggggggatccctagaatcgaggtacatgtcttttagtaattctcaataaaggcacacattcccaatggatacatcataggaaatgcatggtctaatccctaggctttgtagggggcttaatggacgtagtcctttatccttcttacctgatgtgatccctcataacgtagccgtcagtaggcttactaatcatagcgtagtagctgcagaaagggggttacgctgtcagactataagacatatggtagtttcaatacgccttctcctatgcggcattaaatgcgaggtgactgttcagataggatctgacacctcccggagaggctttgttgtagctttgctctccgggagcatgtgagactcacacatcttcttcgggagacatgtctaaggctgatccctttggctaaagagacttagcagaattatcttaacattaaaccccttcagtctacgtgtcatcatccggttggtccacgtattttggacaaaataaggggcaacacatctatataaaggatctttgatcacattaagaatataacgatggttaaatgagatagcgtatctatatcgtggaacatatagaacgctctatataagtct

SEQ ID NO: 344558 - DNA, 593 bp, Cannabis indica
aaaaaaattgttttgaagtgtaaaaatgaaaaagccccttttttttattcggcaccttcatcaacagacagggcaaagcaaccaggccttagagtcaacgtcggagcaacaacaaaacattgttcattatgatcgtaatcagataaatctgctttcaaaatcgcagcagcacaatctattcccctaaatatattcatttctagctcaaggaattttaaaactctctagaaggccattccaaaactataaaattagaaccacgctcatgacttgcacgtaagttctattccaacacgctgatgatcaaaactgtaaaaggtcattccaaaactataatggcatgtttacttaaagggaatgagaatgaatggtatggtattaattcccatataattgcttactaaattttggaaagggggaaactagtgggacccacacaaattagggagaaaacaaagggaaaggttctcccccaatttttatagggaatgcctttccctttccttacttaatttatttttattttaattttattaattaaaaataaaaaagacaaatataccccttaaaaatctataaacagaaaataatta

SEQ ID NO: 344559 - DNA, 549 bp, Cannabis indica
aaacttatttgaaactcatggtaaagttaagacaaaggaaaataataaatgggtcaatttattttttttagctccaaaagtatgtattaaaaaaatttattttaaggctcaaaaagggtaaactaggaataatcacaaaatagcttagcttgaaagacacaaacattctaaagaaattgcctaaatcatttttcaaaatataagttatcaaggatctcacctcaaaggccaaataatgcaagttgtatcaaattcaaactatcataccaccaactatagtcaatcatatatagaaaaatctaaaaatataaagtaattgtgaaacatattaaaaatttctcataaaactttttaattaaactcaaaaatagttgaaccaagcacacgaacattagcaatttcctttttactagaaaaaaaataatgcaatatagataaatacaatggcttaacaaacaaacactaacgtaaacaacaaaaataacaaacaaaaatttaaaattttgtaaatccctcccccaaactaaagactcgcgttgtttccaatgt

SEQ ID NO: 344560 - DNA, 524 bp, Cannabis indica
tttttctcactctcactcatcattgtactttctttcttttgatcactcaatctttttttatcactcaaattcttttgattactcaaatttttcaatctcactcagtcttcatagacttattttggtgtcaaaagagctaaagtgactatttgctgacggaacataaatgagtacttgttggtgatgccgtcatgctggactcaccgatgaaatttccaaggtctttctagaagaaggtgtccagcttgcattgggaccacatcacacaataccttatcctcatacttgccaattcggaaagataccaaacttgtttggtaactctcacttcaccactatcatttaaccattgcaacttgtaaggatgtggatgtttaagcgttggaagtcccaactttcaaccatggatgaacttgcaacgttagtacaactacccacatcaattatcacactacataccttgtctttcacatgacaacatacgagtatgaaaaatattctcacattgtacctcttcttcctct

SEQ ID NO: 344561 - DNA, 976 bp, Cannabis indica
ttaggttggctgccatttgcaaatcagcttggtgcaactcttctagagactttagcttggcggtcaattcttacacggactccttagcgtgtcggagctcccgcctcgcctttgtcacagcctcatccttggccttcagcgcatcatccttagccttcagttcctcggcctttgcctttagggcctcttgatggctccgctccaaaagggcctccctctgctgggcctccttccagatagacttcctctgcgcctctaagtcccgaagactcttcatggcctcttccatgcccccaaactcagacatggtgtacccatggtcaatcagagtcttagaaagatgaccagtctcggtaccaatctggtaaaacaagaaaaatgtgtaagtacatgatgccaagccccaaaagacaaaaggcctaaaaacactgatagaaacttaccgcggtcatggccgcacttatgtcctgaatctcgtagactgggttagtggaagcacaggctgcgtacctcttcatggggagttggacaaggccggaggcaaggtggctcattagttctgaggtgaagggagcaagagtcggcccaatgaagcgattgaaccagtcagtcaaaggatccaaatttagatcccagacattcccagcgtactcgctgcaagtgatattgtcctcggcttcccgtaagatctttttcaaggcctccaccgcggcattccccttcatgtattctgccatggcatagttatgcttggcaatttagagttagtttctctcttcgtcaataggaacgggagttagaatgatacatggaggaacggtgtactcctccgactcgggtgggattcctaaatcaggattgggagccggagtatcaactctcctgggcttcttggcagctttggtctccaccatttttcccttacgcttccggtccagaggggtgagaatctcgccctcctcttcctcttctacct

SEQ ID NO: 344562 - DNA, 303 bp, Cannabis indica
tattatttacaggaaatgttttaaggattgaaacggtaaaaatttatttctactcggtgtaaataatctatagaggatctttgattattgagattataacaatggttaaatgttgatagcgtatctatatggtggaacatatagagcgttctatatgactggtgtaacgtccccgcttcaagcctccattgggtccttacacccacggaatgaatgactcttatacacgagtacgccactctggctgcttcctggattgatgactgaccctacagaccaacacgagtgtttccagcgtgcttt

SEQ ID NO: 344563 - DNA, 627 bp, Cannabis indica
gggattctttccactttatcatcttaactcgtggagtagctcccggacaattgctacatacgcatccattttttcttcacgcgtttgttattctcccgacacttggtttaccaacaaatgtgaatcactcaagacttctactcttgtggcacccacggcttttgctaacctcagccctacaatcagggcttcgtattcagcctcattattggaagccatgaattcgaaacttagggccgcctagagtcgaagcccgttcggagatatcatcgctacccgagctcctgatccgttttcgttggacgctccgtccacgaatactttccatgctggggttggtaatacgagtacgtttgtgctgccttctacttcattacactctattatgaagtctgccaacgcttgtccttttataggcgtgcgtggtatgtagtgtatgtcgaactggcttaactccatagcccacttgaggagtcttccaggcgcctccaacttctgcaaaacttgccggagcaaaaggtttgttaataccttgatggggtgagcctgaaagtagggtcttaactttcttgaagccatcaggaggcaaaaaactagtttttcaatcactggatatcgtgtctccgc

SEQ ID NO: 344564 - DNA, 751 bp, Cannabis indica
cgagtcaatcttgttagatttttgatagcttttcaggtcctttttcttatgatttttcgtccccttttttaatctaacttgccactatttataattacatagtaggtcgttaattacagagttgactataatttttacaacggttatcccctgaaatcgtggggtttgattacatatcacgtagtataaatgtggttattatttgaatatcacacaactgtgatttatccgcttttactgggtcaaaatgatagtgtgtttaaacacgtcttaaatcataacgttctgggatgtctcgacaggaactcggttccaatgaccttgatagcgagctagagctttttcccctatcttttcgaggtcgacaatgtatgccttgttgcttcttcgtttgaaggtttaacgcttcattttgataatcgcaattcttatttacaaagagtacctcaacaaacattcttcttttgactcatcaagactataagtctcactgaaagatgtctgaagttaattggtcaaagtcacaggagtgtgccttcctatagtgagataggcgcctcgcttattaggtcttgagcccgcccgactcatatacttagtttgtatattatacgttaagtgttttcacagttaatatgcatcgctttttgccttcccaagggtaacggagtcgatgtctcgccttatgcatccaatgcattacggtttatcgttaatacctgaggcaacagtttgtatatctttatcttgc

SEQ ID NO: 344565 - DNA, 520 bp, Cannabis indica
aaaaattagactaaaaaattttctcgagttcgaaacaagttaagggtgtatcagtacattccttttaagggagcacattatagaatcacctaaaacttaaattttccaataatatatttcttaaaagttatacaatgcgcatccctaaaaataggagaaatagtagccaatggcctatattcttctttactgaaatttaattcattttttaacaataatataataaaaggcctttataattttttaatacctaaaatacatttaattatataaaaatattattctcgttatatacattctccaaggatgtgtttggaaaaccacaatgtaattagatttgtgtgtaattggaggtaattacacaatttgacatgtttgtctgaccatgtaattacactgtaactgcgtaattggaagtaattgaggggttccaattacactctccaattctcatggcccttcatgagaattgaatgtaattacactgtgtaattactaaaaactttccatattaaacatt

SEQ ID NO: 344566 - DNA, 1139 bp, Cannabis indica
acctatgtttatttttggtggcaaaaacacctaatgttacaattctcttacaccgttactaccactttcgttaactcataaatatggacacgtgaagggttcagatgcattacatttatttttattttattttaaaacttaatattcttaatatcagaaactaaatgctacttgtttaaaaaaaatgtgttctcatcaacaattttcacatgatattggcgatttaattcgataattatgttccatatactacactggttcactcagccgtggtaatttagtattccatccttcttatttttttttaaaacacaagtaatatttagtttttttatattaagaatattaaatttgaaaataaaataaataaatgtaatgcatttgggccctccacgtgtctatatttatgagttaataacgcaagtggtagtaacggtgtaagagaattgtaacagtaggtattttcgccactaaaaataaacattaggtatttaagtgtataaaatcggaaacattaggtatttatgccgcaattttattatgataattagatttgaaatatgaaaaataaaaatctaaatataaaattacataaaaaattagaaattaattccatgaaaaagcataaaaaattgaaaaaatgaaaaaaaaaaaattgatttggtacgaatggtatgcattgcataccatatgcgtgggtgctaggggagggctggccgaggaaactcggcgctggaggctgcttacatcctgtccacgcgggcatggccccctgttcaaacaaaaattgtccccctgattgagaattcatggacatgcaacatttcccaagccgcgtgcaccctgtgtgacacggatgtccgcgcgcgtttggggtgtcaccacccctaagatttttccaattttcaaaaattcataaataattcaaatcaaattgaaattaagttctgtaaaaaagtgaattgcttaattttttccatactatccaacaaaaataattccaaaataaaattttaattattttatgtaaaaaatttgcgaacatcaaacaatcatcaataaatacataaatcaacatgaatcacatccaaatcatacatacatcgttttaagtccaaatttcttgaaagtaaatcaat

SEQ ID NO: 344567 - DNA, 529 bp, Cannabis indica
tactaaaaactttccatattaaacattatctactaaaaaatattatttttccatgtaattactaactattttgtcaaacaaaatattaggaattcatatgtaattaccacctcatatccaaacacatcttgcattttaaaatatagtgtaattactaaactgtgtaattaccaccctagtaattaccctacttagtaattacacaggtacttccaaacgcaccctaaataaaattagaagctcaattcgaaaatccaaatgacaaagcctccatctcttctatattttccagttagttttaatttctttaaaaatttatggtaaataaattaccgtgagcaataaaatattcttctctcatccatttgttcgattcattcgttagatctaatcattttctcctaattcctcacaatctaaggcgacgaagctctgttcattttgttttcttttgattgtctcacatcttcaaattacaacgattgctcccaaacaacggggtaagttgaaaaatgcctcttttattaat

SEQ ID NO: 344568 - DNA, 787 bp, Cannabis indica
aatatccagccagacccaagaagtttttaacttctgtcactgtttttggtctcggccaatctctaacggattctatctttctcggatccatcttgatcccatctttgctaacaatgtgcccaaggaaggacacctgagatagccaaaatttgcacttcttgaatttggcatataacttgtgttctcaaagtcgttgcaaaaccatctgaagatgttgttcatgttcctcttctgattgtgagcacacaaggatgtcgtcgataaatacaataacacaaatatcgaggaaatccttgaataccctattcatcagatccatgaaagatgcagaagcattggtcaatttaaaagacacaaccaaaaattccataatgtccatacctagtgcggaaagctatctttggaatgtcctcctctcagattctcaactgatgatagcccgatcggagatccatctttgaaaagactgttttccccctgaggttgaattctcaattctttaagttttgctggaaccattctgaaagtggtcttagaaatcggttctactccagatgccaaatgattaacaaactcaatttccctctgaggtggtaaacccggaagttcgtcgggaaaacatctagaaattcccgaaccaccttgatgtcttctggccgaacagagtcaggccaagtggtatccaatacaacggcttaaaaacccaagacatcccgctcgtaacaattccctagctgttaacactgaaattactgggatccgagttccctgaaccgaaccgacaaaa

SEQ ID NO: 344569 - DNA, 609 bp, Cannabis indica
aaggcaaaggcttcagagttgcacacaactgtacaaccttttcacagcattattctgaaagaattttctctcagaaaattctctctgagccgccaccctctctctctctattccttcactgtttcgaaatgtatgagtgctagagtagtgcccacacacatcaagtaatacctcaatcatagtgaggaaggctgtgtagaattcagagacaacaaagaaggactttcgggctcagatcttgattatactctgctacagaaaggaatcaagggttagagatctgagtgggaggagacatatatattccgctgcaatcactgtaagatttctgatactcttatgtgtttaatttcatatcgttttagaagttcatatttaggttgttaaatcaacatacttgtgagtagatctaagttcctggtaaaataacttccaacagttttttcccctgaattttcttgtatctttcgttatttttattgacggtaaaaatgcccggaacacttttttgggaaactgattataaaggacctaggttgataatatgtcaacttggtcgttggatccaattttaggacacctagaagtttctatttgttgggttttatg

SEQ ID NO: 344570 - DNA, 666 bp, Cannabis indica
tccattctgcttagtgattcggccgtaaatgatggttggaactggagacttgagacttgtgggaattattcggttaaaagtgcctaaaattttttgcaagaatctaaaggtgcttggtatcgtgatgctaatactgatttttggaagtgcctttggtcgttacaatacctcctaagatcagtaacttcttatggagggctgcttcaggcgtgctcctaacttgtttttagctccaaaaatgtcatgttcccatcaatgctgactgtccgttgtgtaacgctcagaaaccgttcaacatgcattggtggagggtgagtttgctaaagctgcttggaatcgcagcatggtcgacgtcgaggctggggctaccacattcagcagctggctgttggggatcttcggcagagggcacgaaggtgaaatggaggaagtggttgtggtgagttgggctatttggcacgcgcggaatgaatttatttggcaaaataagagttggtctgcatcaaatattgttgcatcagctaggaacatgcttgatcagtataaatttgctcaaggaaggaaggaaggatctttcattgtctctgctgcatgatgggggcaaaatcttgagcgttggattgcacctgagttaaacaagatcaaagttaatgttgatgggacttt

SEQ ID NO: 344571 - DNA, 460 bp, Cannabis indica
ggtgcaagcagaacaacctgttgctggcacccgtatggagtcgttatacgaaaggttccgtaagcaagcacctccagtgtttctgggaggtcctgatgtgatgaaggccgagcagtggctcactgtgattcagcgaattttgaattttatgggtgtggttggtaatgacagggtgacctgcgccacatttcagttccaggaagacgccctactgtggtgggaattggtgtccctcacccgggatgtcactgtgatgacctgggaagagttctacgagttattcaatgccaagtattctaatgaagcggtccgcagtgcaaagcagaaagagttcactgagttagtgcaaactgaggggatgtaagtcactaaatgtaccacaaagttcgaccgtttggccaaactcgccgtgggcatcgtgcaaacagattttggtaagaaagaaaagtacctggtcggt

SEQ ID NO: 344572 - DNA, 440 bp, Cannabis indica
tgaaaatattatttaataatctattttagttattaaataattagttttgacttttaaatggttagaattgtgaaaactgcaaaatccaagtgaggcccattaacaccataggccgtccacttgtgcatgcattttccaattattattttcattattttaatgccaattgattactaacctaaacctagcagttgtctataaatagaaagtgatggctcacaccaaatcaagaagttgagcaattgttcagtaattcaggaaactgcctctttcaaaattttgagccttcccttttctctctatagccgaaccccttttctcttgtcttgctctcccaatttcgaaatgcctagtgaaagagtagtgcccacacacagcaagtagtacctcaatcatagtttggaagattgtgaaggatcaaaatccaagagaaggacatt

SEQ ID NO: 344573 - DNA, 623 bp, Cannabis indica
aaaaccgtctttaaacttatcccccttcttagggacaaatacaagttcaaaaaagtataaaatctcagtcgggctaggtgaagcccagcctcgggctacattaaaaataaataagcctgagagtaggcgataagcttgaggaaggagttggtaaggcgtaaggccgacataaacaaggaaatttataaaataatcttgaaggggaagcatagccccagacatgagatgggtctggctctaagctccaaaacccccgtagttgtggttgggtgtctcttcgtcccgaggcaagcgatgaaagacccccgatgcggacaacttaatgccagctacggtcacaattttctccaactggtgggcgcaagtcagggtggagcgaagctcgtccgcctcccagacgttagaacggcaagtatagttctcgtgggcaactagacccttcatgacttcctccagagtggccaaagtaaccgcccccttccgagaagacttggttccaaacgcagggggtagacatttttgttctaaaataagaaagaatccagcagttagcccccaaccaaaccctaatgtaaaaaaaggaatgagggtcccctaactgctggaaagaggccccctccgga

SEQ ID NO: 344574 - DNA, 511 bp, Cannabis indica
ttatttgaaaataaaacaaggcttgctcaagtgcttccggttgactcctcagtttcctggcacgagctttgagcgcgtgagggtgtatttaatgatggcctttaatgcagcgattcactttttgcaggggtcgattcgtttcacgcccattgattgatacggcgcattaatggtgtcagacggacactcaaacgtttccaccgccttaattacaaatcaatctgatccgttgatctttgagaattcgaatcgtgcgtttcccccaccgttcgattggtaggtgatagtgcctgttcctcatgcagttttgcctataaaagccaccatttcctttcattttcggttacttcccatatcttgccaactttgctcaagtttcccagagagaaaaaattctcagaccaagaaaacactgttgaacacttggcaatttttccctagtccatctacgttcacttactgtcaatccttattatctttgtttgatctacaacaggaccccagtctcaac

SEQ ID NO: 344575 - DNA, 1524 bp, Cannabis indica
tacgctagtcatactctaggcgtaccgatgtgatactctcacatagtacaaaagccaacatacatatctaatgtaatctaacaggcttaactaacatgcacactaaacatgtatatacatatgcataccgttatactaatgttacctcgtttccgaattcaggtgtgccagccaacctgagtggaacaattgctcggcgaattacatgctcctaaatcacatcaatcataacataggtaagtgacacgctaaatcacttttcggggacttaaacgtagaactaaacatcacaaaaatgggaaaaactagggttcccaaaatttccccaaccggtagaccggttcccaaccagaattccagttctgcgaggtttcctggggacctaccagaattctggttcctacaggtccccctgaactagaattccagttcagtgcaggaaacgcttaaaatttcataactctctcaaatcaaccccaaatcacaccaaaccttccagacctgttctatacatcctcaggaacatattcaaggcaacaaaacatctcaacacaaccagaatcaaaattttccattaatgagccaagcttgagttataaaactcaaagcttgctcatttaacactacagtccctaaaaccaaccaaaaacgacataatcaaacataatttaactacagaaaactattccaaacgattacagcagctatagaactcatctactcaaaattcatgcaaaatccaaacttgaaactaaagaaaacttgctaggagcttacctaaagcttgagatcacctaacacttgctggaaaaagcgtgaattgttgaggaacaacccaaaccatagctggttctaagtgggtttgaaggagagagagaacttgacagaaaaaaatgtgtttatgtctaattttttgatattttgagaaaatgggaaaaatccttgttttattaaaataatctcagcttaacattaataaaaaaaaactgatttaattaacttaaataaactcacaaaatgacaaaaaaactaatggggcaaaatgaccattttgcccctcccacactaaaagccataaagggtacttaggggtattttgggaaattctaaaatccggactattcccgacattcccaatgtctaactatattgccccgctatactaaaaatactaagatgtgattctaataggcaaacaccgcgcttcgatgttaccgggcacaaaatatgcataattataaaatttctaaatatgacacatataaaatacattctgaattcaaataaatcatcgtaaattaataattcaacattaataaaaaatttccatgattaaaccttaattatctgctaatttccaaattaaagctaagcagtctttacaattatcccccccttaaaaggatttcgtcctcgaaatctaacctcaacaactctggatattgagctctcatgtctaattctaactcccaggtggcttcctccaccttgttgtttctccatagtactttgaccaaagctatg

SEQ ID NO: 344576 - DNA, 658 bp, Cannabis indica
aataacaaagaaggaaaacaactataaaaagtgacccaaaacgtaagctaaaaatagcctaacagccagtaaataattagaacgataaaacagattgtacgaaattgaataagagatgaagaagaaaataaattctactttaatccataaaaagagttttaagagaatcacataacaccccttaaaagatttagccaataacaatcatcttaaacatccaaatattcaattaaaaacataaaagataaaaagatgaaaaagaacacttactcctccaatagtaattcttatatccagccgtcctttcttgcttcctttttgtctttaaagttgacttttagatgaaaatctaccctccgtactcgttttaaggtcgaaacaagaactcccaaaaatattcaagagttgcgactgttgatagagagtcgctgctcttggattttttttttacaaaattgttgtaattctaaaatcctgctacaacgactgatgatattttagtcataactctttcgatatagctcaaaattaaacgattcaagatattttgaaaagttaaaagagagatctagaactttcttttcgaatgtttatcttcaaagtgaacgaatctgtaaagcccgcttagttaatttggaaattagcagttgtttatgtt

SEQ ID NO: 344577 - DNA, 1295 bp, Cannabis indica
gggtgctcctgatcaggtgccggtaatcctagtcacacaatctgggattttcacaaatagggttaacccctgatttcatattcataaaatatattcatggcattcaaaattagataatcacatataaagaactcccaaatcggagttcggaatcaaaagttatggattttcaaagttggaactccaaactgcccagaaaatcgagggcgggccgcggcgtgcccagccatgccgcggcacctggggcaaatcccaggtttcaccaacaaggagcggaccgcggcatgctcagaccatgccgcggcacctgggttgaaaacccagaaaccagccatcttcaaacacgaattcagcaaccaaaacacacccaaatcacctcaatatcatacccaatctctcaatttaccaactacaactgttagcaaataatatagggtctaaaacacatatttatgtatcaaaatccaacataaagtccccaattcagattgcatataaatcacatgaaccccaattccaagttcttgagctagaatttacaagctagctccaaacatcaattttcaacaaacacatagtattacagccaagaattcacaagaaaaataccctagaattcatgtaaggttcatccaaacacaaacccatacaataatccacaagatttgaatataatcatgctcatactcacataagaacacatacatgcaacatcacaacatcacaacccttttcatgctcttctaacagcaaaattcagcaaactataactagaattaaagctgtaaaactaccttaaactcaccaaaagcaagctcaaaattcctcaattgcaaagcttcaattttacaccaacttcaagcaattctccaaacaaattttgagaaatcaaagaggccaagttagagaaagagagaggggtcgggtgagaggggaagcaaaaccagaattttcattttcatttcttaaaaatttaacttttattaaagtatatcaaataaggtcaaaagaccaaaatgcccctaaggccataaaatatgaataaacactctcaagggcaattaagtcattcatactcataaatttccaaataaaattcagatttcacattatcaaattaaatgtcaaataattcatttcaattgcatttcgggtccgaacccggttctgcccgaaatacctagttgtgactataccgcgccaatctgtcagaacacacctgaaaaaataacacaggcatactatataataatatagttaccattaagcacgtaattaaattaatttcatcaatt

SEQ ID NO: 344578 - DNA, 688 bp, Cannabis indica
agaatgatcttgtcaaaaccactatgaacaaggtacaaatgccatagatatatataagaatgtggttgtggtattttgatgacttaggtctagttacattaaagctcttagaatagtccaagtggatcctggtcacagaatactaaactcacattccatacattaacatatagtttgaatccattgacagaaaatggatattaaacacttaaatttaaaatttctattgtattctggaaacagatttataaaatttctatttagaatctaaaatttaaagttaaagacttaaatttaaccaaatattaaatgagttttattctagcttggaccaccagtactaatctaactctaagtataattttcctatagtaagcatatacaagtagaagatttctaagatcgggaacgtagtcatctgcgccattaaatttcataaaagaaaatagaatgacatcataagcagattatttataaaccattcatccaatgatatattatcatagcacattcgaaatgaaaaagctaagaggaaaaataaaggattatttcgattaaaataggaatacaacaatgtcccgataggcgagagtcaaagttattcttattttacagggagtttacaactacaattaataatagaaaataacatggttcaatataaattcatacacaattcagaaattat

SEQ ID NO: 344579 - DNA, 579 bp, Cannabis indica
cagagccacttgtgatccgttgtccgaattgccaccagtctaaaaagttatttgtgatccgttgtgagccaaagtgacgccggtccaaacagatacttccgctgtctcccctttaacctccatttgggacctttcggccaatgtgtgccaatttccagtgttggggtctttgacctgtttcaaaatccacaaatttcccgacgtgtacacccacaaatttcccgatatttggccttgtgggattctttcaaatgtcacgttcggccctgtggtttcttaaaggtcgttcgttatacccacactttccaggcccaaacgtgaggagggtgtattagagttagtcccacattgctaatgtgtggaaataaattgtgatatataagatgaatgggctactcctcccattgccaattggttttgggatggaacctcattcatcttatcctcaaattctaacagttctcaatgttgggtctctcaaattcaaagatgtaacaccccaatatttttccttattttacaaaatactaattttgatgcattaattaaaagattcaaagctgtttggaaatacacagt

SEQ ID NO: 344580 - DNA, 690 bp, Cannabis indica
tgtcaatatattacttgtattttccccattagtggaccatgtttacattcaaaccctaacctataaatataataaaaccccttcatgcaaagggttcgatagtaaattcttataagctaaaacaaaagctagggttcataaacaagacaagaacaatactcgaaggcttttctagtcaaataatactgactcgtggactagagtttgtttatactcgaaccacataaatattctcgtcttgatctttatattttactaaatttctttagccttattctatttaaaatcactttttgaaaaactcggtgaatattttggtacttttattaagagttgaagaaagatttgatatcgacgttgtgtactacaatgatagtagccactagaaccaccaccactaaacctactgttcgtggtgggaacatcaccatagatgatgttgatctctactacacaagccaagatgatgttgtctgcaaatcttatgtttagatcacaagtgtggatcacctttctgtcatatttatggattatgaaagacttgattggtctgtttctagatgtcgtgagtgcccacttgcattttggatccaagcaataaattttgtatgttcttgcgcaagactttttgacctagtattggaagttgtttctaattgcatagaaactaagcacactttgtagtgtttc

SEQ ID NO: 344581 - DNA, 872 bp, Cannabis indica
tagagtaattctagtggaggtaatccttgttcaagtttttccttggtttcttgaagtttaagaaaaaatgagttaatgcatgcttgttgaattgtggttgtggttgttattattgtttatagttgttttcctaagatttaaaatggttaattgagtgaaatggaactgatttggatgcatgcttagttgattttaagcaagtttggagttttgagctaaatcttgattttaatggtgaaatgatgaaatctgttgttgtgctggttgtagttgattgctgttgttttcagaggttataatatgcatatttgagtagatttaaacaggttgtgttgcatgttagtgagattttgtcaagcttgagttttgaactcaaagcttggagctcacatggtggtttttgatttagtgcatgaagcttggttttcttgctttggttatgttccttagggtctaaatagtaggtctggaagttttggtatgaattggggttgaattgcttgagatgtgattttttgaaagtttcatgcactgaaccggaattccggttcagtgtagcctgtgggaaccgaaattccggttggtgttctgggtttcccccagaaccggaattctggttgtagaaccggtctaccggttgggacatttttgggaaccctagttcttcccaattttgtgttgtttagggtgatgccatgcttttttatcgatagggaaacttttagtttctagtttaagtccccgagaagtgatttagggtatcacttatctagtgttgtgattgttatggtttaggagcctgtaaatcgccgagcagttcgttccactcaggttgaccggtacacctaaattcggaatccatgtaagattag

SEQ ID NO: 344582 - DNA, 1051 bp, Cannabis indica
aaaataaaatagaaaaaaaattaagtgtaaaatcatcaaatgaaggttacaatgattgaactcatatgagttaggacaacttaccatatgtgctagaataacttattatataatttgaatcttattgatttatatattgttatgtatagaatataaatatatacatgtgttttctaatgtaatatgttactttttcgaactatatatttattttcctaaatagtacttaatattgtttttatctaagtttatgtatatagagaagaatatatttaaagcacacatatattttcttttgctacagaggctttttgctaaaactaaaatttgaagtaaaaaatctatgaatatagaagaagatttccatccaggtggtaaagagtggtctctgagaagaaaatataattatgttaaaaatttgtattactaactagttcatgcatgcttcatatagatagtgtaattaaaataaataattaattcaatatctaaaaattttaaatacattgaacatttaccttgaacttagttgaagaataagcatactataaatgtataatatttactagttcatgcatgattttataaataatgtaattgatgtaaataattaattttatatcttaaaatgttaaatacattaaacattataatcttgaaaaataaaattaattaacataatatgatagaattttaaaactattaaattaattgtataagtaaagaaaagaaaagaaaatattacttctaaagtattgaactcatgacattttaattattttaagagtaattattataaaattattataagttgaatatgttatagttttttataattataattattttttttggtaaatgagtaagtgtattaaaaaccaaacaacaatttatacaacctaagagcaccctcaatagaaggcctccaaactagctctataatctttacaatgtactttacaatgagttgaaccaactctcttcactactagttactgttggaaatattttaccaggatctagatttactaccaagtatgtttcattaaca

SEQ ID NO: 344583 - DNA, 611 bp, Cannabis indica
aagtttatatgtttaatctgaatttttggggtttttaccattggatttttaatgcatgaattgtgttttaagcttttgatttaattactggaaaatctatttaatggatttaagttttggttgtgaattgagttgaaatggatgagttttggggctgaaattcattgttgaaggctgatttttagttgctggtttttggtgttgttggagagtgaattaggtgtaattcctctctaattacttggtttatgttaggtgaaagtttggtatgattgtgggttgatatagcatgaaaattggtgtttttggatgcattttcgtggctggaaactgggtttcctgggttttaaacccagtagccgcggccatttttggcagcttattgtatttttttcgggtttttgttttggtcataacttttgactcgggactccgtttgggacgttctttatatcgttggaaagctcgttccgagctctatctgaatatctggaatttaaatgcccagtttttaatttgtggaaatggattttgggattaaccctatacttgtgtatcccggaattgtgactaggattaccggcacttggtcaggagcacccggggatttg

SEQ ID NO: 344584 - DNA, 507 bp, Cannabis indica
accaaagaatcggtttcaatctcaaccggtccccaatgtttcctctttatccaactcaaggcctccttaacccctaccaattcagccatagccgaatccacacaccccacccgtaaaactgtgaaggcttcaatgaatcgaccctgagcatcccgggccacccctgccgctccaaatcgaccatcacttgcaaagattgcaccatcgacatttaccaagtttgatatctagttttctataaatgtccctaatccatatcaaccaatgaagttgcacgtgagttaactctccatgctcttaacttgtatggtttgatgagctatgacattgtgatttatttttatgtaatttacagtataaatatttaagtttaactatcggttgtagataaatacttaagtttaatttttgacggtaataatacctaaattatattcctcgaactttcataggtacctagctaaaagtataagtcattaccacatgtcattttcttattggtatatt

SEQ ID NO: 344585 - DNA, 1026 bp, Cannabis indica
aaaaataaaaaattgagaaaattaaaaagagattaaatagaagtatttagagtaatttgagagtgacatttcaccgcctcatatctctcctttatatatataaggcaagactatggtaggacttaacataagtttcctactggtagggaagcttttttgaccattgattttaaatcatgtggttattaagatataaggtatatactcttacgatatgactgcttatatacaattaaaactttatacatattataataatatttaattatatatttatttaaaaaataaaataatattaataattaaaaaaaatttaatttttaatttgaattattattatttttttaagttaacttgaattatttttatataggtatttattttaaaaaataataattttacttacgaatttttctattaattttttttatactaatagttaattataacaaaattgattacttagatactttcgccactaatttatttacatacataatttgaccataattatcttttaaattaatttattttattattattttttatcaagaaagataatttttattaatcaaaccaagtccattacatccacaaagggattccccttcaaaagaaaaacttacaactctttcacatttttaagaacaatttatctatactagacaactttcttttctatacaagattaaatctatttttgaggctctctttaatgctacttcaatacaactcgaattcatatactttttcttatgagaattgctaaaggcatcattggtgtctagcaccctcctcggtgtcatgctgcagcgctattggtataattaagtatcaaattctatataacttagagaatagcttttagggaatatcgataatcaatcgtggggcgccacctatagcaggtactgagcatcactggtgcccaatagcaatgttattttcttacttaaattttaatttagccaaatatcataaattgcacctggtaacacattcttatgaacataatataatttttat

SEQ ID NO: 344586 - DNA, 726 bp, Cannabis indica
agggcataaaacccaacacttttccctacgtttctgttgaggaatcatcctcatcttacgtaataatgcctttagggcttagagtagatcttgctttttcagctttgccctttttttctttttctctttttttgcaacgtcattgccttttggattcttacactcgattcttgccaaggaaagcctcttggggttttcttatttggcaagtgtccgtagggggcctatttccagcagttaggggacccccattcccttttttgagcattagggtttggtttggggcctaactgctggattttcttgatttttcagaaccaaaatgtctgcttccgcgtctggttctaagtcttccaagaagggagaggttcaactggccaccctggaggaggtcatgcagggtcccatggcccaggagaactataagtcccgtgccaatggatgggaggcggatgagctccactccacactcacttgtgctcaccaacttgaaaaaatcgtggtggtggcaggcatcaaaccctcagccttcgggaccttccctcggttgcctcgggacgaggagacacccaaccaaaattacgggggcttcggagcttggagccaaacctatttgatgtccggggctatgctccctcttcaggactactttgtaaattttcttgtttttgttggtcttgcatcgtaccaactaatcccttaagcttaccgcctgctttcaggctt

SEQ ID NO: 344587 - DNA, 561 bp, Cannabis indica
taattattttgtggttcctttttggtggcaatttcggttttggtagggtgtttaattcttagattttgtggggatatgttgtttcctttttcctttttaggaaaccttgaccaatttttgaaaaatctttttggtttccctttttcctctccacacgtggtgtctaaggtaaggaagttactttccttttccattttatttttctgattttgggtaagtcaaatcaaagtgtatatattctcaactacccacacacccacgatcaccactctctcttctctttttattttttctcaaaagtctaatctttttcaagtgtgagagtgtgtttgtgttctagggtttcaaagagaaatgggaaaaaccaaaaatgctcaaccgaccaagaatccctctcgtggctctgcttctgcatctccgatcacccctcctacgccacctgctctagtgagcggagttcctggttcatcttctgctccgacgaaatcttttagaaagtcgaagacccaagccccactctcattatttttgttataatgatcatgctagagatatgaaatt

SEQ ID NO: 344588 - DNA, 1070 bp, Cannabis indica
gacatccttgtgtactctcaatcagaaaaggagcatcatctttgaatggtattgcagtcacttagggatcacaacttgtatgcaaagtttaaaaagtgtgaattttggttgtcagaggtatcttttctgggacatattgtcggaaaagatggaattatggttgatccgagtaagattaaatcagtgaagaattggccgaggccaaaatatgtgacagaagtttgaagttttcttagtttagcagggtattatcgacgtttcgtcaagagattctctaagatctctatggcactaaccgagttaactaagaaaaatcagcaatttgtatggtcagacaaatgtgaattaagttttcaagagttgaagcaatgtttgataacaactccagtgttagctttgctgttagatcaagaaaaatttgttgtttactatgatgcatccagatagggtctaggatgtgttctgatgcaagctgacaaagttatagcttatgcctctcgtcaactaaaagactatgagcagcgctacccaacacatgatttagagcttgttgttgtagtatttgctctaaaaatatggcgacactatctttatggtgagaaatgtgagatttatactgatcataaaagtcacaagtactttttcacccagaaagattgaaatatgaggcagagaaggtagctggaattggttaaagactacgactgtgagattctgtatcaccccaagaaagccaatgttgtggctgatccactgagtagaagaggtcctgggcaggttttcactactgctatgatatctcctcaactggcttcagagatggttaatgagggaattgaatttttagttgaaaaatagcataacttaacactccagtctgatttgctagagagaatcaaaaaggcgcaattagaagatcttgagctggttaagattcaagatgaggtaatggctggttggcctaaaaacttttcaatcttgaataatgaaatgttactgtttaaagcttgagtttgtgttcctaacgttgatgaacttaagaaagaaatccttgatgaagctcacatcac

SEQ ID NO: 344589 - DNA, 592 bp, Cannabis indica
gttaatttcgttgggtaatactatcatagggactactatcgtattaattcttacctaattgatttgtccaatttttaataagaaaaaggtcatattagtatattagaacccaaaaatattaaatctccttaagtaatataggtaggtttcgtgttttgatatagtatcctaattaactcaaatcagggactgagtttgatttgacgttacactgtgaaattgctgacgtacgttatttaaagtatagaaaataccccatttaacgtcagtaagtacacagtgggacgtacacagaaaattaaatagtgataagacattcgctgatttttttagtgagtatctacaatttaaaattacaggaaatagttcatacttggttaagaaaattcattatttagacaatttttaaataattcccaacaacttaagaacggggactattaagaatgggtagtagtccaaaattagtacaactcctaaataggaaatggtttaaactgtattaaaataaagtattgtacgaataaatatgtctgaaattatagtttacaatttgaaaataaatctcattatctcattatattctaaatat

SEQ ID NO: 344590 - DNA, 600 bp, Cannabis indica
ttttttgaggtcaaacaacattcaatccgcacaagtgcggattttagattttttaatccaatccaatccacgtaagtgcggatatccgcattttgcgaattggattggattggatcgtgcgaattggattgaatcggatacttagtgaacacccttagattggtgcacaaaacaaggttcataataaggcatggttaattgatttaaagaggagtgctgccgtcaatctcctgttacaatctcttaattaactttcgtactcaaaaacacatgccgaaatgttatttcaatttttctttttcatgatggtgtttgttatacttacttcatccctgtaatttttaaaattttttgaataatttaccgtactaaaaatacgtttaaatcttttgaacatgcatagtaaactagaatatcaagatctctgttttcgatactataaatttatttttaaatttttttaaaaaaatgatactgtaacgataacgaataccgttatgaaaaatatatcaacacacgtgatttcaaatataaaaattaattaagaagttctattaacactcctctaattagtaattagtagaccgggcttcactcttg

SEQ ID NO: 344591 - DNA, 563 bp, Cannabis indica
tgttcaaagacataaatagggaaggcttctcagagattcataaagctgaaaaaatttcaaaggaggcattagaagaagcgcagcaacagttgagtacagatccgcttaatgaggaaaaaatgctagcagagcaggaagcttgcaggaggtattctgaggttcacaaggcctatgttcttttcctttcgcaaaaagcaaagatggcatggctgaaatatggagatgaaaactcagctttgttccatgcatctctgaaagttagaagggttcataacagaattctttccattgaagatgggaatggcatctggtgtgatagtttggaaggggtgcaacaagcctttcttgattattatactgggttgttggggaattccatggcacaaaggaggaaagtcaagcagtgtgttgttgatcttggccctaagatcaatgagattcatagaggcattctgaatgctgaatataccccaaaggaagtgaaggaggctctgttctctattcctggtttgaagtctccaggtccagatggatttgggagtacttttttccaggataattgg

SEQ ID NO: 344592 - DNA, 466 bp, Cannabis indica
aatatgaatgatctgatcattcactttctttttttttgcatatttattataaaacccactgtgtatttccaaacagctttgaatctttttaattaatgcatcaaaattagtattttgtaaaataaggcaaaatattggggcgttacaactaaccccggtgaccgcaagttgtaggcccaaataaaaggttccagggtaaccaaggcttccgtcgtagtgggaacaaaaactggcggacttttcctgaatgcccgagatgtaaaaggcgccaccagggcgagtgtcaggccagggcctgtttccactgtggggtagtgggtcacatgaagaggaatttccaacagctactgcgactagagcaaaagaaggatgacacacctactcttgcccaggtgtttgccctgactcaggctgaggctgatgctggtccttccactgtgacaggtcagctttctgttgctaatac

SEQ ID NO: 344593 - DNA, 647 bp, Cannabis indica
tggatccatccaatccaagaaaagaaaagtaaaactttaatgttaattttcatatatacatatagatttgacatataacaatataaaatctaattactcattcaaactaaatgaaaatactaattagttcgattggatgttggatgtattggatttttagacaccacatccaccatccgatccgatccaattggataattaaaaataacatccaatccgatctgatcacaattggatatccaatgtttggcggtcggttgtaattggatcggtcggttctcattggattggatcgatttatgcacacccctactcttgaggaaatgagagcatctcttgtgggataagttaaaaattacttatttttattacacattaactaaatataattctaaaataatttttattgataaatattctttttataatcaaagtactaaatataatctcacataacttatcaaaattagagcttttactgcacataatgaaaatataacctataaaactgagtataaattaaagaataataaaatgaaggtaaaaattaaaataaaaaatgacaaatagatataaggggtaagttgaaaaataccccttttattaatcaattaatcaaatttacctctaattctatatttatttga

SEQ ID NO: 344594 - DNA, 705 bp, Cannabis indica
gcgtattcatgcattaatcaaggaaactgttagacctctatgtcattacaaagtagttcctcgggtaaggaggagatcaaaatagacacgtacaactggtgggtgaaagcccacttagccacattatgggcaacaaaattataagttctgctaacattagaaaaattacaactaataataaaagagggagatgacttaatacaaaaggagacatagttatcaagggcccaatggaacaccttcctattgagcgcattgataactagtctcgagtcactctccacaataacatacttgtaccctaactccaaagccaatgagacagccaaacagcaggccgcagcttctccgccataacgcatatgagaaatccaatcgagacgtgtgaatccaaatcaccttacccagatgattccttgctacaacagctgtgcacatactctctaatcccactctaacatcacaatttatttttatccaatcctggggaggtggagtccaagtctcccgtacgatcggtgtaggattgggcaaaagagaagcatgtaactctggaaaagaagtgcaaatattataaatacatttcaacacctcgggatgagtattattgtgaacctttttcattgcgcatcctccatatagtgtcaacaacaattgaaagcataaagaaagacttcctcaattcggatccccctattctaagat

SEQ ID NO: 344595 - DNA, 765 bp, Cannabis indica
tgagattgggccacatttttctgagaggacaaaaacttaaagattaaagctggaaacacaagcttaaaagttggctttttacctcttcgaaatgagacaatttggttcaaaatgtgggaggtcaagtcaatggatgctcttgaggtaatacggtagaggaatgaggccacatcttgagacaccacagtcttgtttgagtttggaacccaattgctaagagcaaatcgcatgagagatgcatgagcaaatgttaaatgtgtaatacgaagactctcccccgatttcagttcagcccgtgcaccagtgagttcagtgagcatcaataaccgccagcccatgaacaaaaaggaaacagcccactatcttgcaaaaataaatttttctcctttccttttttttaagaaaaagaaagggaaactagaaataccaacattatttccaaaaatatcctatttaagacaatctttcaagattaaagacatatttcaatataagagatcaaactttaaatggaaacatatcaaaataaatcaaggaagaataaatattgatacttaccaattaagcacaaatttccttagcccatgaatcaagtcaccaacacctccctctctttattttttattttttatttttaaagaaccgaaaataaaataaaatatgtacaataaatgtaagaaattctaaaccaagcaagttaatgataaatcattacaaatgacaaatatacattttatgctttcaaaagagaataactaattagta

SEQ ID NO: 344596 - DNA, 772 bp, Cannabis indica
ggggatttgagcacgggctccgggctgtacgatcgtcgtgacaatctgatcgtctactcctctccttctattcaaatcactccttaggtcatgagtcgtccccaacctatcgaatatagaagcgcctggctgccttagtgattgatttgtttggttgacaggtggaatgacaccattaacctggttgaaactatcgggtatgacctttcttgatgaattactagacaaggtcttcccgcctaccgctaggcccacaagcggaactcgtgatcgcggatttggcggctgaccatttgtagtctcgaaagtattcatcgctggatcttcgtccgtcccacctagggggatgacattcgcaggttgttgtacgaaagtttggtaggctttttgtatcagcatagtagcttgccgactacgattttcaatctatgtatgatgagcccttaatgcttccatctctttgtctctccacttggcaaacatacgtctttgttcctcgaatgcgagatttaccgcagcgcagagttcttcctgatcatgatgtagcgtattggtgcacagcggtatggattgcatacccctgcacccgcggaatggcccatctgaccgagcatcaaggctgcatgcagcctacttgaccgagggacatgggcgggacaggggcaagcttcggttttgtaactaattcataaaaaatccaaattaggttttgtaaaagcctaaatttattaattttttgtctactttctagtaaaaataattctagatcgaa

SEQ ID NO: 344597 - DNA, 565 bp, Cannabis indica
ttcacagtcgagtcatcgcctttttgtctccgggagactcgggaaatgtcttttcggagtatggcaagctcagccatgattccttcatttaacgttcccgtagagactgcggacctttccctttcgggaaatatgagcagacctttcacgaatcctgcacccttttctttttgccaggagtggaactagggtttttctgctggttcccttcggagggataccttatagggctaggttccctagacttctgcttttgggtacttggcgaggattcttctggtctttctccaagtccggcagggatggctttatgatgcacgtggattcctgctgcctccatggctttttgcatggccagcatcacctcttgcatctttatgttttgttccttttgggctgcaatttcagcttcgtgatcggcaaccttttgtctcaagagtaccagctctgtatagctgccttcgttgtaagcgtcgtactcatgaaagtttccctcgtattcgtcatcgtgggttccttctccctcctcagagcccacattttctcttgaggccacgtcctcatc

SEQ ID NO: 344598 - DNA, 604 bp, Cannabis indica
aataaaatacaacagaatacaaataaataaagaccagaccagatcctatgtggcttcgcctctagtggatcaagatctggttgttagttacaaccgaaattgtaactaacttccagatctgtgatcaaccctaaactacaagcataaaaggacctagaaccttaccaaaatctctcagttgagagataccagaaactagagccctagtttaccagatctgggaagttgttcagctccaaatgatgttccaagcccatgcaaaagaaacagaagaaagttagtgagtgaaatcagaaaataagagagaaataaacacagaaaaactaaagagagaatacattagaaataccagtcgatctgtgacttggatttctcacctgttgtaatattccttcaaatagtgcaagatctgaggtcgatcttcaaggcgagctcatcagaggacgtacccctaattttagggcgaacctctatatttctggtgtttgatttcttactctaacctactgtgttttggctaatctttgtgtatgtgtgtttatgttgtttctggggtgattttctgggcaagatcgatcaagagatcgagaaggatctctggttc

SEQ ID NO: 344599 - DNA, 565 bp, Cannabis indica
gtcttggagaggcgaccggtctctacggtaatctgaaaaaaagaaacaagaatgaaatcagatgccttagacaaagtataagagaagggaataaattacaagtactcatagcgggcagagcagcactgatgtcttgaacctggtaaacggagttgacggaggcacaagccgtgtatctcttggctgggaattgagtcaaatgggagacaaactggcaggtcatctccgaggcgaagggagcgagagtaggcccaacgaagctgttgaaccaatccgttaggggatccatgtttgggtcccaaggattcctgaaggcgtcctcgcgcaaggtgttctgctgctcctccaggaggatcttcttcaaggcctccacctcagcatgtccccggctgaactcgtccaaggcgtagttatgtttggcaacgcggagcatttgcctttcctcatccgcaaggaccggggtcagcacgatgtcgtgcggcatagtatactcctccgcttcagaagaaatcccagagtcagtgctaacaggtggagtgtcccccctccgggtccgcttggaagg

SEQ ID NO: 344600 - DNA, 567 bp, Cannabis indica
tgaggtcactttagtgacatattgtttcaattattaattcaaatattagacataaaccaataacaaaatttaaatttaattgcttgaaccaaaatatataataatacagtactatgtaaaaaatactacatataatctattttaaaaattatatatcatatatataaaatcatgacaatacaaaacatatacacaataatcaaaagagcatatctaatagtatatatatatatatatatatatatatatataaagttgatatatgccattaaatctaaacgccccaaacaaaaactgcagtagcagaattattaaaaataaaccataatttttaaaatccttaaatttcataaataaaatcatcagttcttcaattaattcaacaaaagtgactttcatatcacttgttaggatttataaaacactcaagaaatatatatcacagatctagacatattttctgaaagtgttttactatagaaaaccctaaatcataaatctatatagcctttgctaaataaataaaaaaagaagatgaataaaagatgagcggaagcactaacctga

SEQ ID NO: 344601 - DNA, 504 bp, Cannabis indica
ctccgggtccgcttggaaggctcgatctcaaccattttgcccttccgcttgcgctcaagggcggccgcaatctcgccctcatcctcctcgacttccccctcctcgtctatcaaaacgatcgtgcctgaaggggcactggacgagaacatcccgggggttaccaattgggatggggccagaggcagagaagcatcagggctatagacctcgacaagggtagccagaagatctagcttcttcaaagctaatgggttctgaactatcaacctcttctgcaatcataagtgcatatgcaatgaattcagcataaccgaaatgatcaggggcttttctctgtcttctctctccatctctagctaattgatagctgctgagttcctgctgatcttcattgtcttccctttcagttgcctcagttgcatctggaacaacattagttggtgttgtaggagcaacctgctccacctcaatctagacattctcatctaaaccaacttcattgtc

SEQ ID NO: 344602 - DNA, 689 bp, Cannabis indica
ctagaaaatgttattatgataccgtagaacttttctgtgaagtttcattgcaattggttaggtttggagttagtttggagagtttaaagttgagaaaaatcgtgttcttggcagttcagaaccgaaattccagatgtaccaaccggaattccgtttggttagttttcagagaagttaaatttcgtatttaggccataactttttactcgggtgtccgttttggacgttctatataccatttcaaagcttgtgacgagctctatgatatggtgtatattttagagccaaaatataagtttcattttattgaacttttacctcgaggcttggtaggaaaccataggtgttcctttacagttattaagtagtgttttgggataaacacttattggtttatcatcgttatcacatagggcccgagatgatcgatcgttctccaagcaggtcggccaacatacctaaaatagaacttgaggtaagaaaagtattaagcactatttattgttaatgatatgattgtcatggtctctattacgatcgagatcccgatatgtatttgttgtgactcgatcttgatcgagattactaatatgtatttgttgtgactcaatggtaatcgaggtaatgacgagaaaagattattgtcatttgtgaattgtttatgattgagggaagaacacggttatcac

SEQ ID NO: 344603 - DNA, 521 bp, Cannabis indica
tttaatatagagtgaagagtagaatggatgggttgtgaagagaggagaggcctatttaaaggctataaggattaattaatttttttttcttattatttcacttcttttgtttatgtccaaagatgcttaaaaatattggtggtcttctacatgtctacactcggcagtaccaatatatgcgggtgtgaagtccaagcgcgcggggattattttttctacaagtccatcataacattataaagttatgataaacttggggggcaaatgttatctctcaaaaaatccaaaataatggtgcatgaatttttactctagatatggaggtccaacaaggtggagcttattggccatggaggagctcatggaccaaggaggagctcaagggccatggaggagctcatgggccatggaggagctcatggaccatggaggagctcatggaccaaggaggagctcaagggccaaggaggagctcatgggccatggaggagctcatggaccatggaggagctcatggacca

SEQ ID NO: 344604 - DNA, 710 bp, Cannabis indica
tacttgaaattctacatctctgcgtttcgggtttgcagaactcttttgcctgctctgagaagcaagcattttggctttaatcttctcaattgcttcataagtctgttgtactgattccggaccaagatattttctctcccctgtctgatcccagtcaatggaagatctacactttcttccatataatagttcataggaagccatccctatcgtactctggtaattgttattgtacgaaaattctattaacggtaggtacttactccaggagctttcgaaatccataacacaggctcgtaacatatcttccagtatttgaatcgtcctttcggactgtccatctatatgaggatggaaagttgtactgaacttcagtttggtacccatagtcgttgtaaactctgccaaaactttgaagtaaacttcggatctctatctgaaactatggattttggcacaccatgcagtcttacaatctctttaacgtacaaatctgcatactgatccactgagaaggttgtcttaactggtagaaaatgagcagatttcgtaaaccgatctatcacaacccaaattgaatcaaagaaatctgtggttctaggtaatccaaccacaaagtccattgtgatatcttcccacttccactcaggtagggtcaaaggctgtaacaactatgcaggtctctgatgttcagccttaatctgttgaca

SEQ ID NO: 344605 - DNA, 1004 bp, Cannabis indica
ccatattatattatacaggtcgtgtcggacttttatgagacccaacttatatttataaaacaatatattttaaaaattttaataaataaaataaataaaaacttataaaaatcaacaatatattttaaattaaattttaaaaataaaataaaattaataaaaacttataaaaatcaacaatatattttaataaaatttaaaaataaaataaaattaataaaaacttacttaaaaatttaaacttgattattatttatttatttatttattattgtttttaaatataaaaagttttataccactaaacttattttaagagtgtaccacgaaagcttctaatattatatgataaatctatagaaaagaaaataaataaataaatattatagggtgtttctacaatgcacccccaaaaaaaaggtgcactgaagcatcctttactgtttcggcatctagaaattttttttaatctatttttttcatggttatgtacttaataattatttaagacatcaaatcaaattttaaaaaattcagaattagttacaatatagaaaacaatattcaaataatctatttacacgtgtataaaattaaagagtcatgcgtacaacaaattatttaaaccctatcttcgggaatcagcgtgttaaattttttaaaatttctcaaaaaatttcaagatgtattaaataactacaatatgcacgacaataaaaaaaatagattaaaaaatttccttggatacctaaacaaacagaagtgcatcagtacattctttttagggatacacactacaacattgacattagcggcggaccactccgctgctaataaccccactcttggccgctatagggtattagcggcggaggtcggccgctattggtcggccgctaatgcttggccgctattaatagtatcagtggccaaaaaaaggggtccgccgctaatactattaatagcggcggagcattagcgacgggaccccgccgctaatactc

SEQ ID NO: 344606 - DNA, 525 bp, Cannabis indica
ttttatagctattatactgttctaaaagttagtttggaggagttttgggtcgaaattggagaagagaacccttaagttcttggtctgccagaaccgttcgaccggtggttctggtgcaccagaactagtcgaccagttgccctgcaggggaaatttctaggttttcttccagatctgttttggctccaggtgttgcgtggtacctgttttaggttgcttatgggttgtttgacctattttagagttgtttggagttaggttatgtttggttttgaactagggttttattccagaatttcaatttaaggtattcatgagttttggttgtcgtgacataggaccgagatcacccagctttctttccactcaagtcgacccatatgcttgagttctgaattgaggtaagaaaagtggtaagcaccatatgtggctaaatgttaacggttgaatggttatagccttgattattatcataattctgattaaatatttgttgagcctcggttatgacctagggttagaaac

SEQ ID NO: 344607 - DNA, 484 bp, Cannabis indica
tcccccttcttggggacagatacaagttcataaaagtacagaatttcagccggactgggcgaaccccagctccgggcagcatacaaaataaacaagcctgaaagcaggcggtaggcttgagggattagttggtacggcgcaaggaatgaaaactagaaaatttacaaagtagtcctgaagagggagcatagccccggacatcaaatgggtctggctccaaactccaaagcccccataattgtggttgggtgtctcctcgtcccgaggcaaccggtggaaggtcccggaggctgagggtttgatgcctgccaccaccacgatcttttcaagcaggtgagcacaagtcagtgtggagtggagttcatccgcctcccatccgttagcacgggacttaaagttctcttgggccgcgggaccctgcatgacgtcctctagggtggccagttgaacctcttccttcttggaagacttagaaccagacgcg

SEQ ID NO: 344608 - DNA, 762 bp, Cannabis indica
tattcgaatgacttaggcaaaactcctaatccccatgaaatgttttatagtatctctaatgattacttaatcttaagcaagtattttacattaatcttaatactagaatgctatgtcgatgacttagtctagaaggaacttatagttttagactaagataaagtgtcacaacaagatgtccctaagaaccaatagtaagagggtaagtggctagtgtacgaacttaaccagactcctactgttgagtgggagccatctaagatgtaatcaaacaacgaacattaggagacagtcaagaaatatttatgaaagtaacctatatgttagatgataagggtgtatattagaatccttatatttacactgaactcataacctattcgagatggtggttactcttggggtggaggaattattctagaggatgtaaaaaatccttctatagtaattaaagctacatcagtgaagttacataactaagttgctttcgaaaagctctagaaagttattcaactgaagaaagttcttaactgtgttatctctattccattttggatagaattagagacatgtcttctgtttattcagatgcacttaataagcagtaaagaattcggtatccctagatgagtaatggatatagaaaatgttgttgcataatgttttatgaacataaaggaagtaatggtggagaaaacagtaccttacgacagacttacagttccagtaatttgggtttattcaaatacactacacttgatc

SEQ ID NO: 344609 - DNA, 1117 bp, Cannabis indica
cataaacaatcactgaaacagtaaaattgaataaaattagataaaagtccttaaatttaacaatctcaatagtttaggggaagtttttaacgaccaaaaaagtttagggacacaatttactacatgtcaatgttcaggggaaaaaattactaaatttatgataacaaatggggcacccaaaataattgatgaataattttatctcataattagcgattgcagcatgtcgaaagtgaaaacataatattgttcaagaagaaaaagtgattgacatatgtgcaagctcatatgttttgattaatgattacacttactaaggaagatgccaagcaagccttattttaattcctaataataaagctcctagacttgatggttacaagagtaacttcttcaaagatcgatgcttggcatataattggctcaatgctttctttcctccatactggtaaatggctaaaagaaatcaatgttactacattcactctaattcataaaactatttttccgaatactgtaagtgattataagcttgtacgtgctataatgtgatttataaaatttccacaatgctaatttgaagcatgttacgagaagttctaccttctattatttatgaaaatcaaagcggtttcattaaatggaagcaaatcactcacaacattttgatatgtgaagatatggttaaatggtatgatggagaaagtgttaaataaccttatatggtgaatattagctagatctaccaaaagcttatgttagaatttaaagaaaaaggtaaatgaagttccatctcaaaattaattagcaatataggaagagtagcccattcatcttatatatcacaatttattttcatacataagcaatgtgagacaattcaaactctaatacactctcctcaaggtataacgaacgacctttaagagaccacaaaaccgaacgtgacatttgaaagaatctcacaaggccaaatattataaaatttgtgggtgtacacgtcgagaaatttgtggatttttgaaacaagtcaaagatcccaacactaagaattgacacacattggtcgaaaggtcctaaatggaggttaaaggggagacagcggaagtatctgttt

SEQ ID NO: 344610 - DNA, 859 bp, Cannabis indica
ttttaaaaaaaaaaacacacacaatttccaccttggtcacgcacataacaattattatgagaaaaatttactatgaaacctcacaaatttgacttatgctaattagataagctttcagtccttcaacaagcaaaacattttctgattttagtaatccaacaacattgagggtaccttttccaagaacagtactgatcatactattaccaaaggttacaacaccacatttcaaaaatttgaaactagtgagtaagctagcatcacctgtcatatgttttgaacatccactatcaaaataccacaaattaacagtatgagatttatgacaagctaaagtaaccagacatttaggatcatttttctttatccaaacctttttggaagaacttctttttctcatactattttgtttgaaataatttgattcaaagaaattattcatggtaaagcacctaggtcgaatgtgacctttcacaccataaaagtgacaaattggtatgaattttggtgtcctaccaaaaaattggaaagtattacttgaggctggagaaactgttctgccaagaaccttttttgtacctgtaaaaattgcaatgtagggtcagaacagataaatgatgaactttaagccttgacaaactgatttttctaaaatgattgagattcagcaaaccccaacccatcatgacttctttgtccaaaattttggacctccttaaaattcaagaacctggattgagcatttttaaattcctctttagactctcaaaatcttttaaaagcctagcattttcttatttttcaaaatcaagatcagtttcaaaatttttgcatttggattcaagatctttatttttct

SEQ ID NO: 344611 - DNA, 780 bp, Cannabis indica
ggattcaagatcttatttttctcagtcaaacatttgatagtctttgacatcaacttatttttagaataaacctccaacaacttaacccatacattaccttgtaggttttagccaaataatctttgttcgatttggattcaccagattcagattctataacatcgtcaaaacctttattatctgaaatagtgttgtttaagcaaacaaggtttctctttttctgtaaaaaataagatatgctagaaagaacagatgttaaagcaattaattcattatcactattttcataattattgtcactccaagaagcattcaatctattttattctttttcaaagtaatagcacattcagattgtatgtaaccaaaatcatcacattctctacattgaacaaatctctaattgttatgcacaaaattttttgaagatgagttactttctaaaaccttagaaaaattctttttgtatcccaaatttttcatgtattggcaaaaatttcttattaatatgaccaattcattatcttcatcatcatcagaactaacattcttcgaacttttgaaagcaattgattttttttttccatttactttattaggtttctccttttgtcagatttgttgattaagctcaaatattcgaagtgatcccatcatctcctcaactttcatcgtgttaaaatatttagcctcctccatagccaaaagtttcacattaaacctatcaaaaagaactcaaacaattttcctaactaaaatagattcatcaagtttttcacc

SEQ ID NO: 344612 - DNA, 927 bp, Cannabis indica
aaattatcctttagtttttctctttactttttcattaagaaattgcttagatagtatatcgttggataagaaagactataaatcatttgcttatgatggatcactttatctttctcttatgaaattgaatggtgtaaatgactatattcttgacattctatcccgaaataatataaatcctcgatcttagaaatctcctacttgtatatgcttacttaagtcaacttagacttaaagttagattagtagtggtggtccaagctagaataattactcattgtatatttagtataaatttaagtctttaactttaaattttagatcaaaatagaaattttaaattttagttttcagaatacattgatcaatacagcatgactttcgcaagttttaataacaatttttaatcaattgattcgaactgtatgttaatgtatgaaatatgagttttatattctatgactagaacccacttgaactattctaagaactctttgttgtaactagacctaagtcatcaaaagacgacaaccacataatatatatctatggcatttgcatcttgttcaatgtgttttggacaagatcggtctctgtaaagagacataagccaatatccacttgaaagtaggatcatctgtatttgaacatatggatgtacattcagtggtggatatgagttatcgttaaattctgaagacaatcactatagatgtatcaaattaaataaaatatctaataaggtaaatgatatgatttaaccaactagatatttttcatattattttataatcttataatttaataaaattaaaataatgaaataaaccaattttaaaatagatatgtgtaatgaccgctctaataatttggattagtaaaggcaattagcattaatttttattaatttattattatttgtgaatt

SEQ ID NO: 344613 - DNA, 545 bp, Cannabis indica
tattttaaaattaattttaaaaacacacttagtataatgaaataaattctagattgtaatttctagtgactaatttatatattttttaatatttaattaaataaaaaatatatttaagttgaaaattaattttaattaatttagaccaacttaaattagactatttttttgatatttaattagaataataaagttgattttaatcaagatactttattatttatttctattttaatacatttaattaaataaaaaattatatttaagttgaaatttttcaatttcagatcaacttgaattagaataatttttcaaagtatattttattttgttttaatttattgaaatgcatttattttaaatgtatatatttcaaaattttgaaatatttgattaaagttgaaaattaattctttaattaatttagatcaacttaaaccaaataatttttaattaatgattttattaaaataaataaattaaaatatattatattttaattagaaaatcaacaattagtttatcgaaaatctagatagttatat

SEQ ID NO: 344614 - DNA, 749 bp, Cannabis indica
ctatggcatcagttattagctagttagaaaccgatgccataggggtatatatggcgtcggttcctagctaataaccgacgccatatatactcgaatttcaatttttttttaattttatttaaattatatatttattaaattatatattatattattttatttaaatttaaattacatatttattttttaaataaattaaatattatttaaattaattttagaattggccaaaatacataatttcatttcatagaagtaattaaatattacacaaatattgtaaaattagtccaagtattaacaagttaataaatctaactacaagttaacctaaaaaaataacctagggaagaaaaattcttgggcctttcagcatcaatcgtcatcgtgaatcaccgccatcaaccgttctatccactgtcgttgtattggtaacaattcagtttttggattgtattgccgcttatccccaaactgttaaaaaaagtaaaaaatttatattagtttatatatgtatattatttattattagaataaatactataatcaataattaaaacttacagctttttgatcttgtatataacgattggagtttgcacgtgcgacgatctcagtcatgtatttcaaaacataaaaacaatattcttggtttttaggttgtcttggataagttggtagtgaaattcctggccacgggccaagattattagaattcaagcattacttaccacagcttcccgtacgtt

SEQ ID NO: 344615 - DNA, 1290 bp, Cannabis indica
gggaaagggttgttgtctgagtttttagcaaggaattcaagggagaaattaatctaaggtaagccctaatgaactcccctttagttttcaagtttttgcttagttagaaatggtgaatttgtgaaataggggctgttaggtttagaaatgtttagggttcggtttttatgttcaatattggttgtttagaggttctggtagttaattttggtgcttggtgttaattctaagcaagcttgagttttgaaactcaagctttgagctttaatggcaagttggaatttattggtttgttctgtgattttcttgttggaaattgttgtttatacattgtataggtaccttggaagttttagtaaggtttgtgattgaattgagttaagggggttggtttttgtgttcccagcacagaaccggtcgaccggttatgggggacctgaactaaccggtcgaccggttggtgttccaatttttggacttccggttgggaccggtctgccggttgggggaatttttggaaccctagtttttcccaattttgagatatttagggtattgccatgttgtttatcgatagggaaacttttagtttcaagtttaagtccccggaaagtgatttagcgagtcactcatctgtgttacaattaatgtgattagggcatccatctagcgcgagcatttccgttcaggtcggccagcacacttgaattcggaaatcaggtaagaactgtatatagcgtgttatatgagatatatgcatgttgtatgtatgattgtatatgttttgggtgatatcatagcggcacaacaattgtgtcggttcggcagtacaggcatcgtactggttaagagtgatattcaccccagagagtattaattggcgctatcatagcggcacaacaattgtgtcggttcggcagtacgggcacagtactggttaagagtgatatcatggccaattgtactcttgggtgctattgatgctatcatagcggtacgaacatagtgccggtcccgcagtgcgatcatagtgctgatagtgggtgatatcatggtcaatagcacagctagttagaacgttcttactcatctgttaagccttgtaaataggtgtatgggcgcctagttacaagtcgaaagttatatgatatgttatatgcttttcttactgagtctgttgactcacagattctactttcatgtgtaggtaaagaaaaggcgataactgaactggggtgaacctgagctcggataggattgtacatgtcaaagcagcacgacctggagtgt

SEQ ID NO: 344616 - DNA, 529 bp, Cannabis indica
tttcttcttattcagctctagctacttgaacttggattgcaatcctagcgagttgagtcggatggttggacagagtgggtggagatagtccaagattgaagatgaagctctgaatcttctattttctaataaattttgaattaattgttttaatttaagaacaatttggattttaattattggtttgagatttttattccctagtttgcatattattgcagacaatttgttttatcttggaaaattttataataaaattttctcttttagaaatgaattgcatttatgaattgagcttcatttactttatcttgtgtatgccaataccaattatatttatatgtttataaagtttgtatgtgtttgtgttttattattgatacaaattctatagtatattaaactcggcaaagattgaatgccacataaaaacttaaaatttcaattctatgtttatgaatagttgttaattctcaaacaattattaagaatttgtttaataaaaagatcttttgatctgataggggtg

SEQ ID NO: 344617 - DNA, 751 bp, Cannabis indica
aaaagtattctaggattagatgtatggagtatacatcagactggatcaatatttaacttggataagatatcataaatttaccgttatatctatctaagtcaatattggttagttgatcttaggtcaatagatcttcatcctgatatgtttaggtttgatctgaattgtattatttatgttcttagagttgttcgtgaaagctaaccaatggtttaggcaaatacttacatcttgggaacatggtagtataattgagtgggagcgctaatcatagatatagaatctatagcttctataagtatttagaagtgaagcaataatttccttcaagcttggcttaatatagataaatgattgaggcctcattttagtaattatattagtttactgaaatatcatttataggtacctaagtattttaaggataaaatatagtgaagggaagaacggtaaatttatccttattcgatgtagatcatctacagaagatttttgactatttggattaaaacgatggataattcatatcgtatctatatcttggtacatatagagaattttatataattgagagtacaattcaaaatctatagtggcgcaaggagaaattaataagttagagaatttacttataaattctagttctaattaatatgttagagaatttagttcttgtagactcagttaattagtttaaattaatcagttataattctaaaattacactatgtcttatttatgaattttcact

SEQ ID NO: 344618 - DNA, 519 bp, Cannabis indica
ttaatcgttccttttttattattattatttactaatgatgtgtttgaaagtaactctctatgtacttagatcatctccaataaaaaaatatgtactatgtttgcacaaaaatgactttgtgatatatttgtatcaatttaaccattgtgctctaattcataaattgcaaaacatgaagtaaaatttaatgtttagttaatatttttattaaaagtataaaaaataataattaatattattttattatataaaataataaatatatttaaataatttataatttattgttgtagctaaatataataatgaaataataaaaattatatgaaagtaaagagtaaataccattttggaccatgtattttgcaaaagttatcgattggactttgtgttttgttaaatgacaaaatagaccctatatttttcaaaatagtaaaaataagaccctgagtttaatttttgataactttttttttaatataaccaacttgaagacaaattcctaatacgaacagatac

SEQ ID NO: 344619 - DNA, 1041 bp, Cannabis indica
taataaaaaatttatatatttacttccaaaaaaagattacacgtgcgtagcacgtgttgttgcaactagtgttataataaaagatgatattatttaatgtactaaatatacaagtcgtacaacttatgaaaaaaggaattgtaactgttgattggatttttagtaataataaatgaggtttaaataaaagacaaacaatcaatgttgttaattttatttttgtcatattcaatttgacaaaaattaatattgtaaaatttatttagtaattttggctaagttgttatttgacattcatatttttgtattaattaatttataattagaaagaaatatgtatagctattctatttatggaaaataaggtataaatggtgaatttgatgactcatcctttttctatttatccacctgcgtatatctgatcttgtgtgagtttcctaatatgtttgattagatttattgtgaagaaattcgaagtaagactttctttttctatgaaagaaaaattgtacttactgctcacgattctgtaggtagaaaaacagaaattcttgggctgattgaaaatctattttatggaattgtctagtgagctatggtcttgttcagactgtgtataagttgttaataaaatgtatattaattataaatacaccttatagcagctagatcatgtatctcttttatacactttgaattctattcatttttaaagaaaagagtgtctttgtattgtagagaagagagtgtttgtcttactctgtttatatgtattttgtactgtcttgagtctgtattaaagtctacaaaagaagaagaacaacagtgctaccttcgggagaaagttctacaagcttttgggagattgcttttcaagtcttgcttcgggaggaagcaagcactctttaaggagatcaaagggagttcgagcacttaaagtttcaacaagattcgattagtaggtagaatatatcaaggttgtggcatacaataagagggagtctatttatgcataagtcaattactttgtatttttga

SEQ ID NO: 344620 - DNA, 581 bp, Cannabis indica
attcattattgattttgttgttattgtagaaaatttcaaaacgattcatgtagaagcaataaatttgatggtagcattaacttagacttttatggaagactagttcacaagttcatgtcgaaactgtaacattaataatgttagatttatcattgaagtgaagactttttcccaattctgtagaatttaattacttaattttgggctctcaaagcttggttttgttttttttattctctacgatattttttatttgtattaaattttaaagatgtttgttaaagaattttattagtttactttttttttaagtaaatttaatttatgttcataatcgtaaattaatagtacattactctctcattatttttaataaaatatttattcatggttaaaaaaaatataaggcaaaattttggaacccggagttttgcaaaagttacagattggatcatgtgttttgttaaatgaaaaaatggaccctgtattttataaaatagtaaaaataagaccctaagcttaatttttgtacaactttttttttaatacaaccaacttgaagacaatgcttaatacgaaca

SEQ ID NO: 344621 - DNA, 647 bp, Cannabis indica
atggtatgtgtgatattgtatgacaaatatttccttactatctaggtttttagctcacctccttactttctcctacatgtattagacatggaagtacgtataatgagcagggtgagttctgatatgtatactgtaagagactactgacgagcaaacgatcaagaataccggtggtgccttagttttattttaagtagttgataattctaaacacactgaaaatatattatttaaaattatttgcttatcgtattttattttataaatgaatgatcattctctgttgcattttgatttctaaaacccactgttgtttttcaaatatttttgaatctttttaaattatacattaaaaagatattttgtaaaataaggcaaaatatcaggatgttacaaattgaaatataatcggttctataacataatgaataaaaataaataacacaaaataactcaaaccagttataattaaaatagaaccagttctacaacagtttattatgaataaaaataaataacacgaaataactcaaaccggttataactaaaatagaactggttgtataacataatgaatacaaacaagtaacacgcaataactcaaactgattacaattaaaaaacaaagaggaaattagttcctaaaa

SEQ ID NO: 344622 - DNA, 605 bp, Cannabis indica
tacccccttttttggcgtttctcctccgtccgggtgctgcctttggaggatcgtttactccttgagccctgggaagggcctgccaggctagcggttggagcggagtgcgagggagcttgtccatttatccctgagggatttccaaaatgggatgatgcgggtgccaaggcctggccctgactatatccgggagtagcagagaactgtatgccgctcattggtggagccgcggtcgggacagtacccgagggcggtgctccgggcatgtaccctgctatcccggtgggatagtatcctccataggccactatttgggcctcttcaaggttgatatatttttggactctcttctggaagtcctgaaggcttgcagctccctcttgttgtagttcgttccagaagggagtccctgtacggatgcctgcctggagaagggcaagttgttgtccgtcatcaactttcttggtcttcgaggcttcctctcggaacctctttatgtagtttttcaaggtctcggtgggcagttgcttgatgttagtcaaggcactgacctccaggttgacctttcgtgcggcgacaaactgtctccggaagttggtctgcaa

SEQ ID NO: 344623 - DNA, 1810 bp, Cannabis indica
aaaacaagatgcaccttgttgatataggtagtaccaatcaatccatttaaaccctatttaactgtgtagtcacatacctacacagtctcagaatcatcccacttgaccttccccaagcgatgtgggattgcacagcttacccggtatttccccttacggatcatgggactactgactgtcacaccaacattagaggaaagcttaatgttgggttccatgagtgtagaagcagtagaagttcccaaaaaaactgtgatagttaaaagttttaataagttaaatggtctttgggagatcgagatgtcacttgaggagcgaccaatctccaaacctaaaaaaaaatgtaaacgaccaagatccttaagcttaaaaatagagttaagttgttgtttaaaaacacaaataacaacatcattggaagcaaccaaatatcatcaacatatattgaaagtacaatgaaaatacctttatgacttttaattataaagtgtgatggaaggggattgagtgaaatcattaaacaaaagatagttgctgagttttgtgaattattgtctagaagcttattttaagctataaagatagtttctagaagtaagagtgaaggtcagttgctgacagcaacggtagaagtggaagtggagtgtctggtatggggtgccatatagagaaagagtgtttagggttagagttatgttctccgatactatattagagatgttattctcatttaattgaaatgggcaataacaataccatgtgtattacaaaacaaagaaaatgaccctaatataatggaactgaaaatacacaaagttggaggcccaaaaaataaataaaagaccctaattacaaattctaataaaaatatatgaggtttaatattaaataatgataatatggtactccaaagtagtgttaggcactaaataatgtaaaacactaattgtttatacaattataagtgtcatatttattgcgattaaccttaacaaatcgtgtacttatcataaaatttcacttcttaaattttcataacaatagtaaaacacaaaagacagaaattaaacttcaagttttccaagcctatgttaccaactggatttaagaatgcctaagctgcacttaagaatttgataagagcaccacatgttctatagtgtagtgataaggatatctttattggtatattttattacttgtgttaagagtttgagtgatcgtgattggctttttgggaggctatcttgatgcaactatctgtccttagtaagatattgggcagggtttaagaaaagagaaatattattaggttgtttaaaaaatatggtaatttaacttgcgtccaactagtgatcaagcatgtcgatatttcagtcacttgccctgtttgtaatctacaacctgaaaccatcagccatgccctcatctcttgcccgcttgcatttgattgctggagccaatgtgcaactccagtagtttttgatcctggcggttcttttggcaattggttggagaccatctttaagcaggctgaagctgatatgatttgtcttattgccatgcatagctgggcaatctggaaggctaggaacaatgttgtttggaaaaagaaacaccctttgttaatgacgtacttacttctgcacaagtagctcttgatcactggaataaagctcaggataaaatttcgttgtcatcaatctgtctggaaagtatcggtgatggcgctgagtcatggactagacccgcaaaaaacacaatcaagattaatatagatacaacactctttgatagcgacaataagtat

SEQ ID NO: 344624 - DNA, 618 bp, Cannabis indica
aatgactctcgaaactgtacaactgccagaatcaaaaaagctctttttactaaaaaagaactttttaagggacaattgttatactcaaaatttggctggaggacacgtgtcaagataaaggaaatgtgaatcgatgcaatagctttttatagaataactcattaattacgtaagtatcagagtatatttgtaacactataaaaagaacatgatactctcagcctccatataattctttttaatccatataattcagccctaagcactagttgcccattattgtgtacgaccctgatgttatttttgcccaatattttattctttttaatccataattcagccctaggccctagttgaaacactataaaaagaacatgatactctcactcatccaactattgtcaacttgatgccttcaaccaaatcaaacctagttttctatgtcaaacaactagtagatgagagagttccttccttagtgatttcagcccccttcattgttcttccatattcaaaccttgagtgaaagagtgccatgcccacacatagtaagtgaagtactcaatcatagtgagtaagacggtggtaaccaaagccgaaagagagaaagagatccag

SEQ ID NO: 344625 - DNA, 805 bp, Cannabis indica
aatctaacgttggagtggggcagaagatgaaaagacaatttataatgaccctcaaaactgtacaaccgccagaatcaaagaacgcgtttttccaaaaagagattatgacgaaaatgtcacctgtaattattaaaaagcactttttattaaaaaaagaactttttaaagggcaattgttatacccgaaattcgctataggaaggcgcatctttgtttctttaaccaattaacttgagacatcttttcagtgagacttataatcttgacgagtaagaagataacattcaaatgagccttgaaaaactctctattaataagaactgccattgtcacaaggaagcattaagctttcaaacaaagaagaaacgaggcgtacattatcgacctcggagataggaaaaaaggctccagctcactatcaaggtcactagaaccaagttcttgtcgagacatcccaaaacgctacaattaaagatgtgtttaaacacacgatcattttgacccagtaaaagcgggagaatcacagctgtgtgatttttaaataataaacgcatttatactacgtgttatgtaatcaaaccccatgattttaggggagaagcgttgtaaagatcacagtcaactttgcaattaactgcctactatgtgattataaatagtggtaggttagatcaaaaacgggacaaaaaaatcatacaaaaaaggccttgaaaagctatcataaatctaataagattgactcatggactatgcagaattttaactgcaaaaccacgtaaaaaatcccttgtgttcatacctctta

SEQ ID NO: 344626 - DNA, 804 bp, Cannabis indica
ttatttttattagttttgacttaatatttattcaagccctcactcaactaaatttctggcttcgtcactgactatatcataatacaattatattagagtaaatataatatttatacatgtattacaatttggaataaaaattattaattttacgtaaataaatttacaaaatatatgtatatattttattaaaatataattattcttacataaaagtataatttattgatacgggacttaaaaaatatatagcttattacaatttaaaaattatttttatttataattagttcgaattaaaattttatttttcttataacaaattaaaaattatttttgaataaaatattgttaaataaaagtcctactctataacctcaacaaatcactcacactagcaatatgaaacataaggagtattttggttgtatgtgcagagcaatggtaggaaagcaaaattatgtgtagttttggggaggattgataagggaaagttagaagtgaggacaaaattataataaaaaatgaaaaaagaaagagaaggaaaatgagtaatgttgtaaaactatataaaaaggtttatgaaaataacataagaaagcaaaaaggtggggcccagcgcagcagtaaggctcgagagtcgagtcgagcctcacgccgtctagcccagcccagcccaagtccccacacagctcacatccgaactcccctctttcactcttctattccattttcattttagtattaatttcttttttttttttagggaaatttacacccactactgattttttccattttatt

SEQ ID NO: 344627 - DNA, 1017 bp, Cannabis indica
ccaccttttggagataagtaactgtcttccaggtaatagggtccaatttactaaagattctagctgccacataagaatgtgtagccctggaatcaaacaaaactgagtaaaaagagttgttaactaggagttgacctgtagccactaaagggctggcctctgcatcggcctgcgtgatgacgaacaccctagctggagcgggtctcgccggagcccttggtgcctctgttctgagctggggacaatccctcttgtgatgtccgggcatgccacaccgaaagtatccctgaccttagcactcacccggatggtgccttttacaaccggggcactcttggtacgaaaaccgggtctcagcagcaccctgacggctgcctctactctggttcccccggaacctcttgttctgccccgagccagcggatgcagtggatgttctcctctttttgtccatggccgaaccactacctcccttgctaaatcctaatgcaggaggggtaggagccccgccactcacaggagtactagccgacttcgacatacatccaactgcgccctcagctcgcagtgatcataaggtcatacttgatcttcacattaagtccatcaagatatttttctttcttactgaaagcggttagcacgattcccgaggccaacctcgccaaccgatcaaactgagttgtgtactcggtcacactcataaaattcaatattcccgtaataactgttagccactactcggcttccatgacgtcaggtgctcccataacctttcatactggggttccatttaggtgccactggaacttctggcaccggcactgcaggagcaccctgctgcctcaatctctgaatctcttgatcttgctcctctaatctggcttgcatttcagcaaacctagtttcccaattctgggcttcctaattggcttgagcagcctgggcagcctgtggcagattatcatcacccggaccacgagccctaccctcgagacctctaccacggcccctaac

SEQ ID NO: 344628 - DNA, 1122 bp, Cannabis indica
tttcttggttttagaggcttcttaccagaacctcttgatgaaattcttcagtgtcttcgtaggcagctgcttgatgttagtcaaagcgctgacctccaggttgacttttcttacggcgacaaactgtctctggaagttggtttgtaacttattccagcagcccacggatcttggttccaatttcttgaaccattcttccgcggatccgcttagagtaagcgggaagcagaaacacttagcgtcattgctgaccctcatgactgtcatgactcggttgaaccgtgacaggtgatcacttggatcaaagttcccagtataagctgccatttcgggcatcttaacgtttttggggagctctgcttccaggttgtgtttagcacacggctcctggtcctcacaatcagagttggagtcatcgcctttctgtctccgagagactcgggccatgactccttcgtttaacgttctcgtggaaaccgcgggtccgtatttcttttggtctaggtgatcacggagatcaccttggttcccattaatttgatttctcagatcaatgggaggacatttctggccccttcttcctctccctccgagctcttggtgtacgaaaacgctctttcagtcctctcgatcctgagggccaagactccctttttggagtttgcccctctgcagacctttccctttcaggaaatctgagcggacctttcgcggatcttgcacctttttctttttcccaagagtggaagtagggtctttcttttggttcccttcagtgggataccttatagagcttggttccctagacttcagcttttgcgtacttggcgaggattcctctagttcctttccaagtccagcagggatggctttaggatgcacgtggattcctgctgcctccatggctttttgcatggccagcatcacctcttgcatcttttggttttgctctttttgggctgcgatttcagcttcatgatcgacagccttttgccttgagagtaccaactctgagtagctgccttcgtcgtaggcgtactcatcgaagtttccttcgtaatcgtcatcaggggttccttcttcttcctcagaacccacagttgttcttgaggccacgtcctc

SEQ ID NO: 344629 - DNA, 887 bp, Cannabis indica
ccattgtagaaaattcaattgttgttgacttgttcgaggaaacatatagaaaatctacgctcaagacttcgtaatttttactgtaatagatcatatgacttcgttgtttgtgacattctgactttaacctcacaatgtttgatcttcactttgcccattcaaggcttagtccgcaaccctaattcaaaaatttcaagctcctaggttacgaacttaacctttacatgtttttcatctttttaatctgtcaagtagacctggtcgatatattttcaagtttctattcgatatcccagccaaatactcatcccgtgtattgtcttttgtagatgaaccctggtgagtttcggggaggcgtgcacaatatcgactaggatcttcttctgcttttatatgagtaccaacctcgtcttcacgccagtccgtcctcttcaagtgacgaactatctaactcaagtttcgaagattgggaagtgagtagtgaaagttcacctactccaaaactcgaggtccaacatcacttttactctgaatagatcacaagagaaggctacggaaattttttttgggagcttaggatgggttgaagatgttatctcccatccaaatggacttatatcgcccgacttggtgttgctgacactattcgtgtaggtcttccaagatttggtgccttcggcattccaattgctgctcctgccagaaaattaataaaattgaaaaagatgaggaggaagatgatggcccgcaccaaacagatgatgcagagaattaatgcaactaaccctcacgtggcccggcatgccacactgtcgagtgtcgaacaggatctgtccgctgcggaggaggaagactacgatggggatgttgatgttggaaattatttt

SEQ ID NO: 344630 - DNA, 904 bp, Cannabis indica
atagagtctcttccttagtgatttcagcctccttcattgttctttcatattcaaacccatagtgaaagggtaccatgcccacacatagcaaatcaagtactcaattatagtgagtaagacggtggtaaccaaacctgaaggagagaaaaagatccaggttcagatcttgataatgctctgctacagaaaggaatcaagggctagagatcttgaacaaaggagtcattatattccactgcaatcaatgtaaggttttcttaaacccttatgtgtttattttcattgttttagagaattcgtatttaggatgttaatcaacatacttgttagtaaatctagatcccagtaaaacattcccaacacatagctccatgtctgatttaccatgaagatgcaagccaatctcacatttgggaattcaagaaacactggttctcgtccgtctcaaggattcaagaacatgggtcgtggtagttcacgaggaccaaatcaatccaacatgtctctatgtcaagtttgtctttgctttgggcacattgcccttatttgtcgtacaaatatcttggattttccatttttgatatagttgttttaactggttcgctgatactcaactagaaaacgacatgaattgttagaaacacaacttcttagaacacaaaatggttttatcatatttttgtaataagttatgcgtccacaactaatgtgataaaaataaaaccccaaagcccaaaagggcccaatccagttaggcatggcaaaaagatccattcattcggatcggatcagtgatccgatccgacggatcattactgatccgaaacattcggatagttattggatcttggatcagatccgacccgctccgcttaatttttttacggatcggatctgacccgat

SEQ ID NO: 344631 - DNA, 703 bp, Cannabis indica
aatattaaaaaaaaaaaaaaatagactacaaaatttttctagatgctaaaacagatagagagagcatcattacatgttttaagggaatacattgtagaaacaccttatattttttaggaggatttacaaaaatactagaattttcggtaagttttacaaaaatactgcagcatggtattttttacaaatatactgccctagacttttttatttcttttatactgtgtatgccccaaaacatatacaaagcctccatcttcaacacaaccatcagagcaatactataacagccagaaaataactattttttctgtcaaaacgtaaatatttaaaattccaatcttagaacaataacataaaaaatgactaaaataactgtaaaacaacagcaaaactacaaaataaaacaaccaaataaaataacaaaaaaaattatacttcaataactcttttcccagtggagactatcataacatcacgagagggaacctttaccttggaaaatttccccttaccttaaatacatgaaaaaataattcaggacaacaaaaaacaactgttaaaaacataaaaaaaatcaagtatataatactaaacaccgaataacacatacagaacacaaaccatatttttaacaaaatgacggagtgatgaacaaaatcttaaattgatatctgagactgaacatgcacaaataaaaaaa

SEQ ID NO: 344632 - DNA, 571 bp, Cannabis indica
tactatttcctattatcatgtaaagaaatatgcatatctaggcaagactaaagtgggtaccaaagggctactaaaactaacaagaaaggacgaaaagttatgtgggtacaggcccggccctgggcataggcgggctaggcctgtgcctagggcccacccagcccaggggcccaaattttttttgtcctcttttgaaattatacaattttttttactgattttgaaaaataccacattttttctaacataagggcccaaaaaaaaaattccctgtggcccactttgtttcagggccggccctgtgtgggtaccaaaagctaacagatgaacttgtttttgtaggaatcaaaaagaaaaggacaaatcctatggttcttggatagtggatattcaaagcatatgactggtgatccatcaagattttcaagctttaagagcaagaaaagtggctttgtcaattttggagacagttcaaaaggaaaaatcttggacattggtgatattggtaatgtatactctccatgtatcgaaaatatgcttcttgttgataatcttaaacataactttctta

SEQ ID NO: 344633 - DNA, 929 bp, Cannabis indica
ccatctactggtggaggtagtagatcttggttgttctgaccttggttggtcttcacatacttctgcaagtgcggattgtttctctttattagaaattcaatttcccacttcagattgtagcattcattagtgtcgtggccgtagtctccgtggaaccgacaaaacttcgtcatgtcccttttgttggtatctttcttcatgggcccgggcttcttgtacgggattaacgactgagttgccatacatactctttatatcttcagtcgaaatagtgaatgtagtgtatttggcatgatcacggggagtctgtcccgatttatcagtgaactttcctttcttcccgtttccttgcttgtggttgttgcttgaatgcttgccacttgagcttgattgttggaatagttgggaagttgggcagatgttccagtggaaggagccttcgttttgcccggcttttgctcactcattgagtctactggctcgttcttccttatatctttccaaagttcaccgaggacttcaatgctccccagtatcgcggataactttccatcctcggttactcgtgaaactttggtcgcttttgtcatgaatctgttgatgtatgcctgcagtggctcacccggtcgttgctttacttcgaccaaatctcccaaatgcaatgggagctggcgcgaggaggagaattgtgcatggaatttcgaagagaaggttttccatgaactaaactttccagaagccagcttgaaataccattgctgtgcgggtttcgacagagtggccgggaagattctgcagcatacattcccccgtactccttgtaaatccatttgcatctcaaagtaattgagatgggaaagaggatcttctctcccagtatacatcttccatgttggcattttgaacttatgaggcagtggcaggagatt

SEQ ID NO: 344634 - DNA, 2004 bp, Cannabis indica
ttctaaatattggggtccacaaataattaatttcacaaataatcattaaaaaataacagaaattagtgctaattccctttactaattccaattactaaagcggtcattacatccattatgtagtagatccctagcccttagcacaaaaataaccgggatccgagacccctgaactgatccaacataaagaaatggatcttcaccttctggctgaaaagtcaccattttccgcttacaatctatactggtcgaatacttggacagaaaatccatcccatgtataatgtgaaactccattaattccagttctataaggccaacactcaactccctatcctcgatcctaactggcatagacttaatacacctattggagatatccaactcttcgttaggcattagggttccaaaccctatttcaagaaaatcacctagcctacccaagagatcgattacccgtgtagccccatatgagtgtgtagcttctgaatcaaataacacagtataaaagaagtcgtttacagcgagctaacctgtcactacagaacggctggctgcagcatcagcttgagcattagcatacaccggagtaggtaaaaatgtcgcttcctgctcttgttcttctttctccgcctgagggcaatctttcttaaaatgcccaatcatgccacattgaaagcatacttttaggttgcattctccgggatggtgtttcatgcaacgtgggcactcaggataagaataaccctggcatccaccttttccttgaaatcttcggagccgcttgttccgtcttaaacccaccactgctgacataggtttcttcttctgctcaaccacagagcccctaccacttccaccataatcaggaataaggcaagtggcatcctgaccttctgtcataacctcttgaggtcttggaataaactcttcaaggctttcagcccaataagtattctttgtatttgaatcttcctgaaagtctaaaggttcattcatccacatctttccatgcaatggttccacatggttactagccatcctacgcttcgctggtagtaccaaataaaaaatgattggcatatgaggtaaagatactataggagacctttgttgtttcaacctctgaatctcctcttcatgtcgttgaatcatagcttccatttctgcaaacctttcctctaaatccaacggagcctgtgacagataaccatcactcccatcagaagccctccaagggctttcacctttgttacggggacaacttgcactccattctctccaaccgttactagccctgaccacattactctgactctccatattgcaacaggtgtccattctataggactaacctgtcaattagtaagtcagtctggtcaggcaacgacccaattacaaactcactaccgcacttatggattttaaggcaatgaattaaattaaacaaccataatctaatatgctccctaacatggtttaataatcacagataatactaaacaagtacgagcttactgaaccgtgaactgagctttctctgatgaagattgtacatgtcttggcaagctttggtagacaaacctagcgactttgataccaaaattgtaacgacctaatgctaaggcacactacagtgatttttcaactacagtgctgactttgctaaccaaagtattttcttaaaatcgtgtcaaattaaaactttaatattaaatattaaactttataaactttacataattgtttacaaataccgaggtcgcgtttcgaaactttttgccaaatatacaaaataactattcaggtcgcacggcgactacaaaataacaaccccatatgtcccgagacagaatgctctaggtcgcgctaccacgacatgtacaacttcatcctagctgaggctcactcctgttcaggttttgccttttctttacctacacataaaaacagaactgtgagtcgacagactctgtaagaaaagcatataacatatcatataat

SEQ ID NO: 344635 - DNA, 500 bp, Cannabis indica
aaacccaacactaagatcctggtaaaataatttccaacaacccaattcataattttgtacaagactttcaagctagcaagaatcttgtaagagacgagattcagctggaatggggcaaccttgatgtgatttatgtaatccttgaagtagtcctgaagagggaggatggcccctgcacaaatatgctcaaggctccaagcgcccatactagttgaaccactggttcctgagttattattggcaaagcgtgcagggggatagcaactgaattcactctctcgtactgacctaacctgacattattgcccaagtgcaatttcgtaggtcttcagcatttcgcctgtgtagcctgagatagatcgcaccttcgattttattaactaaacctcgaaggtgacgttgggatcttgaggagttttggacgtacgtggtttgggaggcataatcttgaaatctaagtcagtggttcaaaagaaattgtgacgttgggtaaaaacaaa

SEQ ID NO: 344636 - DNA, 636 bp, Cannabis indica
caatagcattcactgtctgacattgtaaagtctctcgcttgaccagctaatacctcttttctgatcttcactaactctggatcagttaactgagcaactttaattcattccaacagatcagattgtagcgtcaagttataaagtttgcctacaacaaactcgatgctagatctgaccatgtcttctgctaactgaggtgaaatttgaaccatactagttacttgttcgggacccttcctgcttagggcatcggccaccacattggccttcccaggatggtaaaggatctcacagtcataatccttaaccaactctagccaacgcctctgcctcatattcaaatctttctgagtaaagaaatatttaaggcttttatggttagtataaatttcacatctctccccgtagagataatgccaccaaatctttaaagcaaacactactgcagcaagttctaggtcatgagtcaggtaccgctgttcatattctttcaactgacgggaggcataggcaataacccgatagaccagcatcaggacacaccccagaccctgtctggatcacaatacaccatgaacttctatttgtcagaaggtagggcttacactggagctgtgattaatctctgtttcaact

SEQ ID NO: 344637 - DNA, 493 bp, Cannabis indica
cagtcccaacacgtttcctcccatgcggcattaaatgtgaattgactgctcaggggaagtctgacacctcgcggagatgccttagtattacttgggcatccgagagcgtatggagctcagcatgccttctccgggaggcatctctcggatgctgccttatatcacaaagacttagcaaataattcaagcaataagacgttttgatccacgtgtccctgtccggttggcccacgtatattgggcaaaatcaggggcaacaaacttaaatagagaataaggatatattgggcaactcactcacaaaagtgggtacattttaatgaaatataatatgagggtgtttttgattaattgatacaagaaaaaggtatttcctcaacttatctcatttagatacaagttgttactaatttagttttagtcacaacaagtattgtgactaaaaacatatttagtcacaacaaattgtaaattttgtgactaatacttttag

SEQ ID NO: 344638 - DNA, 627 bp, Cannabis indica
ccaactactggtagccggttccccaaccagaattccagttctgtggggtttcctggggaccaaccgaaattccagttcctataggtcccactgaaccggttcagtgcaggaaaaattcaaaatttcatatctcactcaaattaaccccaaatcaaaccaaaccttccaaacctgttctatatatcccaaagaacataaacaaggcaacaaaacacctcaacatgcacataatctaaatccaccatgtgagagcaaagtttgagctcttaagctcaaaccttgaacaaacctcacaaccatccaccaaaccaactcaaaacaacatttctaaccatgattaactttagaaacacaattcaaacaacaacaataactacaacaccttaacttacaaatcatgcataacttcttaacttaaaacccaagaaactaaagagaaaggtgctagaaacttaccttgaacttgaatctacttagaacttgctggaaatcacaagatttggtgaagaaaaccagaaccctagctggttctatgggattcaaaaaagagagagtttggagagagaaagttccttctttttttttttttaattttgattttttataaaatgaggtaaataaaatgag

SEQ ID NO: 344639 - DNA, 720 bp, Cannabis indica
aaaacaagatgcaccttgttgatataggtagtgacaatcaattcatttaagccctctttaactatgtagtcccatatctacacaatctctaattcatcacacttgacatttcccaagtgatgtgggattgcacaacttacctggtattttcccttacgaatcacagaatcactgactgtcacaatcaccccccttacggggtcgaacatcctcatcgaccacacttccaactgggtcaaggctctgataccatttttaatgtccctgcttcaagccttcattgggccctcacacccatagaatgatggctcttatacacgagtatgccactttggctgcttcttgagaaatgagagacagttagaattgcccctaatagggacgggaacagcctttgggcttccttgttatagacacactcggtttcaccgctaaaggctaacaaattttttattgtgatagtcagtagtgtcatgatccttaagggaaaacaccaggtaaactcccacatcgtttggggaaagtcaagtgtgatgattctgagattgtgtaggtatgcaaatacacagataaggatggcttaaacggattgattggtacaacctatatcaacaaggtgcatcttgttttctagtagtcatcacaaaagaactccacagttaaacgtgcttgacttggggtaatttcaggatgggtgaccttttaggaatttttcccaag

SEQ ID NO: 344640 - DNA, 1339 bp, Cannabis indica
aaataatttccaacaacatctaatattaggaactgtgccattacagtcatgctcgtcgaagattgtccaacagtgaggggtagacgaatttgtcctagaggtgcgactccttgaccgaagaaaccgtagacaggttggaggcatgggtttagatccttgagttggagtcccatcttttcataagaagttttgaacaagatgttggaagaggctccattatcattcattgttttggccaccattttattggctatttggacttccatgaccagcggatcgttgtacagaaatctaattttgacagcgtcttcattgttgaaggttatggttggctttcctgctcgtggaactttgggcttcctttcttccacggccaggataacttcttcttgctcgtgctacactattcgggcatacctctcccgagctttgcccaaatctcaagcactgtgtgggcctccaaaaatgacttgcagatgtccatcaactggtggaggtagaaaatcttgcttgttgtcgttcctctgaccttggtcggtcttaacatacttatgcaggtgtggatttcttttccttattagaaattcaatttttcgcttcaagttgtaacattcattagtgtcgtagctgtagtctctatggaaccgaccaaactttgtcatgtcctttttgttggcatctttcttcatgggcccaggcttcttatacagggccagcgactgagttgccatgtacacactttcaatatcttcagtcagaatagtgaatgcagtgtatttggcatgattctcctggggagcttgttcagattttccagtgaactttcctttcttcccatttccttgtttgtggttgttaatagaacgcttaccaattgagcttgaattacttgggtagttgggaagttgggcggatgttccagtaggaggagcctttgacttgcgaggcttttgctcacctttcgcttgctaaatggcttcttcgagcttgatgaagccttcggcacgatcaagaaaatcactcattgagtctaccggcccgttcttccttatatccttccagagttcaccgaggacttcgatgccccccagtatcgcggataactttccatcctcagttacccgtgaaactttggtcacctccgtcatgaatctactgatgtatgcccggagaggttcgcctggtcgttgcttaacttcgaccaagtctcccaaatgcaatgggagttggcgcgaggaggagaattgtgcatggaattctgaagagaaggttttccatgaactaaactttccaagagccaacttgaaataccattgctgagcggcttccgacagagtag

SEQ ID NO: 344641 - DNA, 1223 bp, Cannabis indica
gaccttttttctacgagtttccttccatttcatcctctcaacgcgatccttgccctgttcgaagatttgaagacggagtaaccagtcattgccctaacttcaaacactaagttgctgtcttctttctcatgcttattacattgtgtggatgtgttacttagtttgtttgtatcgttgtcacctcatctggttgtggtagttttttagggttaaactgaatttaggttcatactagggttcaggcaacatgtaggttattttaagatctccaactcattaccttcgggtttgataaaattctttccagggattgaactgctctttgcctgcagcaatgtcctactctggttcaggaatttatcgtccagaagttttagagtttgagtttcctacagaatcaaccatcccatatgaacccaacccttctaaacccacctccaaattagagttgaacgatgctagggttagggaacacgtagtgagaacccactaggaagatattgctagtcgctacaggcgtttcttgcaagaaatcttcgaaggcaaacgtcaattcttgcgagaggcaacctggctagaacccaacatcacgattgcttttgaaccaggtgactttgattttgaaattatgccccccaagccacgtacatcgaagactccctaggaccccaatgtcacttttgaggctgagttgatagaatcaaaggtgtggtctatctcaggctacacgagcgagatgcttaagacctgcgggatcaaacttggacaatcatgccaagttagatactatgggagggtgagttcagtttctacccccctacacgttttttaagaactaacccagggaccaatagtgagactagtaacaatggttcgactagtatgggcacctggagccttgagcatatcagtgtaggggccatacttcctcttcgagactacttcaaggactacataaatcacattggagttgccccattcaagttgactaccatctcctacaggattctcgctagtttgaaagtcttgtacaaaattctaaactaggggtgtcccacaccagtagagattgagtatctttactcagttaaggccgttccgtcaaggaagaatgccgtagggggctttttctatcccggtactcattcaaacgagcctaaaattattgtagacttgccaaataaagtatccttcaagaacaacttcttctggacatctggtct

SEQ ID NO: 344642 - DNA, 858 bp, Cannabis indica
tttttgttattgttttgagtgattatgacttagagtattgattttagggtttgatttgaacggatttgttagatttaggggttgatttaggctaagatcttggatttgggaaaattggtttgggaagacaatggtccgatggacccctgatgggtccgatggacccccgatgggtccgatgctttggcccgatgtatggatttgaatttgttaattaaaggatcgggtccgatggcccgatgggacccccgatggcccgatttcatgcaggcccgatggtctgctttgaagggtccgattggggtatttttgtaggttaggggtccgatgggcgggtgtaggcccgatggcctgatgggccgatttcatgcaggcccgatggtctgctttgaagggtctgattggggtatttttgtaggttaggggtccgatggggcaggtgtaggcccgatggcccgattgtatgtaggcccgatgggaccgattgtaggcccgatgggtatgcaagttgaaatttttttttttcgtttttttaaatattagtaattgttttatgtattattttatttgtattgaattattaaatattgtttaattaataattgttttattattaataatcaattattatatttttttattattaattaattattgtattaattttttttgttttttaattattgtttttttaattacttattaattattgtattattttttacttgttttaattaattattgtatttttatttaattattcaattaatgtttttattattaattattaattattagaattaatttgttattgttttattaattattatttttgttactaattattaattattaatt

SEQ ID NO: 344643 - DNA, 789 bp, Cannabis indica
cattagtaagctctcgttgatcgtgacctgatgtgccaactctgggtttcgaggctgttcagactagatggacgccaggcgaaacaccaggagtcagggcaactcggtcgggtcaaatcaaggtcaaggagctcagtttcccccagatgttaggggccgaggtagaggtcccaggggcagggcttgtggacgggatgatgttaacccatcacaggctgcccaagcaaatcaggaagcccaggattgggaaactaggtttgctgaaatgcaagccagaatagagttgcaagataatgagattcagagataagacagcaaagggctcctgcagtgcctgtgccagaagttccagtggtacctgctcctgttgtccaggccgaatcagtagtagcggcgaatagaatggaacccctgtatgaaaggttctgcaagcaggcacctctggtgtttctgggaggtccggatgtcatgaaagccgagcagtggctatcagtgattacgagaatattgaattttatgagtgcgattgagtacacaacccagtttgatcggttggcgaaattggtctcgagatttgtgccaaccgatttcagtaaaaagggtggaaaaaccactgcgagctaagggcgcagttggatgtatgtcggagtgagttaggactccagtgagtggcggggctcctacccctcctgcatcaggctttagcaggggaggtagtggtttggccatggaccagaagaggaaaacatccgctgcatccggtggcttggggcagagcaagaggttccg

SEQ ID NO: 344644 - DNA, 682 bp, Cannabis indica
acaactatgatttatccacttttactgtcatatcgtgtgtttaaacacgtcttaaatcataacgttctgggatgcctcgacaggaatttggttccaatgactttaatagcgagctagagcttttcccctatctttccgaggtggacaatgtacgcctcgtcacttaacgcttcattttgacaatcacaattgttatctaccaagaatatctcagcagacatttgaatgtcagcttctgactcgtcaagactataagtcttactgaaagatgtctgaagttaattggagaaagtcacaggagtgtgccttcctgtagcgatataagcacctcccctattaggccttgagttcccccaactgataaacttagtcacatattatacactaagtgtcttctcaatcgatatgcattgctttcgtcttcccaggtgtaacgaagttgatgtctcactttatgcatccagtgacgtatggtttctcgttaatatacaaggcaacagtttgtaaatctctacctcacataagaccttatagtcagtaagttgcaagtatattctgttacttacgcaattaatgagttattccattagaagtaatgcttttgacacctgtcctccactaaaatggcagccgaatttgggtataacaggtctcactatcaaactaatgcttctatagcttt

SEQ ID NO: 344645 - DNA, 921 bp, Cannabis indica
aaaaatgagcagcttagggagctctctttttatcgtgaaggaggcccacaaaaatagggaaaaaaatacaaataagatgttttcaatcgttaatgaagatctaacggaattagctcttggtggtgatggctattcttgagagcccggtgggtcttgctataggcaacttgaaacttattttcgtaactccattgagggtgaaatttgacgatgatagatttagaattacgagtggagtgtgagacattacttgatatagaatcaaattatcttcgaaacgcaagttgaatcgcgtcaatcagatcaaaattgagtgaattatggctattttacttaaggcagttcatgacctagcgcccaagttgacatccagcgcccaagttaacatcctgcgcctaggttgacatcccaacatgttgacatatgatgtcaacctggacgctgggtaggtgaaaaaacatccaagggatgtacttttagatgcctaagtgatattttgacatcacttaatcagtttttgtgttctagggaagctggtcaccaattctcagagatgttgttattttgcaaaaatgagagactggaaactcttcatttccgagtgagctgaaaatgagaaatgcaaagttgtgaatttgacttctctaactccatagatctacgtaattgattaaagctagatggacgatcaaaacgatatcttaatcaaataagcagaacccagcgtactaggccttttgtcaacttaggtgcttggtacctactctcgagctcttggggtctttttttgatacttccaatgcttttgaacttgaggatgaggtctcctactctctattttttaccattctggattcaatggtcacatcgaattttgcatttgagcaattgaaggcagtgtcctaggttgattgtcaacct

SEQ ID NO: 344646 - DNA, 664 bp, Cannabis indica
tgttattttttatgagaatatatttcctttacataataagaatttggatcctaacattaaagatttttttaatgcatatcttttgccctctacaggatcaataaagttccaaggacacaatgattctttgggttttggcttgccccaaaaagaacaaccaacaaccactagcacaccaaatgacactgccacatcttctccgtgtgtccaaaccactaaatctagccgaaaatctcagcccccatctcacttgaatgattatgtttgcactcttgatggtttctctacttccacgactcaccctttgtgcaatttcttgtgttatgacatgttatcccctcagtttcgtgctgtcattttggttgccaatgccatcgttgcacctactagctataaagaggcagccactattcacgaatggaatcaagccatggacaccgaaatcattgctcttgtggctaacaagacttgggatgtcgttcctcttcctccaggtgaacatgctataggatgtaagtgggtctataactataaatataatgaaaaaggggaggttgttaggtgtaaagcccggttggttgccaaaggctatacccaaaaacacgggataaactaccttgatacttttgcccatgttgcaaaatttaatactctcaaaatatta

SEQ ID NO: 344647 - DNA, 634 bp, Cannabis indica
ctaatcagtttatttgcttcttagtttcggcggttgaactccgcctgatggtcttggaggatcacgacctgctaatccatcaactcttagaatttgcgtttttgctgggcgaaagcatcactcacagcatcgcgtgtttcttcttgttcatgatggaggatgtttgtgtgatcatgccatgtgaaagggccacatcagttgtgtgaactttgggataacataaggtaaatacaatatataatgttgactattatgtcggttaggagagatccaattttaagggtcatttgtgtaaatcccaagttcttgtgtctagcctatctttttcatatttagattgattttatcttgatttaagcttgaatataagaaaacaaaaacaaagattcaacaccagaatttcacaagcttcacctgccctagaaactcattctaggcggctagtgcttgggttccccgaaccagggtaataacttctacttattcaaagatatatcttacaaaaaccaataatattgtaaacaatacactctttttcaaaatacagtgtgttgcccctgaattcgcccaaaatacgtggaccagtcgaaaagggacacgtggatcagataacttgtaaatatttgataagtct

SEQ ID NO: 344648 - DNA, 462 bp, Cannabis indica
gataactaatcagattgtaaagagttttatttaaggcataaaacccaacagaagcatctcaagagaatcgcacgaaagagagggctgaggtgagtattttgagttttttagctttagggatttcactttttgttgcgtcggttattaactctcattattatattttgcgtcgtttttaaaagctcgctaacacaatactcgactgttgataaaagacgcaaaatgaaatgtaaatgtttaatttttttgcttattctcgtcggtttactttttagcgtcatatacctaaaagacgcaaataacagattattaatgtcatttttaaagagacgccccaattatttgagtactattcacgtcggtcaacgctatgaatagtagcattgaccgacgtaaatagtataatttgtagtagtgttccttaatcacaaaaactttgttattgtgaaattcctctctata

SEQ ID NO: 344649 - DNA, 948 bp, Cannabis indica
aaaaataatttaaagtgaaatacctaaacaaatacacacaaaaatatgaaaatacttaaaaccatgaatacaaacagaaaaaacataaaaaaaaaaatagaggatcaaaaattacaactttaaaaaagcaaaaaattggaaagaattaatatacaaacattggatttcactttaggcttcaaatccaaatcaggaacttcatcctcgaaatcaaaatcggacacaacctaaaacggagaaatatatttaaaacacaaaacagaaaattaaaaaaaaaagaaaaaaaaagaaacaacaacaaaaaactattatttttttttaaaaaaaaaacaacaatagaaaacttacatcgttaaccgattcaaagatttgattctctttgccttacgagcttcaaccttagatggaagatgtcttttcttagaaccagaagcctctacaacatcagccacattagacattctcttcttggcaatgcctttcaaatccattttaggatcacctttagaggacttcgaacgaggtttcttaggattctttgaaatttttttagcaagggaagcagacatggaacccaacctagtggtagccatttatacacaacgacaaaaaatgagaagggaatgaggttatggaagagaagagatcgtctgaaatgggaggttggaaaaatagtgggttaggtcagaagttagggacggtttacaatggccaagtcgtgggttatgcataaaaaaacaaaaatacaacaggaaagaagaaaaaaaaaaaaaaaaaaactaaaagaagaacaatagaacaataacataggagaaaaggatgatattagcatacataggtaaaattataaacaacaaactttttgaaatttaaaattgaaaaacatatttttttaaaaaaaaaagtttaaaaaccatgtagtaacaaaaatgtaaaaaaaatgtcaaa

SEQ ID NO: 344650 - DNA, 771 bp, Cannabis indica
gatcaatcagagataattgctatggatcaatcaggtacacatactcaattatcatatactactattgtgttctatgttatatacaaatagatcttgggttaattgttaatttatataacattaatatgttgccaaaattggttgaaatattctcctatgccattagatatgagtttaatattagaggacatagaaatatattaattttatgattcaggtaaataattaattaataatataattgtcaattctcatatattattttcttaaaattaattattaaatatctcattatcaactacttcatcatctgaaattgcagaccttgaatagcttgctaaaagttggagttggaagtagtgacgaagccagaaatttagttgagtgagggcttgaataaatattaagtcaaaactaataaaaataatgataaatgtatctttcaaattttcatcttcaacaaaataaaataatactgttgacaaaaataaaataaaatattgtcaatggtattattttattttttaataaagtattattttttttattatttgtattggactacttttaaaatgggcttgattagaataagagtaggctcatgaatcatgattaagatattgagtgagggcttttgtgaattggactttaataaattgagcaaagtgaattaatatatgtatatatctacatataaaaaatttgatgtatatatttgagtgagggctttagcccacacatgggctaaagtccctccgtccctggttggaa

SEQ ID NO: 344651 - DNA, 519 bp, Cannabis indica
ataaaatttaatgatctagactaattagggtctgccatgtggccattaacttaacatttaatggtcaggtgcctagggaagttccagaaatttagcttaggtattattactttcaaaaattaaacttgaatatttatctgcaattgaacattaaatttagatatttatactacaaattactcatttattttaatatgagttacttgattatatccttatttaaatatacgttgatgtacacatattaatttatattttttttttatgaattattgaacttattagatttttttttatgaaccagaaaattgtattgctcaaaaaataattttataaagaaaataaatctaagaaagacataaaatataatctttaaaaaaataaattttaaaaatagttaatcctcaataaacttattaaaataaatattttttgaaagcatcatactaaaacatactaaaaaaaataatctttacaaaatatgaaaaattaaaaaattaaataattaaagtgtactaa

SEQ ID NO: 344652 - DNA, 529 bp, Cannabis indica
tcttattcctctttaatcttctaatgaaactaatttgtatttaagctaaagtggatgatctggatgacataaatcagctatgtactagttagaaatgagaaataatggatgctaggtattattttggtattttattgacttattaaatctatctatttggtgattacataaccatggggatattattgttcttttatattgatgagaggtcttgattttattactaatattttcttattaatataagagttaatctattacttttaaaatttgtattttgtaatataaattaaaggatcatttataagctttatcttcctccaagggtcaaagtgttacctttgaccacaaaagttatggatattacatatctgccacggcctagggctcgggtcgtgacagaaaaatggtgtcaaagcagcgggtttaattacctcggagtatgtcacccaatagtttagatttattttaaataataatagtaataagtgtcttggcatttatatgtataagacatatttatattatt

SEQ ID NO: 344653 - DNA, 688 bp, Cannabis indica
tcggaccattcaaggatcaattaccacccaccacaatgagtttataggtttgttcttctataagattgaagtggtttctagtttctagagcttggtgagttctcttaataacaaacatatggttcaagtagattcctaataatgtttacaaattcatccgatctaatccgcactattttgcccatagtgtatccgatccgcactaagtgcaaattttatatttttgatccaatacaatccacatagtaactcaaatatccaatccgcaaagattgaattgattactttttaatattgaattatttaatatttattaacaaaataattttttttcacgtaactaataacaaaagaaaataaattattgttattttatgtattaaaacaacaaattaaaataaataaaattaaaaaaataacaaatttaaagcaagtatacgtttaaaaaagtatttcattatttaaattatatttttcttgtaaataagtatgaaatatacatttcatatactatattttgaaatatatttgtataatatgtattatatttttaaattattatttttatatttaaatattaattgtgtatatataaagggaaatttcactatttgcccttaataatatacctcatatcaaaatttatacctttccttaatttgtacaaatttagtccattaattacatg

SEQ ID NO: 344654 - DNA, 881 bp, Cannabis indica
gttttttcagtagttctgtgggcccaaagtacttgaggtatctcatcgacccatctacctttggcagcatctagcttcttcttgatagtatccttcaaggttttgttaacagcttccacttgtccattcgcctgaggcctagacactgaggagaagcttttaattattttattcctctcgtagaactaagtgaacaagtcaccatcaaactatgttccgttatcagatactatcttcattggaattccaaacttgtagacaatgtttttgacaacaatgtcgaggacttttttgcaattatggagactatcgatagcaatcgactgctaccactacgtacttggctcccccttgccctatgggaagtgtccgaattagatcaatccctcatatagcaaatgggtagggcaaggtcatcatcctcagttccgttggcggtacacgaggtatatgtgaaaatctctgacacttatcacatttcttgacaaactcatgggtgtccttgttgattgttggccagtaatatctttgtctaatgatcttttttgatagactctgccaacctgcatgatccccgcaaaaaccttcatgaatttctttgatgatctcgtttgcttctataggaagaacacaccgaagtagaggcatggaataacgtcttttgtatagtttgccttcgattattgtgtagtgaggcactgcatataggagtttccttgcctcatttttgtcaactggaagttgtccgtcgagtcgatagttgagtataggagtcatccaagtaggtgagctatctatcatctcgacatctcctttttcacatatgcttggctcatctagtacctccactggaaccaagttaaattcatccaagtcattct

SEQ ID NO: 344655 - DNA, 641 bp, Cannabis indica
aatttatagatatatacacacagtacacattaaaaaaattgaacagctgtataaaataaccggttataaaataattttttctgcttaaaataacaggttacaccagtcacaaccatactccaccaagtgaatgtgctagagaaagggaaattcctggtcaatttactggacaaaacatgtgaatgtaaccggttccagcaagatgaaatcccatgtgctcatgcaatagctgtattctcgaaacgaggattgcgagtttacgactatgttgcggactactacaaaactgacgaaatgaaagcaacatatgacacaacaacaaacccattaccaaatgaaagtgagtggacactgcctgagagcttggaaatgatagtcctacccccaaacacaaaaaagagagcagggagacctaggaggagaagaataagttcaaaaggagagccaaaggtacaactaaagtgtggacgttgcaagaagacagggcacaacagaaaaacatgcactaatccagctctaccaccaaagcaacaagaaccaaaacaaccaaggcgcaagaaagcaaagacacaacaagaataaccggtttattgaatacaaagatacatttacaataaaaaaaacactatatttgattttgt

SEQ ID NO: 344656 - DNA, 1090 bp, Cannabis indica
acccgcactgtaaaattaaaaaattgcagaaatcacaccgcaaaacaccgtaaaaaatagtgcggtacaatttctgcaatttagactatcactaaataattaaactatcagaaatacaacaaaacttgagcaacaccctcaaaaatatcataagggttgaaaataaatataaaaaaaaagttttaagttacaataatacaataatacaataattagtgggctttgggttaggcctttggacttaaataaatatacgatacagtgcggtttgaaccgcatattaacaattcaaaattgcaaaccgcaccgcaccgcgtggtttaggaaaaattcaaactgcaactgcaccgcaaagaattttaaaccacatttttttttgcggtgtagggtggtgcaggtggtttgagcagtttgagcgatttggtaaacaaccctaattcgcactgtattgtatgatgtggtgtggttaatttctattatggtacgattataattaaattgtttactatcatcacagtgcggtgtagtttagaaaattatatttcaaaaacgtataatacacccattgcactataatatatagaaaaagttttaatagttacattaaatatgtaactacaatgattacatttatttttaattcttagatcattgttaaatggttgtaattaatttaaaaattaaataaaaataattaataaatcacctgtaacttaattttatttatttctttataaataaaaaataaaaatatttatatatattagttgtaaaaaatattttattaaatattttaattaaaaaataatttattttaaatatataattaatttgagtctaaaaataaaatttttacctgttatatatagcaggacataaaaaatataatcatcgtaattatatttttatgaaataattacataagacatcattttttgtaaaatatttacatttttactgtcaaagaatatttttttacatttttacggttttgtaacaaataacacgaaaacaacataaaatcaacaagaaaactatataaaagtaacatcaaaataacataaaaaaaataaaaaataacatacagata

SEQ ID NO: 344657 - DNA, 609 bp, Cannabis indica
tcattctggaaatcttcgattatctgtattgtattagggaccaacccaccttttagagtgtttgagggttttatcaagagaatatgggggaacttgggagtggaaaggatagtgagaatgcactcagggttcactctagttagtttcaaggatgaagctactaggaatgttattcttgagactggggtcatccaatttgataggaaacctgtgattttgaggccttggacggaggatatggacacagctcggatggtcaaataggtccctgtttgggtgaggttaaatggcctggggttacaatattgggggaagaagagtttgagtgcccttgttagtactatagggaaaccgattatggcggataaggtaactcttgagaggtctatgatcaagtacgccagagtgttggtggatgttgagattaaagaagaacttccgagaactatagcctttgtcaatgagaagaaacaattaatagaacagcctattgaatttgagtggcttccaaccaagtgtacggcttgcgatatgcttggacactcaatcgctaactgtaacaaagggaagcctgctatgtggaagaaaaacaagcaaggggatacgcga

SEQ ID NO: 344658 - DNA, 549 bp, Cannabis indica
aagcccagcaaaacagtataaatgtcaataaacacaaataacatttcacatatataataatgccatttcacttattgtctatttgacatagacctgcgtgttacgctcacacgcctatttatgtctatgtggcatagacctacatgttacgctcacacatctaaatataaaaaggccttagaattgtttatctcggttctaattactgagtctaacctaattatgccttgaacacataattctttactcaacatatatagcatggcataatatttaaaatcattattcactagggtaataaccgtaggccttataaccgctcactttagggttatgaccctaatcccagttcacatttaatcaccattataatatcaaacatgagtgccaccacgcataactctacatgctaactactatcttacccgatgtcccatatacgtggagattccaaatccctaggtgctcctgaccaagtgccagtaatcctagtcataatttctgggattcacaaatagggttaactccctaaatccacttccacataat

SEQ ID NO: 344659 - DNA, 1113 bp, Cannabis indica
aaatctgatctcaccacctttacgagattaaacttgttgccactcgcctccttgcgtcctcgtcctacccagagagcgcacctttcttttactaaccctgcgatcatacccatagaggatgtggttgtctcaatacccatacttcgttgcggagtatcaatccctttccatcaattcatctccgctattctccagcggtatgacgtgtccccttttcaattaaccccaaatagctatcgcatagctttaggtttttatgcgatgtatatggagtatgcgcatagggagccttctatattatctccagcggtatgacgtgggtctccacaatggcttctactatttcagcaagtgggctacttctgaaatcaacggggtggaaggcatggtttccaatattggggattggaaatctaaatggttttacgtgtttaaagtcccagggattaggactgactttaatcgtcgacctagtacgtcgaatatttctttacttagttaattttcatgttaccttgtgattttgagctaacccacttttccttattttcgcagatagagcagctcgacctgcactagacgcaacacgtagagagactgctgaaattctcagaagcctccctgttcaagatcgtgactggtgactactgtgcacgaccttaaagctacgggaacataagctaattccagagaacgcgagccttcaaagggagccagtgtacaagaagccgtctcagaagcaaaaagagtggatagacaaacgtctttccaagcagacttctcggccgacatcaggtaacatatcgcatgtatggactaatgcatttaaatttattgttattttaacttatcttttcttgtccttgcagaaatgactttcctgaagtcggcaccagttctcaaccgcaagccaaaaaccgaaacaacgacgacatctcctatcgttccccagaagagaaaaagcgatgtcgtggttactcctgccgcagattcctccaagaagctagctaagcctacgcagacaaggggaagaaagttgtgatcgatccagctgttcgagctcgcgatttcctagttttgcaagaaaaggttgtgggcgaggagttcatgtcc

SEQ ID NO: 344660 - DNA, 806 bp, Cannabis indica
ttcccggggacttaaactcgaaactaaaagtttctctatcgataaaaagcatggcaataccccaaataacataaaaatgagaaaaactagggttcctaaaaatcccccaaccggtataccggttctgcaaatggaattccggttctgggaattcctgaaccctcatccagaatttcggttcctcgcaggatacactcaaaaaatcataacttgctcaaatcaaatccaattcaaataaaaccttccatacctgttcttaataccccatagaacatttctaaagcatcaaaaccatccagaaaacacagatacgaaaaatgccatgtgagctccaagctttgagttcaaaactaaaacttggctaaagctcacctacaagcatcaaaactagcttaaatctactcattcaggcatataaaaactgcagaaactgaactcaagcacaaccaaactctacaacaactattttcacattttcactttgaaaaaccatagtttttaagctaaaattcacaactttaaacaacacaactaacatgaatcacaagtagctctattctactcacttaatcaagaacaaacttctgtaaacaacatcaaaaacacagcagcaactattaaccaaagctaagcatgcaacctatcaaactttctcaaaacttcaaaaaacttaaaagaaagctagaggaaatataccaacaactagagatcacaaaatcttgctaaaaggagcttgaaatccaagagaaaatggccagcttcttgctgctcaaagagggccgaatagacagagagagagaggaaaa

SEQ ID NO: 344661 - DNA, 1117 bp, Cannabis indica
aattaataattaagtagatttttttaagaaattagttattcatatattctttaaaaataaatttaacttgaaaatttgttaattttaaatcaacttaaattgtgatatttttcaaattaaggtgattagttcaagatacttaatttgttatttaattaagtttttaaaaaatatttaagttaaaaatttagttattttaaaacaacttaaattagatattttcaagtatttattttattatattttatttaatttttgaatgatatataattatatctaaagaatttcgaaattaaccttgaaaatttaattaaagttgaaaattaaatttttaattaattttataccaatttcaattaagtaatttttattattaaatatacagattaaataaatgattaattaacaatatattttttaaatgacgagctttaatcataaggacattcaagctccattatttgtcatacatagtaaattgtttcaatgtaacctcgagacgatagacttcattccccttatgggtggttatccattgaagcattaacaccgtaagatcttgtatgataaaaattttgtaagttttcttttctattagactctctcctacggtgactacttagaaataaatttacaaagtatggaacaatggtagaagctcataaaataagaataacaatgactctcgcttaccgggataacgttagattcttattttgattgaataaaaggttgctaaaatagtgtccattttagatgagttgactactttattcgactaatattatttttgacactcgcctactgggatactgtatttcattttgttagaaaccttggaaaataattgaatatattttatttttggtatttttgcaaatatattttctatacttgttattttctaaatatgtgtatgaatttatttgaaccaagtaatttatttctatttattgatgtttgtagtgtcaaaatgctgtttaataatcctcaccccaaacctcaaatattatatacctttgcaaatgaactccaaactgcgatgatgactcttggtcagggaatcacttcacacttgctcatgatgaacttgaaattccagaaagcaactatgctg

SEQ ID NO: 344662 - DNA, 582 bp, Cannabis indica
gcatgacatgatatgtatgcatgcctgctgcattatgtttcatttatttttaataaaatggtattttattctagccttcattttctcagtgatactatcacaatcagtttactaatttcttttagcaaattggaatgctcaaataccgaaaaggaatttttttttttaatcgaactatacacttagaaacttaaactctaaatttgatgtgtttctcgtgtaatttaactttaaagttcagattaaaattaataaattttttaatttatattcatcaaaaaactcttttagtgataattttttagttacaacataaatttttatgactaaatttgacttttagtcacaataaaaaattacttatgactaaaacataatatttaagagtgttcattggatcatatctagtatttttaggcctatccagatccaatccaattaatattggatgttagattttaccatccaatccaatccaattaattttagttatcctatcgatccaatatccattaaatgttgaattggatcacttttatccattagatgtatttcaaatatatttattggtttaattttggc

SEQ ID NO: 344663 - DNA, 985 bp, Cannabis indica
aaagagttttatttagggcataaaacctaacagattgtcaacctaggcgttgggcccagccttaggtcaacttgggcactgggtgcccgaggcctcggggccccggatgctcaaaaatcaacttgctctgattttacttctgatacctcaaatatgcccgtgggatgtctagttgatgtctcaatataagttttgaacattttgcactaagacgggtccagaaactgaaaccctagttgaggatgtcaacctgggtgccagatgaaactcttggtgcctaggttggctttcgggttgcaggtttgtctaattttagctctcaaggcttggactaggttgctccatgtcttcatatatagtacagaatactagaagatagtggatcagattcaagttattgaagtccaaacttccatcttagagatctcgaagtcaacttggacgcagggcaagggtcccttcctaggtcgactgctatgactcgggtctacttaactccgtgacattatccttcatgtcacgtgtcaaacattgatgtccatgttaccaaggaaagtttttgagttaacatttgcccccaagtaaactttacacttgtgtggagttaacttgatgatgtgaatcgagcccatttcacttgaaactaccagttcgagaaatcaattcaggtaataaatattgtaatctgactatatatagaatatcaattaattaattgtgtccaaattcaataatatacaatatttatgtatctcaaaattaatccattaattttattctgaaaatagaaaatattctaataaatcaaagaaaactttctttttgaatcaatcacagacaaccttattatgttagataaaaaaaatcacagacaaccatagacttataataaaatccgctaacaaaaaattaaaatatacaagtcgggacttttatttacatccttataattaatacaaagggaaaaaaaataggaaaatacaaa

SEQ ID NO: 344664 - DNA, 1114 bp, Cannabis indica
ttaaacatgtaaaaggtattaaacacagaacccctataagctatcaaaactatatagatactctcatcctatatcaaaatttgtttctatttcactatagcataattgatactcacttctcaaaatttgcattaaaatcataaatatttaattggtgatcagacaattaaaaataattaagtacggatgaaatagaatacatagaatttaggagaaaattaaatcgcattaaaactataaatcaatgtcaaacaatatccatctacatcctaaataactatttagctactcatattcatcgttgcaaattcacacatattaattcaaaatagaagaagaaaatagagaagataagaatgttgaaaacctcgttgaaaaagccttcgcaattgattttgctctccaactttcgtactcctcaattacttgctaattaagagtttgtgaatttttttagctctgaaaaatctcctaaaaatactaataataacgtgtttatatatgttaataaagatatactaaaagatactaagaagattaataaaatttaaacttaaacaagacaaaaatcgtagttctatctcttttttttctgttatctttttttatctttttctttttagaaatttcctgctgtgatgattgatagtattttaactataacttttttgatattacttggaattggatgattcaagatattccgaaaatatgaaagagagatctttttatgttttgactttttccaaaatatgaatagaacatagtctaatttaggcttgaatttttaactttattttcttgcacaattttttctattttatagatattttttttaagatttgacccattaatttattgaaaaaatgtacctaaaatgattaatatatgattattagtctattataatgtaaagaatttcagaaattatttactctaaaatgttaagagcaatgtatctatcaccttgtatcttcatctaacatcccaaactctaataaattcatttacggttcgtttggtacgtcgtattacataataatgtattgtatattattatattgaattgtatttcatgtaatatttttatgtaaaactatatgtggtattgact

SEQ ID NO: 344665 - DNA, 512 bp, Cannabis indica
atcagatagcctttcatagaatttagttaggatttcattatttgacaacctaagctcatcaaatttagtttgaagcattataaatctagagcgcttaacatcagatgttccttcaaatcgagtttgaaggatctgccaagcttccttagcaaattcacaagatgatataagtttaatataactacaccattaaatatagcatgcaatgctttgctattgtaggcagaaagcttatcatcttcaatagatcattccagttcagattttattttagaattactttcggaatctatctcaacttgagaagaccaacccgatggaaccatcctccaagctctctctcatcttgagatttaatgaaagccctcattcaaactttccaatcaggataattagaatcattgagcaagggttgtctagaaatcgaacatcctgctgcaaaaaaaatgacaatttacaaaaaaaatacacgaaaacgttaaaaggaccacactaagagtttagtgtctcgc

SEQ ID NO: 344666 - DNA, 821 bp, Cannabis indica
tcacgaggtggtgacctttggttgtcccatcgagggtttcaaaaggacggctgtaattattacatttaacccatttggggtgccacatcacgaaactctttggaattcgtgtaggcatgcttacaaataaccgttagattggaagaccttaggcattctcctgccatgtgtctaatctcaattaatgagggataattgtatttaagtcctctgatacgaaatgattcccacattttccctctcattttcatttttcttttctctttgctctgaattttcgaaacttcaaaaactccttccagatttctttttctctcttctacgaacgatattcgaaagcttctgaatcgaccgaggatagatcgacattccctaaggttagtgcaagaattgtttgcaactattcttcttttattttaagaatcgacctgcattttgtgttttaagaggtagaatatgcatgagataataggaagtgtgtatagaactttattttctgtcaaaactgggtgtttttcaggaaaatataagcctgaaacttaggtaactacgggcttcaggaagaacacttcgagtattcgcattccttttgttgaatattctgaatactcgcgggtattaggatgaacatcttgaatactcgtacatacatatacaaaaataccttagcaaatctgaaatttagctatcttaacccctgtttatgttgggttttatgccctaaataaaactccatttcaatgtaatccattttattcaatatcaataaagaaacagaagtattctttcattcatttgtatgttttggttcatgttatcaa

SEQ ID NO: 344667 - DNA, 1289 bp, Cannabis indica
ttattgtgttgtcaacatagtggaaagtaatcacgatttgtgtgatttaatgtattcctatgatttatcaatacacaaggtttaactgataggataatctacaatgtagtttactcgcaccatagataagtgttatgtcctttccagggcattagttaaactaagcttgggttggatgtatggagtatgcatcggaagggaccgatattgaacttggataacatataataaaataaccgtaaaatctattcaattcaatatcacctagtttatcttagatcaaaagatttcaatcctgagatggttagtactagtttagttgcattatttgtgttcttctatctcttcgttaaagtcgaccaatcgttcttctcgcgacatatagattaaggacatgatagttcaattgagtgggatcactaatgataaatacagaatctataacttttatccaaacatagaagtcaaacaatgattttcttcgagcttggcatactagagataaatggttgagtactcatttctgtgattatattagttcactgaaatatcatttataggtagcctagtgttttaaggataaaatacaatgaagggtgtaacgaaaaatttgtccctactcaatgtagatcatctatagaggatcattgattatgaagattataacaagtagataactcatagcgtatctatatcatggaatatatagagcattctatttaattgagagtgaaattccaaatctatagtggtgtgaggaggaattaatacgttaggcaatttacttggtaaattctaaatctgcttattggaagctcggttatataggcccatggtccccatactagttgagacaaactacttgtaagactcagttaattgattttaattaatcatttataattctataattagactatgtcttactaatgaattttcactaagttatggcttgattgttaagaaataggattttagagtttatttgttaattatgaaacattgtagagtctaattaataaataatataaatgataattttatttgataattaattataattattaaataaagagttttggcatttataggattgaaattaaaaaaggtggcatttgtgaaataatagataaattgttaaaaaatagcaaaaatataattagtgggggccacacttatggccgacaactatagggtttatttagctattatttttttcattttttattccatataattcaatcctaaccctaagtgaattagtgaaaaagaaaagaatagtctcataa

SEQ ID NO: 344668 - DNA, 964 bp, Cannabis indica
atgagaacagaaggcaaccaaaacccagggaacatgaaatcccccgtgagaacgagggaaatcctaggacctaacctgggacacgtgggtcaccaacgagacatcgccaacgtccttctcgaaccaacagggaaggggcacgtacaaacctcagcagggggcacgcaataacccatacccaaggacccaaggaagaaggacgggacgtgaagaggcgaatgttacctcgggacacacaagaacccatagtcgatcaacacgaggaggggaaagaactcatcgcaataatgattgggaagtataggcacaagtaaaactgaaagttactcaaggacgaggtccatgagtaggaaaaagtccatgagtatgacaaggttcattagcaactataaccagcaacaaccagatcttcgtaatcaattgaactaaaaaaaacctgatcacaacagctcggtccaaagcaagaggatcctatccaattacgaatagatgagttggaggataaattcaggaggtatcaagtcagggagcaaggaaagcaatctggatatgacttggatgaggagctcgagcctttccatccagacatcacgaatactgcattcccataaggattcaagaaccctcacgtctcgtcgtatgatgggaccacagatccagtcttgcatttaaataatttcaatactattatccgagtcagtaatgttacgaacaatctacgttgtattttgttccccacttcgctagttggagcagcgagtagctagttcaacaaatttactcatcattcaatcaactcttgggaacaattgtctaatgacttcaaaaagtagttccagaccgcaagggataggcgacccgaggcatcctcacacacaaacataaagcagcggtcgagggagacgcttaaggcctacttaagtcgttttagcacaactaagtcgaacctaataatatcaggatt

SEQ ID NO: 344669 - DNA, 469 bp, Cannabis indica
tacaacaacaagtggtctttctttccacattattatattccaagttttattttaaataaattggactgtccattgtcacatataacgcaatccaacaaagttgaagaaatcaggggattatatttattgggcctatctgtctctctgtctgctgtattactctttcatattccaatatgtttttaatttattattattgctgaaaaactttattattcaagacgccataaaagcacagaaaggtcattattattataaaactacaactatgtttaggtttttttttttttttttgtaaagctacctacaactacgtgtttaggtttattttttttttaatttttttctatagaaactacatgtttaataacgctcttgtttttttttttccttaatcgtaaagggactttcgaacttagctttctaaaaagaaaaattaagctttctatgtcttaggaaaaagaaaaag

SEQ ID NO: 344670 - DNA, 575 bp, Cannabis indica
accgacgaatgtcgccaattgaatgatgagatagaaagtctcatcactcgaggccattttaaacaatacgtgaaaagacagggccatggatacaaccagcccagtatgcccaataacccaaacaaccaagggttacaacctcttcctgttgaaggagaggacatcttggttattttgggagggccacatatcgcaagggaaagaaataacgcccagaaaagatatgtgaaagagataaagaacgagcagttgacattttccctagaacctttcaagaaggtgaaaaccgagaacctcccattattttcacgatggaagacgagaaaaacgtgaggtatccccatgtcgatccattagtgattaccgttccactcgccaataaaaggatcaagagggtgttaacagacaatgggagctcggtaaatattctttataaggagactctatggaaaatggggctcaaaaaggccaaattaaggccttgtatgttgaatctttgcggattcatcggagacagcattgccaatcttggcataatcaagttcgcattaaccttaggcgaggcacccctatct

SEQ ID NO: 344671 - DNA, 1305 bp, Cannabis indica
atcacatcagtatgataacatttgttttcatccagaattaggggaagaatggtagaatgagaaagagcttcattccggatagtggtgatatcatcctcctttatgaataatgtgggtaccacatcagtatggtaaccctcatatgtactcagtagagtggattcttcaaaattttcaccactagaggtagaggtgacacttacctcgtcaaaattgtgaaaggtttcattcagcggttgtagaggaaaaccattagcacgcgaacttaccaggtgaccagataacttgctcaattcctgcttaatttgtttcaactcagcaagtaagtctttcatcatctcacaatttatcaccatagattcttgtaactcaacaatagtctcatttagggaacgagtgtatggatgttgagagttatgagaattcgaaggatcttcatcttcataattccactcatataatggattatagtcatacttaagcttccaactacaatcatcaagactattataatagtaagagttgtaggattgttcttcctcttcatcatagggatgtgcaccagatgatgtatgttcacaaggacgtggttgatgcaactcgtaccaagccttccactttttagaactctcactcttgtaaaaagaatagtattggaaagcttcctccccgtcactaaattctggttcgataaaattactagtaccttcagtagcactagaatttttatttaatgaagcaagatatattggatataaatattcaaatcggcgatgatcttcttcattcatattttttttaattagtataaagttcaactatgtaataatttaagggtatatacatgagatattcccaggccgattgggaaggttgccaaggtaccgcttcgtcccacactttactagaactccccgaggttgctagaaagtgtagagggtactctaccacaaacctttaaagccaatctttcttagacagaatattctcagttttaccacttttactattacacaatttttctcaacactaatttttttttttattttattttttttaagttaaaagactaaaattaatctaaaaaaataaaaataataaagagagaaacaaataaagtgtaaaataaaagctaaaaaatatatgatataaaataaaaagataaaatatatatataaaattagctagatgatatatttttttactaacaaaaaaaaattatacagaataatgataataataataataactaaaaaaagactaatcctaattatataaattatagtaatactaaaataaaaagaa

SEQ ID NO: 344672 - DNA, 640 bp, Cannabis indica
gtgtactctcagtcagaagagtagcatgagaaacatctccggatggttctgcaacgacttcgagaacacaagttatatgccaaattcaagaagtgtaaattttggctatcacaggtgtccttccttgggcacattgttagcaaagacgagatcaaggtggatccaggaaagatagagtccgtcagggattggccgagaccaaaaacagtgacagaagttagaagcttcttaggtctggctggttattatcgtcggttcgtaaaagggttttctaaaattgcaacacccttaaccgagctcactaaaaagaatcagcgatttgtatggacggacaaatgtgaagtaagttttcaggagctgaagcagagattaatcatagctccaatgtttgccctaccttctgataaagagaagttcgtggtgtattgtgatgcatccagacagggtctggggtgtgtactgatgtaggtcgatcgggttagtgcctatgcctctcgtcatttgaaagattatgaacagcggtacccaactcatgacctataacttgctacggtagtatttgccttgaagatttggcgacattacctctacggggagcgatgtgaaatttatactgaccataactgttggaaattatttt

SEQ ID NO: 344673 - DNA, 614 bp, Cannabis indica
aaaataatttccaacatttttgactaggtagattcatgctaggagtttctttattgtctttggaagttttgggtgaatttaagatatgtgatgctagattccactttgattttctgggctgcttgattttttgggctgctcatttgaagttcagggtttggatgttttgaatgtcttggtttcaagattggatgatgtattgcatgtttattggtatggcatgctttggttttgtgttagccttgaacttgaactttgttttagcttaaattcttagctaatgttgattatgagtagtaaagttttaaatttgaatttgaacttggttttgggtgaagttttatgtcaatttggtgaaaaatcgagcatgttaatgatggaattattttaccatgatctagatttactaacaagaatgttgaattaacatcctaaatatgaattctctaaaacaatgaaaataaacacataagggtttaagaaaatcttacattgattgcagtggaatataatgactccttccgttcaagatctctagcgctcgattcctttctgtatgagagtattatcaagatttgaacctggatctttttctctccttcgggtttagttac

SEQ ID NO: 344674 - DNA, 501 bp, Cannabis indica
taatagagcgttcaactaaaaagctaaaaagagtttaggtaatacctgaaatgtttatgaaatgatttattggattgttaaaattcattggatgcagctacaaaacacggatgtagtacataccaatccttatttttacacctctttacttcactgcaacaacaatacatattttattattttatccctatacatacatctatagatggcgactaacttctctaggcaagaaaaaaataataaaaaattaaggtgtgaaggtggaaagagaggtaaaaaggatatatatatagtacttgtggatgtgattgtgatgtgtagtcttgtcacaatataaaaaataataataaataatattaacaaattgtgatatgacttaacaggggctgatatttctaaaaatgaagctgattttatcaatcccttgaaaaatgtaatttcaacaaacccaacaaaatgggcggtttggttaaattttcccttggaagacgtaatttgaac

SEQ ID NO: 344675 - DNA, 955 bp, Cannabis indica
cgtgctaaatactatcttaccaactgtcccgtaaacccagagattccaaatcccccattgcccctgacctagtgtcgataatcctagtcacaatttttgggattcataagtatagggttaatccctaaatcaactttcacataatataaaattgacattcaaaatataggtaaacatataaagctcgaaacgagctttccaacaatataaggaacggcccaaacggagtcccgagtcaaaagttatgaacaaaacaagttcaacatgcaatttgtccatgtgagcgggccgcggtgcccaaaagctgggccgctgcgcctgggttgaaaacccagaaactccattctagcaactccaaaaatgcatccaaaatcacccaatctcaccccaaacatgcatatatctcaaaatcatttcccacacaatataactaacataacatagagctaatacacatatttaaaggtcaaaatcaaagctcgcatgcaacaaaatcagatttaaacaatatacaatataggctccaaacttgagtaacatatcaataaatttaagctcagaccttgaatctttaaacccaaaatacaagctcaagctcaacaataaaatcagagctgtataaaagaattaaagcaccaacttaacttcaaaacttatctcaaaagcacaacacaaagcatcctacatcaatctttaacacaatcaagcatagagtatcaaaattaaactaattccaacacccatgcatcacaaggatctctacattaaaatcatgcttaaatcaacttcaatttcagcaaccaattcaaattaagacagtaagaaaactacctccaaatcctcaacaactcaagcttcaaagattcccacaaaataagcttgaatccaagcaattctctacaaattcaaagattagagtaaatgagtttagagagagagagagaggagggggcgg

SEQ ID NO: 344676 - DNA, 699 bp, Cannabis indica
ccaatccgcacaaatgcggattttgaatttttcaatccaatccaatccgcacaagtgcggatatccgcactttgcggattggatagtgcggattggattggatcggctattttatgaacacccctacaatccgatgtatagccaatacatctgatacaaatttagtttactaatgtcttgaaaaaaacattccacttattcaagtgtaagtaaaccttatcgctgattatcacagtgtaaatccggtgcactaataaatcgtaggactaaatagtttgaagcatataattacaagtgctttccattgtgacagcatcactataattataaataactacatattcgggatttaataaaacttatatatctattctatgtaaagtgtgtctatataacagaattcttggtttatgagaaattcatggggtgactttttatttatattagaaataaaatggtttatgagaaattcataggttacttattatttatatataataaaataaattaataaattaaatccaaaaaaatacaattgggtttttgctgttgtacatctacgattatattttctttaattatttattgtattcattttcctattacaatttggacattcccatggaatcacacataatattccaatccgcacttctcttttttcttcttcacaacataataacaaaatatataagtaat

SEQ ID NO: 344677 - DNA, 475 bp, Cannabis indica
ggtaaaatatattccaacataagcatacaaaaccacccgtggtaacctatacaggataacccatatatttcaacaatacaccctggtttaatgaacaaacatgttagctccctttttcatgtgcatagtctctcttgggactatgaccttgtatgagatatgttcaataatcaagatgctgatattattttgggcatcccaataagctcaaatgtcttcattgatacgtggtcttaggtgggggaaagaacgggcgagttctcggtcaaaagtgcttataacatgctccaacaacaaaagcgcaccgaagagatggttggaaactcagacttctgacagcaactatggcaattgaaggttcccccaaaagtcaaatactttttgtggagagccgttacaggtacattaccaacttgtgtccaactagtgatcaagcatgtcgatatttcagtcacttgccctgtttgtcatctac

SEQ ID NO: 344678 - DNA, 596 bp, Cannabis indica
cattttttttatactaattcacttagggttaggattgaattatttggaataaaaaatgataaaataatagcaaaaaataggaatatagtggccggccatatgtgggcccaacactagttatatttttgccatttttcttaactatttatctattatttcacaaatgtcatattttacaattctaatcctataaatgctaaaactatttatttaataattgtaattaattattgaatcatttatattatttattaactaggaaacggcatgcgcttcacgtgcggtataagaatgttggatttaactccatgtaggagtgacaaaactatcatcgtgttcgtgttatattttagttaatatgcttttatatttcgtgtcacatgtgtcaatccgttttaaactgcatctaattttctcaaccctaacccgaagcataaaaaatcgtattatatttgtgttaacctactttgacctattttgctattactggatttaagaagaatgtagatttatccattgaaaaacttatatatactatgtatatatagtttttatatatcacaaaaaattaaattttttaaaatattttcaatttc

SEQ ID NO: 344679 - DNA, 1054 bp, Cannabis indica
gatatatgtataattctgcataattgatgaatgtacataaatttatatccacagacacgattcacatgaatataaagatagattataatagtagaacaatatattattttgtatttatatctacagacacgattcaaatggtgaaaatttagtagcagaatgcattgcacgattataggcaaactcaacatgtggcaaacaatcttcccaagtcttaatgtttttacttatgattgcccttaacaaggtggatagggtcctattaactacttctgtttgaccatctgtttgagggtgacaagtagtagaaaataacaattttgtcctaagttttccccacaatgttttccaaaagtaacttaggaacttagcatccctatctgatacaattgttctaggcataccatgtaatctcacaatttccctaaagaacaaatctgcaacattagatgcatcatcagttttatgacaagggataaaatgagccattttagaaaatcggtctactaccacaaagattgaatccctcccacacttcttggtagacctaacacaaaatccatagaaatgtcaacccatggtgaactagggataggtaggggtgtgtaaaggccatttggctgcactcttgatttagcttgcctacaagtgacacacctaccacaaattcgctcaacgtcccgtttcatatggggccaaaagaaatgcccttgcaacatagctatagttttagcaactccaaaatgtcccatcaaccctcccccgtgggactctctaacaagcaaatctctcacagaacaattaggcacacacaatctatgttccctaaatagaaaatcctcatgcctataaaactttccttcagcagtcttttcacaaagagcataaaattccccaaaatcatggtcagcagaatacaactcttttatatgttcaaacccaagcaatttagcataaggagtagagattagagcatacctgcgagaaagggcatcatcaaccacattctccttaccttgtttataccgaatgacataaggaaaggtctcaatga

SEQ ID NO: 344680 - DNA, 587 bp, Cannabis indica
tctaattatttaaatgctaatttaatttgctcaacaattataaataactaccccaaaaattactattttaatatattaattagcattataaagtatctttattaataaataaactatttctttacttttcttttcaaattttcccttccttattaaaaattcataaataagatatagtcttctttaaaattctaattaatttacgatatcaactaactaaatctaaagtcaatattatcccatataatatgaggaccatataggcttatgtaacgaatatcttattaagcagtttccaaaatttatgaataaattttctaacttatgaatttctcctaactccactatagattcaaaattgcattcttgattacaaaaactactctatataccaaatacatatatggtatgattcttcattattttaatctaaatagtcattaatcctctatcgacagtttacatcaagtagggacaaatttactattttacatacccttcaatgtattttattcttaaaatacttagcttgtaaagcccgcttagttaatttggaaattaacagttgtttatgattaattatgaaa

SEQ ID NO: 344681 - DNA, 1251 bp, Cannabis indica
tgaaaacatagaaaacaagcgtaattccgtcccaacacagctaaaaatgcacataaattggatccaaaacataggctaaaaatagcctaacactcattcttgctagccttattctcgatccaagtgtcacctaaactaccccaatatcacaatacagttaaaaagctcagactcgaatgcttctttaatcgataattattgagtcaccatcgatcctcaaattcttgtaagactgccaccgtcgaagaagctttccgagatggccacatcaaattttttgctccatttctctgttcagtacatccttaaagaaaatgtggatgaacacagattttcattgattcatttacgccttttgcaaaccattttgtatgttttttgtttttcttcctcctatattttgttctgattgttgaagaaaaaaagaatgaaaatatattgataggaatgaagagaaaaagataaagtcatgatatttttctatttaaaaaatattattaaattaaaaacaagacaaatgagtttgttttcagagagatctattaaatgtataagtgtacttttagttgaggtggcaaaatattaatgtctaggaaaagaaatgggataggaactagggatttggggttgtacataaatttttgtaaatcaccaaaattgaataatcctcgcaaatgtaatccaatgaaaaacacaaaccgagaaacccaacaaaaatataacccgctcaataatttgcttaaatatggaaattaagggtatagttatatttttatggcataaataaataacactatagggttaagggtttctttttttatatttatatgagttttttatgccatatttttgtcaaaaaaagtgaaaattccatatttgtaaaaaaccaataaattttaccggaaaaatcaccgccggcagaaaagtcaccgaaaaagtcattgtcattgaaaaagtcaccggaaaagtcaccgtcgctggaaaagtcaccagaagtaaatgtctcagatataactaaaaatataacaagttctatgaatataaactaataactaaaaccggttataattaaaatataatcggttctttaacataataaataattataaataacataaaataactgaaaccggttataattaaaataaaaccggttctttattagtgttatgatgaataaaaacaaataacatgaaataactcaaactgattataactaaaatagaacttatatagcataatgaatacaaa

SEQ ID NO: 344682 - DNA, 1160 bp, Cannabis indica
atcatgagaattgcactagccggagtgatgatgtggatgaagttcatccaatatcaaatgacggaagtggaaatctctcaacaagtgatcttcaggcatgattgaatgtcaagagagagaaggctagaaacgagaaagctagacctcgcggagatgacttgagaaatcacattaatgatcgaatttgtggaagagagtctcaagatgcagccactcagcatttggaatgtaatattgagaaactaaataagatcacagagcgcatctctcaaaagaaaaaaggaactgtgtctaactcaaaagacgaggacacagaactatgtgtaaaaagaatcatagaagcacagctggtggaacacttcagaatgccacaaattgagttgtatgaaggaagaacggaccccagggaccgtttgtccaaatatactagaatgatgcaagtggaaaaagcaagtgatgatgcaagtggaaaaagcaagtgatgatgcaaagtgcctttgtttctctttaattctgtccaagtttgcagaagactggtgggaaaaattatctcctggatttgtccgtaactagaaggatctgcaagtaatgttaaagaaataattcatagcaataaaggattttgatctggaagttagttctttgacaaatatcaagcaacaacttggaaatatccttaagaagtacattcaacgtacgatggatgctgctgcaaagataaaagttactaatgatatgaagtatttgtttttatggtccatatcaaagttataatagcataggcaatattcgataaaaatagtttttatctaatataaaccataagcccaaggatctcatcataatgtatatagattaaatctagactaatgaaagaaagaaaatacctcttgaagcttatcaggatatccttgtttcttttcgtataaataacgatcacccaatccaagaacctttgttgaagaatccacaccttgatcttccaagccaacctcaacactcaacaatagagtgagctattagatcttatctagatgaattactttaggtattacagtgtgtacttaactcatgggacattttaattgagttagggttgtttaatctcacacacacctggatagatgtatgtgtgtgagacaatatatatatatatatat

SEQ ID NO: 344683 - DNA, 1598 bp, Cannabis indica
actaatctgtgcttattccaaaaaagaaaatgtctgtagtcatgggagatttgagacctattgctctgtgtaatgtgctttacaaagtatttctaaagttttggctaaccggctcaaagttctattgtccaaggttatttatgagtttcagagtgcattcattccgggtcgcctcattacggataatgttcttgtctcgtttgagatcctccactatttgagacgtaaacagcaaggaaagcaaggatgtatggcccttaagttggatatgaacaaggcttatgatagaatggagtggtcttttttgcatgcaatcttacttcgcatgggtttcttggttgattgggttatgatgataatagaatgtctgcgaacaatctcttacaacattgtccatgggggagaagtacttgggccgattgtcccaactagagggattcgtcagggagatcctatttctccatatctcttcattatctgtgcggaagttctctcagctcttattcggctttatgaagagaagaaatggatccatggttgccgtgtggctcgtagagcccctcatgtcactcatatactgtttgctgatgatagctttctttattgctcggccactatggaggaggctcaacgtgaacaggaattgctgaagaaatttgaggaggcttcgggttagaaggtaaatctaaataagtcttttgtattttttagctccaacacgattggtagtgttcgcttcggtattttgtcaacccttcatatgcatgctgctgatgagaatagtttttatctgggtctgccgagcgtgttggtagaaacaagaatgtggcttttggtttcttgaaggagaaggttaggaagcgtattcagaactaggacagtaagcttttatcgagagcatgtaaggaggttttattgaagtatgtgatccaatctttaccttcttacaccacgagtgtctttttggtttccctcgaaatttgtaaagacattgatcgccccatgggaagattctggtggcattctaaggcctctcaaggtggaggaactcattgaaaaagcttggataagttgtgtctgcataaacataaaggtggattgggctttcgaaatttgagggactaaaatttatctatgttgggcaagcaaggttgccggctgttaactaatccgacttcgcttgtggctcgtgtttttcaagctagatattatcgttcttttcttgatggtgagttgggagctaatccgagttatgcgtggcggagtataattgaagcgtaagatgtggttaaattgggggctagatggcatgtgggttctggttcttcagattctgttcttcaacagccgtggctcccttctgtggacaatctctatgtgatttcttctcatgaggcccttcagaattgctctgtctctaatcttcttcagcctaatcgaatgtgttggaatgtggagcttttagaggatttatttgagcccagagatgtggatctcatttgtaaaattccgctgcctgagttgccagaaatggatacatggtattggtcttttaaaacttttggtggatattcggtaaggagtgcctatcgtgcttt

SEQ ID NO: 344684 - DNA, 682 bp, Cannabis indica
cgatggaaagagtgtggtatcttgcaaatggcttttcaaagtcaaggaagggaggaccgaggatgaaccggtaaggttcaaagcgagattggtggcaaaggggttcacacagaaagaagggatagacttcacagaaatattctcaacagtggtgaaatataagactataaggttgatgctcgcactagctactcagtttgacatggagattgaccaaatggatgtgaccacaacttttctacatggggacctagaagaagacatctatatggagcagccaaaggggtttgtggttaaaggcaaggaagaccatgtttgcaagcttgacaagtctctatatggattgaagcaatccccgagacaatggaacaaacggtttgacacttttatgaccaaacaggggttcaatagaagctattatgaccactgtttgtattttaaaggttcagaaattactaaagtcacttacttgctactttatgtggatgatatgctaataattagcaaggagaggtcaaatgtcaacaaggtcaaggatttgctcaagtcggaatttgaaatgaaggacataggtgtggctactaagattttggagatcaacattctaagggatagaggcaaaggaaaactcatgcaacatcaggaagactatatcaacaagatcatgaaaaagttttctatg

SEQ ID NO: 344685 - DNA, 765 bp, Cannabis indica
tcaaatttacaaattaatatataagatcagaaatcacttttatgttgcatggttcacatgatttatttcatgattatgtttaatgtataaattctattaagtccacaacatatataaatatatatttgttcatgattttagtgttgtcagcacagtggaatataatcatcattatatgctcaaaagtttaattctcatgatctgtcagttcaatggatttagactgccatgataatcgacgataaggtatacttaccccttggataagtattatctcctttctagggcattagcatagtttattagtatcggatttatggagtatacattagaagagaccggtattgatcttggataagatatcataaacttatcgctatatatttctaagttaatatcaatggttgatcttaggtctatggatctaaatcttaatatggttaattcagcttagttgtattatttatattcttcaagttgtttgtggatgctaaccaatggttctggcagatatttacatcttgggaacatggtagttcaattgagttaaagcgctgatcatagatatggaatctatatcttctataagtatttagaagtgaaacgatgatttctttcgagcttggctgaataaagataaagaatgagatctcatttcagtagttatattagtttactgaaatatcatttataggtagctaaatattttaaggataaaatacattgaagggtagaacgattcatttatccctattcagtgtagat

SEQ ID NO: 344686 - DNA, 854 bp, Cannabis indica
aaaaaaaaaaaacaaaagaagaagaaagccccaaatcagcccatcattttcagcaagcagaaccctagccgtccaccattgcttcaccccagttactctccaagctcgaacccagccgcaccattcacccctgcacagaccactcccatccgcacactactcaacctcagtcacaacccaccattcggatcaccaaagatcgcaccagttcaccttcgcaccaccaagctcgcaccctccgcccaaccacatcgactcacagcccgaaccaccactctacagccttcaccattccgtgagtcaccatcactcgtccatccatccacaggttcgaactcgccttcaccaccgagccctaatttcgcacaccttcgagctgctgaaattcactcctccacaacccgcaccactgccttcacccatcaccatctccgacgacagcaaccacgcaccaccatactcgacagttccagcacacaggtgaagtgaagagagggtcagggcacgaaaaatttggccaagccgagccaattcctggtttgtatcttgaaccgttccttgaatgaaatggatacttggagataattttgacttatgctgtttggaaattgttgaggtggagaaatattgaatttgttctgtttatctgtgaatatactggtgtgtgggttgatattgttgaaacagcattattgtggctgacttttgctgaaacagaggacaacatgccgaaaattaagagatgtgctcataagcctcctgagagagatgctcgggaagctaagaaatttgtttcaccagctgctgaaaagaaataccttgattcagttagccacaaagaattctatgtcgag

SEQ ID NO: 344687 - DNA, 1976 bp, Cannabis indica
ggaatatacctagctgtcatggaacatgccgtgagtgccatgctgatcagagaagagaacagcgtacaacacccagtctattacattagtaaaagactaatcgaggctgagggccaatatccgttgatagaaaaactcgcgtactgcctcattctagtaacaaggaagttgaggcattatttccaagctcatcctgttcgggtatacaccgaccatacgacaaatactgcaaaagccaaatgcttttgagcggttactcaagtgggcggtagagttgggtaagtacgaaatcaacttccaatccctaacagcaatcaaaggccaagccttggctgactttgtagtagaatgcacgggcaaaaaagaaagcatactagaaagcaaccccgagccagcacctcagccaagcaacaatgaagacaaaccaacctagaaactacatgtggatgggtcggctacagatcaactatctggcatagggatcgccctcgtcatgcctggggggcaacacctgcacgctgcaataaagttcggattcaaggtatctaacaacgaagctgagtacgaagctctaatcgttggactaaaactagctcgggagatgaaggccgaacacattgaaatctgtagtgattcacaactagtggtaaatcatgtatccagagaatacgaggcttagggagaagagatgatagcatatctgatcaaaatacacgacctgcttgcacaattcaaaagctacggtctcacaaaaattccaagagaagaaaatacaactgcagacgcgttagctcgattggcaagcagcaatgtaagtgacaaggaaaacttggtccctatccagttccttaaaaagcctagcatcactggcacggaagagatcgaaatgattgacacatctccaaactggatgacgccaatagcagcctacctcaactctggggaactcccagataaccgaaatgaagctcgaaaaatgagaaggaaggcagcacggtatatcatagtagaaggggtcatgtacagaagaggattctcgatgccattactcagatgtgtcacacaagacgaagctgcacgactcctatctgaagttcacgacggattctgtggaaatcacgccgccggacagagcttatccaagaaaattctaaggcaaggttacttctggccaacgatgattgaagattcgagagcctatgttaagaagtgcgacaaatgccagagattttcaaagataccaagagctccgcccaacgagctgacacagatgcaaagtccgtggccctttgccatttggggaattgacctgatcgggcaattacctaaaggtaaaggcggagtgcagtacgcagtggtagcagtcgactactttactaagtggactgaagccgaaccactggcaaccattacatcaaagaaagttcaagactttatagtgaagaacatcatatgccggttcggactaccgtacaaaatagtctcagacaatggcaaacagttcgacagccaatctttcactgatttctgtgcgaaccatggtatcatcaaaagtttctccgcagtggcacatcctcaagcaaatggtcaagttgaagcagtcaacaaaaccttgaaggatacactaaagaagaaactcgaagatgccaaaggaaactggccagaagaacttcccgaagttctatggtcatactgtacaatggaaaaaacagcaagcggtcagacacaatttgcaatggcgtacggttatgaagctatgatgcccgtcgaactcgagccacgttcccacaaaagattgacgtacaatcaaggtaccaatcacatacttcttgcaaaataacttgatgaaatcgaagaaagatgagcaactgcaaacttaaagttgatggcccatcaacaaaaagtagatcggtatttcaacaaacaagtgaaagatcagaaattcttcgtgggagatatggtcctgagaagggtat

SEQ ID NO: 344688 - DNA, 643 bp, Cannabis indica
tttttagcggttgcagtagtacacaggaattgtcgtatccataagaaaagaaaaatcgcaactaaaaaatatattgaaaataataaaatgataaaagagaaagaggatgatgagataaatttaataaggtccaaatatagttatataaatcttattctaacactgatcatattcacacaaattgtaattctacactactattacagctggaagatgaatatattaaaagcataaattaattaatattaataaattgaagcatatctatatcttcatagcatatcatattatatatttgactaggtagtcaaattttcctgagggttcaccgagtgggccaatatccttttggccattttcccaatttttaacttctttccggcgcttttctttttgggtgcttcttcttgttcattggatgttgtacaatcagaacagttgcaaatgtcccagtatatgtgccctgaagttgatttaaaggcatatataggggaaccatttttatcgaaggatgatatttctgcggcttctgggatgattgtcgacatcatgtattgagttgagaaaactcttggagttgtttcattctttgggaaggatatttcgattgaaccatcctttttggacttgaacacgggatctg

SEQ ID NO: 344689 - DNA, 998 bp, Cannabis indica
gggttcggttctggtcttaggtccgggtcctagtcacagttccaattttgattttagttctgggttttgttccgggtccgggtctaggtcaaagttggggtcagggtccaagtctcagtcgtagtttggatacgggtttttcggatccctatctgggtccaagtctgaattcggatctaggtttaggtattgggtctggtctcaagtttgggtttgggtatgcgtctgggtccgggtttgagttcgtgtccatgtccaggtccaaatcccaatttaggtcaggggcttgatttgggtccgggatcgagtcccgagtttgggtttaggttctagtctaagtcctattctgggtccgggaccgggtccagaactgggtccgagcacgagttttggggctgggttctagtctagttctgggtcccagtccaggtgtgggtcctggtcacgttcccagtcctgttccagggtcctagtcatgttctcgttcatgtttcagttttgggtcccaggtctgggtctaggtccaggtcctgggccatctttgggtcctaatccggttacagttttcggtctgtgtccaggtcttgttcctaggtcccgatccgcttctagtttcggttccagtttcaagtcacgaggtacgggttctactcgagtttgggtccgagtctgggttaagatgttatttgggtctggagctaggttcatgtctgagtttcggtctcggttagggtccaagggtgggtccaatttcggattcgagtttgggtccaggtcccggtcccgttccaagatccctgaccggttacagttcaagttcggttttggttcccgagtgtgggtttgggtcttggtatgtgtccgggtcctggtatgagttcgagtgtgggttcgggttcttgtctaagtcctagatccaaataccgactacgggtccggtccaagcatcgagtcctggatcttaagtcccgaggtgggtcctaggtccaggtttgggt

SEQ ID NO: 344690 - DNA, 1072 bp, Cannabis indica
agatcctggtaaaataaattccaacaagcagagggtacttattcttcactgtcaacttgtttaactctcagtaatcaatgcacatttgtaaggtttttctttttcacgaacaaaactggtgcaccccaaggtgaagtactcggtctagtaaattttaaatccatcatcccctgtaatttaacttttaactctttcagctccgcaagtgccatcctgtagggagctttcgatacaggctctgcccctggtattagatcaatctcaaaatcaatttcatgtttcggtggtaaccctggtaagtcttttggaaacacatccagaaattcttgaaccactgggacatgctccggtcccgcttgtggctccctggtaatatccacaacatttgctaagaagccaatgcaccccgcaaacaacaaatctcttgccttaaaagctgaaattaagggaatccgggatccctgcatcttccccacaaatacaaaaggatcctctccctcaggctgaaaagttaccattttctcttgcaatcaatagtggcgttatatttttcaagccaatccatacccaaaataacatccaagtcttccaaatttagttctatcagatcaactgataactcccttccttccacaaatattggaagagatcgaacccacgtgctggagataaccaactccccagtaggcagcaaagttcaaaacctctagaaagcacatcactaggtctattcaacttctcaattattctacttgaaatataagaatgtgtcacaccagaatcaattagaacagtcaataaagtaccagcaacagaaaagctgacccgtcacagtggaaggaccagcatcagccttagcctgagtcagggcaaacactcaggcaggtgcgggtgtttcatgtgacccactaccccacagtggaaacaaaccctggcctgacacttgccttgatggcaccttttacatctcggaaattcagggaaagttcgccagtttttgttcccaccacgacggaagccttgactaccctggaaccttttgtttgggcctgcagttgatgattcactaggt

SEQ ID NO: 344691 - DNA, 618 bp, Cannabis indica
attttaaaaacaaaaaaattaataaaaaaatgttaccaaatgcactttaaaatgttgtctttctagttttgaactttgttttttactagtgtatgataaggaggatatttatcttgaagtgttgggattgttgaattggttctgggatgtatgattgtgagtctcttttatattattacgattgaactagtcttattttatttaaatttgccctctaggaacaatatgtattcatatcagtacatgaattacttaatcagtatttttttttctctgagaactgaaatcatcattttgttgctctaatggaaatgttcctctattccgcaggcccatagttagaaatactaaatcgaagctaaagaccaatcaaatttcactatttggggtacaccaaatcacccatttcaggggtgtacccaagatatttcctattaatacccttaatatttttaaagctatccacttacttatttatacatttataactctcatttatatatatatatatatatatatatatatggtatactcttaatgggtattacctattaatgggtatttattattagtccattagatcaaatctaatggttgatattataactattaattaaa

SEQ ID NO: 344692 - DNA, 538 bp, Cannabis indica
aaatttgaaaaaaaaatatttctgcatgtgatttcggacgtggagattgactaagaggttgtaatagaatattgtaattagcactcctctttttcacgtgtacttcattaatgcatgttattagtttcaaaataaattaattaataaataatgcatgttattatgtgtaatttttgtcacaaagtgtgggatattttatgctgtctttacgaaattccatataaattgttgaccagaaatattttgttgtacagcagcgttttcttaaatcagaatcagaccaaaaagaaaaaaattgaaatgtcaaatttcagttgatataaattacaccaagtataatcatcagtaaatgataaacagttagtttagctaatgagtgtctaacactattaactattttaagacaaattaaaagagatactaagtaacagtacttgcttctccatcgttctgatcctccaacaaactatcacggtaaatatctctctctgtttttcttttttctttttcgtagactgaattcattccattttatata

SEQ ID NO: 344693 - DNA, 547 bp, Cannabis indica
taaacaactgctaatttccaaattaactaagcgggctttacagttgcacttgattacgtttgatttcccatattcacttttgaggcgggaagtcgaggcgtctaaggttcctttgtatgcagttatcctttttgcctataaatactcagagtgctggcacattactcattttatcaccgttctttgttaagttaactccagagcaaaaagagagagttttctggcttcaaagttgtcgaagtgcctacagacaattactcgcttgcttgaactcggacattcgaatctttgagtaagtttctgatttcctttatgcttttcgttgcatgtttacgcttcgaatgtagctatgttgtagaaataattcttaggaaaccctagggttagaaacttctgcgactcttcttttccaagtccttatgtttgcttttagctgtaaagcttatttttgaactgcattgtgtctgtcttccatcttgcttattctaagtttcatgaaatttttcgccctaactcaagaaaactttttgacttcttgagttttgac

SEQ ID NO: 344694 - DNA, 601 bp, Cannabis indica
aagaaatcttttacatgcatgtaaggatcttctctttctaaaccataaaaagaaggcaacaattgaatgattgatggtttaagttcaaaatgagtggcattagtagtaggcaaaacaatgcatgatggagcattagatgaaataggtgaaaaatattcaagtagtgttttttcttgcgcaatattaggttcttgttccattatgcttaatttttcaaaaacactttcaatttcacctaaagttactactctttttaccaaacgatttttagaatcacgttgccaatgatgcatgcaatgtcacaaatttcacaaagtaacacaaaataatctcaagaagaaaaatttctgatgtggaagatcagttataaaccgcaaccacagagcatacttataacacgaagagattatgatattttttttttaaaaatttttaaattttttaattttttttggtttgacttgttcccaggcctatttgattccacttactcaaaacttaataaaaactccccacgggttaattattaagtgtggatgggaacgcttgccaaatttcctttaagcaaaaattgcttatgttgaaagaacaagctttgttt

SEQ ID NO: 344695 - DNA, 716 bp, Cannabis indica
cgatttgggagttctttatatcattggaaagctcgttccgagctctgtatcattatttgaatttgaaattccctaattaaattttatgagttgaaaatcaggggttaaccctaggtatgaaaaatcccagatttgtgtgactatgattaccggcacctgatcaggatcaccttaggattcggaatctctttctattgctggacaacaggtaagacagtcattagcacgtagagtatgcacagtggcgcttatattgagaatgatatgcatgaatgtttagtaaccgggattagggttattaccctaataggaacagtctaatagcctagggttattaccctagcgatatatgtgtataaatgccataccatgttaattgaaatgagatttagggattatgcgcttaagccataatcaagttggactcggtaaccataatcgagatgaaccaattctaaggccttaatgtatttagacgtgtgagagcaacccgtgggtctacgccatgtagatttaaatagatgtgtgagcgcaacacattggtgtacgccacgtagacatcaatgggcatgtcagtgtgatgtgcaggtctatgtcatacagacttatgtgaatggcatatttgtttaaatattatgatgagcatattacctttgttatgatttatactgtcttgttgggcttggctcacgggtgctctactgtgcaggaaaggg

SEQ ID NO: 344696 - DNA, 644 bp, Cannabis indica
cacagttccgattccggcctcccgcgtagggaacttcaggcacaggtgccgaatcgatgtgactgcgccaaagtctaccaaggccagtcggcgtatttaaatgtgctctggggggtgtccgggcacaaggtgactgggagccttacttttcccattgggataagtgtcgtcccgttaaaccctgtgagctgggacccactaggtgagaggtcccggtccgtcaagcctatcgcggtgaaggcttccttgaagagtaggttcacggaacttccattgtcaattaagactctggccaccactttattcgcgatgggggtctctatgaccaatgggtcatgatgagggaagcgcactgtcttggcgtcttcttccgtgaacgtgatgggttggtccatcaaccggggcctttgagctgggagttgagtaacttcccaaacctcactgtgtttcgcggcccctgcgtatcgcttaagctctttgcgagtagttcctccgatatggggacctccggagatcatggctaccctcccattaggccggggcggcagaccggggatgtgctgggcgtcgcccgtgggagcagctggagccaatgcccctgctgtaccccccggtgttccctgaggcatacccacagtcgcctg

SEQ ID NO: 344697 - DNA, 806 bp, Cannabis indica
catgtgactctaacgaccatccaacgtatttttcgtcgtcaccgagtaaaaatcataaaaattacataattcatatgtaacacaaataatacctctagagtttaatagaatctccagaattaagaaattataactttagtgcccacttctaataatgggacccacaatcaaataaattcatgaataattataaaaatatcaaaaattaatggtaattgcctttactaatccatattcgaaaatgcggtcattacaagtaggatttaatagactcaaattcctctccatgggcatgtcatgcattttatgtcaatagtcgatcagagcaagcttgaggaaagcaaaggttggtcatcaactacaagcccgtaaatgagttcttagcagatgataaattcgcaataccaaataagaattcattgtttgccagtttatccaaagcccatatttttttgaaattcgacctaaaagcgggattttggcaatcaggcatcaaagcagatgactggcccaaaatagccttttgcattccaaatcatcatttctagtggacactcctaccttttgggctcaaaactgccccttccctattttaaaaggctatgaccaagatatatggcccgatattggaaaaggctctcatctatattggcaatatttttcttttttctcctgatgcaaaagcccatcaatcgttattggcccagttggcttctatcactagatcccatggcatcatgttgtctaaaaagaaaatgattactggacaaacgtaaacagaattccttgggatgaaattatccaaa

SEQ ID NO: 344698 - DNA, 396 bp, Cannabis indica
actaagcgggctttacaagtgttgtcttctgacattgattttgaccttgttttgttttcaagccttatgaagttgagctttttgcatggcaactccaaggggtcttcgagtgctctttgggagcagataaagaccatggaggttgatctcttggcaaaaggcaaggctttagctgatatagaggctcttggcatgtagtataacaaacttgtatgattggtttgttgaaaagaacaatgatatatctgttttgtctcttgagcatattgttgcacagtacatccatggtggtaagatattatgtgtcactccttggcactttgtcgatcacaccctaggcataggcgtgctaggcccgcgcctagggcccactcattttaagggcccaaataaaaa

SEQ ID NO: 344699 - DNA, 614 bp, Cannabis indica
gatcgcgaggtggaatcaatgatggcttccaggttgagggccgagcaaataagttgctcacgcataaagtaggaaattcactacttagcataagaggaaaatgcgaagcaatgtaaacccctaataaactttatgcatgtgattgtataaattgtgaatgaaatgcaagcaaacgtccacatattaaagtttaaacttaaaagtatgaaaaacaaagttggccatccaactttgcaaatccgcctttacaaaaagtgtcgccaggggcgaaccattgtcttagccaaaagacaatttttaaaaaaggaatgagaaaagggagataaataaataacctagtctacatgctgggagacttggacagattttcttcttcttcttcttcctcaacgtcgccatcttcttcctccatcttggtcttctcgcaaagagctaaagttttctcgtccttctctgttggaatttatttttacctaggatcttagatctactcataggtatgttgtttaacatcctaaatatgaactttctaaaacgataataaacaacatataaatttaaaaaaccatacatgttgcagctgaatgtaatgtctcttccactcagatcactaa

SEQ ID NO: 344700 - DNA, 577 bp, Cannabis indica
tttgttaagtgttggaaaattcatcttgaaagcttggattcttggtaggttttgtgctcagctttgtttggagattgaggtagttcttaaccccttttctttgttgatttttcttgctgaaatttattattcaaaatcatgaaaatagtgtatgatgtttttggtttgcttgtttggagatttgttctgtaatggattatgttggttgggttctacatgagcttttagggtaattttcatgtttgaattcaggtcttgtttcatgtgttgttgctggaacaaaattaagtttgaagcttgcttgaagttcaagttcttgattaggaccttatgatgaattttgctctacgttaggagctttgatttcatgttgttgaatctaaatttctatgcatgtggattgaaattttaagcttaataatttgtggtttaacttccttttgtggttgtttaattatataagaggttatgttagatttaagcatgttttggttgaaatggatgagtttagggggctgaaattctctgttaaatactgatttttatgttgctggttttttgtgttgttggagagtga

SEQ ID NO: 344701 - DNA, 980 bp, Cannabis indica
tttgttccccgattgtctgtactaacaaggccactcagcaatatgctcaaaaagaatatccagaatggtcacattaccaaacagacgccagtgaccaacattggggtgttgtccttctagagtaggatgagtagggaaaaagacgaataagtggatataaaagtggtcacttcaaagattcccagctccattattattcaacactcaaagagatacttgcaatcaagatgggaatcacaaaatttgagttctacctcatcggccatcatttcttagtggaaaatgattttgctgcatcaaaaggcatgataaacataagaaataacaagacaaccaatgctcaacctttgagactggcaacattgtttgatcattactcttttgaaataaaacaccttcccagaaaagaaaatattttagccgaccatatatatagacctacgtctataaatatggtctcctcacatccacttaaaaccatccccttaatcagccactacttcccatacaattccatacatatatttaatggcatcattatcatcatcacaaaagaattgctcatttccctgctcattttccgaagatgcaaagctcatcctttaaatccaatcaacaaaagaaagggcctttcacagggctatttgtactcacaacgaaattctccccaaacttcgaccctattttaaccagggttttctaattcacccaaagtatccttttgccaatctagtcccctttcggactgcacttctcactccaaaatccatagctcatcttttttggtacctaacatgcatctgtacgatggctatcgaagtcaaaactatggctattcacactactatacagtctttccttgaacaagaaaaaaataaaatatcctaccaaatccaaatggacattttgtcttggtacgctcctctagaggagtgaaaaaaaatactttgggatgaatgggaaaaagtttgcaacaatag

SEQ ID NO: 344702 - DNA, 530 bp, Cannabis indica
gatgactgctcagaggaagcctgacacctcccggagatgctttaatgccatcttgatctccgagagcatataaaaccttgcatgccttctccgggaggcatatccaagataatgcctttctttacaaagacttagctattaagttaaatgctaaaccctttgtgtccacgtgtccttgtctggttggtccacgtacattgggcaaaatcaggggcaacatttacccccaagccttgtttaatcgtgaaatgaacaaggcttgcttagatgcctccggttggctcctcgatttcctggcacgtgctttgggcgcgtgaaggtgtatttaataatcaccactactgcagcgattcactttttgcaggcgtgtatttaataatcaccattactgcagcgattcactttttacaggcgtcgattcgtttcttgtccattaattgatacggcgcattaattggtgtcagacggacacttaagcgtttccactgccttgatgacgaaccaattcagccgttggatcctgggaattc

SEQ ID NO: 344703 - DNA, 540 bp, Cannabis indica
tgtcggggtgatgttaacccgcctcaagctgcccaagccaatcaagaagcctagaattgggatgttaggtttgctgaaatgcaagccagaatagaggagcaagataatgagattcagagattgagacagcaggatgctcctgcagtgcctgtgccagaagttcctgtggcacccgcccctgctgctcaggcccagatagtagtagcggcaagctgaatgggacccctgtatgaaaggttccgcgagcagacacctccggtttctctgggaggtccggacgtcgtggatgccgagcagtggctatcaggaattacgagaatattgaattttatgagtgtgacggaatacactaggcagtttgatcagttggcgaggttggcttcgggagttgtgccaaccgatttcagtaagaaagaaaaatatcttgatggacttaatgtgaagatcaagtatgaccttatgatcactaccgacgacaagatcacctctgctgagacggtggagaaagcactgcgagctgagggcgcagttggatgtatg

SEQ ID NO: 344704 - DNA, 596 bp, Cannabis indica
tgatgtcgtctctttttttataacgacctccaacaatctcaatatcaccgacaccacatgagcatccaataatatctatatataatataaaataataaaaagatgttggaatattgtaaagatgaatagttgaatatatttattaaatatcaataaaagataataattaaatgaatacctgagagtattgtgttatcattaacacgtaaatgagtcaaatttgaagttatgaattgaaacccattgatcggaatgttaactatttctccttcttgtctctttactgaagttgtaaccaaaaataaaattttatagtcatttgaaagtggtctgtactaacctgtggttgccacaatttttaaattttgcagatagtacaaagaaccttcacttaatagcttcttaaacttagaaattaaattttttcgtattgttgcatccattagattttcctgtaggataaatggtagacacattgagtatttaataattgataaataatcaaaaaaagtaataaagggaaaatatgaataaaataataattaccttttcatcaataaaagtcatatctgttagacttttatttgggcttacat

SEQ ID NO: 344705 - DNA, 538 bp, Cannabis indica
tttttgtaaaagaaaagcagaaatcccatatttataaaacaacaataagttttgccggaaaaattgccggcaccggaaaagtttccgaaaaactcaccgtcaccggaaaagtcgcaggaaaaattatagccgccggaaaagtcaacgtcgccggaaaagtcaacgaaaaagtcaacgtcgctggaaaagtcaccaaagtaaatatgtcatatataactaaaaaatataaccggttatatgaataaaaactaataactcaaaccggttataattgaaatataaccggttctgtaaaataataaataaatataaataacataaaataactcaaaccagttataattaaaatagaaccggttctataatagtgttataatgaataaaaacaaataacacgaaagaactcaaactagttataactaaaatagaaccagttatataacataatgaatacaaacaagtaacacgcaataactcaaaccgattataattaaaaacaaagaagaaatcagttcttaaaacactgaaatataaatta

SEQ ID NO: 344706 - DNA, 767 bp, Cannabis indica
tgatgaccgaattgtctgaggatatatatctgtacggcgatcaagctttcagctgggccccactcctcgaatatgatttggtacttttttgagagtttatggaaaagtcatcatttcacaaaattttcttttcttttctttttttgaataaataaaaaaatcagattcaataggaagaaaagggacaaacccaacaaataaaggccaataaatttcacaaggagaagatcaaataatggtttcaaaagacaatgatcaaaagaaaccacaaacatctagacaaaatgaaagtaaagactatatgttaaaatttgagataagaggaatgagattttatctcaaaaccaattaacaatgagaggagtagttcatatatgacaatttatttccacacattagtaacgtgagactaactctaatacactattttcacgtttggacctggaagaacgacctttaagagaccacaaagccgaacgtgatatttgaaagaatcccacaaggactaaaaaaatttgtgaatttttggaccggtggtaatttgagatcacaacgaatcacaagtgactctgataccatgtctaaattattaatatgtaataaaagatattagttattatactattacttcaaacaaaggaaagttctagcggtgcttctactttctaatcataaacctcaattttggcttctttaaccagctgccacacacaagttacttactctgaatttataaccaattacaaatttttaacactacaaaaagt

SEQ ID NO: 344707 - DNA, 573 bp, Cannabis indica
agtgtgtgacagatttaagaaactaaacattttttggacatggggtggagcatacatagcaaactccaaaccttcctagatcttagtctattgatactcttcaatgggggtttacatatcgaatcgtgttctaaccaaaattgtttctcaaacatattttgagttatgataaggttgaaaaccgacttgatgacatgtacacattttataaatacccatatatagttagagtacaattgtcaaagaaaagatctggacccaaaaccataaatgagcatttcatccgaaaagctataaggtttaagggttacatattttattatccatctcacaacactagaactgtggaattaagaattgacttgatcagtgggagtgatcaatctaggaacctagtttctgagaaagatcattcatattttctcaaacttccacctcaagtgttagattaattatgattcacaacaacccttaaggttaatggttattgagaattcataactaatcattaataatctacaagtcattgataaaattctaataagttatgttatttagtaattgcttacaatt

SEQ ID NO: 344708 - DNA, 678 bp, Cannabis indica
ataataacaattcagttattatagctagactatagtccaagtaattaaagtccatataactatttaaatatttaacatcatctggatcaattctacgaattaggtttctttattttcgtttaatatttatatctattgatcattttgtttttaataatatatatagtctggtataatataataaacattgagtttaagtgggtctttcttttggaaatactttatttcctttaaataaatataaataactttaaaatagacaaataattttagttgaattcatgtgatgtaaccctaactataatgctttttttctttgtttaataatgagtcatggttgtatatatataaaataaaataatgtaatagccaccatcataatttaatatcttgttgctgcattattcgacattattatattctgaaagcataagagaaaaaaagtagattgaatacaatcaatcataatattttatacacttttgtttcaatccttcattttctttttatatttaaatatatatatatatagacatgattttgtctcgcgatgtattttcacggaatgtattttgtgatgtacgatagccgttaaatggatgagttatttgatctgatgagggctaggggttattctagggataattaaaattaaaaaatggtaacgcaccctgagac

SEQ ID NO: 344709 - DNA, 987 bp, Cannabis indica
aaaactattacaaaggtcatggtgaaccgcatgaaacccttcatgaatgatatagtagccgacacccaaagcgccttcataccgggtaggctcatctcagataatatcttgatctcgtttgaagtgcttcattacttaaaaagaaaaagaaaagggaaagaaggttttatggcacttaaactagatatgagcaaagcgtatgatcggatcgaatggccattcttggaagcaatgttaaagaaacttgggtttgaagactggtggattcggttgttgatgaaatgtgtaacttcggctaattatgtggtggtccatggtaatcacgaggtgggtccgattgttccaactcggggtattcgtcaaggagatctattacctccgtacctctttatactttgtgcagagggtctttcggccttgctccaaaaatatgaaagaagaggtctcatccatggttgtaaggtgtctaatggcgctcctcgcatctcccatatgttatttgctgatgatagttacctatactgtaaagccactatgttggaagcctcaagaatgaaggaaattttgcacaagtttgaagctgcgtctgggcaaaaagtgaatttcatgaagtcatccatcttctatagcaccaacacatcttcggatgttcgagacaacatcagcactctacttggaatgtttatcgcaggggaaggaagtctttatttgggactgcctagtacgctaagccgaaacaagtcagcggtcttgggttatcttaaagaacgggttcgaaagagggttgaggggtgggagatgaaattcctttctcgtgctggcaaagaagtgttgatcaaaacggtagcgcagtctctcccaagctatgcgatgagtgtatttttattacctttggacatcacccgtgatatggagaaaactatgaataagttttggtggcaaggatctaataaggcaaaaaatggcatccattggttctcttgggat

SEQ ID NO: 344710 - DNA, 585 bp, Cannabis indica
ggtcctaaaccctcgccgggacctgagacccgcgacgcagaccaggatcaagaccccaacaagcacccaaacctgaacccagaccaagactgggattgaaacctggacccgaactaagaccgagacctagaataaaaccaagactcgtgacctgaacccgaacctggacctagaccaggacctaggaaccgttcttggatgggggacctagactacggacctatgcccggaacccagacccagatctaaatttgggactcaaacctgaaccaggacctgacctggacccacgaatctgaagttggacccagacccagacctgaaacctgcccccgacccaaactagtacaagaacctggacacaaacccaaaatcgatcctgaacctgggacccagacccaaaatcagacccaaacctagacctgcacccggacccaaactcgaacccagactggaatcggatcccaggactagacccagaactaaacccaagctcagatcgagatcgaaacttaggactcagactcaaacctagaactagacccagtgccctaaccacaactcggagcccgattccgacctaga

SEQ ID NO: 344711 - DNA, 1318 bp, Cannabis indica
tatttactaatttaataataataataataataataataataataataatagtattaataataataaattaagcaatatgctataatatatttacctatattttcattattaatataccactaataatattcacaaataatagaatattaaattatctccaataatttaattatttatctggcattatacatacccttaaaataaaataataataaaataataaataataaattttattgtcacttaaaaaaaaaaaatcatacaccactaaactcataaatattcaaaatagtaaattatccccattgacaaacaaaataaactaaaagtaaaaaaaaaattaattacccaagaaagcagatattacaattatgccctcctaaaaagaaatttcttcccgaaattctactcgattcttttttttttgttttgaaagtgaagattcaatgtcttataccttagcacttgtcatcactctgtcctgcttctttgattgcgaagaccctcgctggaacatatttatcgtcttcctttgaatcttccttgttctcagtttgtccccacaatggacaattacgtttaatatgaccttcttttccgcatttgtaacatgcatttgccctacactctccgagatgacgtttagtacatttaggacattctggaacattgcgtccattgtttccattagatcggtggtcgttatcagttttgtacctcttgtcttgacttgactgtccgggctgatcttgtccccttttcttgtggtcattagaattggctgcacctttcttagattccctcctagcagcattttccttccaaattttgttttcacttcgctcagccgtaagagccatttcgacaacttgagcataactgaattgaccccttgacacaatctctacatcccgagcaatcattggtttcaggccttccacaaatcgatgtgctcgcactctatcagtaggtaccaaatctggagcaaattttgccagtctatcaaatttttgtgcatactctgtaacagtaaggctcccttgggataatccagtaaattcatcaacctttgctgctaacactgctgagttataatttagaattaccttcggaatctaccacaacaggaggaaaccatcctgaaagaaccatcctccatgctttctcattttgagacttgataaaggctctcattctaaccttccaataaggatagttggaatcattgagcaatggtgggcgaacaatagaagttccttctgcaaagggaaacatattgcaaaaacacaagaaaacattaaaaggaccacactaagag

SEQ ID NO: 344712 - DNA, 1260 bp, Cannabis indica
taggaaatatatattttacttttgtagacatttttgtagcgcctacaaaattaatctcatcccttcactcttttgcagtccaattcactaattattgcgtctgtaataacaactaattatggacgcatgaattgaaatgcccctagaaaagagttgattcttgtagtttgtataaacggtacgaatggaatcacaattttaggagaattagtttcattatcgctatcaagctcacaattttctaggaaattaggttatgcattagtttcattgtgttttttttaataaaataatattatgttaacggaatgtttgtttttttgaataaatttttgttaaaaaaataatataaattaattggaatattctgttaaagttaacggaggaaacgaaacaacatcgttaaaccaagaattgtcgttagatagacacttttaaaccctaaaccctaaaccctaaaccctaaaccctaaaccctatacttgttctattttcttactattttattatttttttaaaaaaattatatttaaaaaatatcatcacaactctaaattgaaaaaagatttttttactttattttttataattttttttgctatcacaaatcactatatatattctaccttatttctcttaatttcatatttcaatttactacttaccttctctattttctcttatattctctcttcttctctcatgatggagtgttcttttcttagtgacttaaatactgatacagatagttggagcataaaaattagagtttgtagaatgtaggagtctcttaatactaagcaagttactactaattcttttgccaaatactgtataattaataacatttagatatagaaatattctttctaataatgccatatttttttataaattttatgttatcaatagtcatttaattaattaaactttttttttattgaagtgattttttgtatacggtaattttttttttatatatataattgagtcttgatatgatttttattgataagaaggtgattattattttattcatattttccctctattacttttctttaattacttatcaattattaaatactcaaggtgtctaccatttattctataggaatatctaatgcatgcaacaatacgaaaaaatttagtttctaagtttaagaagctattgagtgaagggcactcttagtactgtctacaaaatttaaaaaattgtggcaaccacaggtgagtgtaggctactttcaaatgactata

SEQ ID NO: 344713 - DNA, 492 bp, Cannabis indica
caaagcacgctgaaaacactcgtgttggtttgtagggtcagtcgtcattccaggaagcagccaaagtggcgtactcgtgtataagagccaattattccgtgggtgtaagggcccaatggaggcttgaagcggggacgttacacttaaaatatcaaaagtaaaaggtttaatcgattcatagaaccatcatctcccttaaaatattaaaactaaaaaggaatcgaatacgaatttcggagggatgcctctctaaaagaagtattgattctaacattcaaagtgtgttctaagtgccacaaatacaacgtaaggggctgagcccagcctaaaaggctacaagctcccccaataaaattttaaatctagaaaaaggtcaagcgtagcctaaggggccacaagctcccttacatccaatgagtaatcgatatgaggaagagaatgctctcagagctaatactcactcaacgaagaggttgttgggttttgtgccct

SEQ ID NO: 344714 - DNA, 868 bp, Cannabis indica
gggggataattgtaatcaccgctctagtaatttggaagtaaaggaaattagcactaatttcacacatttttataattatttgtgaatttaattatttatgggtcccattattagaaatgggcattagagttataatttctcaatttcagagattttattaaactctagggtaattttatgaattatatatgaattatgtaatttttgtaatttttggtcgacgacaacagaaagtgcgatggatggctagtttgatcacatgtaagtttaaaaccttatttcttagtgggatatttattggagaaaaaaaatatcagggtttagcggggttatggtttttgaccattttaccgctagttttgagaatgcttaggttataacctagagggtaatttagtaattttaatagtggagagtggtggtagccctaggtgttgacacctagccagagaatattcagccaaggtttaattagataaaccattatttcatttagaaggaaaataagaaaaataagaaaaagataaaccaaaattcaagagaagctctctctttccttcctctctcttcgaaccagcccagaacaaaggaggttgttgctaatttttgggtgttttcagcaagaaatcaagggaattcaagccaaggtaagccctagcatctctacctcttagtttttgaagttgttacttggttggtatatgtaattttgagaattagtggttgttagggttaggttgagttgtagttcgaattatagggttcatttgagttggtttcaagttcttgcagttggttttagtgtataatgttggatttatgcaagtttgggtttaaaaacctaaactttgatctttaatggcatatt

SEQ ID NO: 344715 - DNA, 898 bp, Cannabis indica
gtaatgatgttgaacctaataactaataattattttttttaatttttaattgtatcactttttaataacatagaaaaaaaaactagcataaaatttagtatacgtgcctagcacgtaactttttttctagtatgtatatatatacgtataggattggttattattattattattattattattattattatttggatataatgcacctctaggtgtagaataggatagatagatatatatatattaaatagtaatataaataaatagggaggaatcaaattagttagtctaaaattcaaaatttcaattatattagcataatttttatctgattagttagatttttattttaaaatttaaacctattatatgatatctcatatacacgtatatattcatatgaatagttttagaaccctatcagccatatatctaccttattctcatcatctctcaaaaattttatcctctatttcaccaaattaattgttctaatcttaagagcttcgaggtcagcaatcaaccactgttgttttctgatcatctttccgtgtcttcaaaatcttcaggtaaaattcgtagttgtgtttttattttcgttttcagagaaatagactttcataaaactaccatatctctctccccataggtccatttttagtgatctaggtaccgttttaaagataatttaatgatctatatttttcatgcagagactatttcctaattctgaatatttcgatgtataaaaaaaaatcatgttttctatgctagctgtcgaattacagtttttctaaatttactttcttgatattgcctcggtgaaagtacgatatctctctcgatatatatataatattttgtcatcggttctagtaccgttggaaagataattcaa

SEQ ID NO: 344716 - DNA, 548 bp, Cannabis indica
tattaaaataatacttaaaaagtattataaaagtgtttttaataatactttagtataagtcataaaaaatattatgaaaagtggcatgacttttaataacacagcctttcttaatacatcaaaaagtatatggaaagatatttataatactttttggatattataaaaaacgttatttcttgttgtgaggacacgtgttaatataaagggaatatggatcgatgaaattgctttttatggaataactcattaattgcgtaagtatcagagtatatttgtaacatgctgactgtaaggtcttatgcgaggaatcaatatacaaactgttacttagcatactagcgagagaccatatgtcgttaagtgcgaatagcgaggcatcaagtacgttgtatctaggaagacaaaagtgacacatatcaactttggaagcacttagtgtataatgaacaaactaaatgtaacagtcgggttggctcgagacctagtaagcgaggtgcctatctcgttgtgggaaggcttcctgtaatttcacccagttaacttca

SEQ ID NO: 344717 - DNA, 452 bp, Cannabis indica
acccggtgtttccccttacggatcacgggactactgactgtcacaaagctgatccaggggcatcagtcggtggaagactccaacctttccaaagtcatctgcccgaacgtgagggttccggccgtggagaaggtactccgggaggacatcatcgccacaccggaagataagtgccagaatcacctcttccagaaggcccaggagcaggcttataataaggcccaggtggccgccagaaggccccttcgtatcgggagcccggtggagagaaggacccccagaccaaggcctgcggtccagttgccaaatacgggtgctccagatgccagcacttctagttctggtaagtcccctttaatgatacattacatccctcctgtccgtgagtatgctagccttaggcctatagggttcgatgaacgtctccataggtttaggatgccctccactcg

SEQ ID NO: 344718 - DNA, 616 bp, Cannabis indica
tcaaggttgtgagtgagtgtttatatatttatatattatgcttttgttatatatatacatatattatattacatgtgttgtatcttcttcttctacctttcttatacatataatatatatagtgtatatatattatatattatgtgttgtaacatttatttaatctctttgttggtccttgtattatattacaatagagttgtaatatcttgattttcttccattgtaataatatctctaacattcaaaagcttatttctttttaatggaagaggtgataaatcaagattgtgagaatacaaggataaggattttatgttaaaacgattcatgagtgagtatggtggtgtgtattatgtgatttactatattttatatgatagtaatatatataatatatatatgagttatatatatgtgatcatgtgtttatatcatattatatatatgatatttgaaatttatatcatgttattgtatgtatatatgtgagatatataatatataacatgtatatatatgagtaatatatattatatatatgtaaagcatgtgatataatatatattagtgtaattaaatatgtagaaataaatattttctatgtatttatatg

SEQ ID NO: 344719 - DNA, 482 bp, Cannabis indica
tagtaaaaagagctttttaataattacagagggcatttttgtcaagatcactcttggcaaaaatgcatcttttgattctggcagttgtacggtttcgagggtcattatgaatcgtctcttcatattctgcgcttctcccaactgttggatttctcaatccttaactttcttgtcactagactttgtgtataaaagggcggctcaagcttgtcattttttacaaacctttggctttttagtgagatccattttcagaatggatcatctctttcctgctagaatgtgccttctgagttcagaagttcaccctccaaattcataataccagaatgcaccaactattttccattagttcccaaggacttcgagcctcaattggagtcggaaacgatggattccaaggttgaggagcttccgatcaattcaaaccagaggatccccgtagcccgccatggacgatcctcacaagtgatccttgaggg

SEQ ID NO: 344720 - DNA, 827 bp, Cannabis indica
tttgaatcaaaagttatgatgaaaacaagtttgaggcacaggggtatgcaaaggcatacccctgagcgcgcgtaagctgggaaacggccgagaacagaggctgcaagcagcctcgggccacgggcgcgagcttcccttcagacaagggttgtgcccgagaaacctcggtcagcgccttgtctgaaagggcgctgtccgagcgtcccagaccctgggcgcgcgcgtgtgtgtttcaaatcctgatattttcgttcaacttcaaaaaatcataactaattcataaaaaatccaaattaggttctgtaaaagcctaaatttattaattttttgtctactttccagaaaaaataattccagatcgaaataaaaaatatttcagtaacatatattgcgatttctaaactatcatcaaataagcacataaaccacatgaaaccatccaaatcaacacataacatcgttttaattcatatttcatgaaagtaaatcattaccatggctctgaggccagttgttggaaatattttaccaggatctagatttactaacaagtatgtttcattaacatcctaatatgaattctaaaacaatgaaataaacacatataaagtttagtaaaccttacattgggtgcagcggaatataatgactccttccgttcagatctctagcccttgattcctttctgtagcagagcatcaccaagatctgaacctggatctctttctctccttcctttgatgctgattctccttcttgttgtttggaatctcctacagtcttacacactatgattgagataccacttgatgtgtgtgggcactcac

SEQ ID NO: 344721 - DNA, 640 bp, Cannabis indica
aattaaaagtagaaaaaattatgactaattataagggctattttttaaaaatataggaaaaatttattaaggttatgataaatatgacataaaaagtaaatgacactaaatatgtcattatctaaccaatcaaactaaaaagagaatctgaattttaagattcataaaaaataaaaatttaattgaattaccataaaaatattaaaatttccttcatttcatatttatttcttttaaaaaataaaaaaatgaaactagtgatcgctaaaattgtcactcgtgccgaaaaagtcactggagtttgctgccagcacatgaaaagttgtcggagtagcttctggtgccgaaaaagtcgtcgaagttgccactggcgcccaaaaagtcatcagaattagaattgtcgccaaaaaaatcacaggaaaaatcacccataaaattggtttactgatgaagaaaccgatcaagaaaccagttctcttggtgattttaccggcgacaatgccaattctgacgactatcttggagtttgctatcggtgtcaaaaaattcgccagagttattgccggcgtcgaaaaattcgtcagaattggcattgtcgccagcaaaatcaccgaaaaaatcaccaagaaaacggttcttc

SEQ ID NO: 344722 - DNA, 545 bp, Cannabis indica
ccctttatcagcaagacaactctcatggctatgggatagtagcaagggatcaccaaggtaagttcttagaggccaaaacatcctactgttatggtacacactctgccgaagtgattgaagccttgggaatcaaagaagctctaagctggataaagaacaagggttggaagaatgtggagcttgaaaccgacagtctcttatcagtgcaagcaataagaagcaaccaaaaaatgtcctctctttttggtattgttatagatgattgtcgcttgttattatctttcttacatgatgttaaattacgctttgtcaaagatcagctaatcgagttgcccatgctattgcaaggcactctcgatttatccctagtggttgtattctagagcaagatatctggcccgatttgagggatatcttattttctgaatgcttttgatttaatgaagttgatatttcattcaaaaaaaaaaaataacatgcaaaaaaaaaaacatactacttacaattcatacatctagtatttatataaaaaaaaaataaataaa

SEQ ID NO: 344723 - DNA, 797 bp, Cannabis indica
tctttggagtcggttcagggaaattcctcgggtttatggttaatcagcgaggaatagaggaaaaccctaggaagatcaaagcattagtagaaacgcaatcaccgactaagccaaaaaaagtccaaagtctcacaggtaaagtcgccgctctaaatcgttttatatcacgatcctcttataaatgcaaagagttttttcagattttaaaaggcaacaagaagttccaatggaccgagaaatgcgaagaagcttttcaagcattaaaaacgcatttggggcagcccccaatcctgtcaaaacccatatccggcgaagtcttatccgtttacctggcggtgtcagagtatgcgattagctcggtgctaatccgcgaagaccaaggtcaacaatacccagtgtactatgtcagtaaacgtttgttagatgctgactcgctatcctcaaatggaaaaactagcatttgccctggtaatatcgtcaagaaaactgcgaccttattttcaggcccatagcattgaagttttaacaaactaccctttgaggcaagtcttagcaaagccagaggcatcgggaagattgttgaaatggtcagtagagctaagccagttcgacatcaggtacaaaccgagatctgcgatcaaggggcaggccttggaagatttcattcttgagttctgaagtactgaagtggcactcgtaaaagaaaaaattgacactgctgtactaaatggagaaggatggacattgtacgtcgatggagcttctaatagcgaaggttccggtggtggaatcatact

SEQ ID NO: 344724 - DNA, 564 bp, Cannabis indica
gttgtcaattcaaatgcatgaaagaaaaaaaaaatattatggaaaacaagctaatttcaaggttaagcttgattgaaagtaataactgaagatcaggcaacaaaggtgggattagcagtgaagagacaatagagtggtataagaatcaagaggctgcacaaggaatcaaagactatactattcaaaaaaaaaaatggaaggaagaacaagtgcaacgaacatacaacagaaagaagctaagaagttatatctcatgttcattagtggtagaatggatcattaaaagtatataaagaattttaaaagggtctgagtgttgattttcccgtgtcatgggaacaagtatctatagatgataggataacaactacgaagctataggtggcaccgtgactctatggtgggaattaagtagaaaattaagctttctatatgtaataacatttaaccaaagaatgtgaataattaaagagaagtttgcataaggtcttctaacctactctttgttgtttgttattttttttttttttttttttgtaattgcataatgtgttctcaagtgac

SEQ ID NO: 344725 - DNA, 532 bp, Cannabis indica
taaaaagaatatttttttaaaaaaaataataagtagttaaattaagcatagaaattgaaatttgtgatttcattattcgctattagatcaaaatttgatggtttgatatttttaaaattaatatttacagttaaatttgcttagtaactattcatgggtaatacccattaaaaagtgtttatattaagaagtgttctaggaatatagataaattttatcattaattttctcctctacattatttatggtgttttcctttggtattgatcaaacatatatgtgagatgctaaacgaaaattaagtcaaacataaaatcaatattatataattaagattaaactcacaacataaaatcttacatttaatcacaataaattttttgactaaaagtaaaaacttgtgattaattataaatcacaccattcttatattgtgaataaaagatccatggttaaaagtaaaaaattataggtgccgtttggtaacatttttgttttctaattttttaatcacaaaataaaagtaaaattt

SEQ ID NO: 344726 - DNA, 514 bp, Cannabis indica
cacaatagggaaggatatccttgagtctagagcagagtacctttggggctactttatagagcacattgcagcacgcaattggcctagaatcacttggtgtattggggcatttcactttagggatgattgtaagagccatcgaattgatctccttgagaatcttgcctgagtggaggaaggatctcacagcatcacagacatcacttccaagtaagtcccagttatcttgaaagaaaaagctggagtatccatcagggcccggtgctttggaattaggaatagcaaacatagcattcttgatctcttcatctgtaatgggagccatgagagctaggctttgttgcatcgagactataggccctttattgagaacttggcctattactttccttctattcatcatcttcgtaccaagtaattgctgatagtaatcgaagaataccttagtaatcttattcgggtcatctactctagtgccatgtgcatccacaatagataggattctattttggtt

SEQ ID NO: 344727 - DNA, 571 bp, Cannabis indica
aattttgtcatgtcccttttgttggcatctttcttcatggacctgggcttcttgtaccgaattaacgactgagctgccatatacacactctctatatcttcagttagaataatgaatgcagtgtgtttggcatgatcacggggagtctgtcaagatttctaggtgaactttcctttcttcctgtttccttgcttgtggttgttgcttgaacgcttgccacttgaattgttggaatagttgggtggacgttccagtggaaggagccttcattttgtgaggcttttgttcagcttctactcgttgaatggcttcttcgagcttgatgaagccttcggctcggtcgaggaaatcactcattgagtcaaccgacccattcttccttatatccttccatagttcaccaaggtcttcaatgccccccagtatcgcggataactttccatcctcggttaccctcgacactttggtcgcttccgtcatgaatctgctgatgtatgcagggagtggctcgactggtcgttgctttacttcgaccaaatctcccagacgcaatgggagctgacgtgaggaa

SEQ ID NO: 344728 - DNA, 697 bp, Cannabis indica
tccaacgccatgttgacatctcagtgcctaggttgacctatgatgtcaacctggatgctcagtaagtgaacaaatgtctaaggaatgtactttaagatgcataagtgatattttgacattacttagtctgtttatgtgttttagcaaacctggtcataagttctcggaaatattgttgttctacaaaaatgagagactcgaaactcttcatttccgaatgagtttcccatgttagaaatgagaaatgcaaagttgtaaattttacttctctgactttatgaatcttagttattgtgaaaaactaaacggacagtcgaaacaaaatcaaaatcggataagcaaaacccagcacactaggccatttatcaacctgagcgctaggtaccccattttcgagctcccggccggttttcgttttgatacttccaaggttcttgaacttgagaatgaggtctcctaccctatttttgactattctagattcaatggtcaaatcagatttgacatttaagtgattgaaaccagcgcaccaggttgattgtcaacttgggcaatgggctttgcttacagagcctcaagtatatagttttctccccgagtttgtttgaatctttatatttctgatgatggaaaaaaatgtctagaatacttttttgagaacttgattgaaaatagcacaggttgacaatatgtcaac

SEQ ID NO: 344729 - DNA, 733 bp, Cannabis indica
atcattaaaataaacaaaaatgggttgcagacgagcatcgtcaaacttttattgggtggttaaggaataccattctagcaaagttgaacgaaccaaatcatggagtatccgatgagttgagtcgtattgcccttggacaaaattttgcggtagcaaagcatgaagcgtacattataagaggtaaatattttcatacaaagtcaaaagatgatgttcgagaggttcaaaatagtgacatatgtatcgttgcagaaaccatgacttattataaggttattgaataaatatgggagctcaattattttgcattctgaatttcactttttaaatgttcttgggttgacaacgatgttggaataaaaactgacgagcttagttttactttggttgatttaagtaagagaggaagcaagaatgatccattcatcatggctagccaagcagtataagttttttacattttttatctggctaatgataaatgggttgtgtttatcgacaccatagaggaggctcttagagaatgaagaggacgaggataatgttgatttatgttatgatgacttcattattgggcaaccaattcatgaacaagttgtagaaattgatcataaccttaaggaagacgatgctgaatacattagaaataatatcaatgagggagtatgggtcaattattatttaggcaaagataaacaaaaaaagaaaagaaaatgtgcctaattggtaactt

SEQ ID NO: 344730 - DNA, 1114 bp, Cannabis indica
gacctcacttgcgtgagatactacttgattgcgtatactttcgtagaaatcataattttcgtaacaactataatcatgaataaatatatacatatttatatatgttctggacttattagaattgatacattaaacataatcatgaaataaatcatgtgaaccatgcaacatagaatgatttctgatcttttattaattagtcaatctgattatatagaaatgggttttatttagagcacaaaacccaacagcatatccattcccaaagacgttaccaacaaaatcttttatgggtcatattactgatatgggactaagggagatgcctagttttcgtttagggcaagtgggagattattaggctttattcttagaaaagcttgtaaagacatttctgattattaaataaatatttaaacatttgatatatgtatgaatgttaaattattaatattattattaaattatttgtattaaatattaaaaatttccttattcatatatgaggttgttgcttggagttgtaaagagaattaggaccgctaagctatgaataaaaaagtcagcaacatattaaagttattaaatctttaatcaatggttgctagtgcagctcactgatgcccattcttcggtgcaagtaatctcagttcggattacggatgtagtatgatatcaaagtgaaggtgctatttataatagatagtattatgataaggaccgatatgaatacaactatctttactaacatgccatttatcataaagatccaattcatatcataacgataatcaatagtagatcagccgaaatccttagttatcatgaactcttatttatgttattagtttctttgattcactcattaaattttctcaaataagatgattcttacaactactattttgggaatctaataaagtagatgcttgggaacaaaatttacaattatggaatcttgactttcctaatggatcgaatgcttgttctctttaagtgtaaattctagaactagaatattgtgcacaaaatttagatgggatctaaattatacttccactagtgacttaatagtactaaaggataaagaagtaattagaagggtaaaatggta

SEQ ID NO: 344731 - DNA, 831 bp, Cannabis indica
tccctttcctgttggcagggaccctataagatatattccccagaccgcaaggggtcaaggactagtcatcagggtgattcattaggaggggctctcggtatgtttgcgaatctttggcacgaatcacattttttgacgtagtctatataatcttttttcatagttggccagaaatacccttgtctcaacattttctttgagagacttgggccttctgtatgatctccgcagaacccctcatcgacctctagcataattttcttagcttcagggtttgatatacaccttaggtacggcatgctgagtcctctttggtagagaatattgtccatcatcacataacggtgcacttggtactgtatccttcgggatagtgccttttcttggggcaagtcgccttttattatgtattcgatgatgggggtcatcagttgagctcttgttcaactgccgctacggtactcttggctttgatgcttggttccgcaaggcgttccacgggtactacccttagtttctcaatttcgttgtctgaggctaacttagccaaacagtccgcgtgagcgttcttttccctggggattctttctactttgtagttcgtgaactcgtggagcaactctcagactattgctacgtacgcacctctccgcgcgtttgatattcccctgatatctggttcactaccagctgtgaatcactgaagacttctaatcttctagcccccacagcttttgctaacctcagccctgctatcaaggcttcgtattcggcctcattgttagaggctgtgaattcgaaccgtagggctgcctggagtcgaagtccgtt

SEQ ID NO: 344732 - DNA, 610 bp, Cannabis indica
aaaattttaggataataattaagtagtcagcctggtttgagtcgatttagaagttagagattagtaataaaggattaatgaattaatcaaaaaggtacagtgtaaagatgcttagataacatcgattagttgtaaatagatatatgtatgtatccaattatatgtgtgcatctatgatactaaacagttatatttgtggtccaatgtatgtaatatattatattatatttaggcaaaatatgaataagagatagctttaaacttgtcgtaatacataactaactgttattatcgatggacaatataattaaataatatagacaaaagaatattacgtgttcaaattaattaatcgaattatgttaaaaaaataataatagttaatcgaagataaatattgaagtagcttgggattaggatacacattttccccacggggatggtaccccgcgtggactcgtccctaatggggcggggattctccgtttaaataggaaacggggcggggacggggatcaattttgtccccgaatgtttaaacggggcggggacggggatgacactccccgccccgacggggacccgtttcatttattaattattttttatt

SEQ ID NO: 344733 - DNA, 572 bp, Cannabis indica
aaaaaaaagagaataaacatagcaagagaagtctattgatcaaggggataagtttatactacattagtggagagaagtgcactaatccaacttatggagctttagtgaatatcaaaattttaagggagtttgagagaagttcaaagttttagtgggatatacttgtataaattgttgattaggtgactttggggaggtattaatgttatcttacgagaaaagtcaaaggggcagcatataaagttatggcaaaaatattttcctatttcatttaattccatctttttgagagcatcaatgttcgctaggccaacttgaatttctatggaatctctcatttgtcttgtgtgttgagtctttgtgtaaaaatttttgttgtgttttattttgttttttgtgttgcaattgcttgaggacgagaaagattctaagtttggggtgttaataactctaagatttagagttattttggtatctttaaacttgaattttaagctaaataatacagtaattagtgtctatattatgtaattgtgtttagtttgttgtgtctttgtaataaatggaagtgt

SEQ ID NO: 344734 - DNA, 870 bp, Cannabis indica
gagttggattgcaactcattcgtgggatagagtcatgttggaaacagatagtttggtgtgtgtccaaataattcagagcgatatttttatgccttcacaatttggtcttattgtttaaaatgtttgaaatttacttctggctttatcttttgttgatttgtgttttgtaaaacgatctgcaaatggctcattgcttggcaagagactcttatttctttacaggtcgtgtgcttcagttggaggactgttcatctgaagtgcgttttatgttttgaacgaatttattaattaatatatcttatgatttttattaaaaataagtaatattaaaaatgtgtttttttttggataaatattaaacatgtttttagtaaaggaaaaaaaaaacgtaaaatgataccttagtgatgaattttctaatgcccacacaaatgtaggattatgcattaacactaaatttttaatttgaattaattttagaatatatgacaaagtgatattaatggcatgcatcgttgatcatgcaatcaattctttagtctcacttttggtagttttatatatgtcgcttctaaatttacaagacttatgtgttttttgaaaaatcattgtaaatgtactaagtgaagtaggtcaattcttgagtcaccctaaaatttatttgattttaaaattgttattcatcaaaaatgctctcaatgccaaattaattttttgttcaagctgtggacggggatgaaggtatgctaatgctaaccactaccatgaaaacatccactaccatgaaaacatattattgctagagcgaaatgtatcgtgctcatctctcgtccaaagttaagacaggttaggcctatactattgataaat

SEQ ID NO: 344735 - DNA, 1031 bp, Cannabis indica
gaatcccgagtcaaaatctggatcactgtcacgggtctaggtcttattctagttcaggtcccaggtcccggtcaacttccggctttggttccaatttttggtcacagggtacgggttcgggtcaactttcgggattaggagtgggttcaagtcctggtgttggttcgggtccttgtcagggttcgggtccacggctaggtcctaaatccagacaccgaatacaggttttgtccaagccgtgggtccagtctggttccatttctggtgtcgggtcatgagctgggtcctaggttcaagttcaggtctgggtcgggcactaggtcccgatcctagttctttttctcatgtccctatcctgattctgggtctcagtctaggttcgggttcgagtactagtctctgttcgggtttaggtctctgtctaggttttgatcttggttcgggtttggttttaggtcctcatcctggtcctagtcctagttcggttctaattccatttgcgattcttagttcgagtttgggtttgagttcgggtcagagttccagtcctggtcggagtttgggttaaggtctggattacattctaggtccatatcaggctccgggtgtgggttcgcgtcctgggtcttggtctacgtttggtccgagtcccgagttccaatcccaatctgagtctggattcagttctttgtctaagtccttcgttctgatccttgtatgggttcgagttttggtccggatccgggtctagctttcggtgtgattctaggtgtgggtttgagttcgggtccgagtctgtgtccgagtttgtgtccaggtctggtccacgatcttggtcttggttcgggtccaggtccaagttggggtcttgagtgcgggtccaagtttgggtctgggtccgaatctcggttcaaatctaggtccaacatttcgatccaagtcggggtcttggtctgagtccaggttcgtattcggatccctatctaggtccaactctgtgtttgggatcgggtcccagatttaggtctagg

SEQ ID NO: 344736 - DNA, 1181 bp, Cannabis indica
cagctgcgaatcactatgacatacgtgattcttgaccttcaatgcttcggctatcctcaagccagtgatcaaggcttcatatttagcctcgttgtttgatgcatcaaattgaaacctcaaagcataatgaaatttaaagccttctagaagaattaatatcactcccacacctgaaccttgctcgttggattcatcatccacgaataacttccaagtatccgtgtctcgctgaacaagtggactttcctctagagttagtctctctaataagaaatctgccaaagcctggcccttgatggatgtttgagggtgatatgttatgtcgaactaccccagttcaattgagcattttatcaatcttccagaagagtctggttttgataaaacttgtctcaagggttgatcagtcaacatttatggcatgttgacttaaagggaatgggaatgaatggtatggtattgattcccatacaattctttacgaaaatttggaaagggagaaactagtgggacccgcacaaattagggagaaaacaaagggaaaggttctccccccatttttatagggaatgcctttccctttccttaatttattttaattttaattttattaattaaaaaggaaaaagacaaatatgcccctcaaaaatctataaacaaaaaataattacatgttctaataatgggaattttgtcaaattaaagcattctgattacctttcctagttatgtaaacaaaataatatgattctagttttctttccggacagtttagtaaacatcataataaaatattgtttccgaatattttctattataagctaatacatttctcccattgattattctgattgcaatgatagtttagtaaacgcaccattatattgggtgtgcctggaagtaatgtcgtaactggcgagacgtgtggatgaggcataaggcaagttttttaagagggggagacctcgactctgcccctagtaacctattactgacatagtaaataggttggtggtgctttccctcttgtcgcactattgctgcactaatcaatatttcttcatattgtacttctttaatatttcgaagcactctgcgaggtctgtggtatgacttccgctttttattgattttacctacatatcatcgacgtaaacctccatgtttcgtctgatctgatt

SEQ ID NO: 344737 - DNA, 1559 bp, Cannabis indica
tttagttagcatagtatatatattaataatatgttaattattattattattattagtatatatattttgatgaataaaatatatatttttattatacagtatattatttttttaataatatttaagtttttttattgtacttttattaacgtgacatataattttattagtgttatacatatttttatttttatttgttgttattatatatatttattgtaactttgtaaggtatatatattttattgtaaagtatattattttattttagaccgtgcatgtttagtttttattttattatatataaatgtggtacataattttgtaagtatgatataattatttatggttgtatataattttgctagtataatatatattttttgagtattaatatactaagatttagtattgttaatatttttttgtggtatataattttattactacggtatattaatatttagtaatacgatatatcaaatattactgttgtatatatttaatgatttaatatatatatattcgtttttgttacaatatattaatatgcaatactaaaaattttatataacttaatttaattattatatccattttttgaaaaaaaaataatatgtattaaattaatttttataatttttattagctaatttattatatttaactatattgttaaacatgtagggggattgggattttgaagcttgagagactttaatttggctcttttagagaagcaatattggcgtttgttggttaatgctgattctttggttagtaggctttatgaggctaaatattatgctactggtaatctgttttctgctgtattgggagacaatcctagtttcatttggcgtagtattcttgaagcaaaagatcttatccacgcctgtgctcaaagaacaattgctaatggggaaaatgtctccattcttaatgatccttggcttccacataattcaaacaactatgttgtctcacgacaccctgctcttgtgaataagtcggtcagctgcctctttcaagtcggtactcgcgcgtgggatgaggatgttgtgagggacctgtttgttgcccgtgatcaggaccttattttgtccattcaacttagtgattcggccgctaatgatggttggagttggcgacttgagacttgtgggaattattcggttaaaagtgcatataaattcttgcaagaatctaagggtgcttggtgccgagatgccaatactgatttttggaagcggctttggtcattaaaaattcctcctaagatcagtaattttttatggcgagctgcttcgggtgtgcttccaacgtgttttcaactccaaaagcgtcatgttcctgtcaatgctgactgccctttgtgcaactctagtactaaaactattcatcatgtgttggtagaatgctcatttgcaaaggctgcttggcatcgcagcatagtggatatcggggctggggctgtaacattctgcagttggtagttgagaattttcaccagggggcacgaagttgaaatggaataagtggcgatggtgagttgggct

SEQ ID NO: 344738 - DNA, 705 bp, Cannabis indica
ttggtgattttttcagtgatttggcgacaatgccaattctgacgaattttttgtcgccggctataactctggcaatttttttgacaccggcaactactccggcaacttttccggcaccgacatcaaactccagaataatcgttggaattggcattgtcaccggtaaaattaccagaaaaattaccaagaaactgattccttcatcaataaacatgtttcttggtttcttcatcaagaaacccgcatcaagaactctggtgatttttttggcgataatgctaattctgacaatttttttggcgccggcaacaactctggtgacttttccagcaccggaagctactccgatgacttttctggtgccggcaacaaactctggtaacttttctagcacgagcgacaactccggcgatcattatagttttatttattttattttttttaaaaaataagtaatatgacagagacagatgttcaaaggattctagatgcctcagggtttcaaaagcagagcttgcctttcaaatacttgggtgtgcctatttgtgcaaaaaagatatcttcagcagattgcaaactgttggtggaaaagatgatggctcggatcaaaacttggagctcgaggaatttatcttttgctggccgtgtggtacttattaactcagtcctcatggctatacattcatattggtgccaagtgatgtt

SEQ ID NO: 344739 - DNA, 1008 bp, Cannabis indica
gacatctttcttcatgggccaggacttcttatatgggactagcaactgagtggccatgtaaacactttctatatcctcagtcaagatggtaaatgtagtgctccttgcttgattctcccagggatcctcctcgattttgctggcaaactttcccttcttcccattcccttgtctgttgttgttgttagaacgtttaccatttgagctcgaattatttgcgtaatgggagagttgggcagtcgttccattggaaggagcttttgatttgttaggcttttgttcaccttctgctcactaaatagcttctttgagtttaatgaagccttctgcacggtcgagaaaatcactcattgagtctaccgggctgttcttccttatgttcttctaaagttcaccgaggacttcaatgccccccagtattgcggacaactttccatcttcagttacccgtgaaaccttggtcgcctctgtcatgaatctgctaatgtatgctcagagaggctcgcctggtctttgcttgacttcgaacaggtctcctaaatgcaacagaagctggcgagaggaggataattgtgcatggaattccgaggagaaggctttccatgagttgaactttccagggggcagcttgaaataccattgctgggcggcttctgagagggtagcaggaaaaattctacaacatacgtcacctcgtaccccctacagatccatttgcatctcgagatacttgaggtgggaaagaggatgttctcttccagtgtacattttccaggttggcattttgaacttgtggggcaaccctatgagattgatctcgggagagaaaggggttccacgtgctcggtccaactcgagatcattgtttctctacccggccatgccttggaacatactctttagttcgtctagctgtgcttgcacaactggactaacctatttggcatattggccaatttgagtcatgttagtatctttctgagcgggaatttgagcacgggttccggg

SEQ ID NO: 344740 - DNA, 557 bp, Cannabis indica
atcctcatcagaatcaccccaccacttggtggtaaaacatttcctaacagattctttagtaatagaggatgaagttggccaatatttctcacaaagactattaacgtcttgcttaaaatctaacacactacaatcaccttcacaatctaaactagttatcaatgcaaacacctcaatgctaaacctaatcctaacaccacgtatcataacccacaattcagcatcattaggttgttaaacctcccgcaacaacccatgaaaaacttgcggttgaactttaaactcaggatgcttaaggaaatgtccaaaacagattttggaaaaattttcaagctgttcaggggaaaggcaagacttaatattttgtataacctggaatgtagcagtggaaacgacttttgcaataaacagattctactgatcatatatgtaatcccattcctatagcagttgaaacaaaaacaatgagaaaaaagaatgaaagactaaaaccagaaacataaaagtactaataaaaataagacaaaaaaaaaggacaccttaggaggatttttttt

SEQ ID NO: 344741 - DNA, 1098 bp, Cannabis indica
gcataaaacccaacatattcgtgggaacagattcagcaaagtaaaaggtcagttttcgaatcttcaccgtgttttgttttctgtttgagtggggactgtattttctgggtttgtaatatgcatgagggtggtttaagaatgaatgtttatagctggtatgtatgaggctatgttttttaggtaaaaaccgggttaatttcatagagaatgacctgtaaattgacataaccgcatacggtgtaagaaatacttgaataggcactgtttttatgttttgaatactcgcaggtattcggatgaacacttcgaatactcgcatacttgcgagacttatttacttctgattgttgcctagatcttttaggattttgtatactgtgaacttagtcgcgagaacattaaccgagtttccaaatggtggatgtgtcacagtattctaatggtcatatatgcggttatatgccccttgagatactgtgatacacccagccatttgtgaaatgcgttaatgttctaatgagcgtactctttggctggtagatattctcgaaacggtgggagtacctcagtaacttcagggtcatgcttgagaacgcatgccccttgagtcaatgagtttctcccagccgtttctagcggtatatcgcttggcccaggatgcgtgacttattcgcaggttgtgactttagttagactccttgaaatggtgggtgcctcctcgttacctcagggtcatgccaggagacgcatgtcactgaggtcactagggcgctcctgaccattcattgggatgcttttctattcgcatttttagtattctatctacttgcatattgacggggtggtcagtattcgcaagaacgctgaccattctatcaagtgtgactttataatttatgcgggtgagatcacttactttgttttcacacattcaccacgctgaaaagatcttctatctttcagatgagcgacctatcggatagtcaactgctcggctcgggaggccacgcattcgatggtgacgaggactaggaggaggatagctttatcccaacttcgatctcagaagaggagatcgcacctgcagtgggtatagag

SEQ ID NO: 344742 - DNA, 843 bp, Cannabis indica
atttagtttcttttttttaacatagcatatctataaatattctgtaaagtgttaatattatatgaacatctccatttataaagctaaaaagtgggtcaatgacagaagtggtatatctgcaatcacacaaagatagaagtggtatttctgcttcctatgcttatccagagaaaacattagataacgtgaggttaactttaatatataaagatttttcttttttaaaaaataaataaaaaaaattattaatattctcccaagataggtttgttagagagatatgtggctaagatgatttttttaatttaaaaagagattattaatatttaaaagattgtttaattttttggtttaattattgggtttatttgttaacgggagatcaaacctaatcgttaaatttaacagaatattcttttatttttaagtatattctgttaaaccaagaaatgccgttagatagacacttttaatatataaagatatattaaaaaaaattatatatataattaatattttaatgtaaaaaaaacaaattaaaaaaatctaacacatgatacaaatatatctcaaaatttagtagataaaatataattctaaaaaaccgacaaaattacaaaacaccgaccacggcagcagccacacacactaccacttaacaattacattacatatataattcccatgtctattcttactatataattaatattttatttgcaaatgtaagaagttgttttacaatgtaattcaaaaacacacaagtgttctatattcaacccgcctaggatttttggatttttggtcaaagcccactaatagggtaaattacatgcaaaatga

SEQ ID NO: 344743 - DNA, 649 bp, Cannabis indica
acacctctatttcatttcactataatattttatttttatatcaatataacattgttacttgtttcagcaagcattaaatgttgattatagcaatgacatcgggaagtattgtattcttaaacccgcttgaatctaaaatctcgtcaatcattgttgagaagataaaaatgtaagtttagaactttaagctattcattctaatataatcatcaattaataaattttaaatgcttaacttataatttttttaatatctttaacaacacatacacaaatattagttcaaatactatcgtatttggcgcaaagggacctcggatatatacttttgtttgtccaaaacaactatacaataacgaatgtggttactatgtactaacttacattcgtaatatgcttcaacattcaaatcctattgaaatcataaaagaaaagtatatactcatttttactaagcatataaaagtactatccttttaattagttttaatttttttaatttgacagtttagcggcctatccaaatattctgagaaagaacatctcttaccgcttcgacaacagtagttaagtcaattgcttcccttgatatataaaaattaattagtagtattttattgtatttcttagacactatgtgtagtatttt

SEQ ID NO: 344744 - DNA, 1027 bp, Cannabis indica
gatgtaagcctcgtcattcctgcacctgaagatataatgctccatctgaaaatcccagttcttggcaacaaggtggacttcagcagtcaacatcatttgtatgtcagtttctatctaagagagctgactcgacagagctctgaaccccattgaaaggtgtttggagctgattaatgaaggtaccatgagcgggccaacctatagcgagatgggtgcctccctattagttgtttgaatttacccgactgttatacttagtctgtataaggtgtattatacactaagtgtcttaccagtctccatgtcttgtctcctaatgcatagcgaggttgatgcctcgccttgtacatctaaagtcgtatggtttctcattaatgtacgaggcaatagtttgtgtatctttatcttgcataagaccttttagtcagcaagttgtaaatatactctgtcaattccacattaatgagtcattccattttcaaatgtaattaccgttacattcattgattcgtattctttccaatttgacacgtgtcctcctttgaaatgatagccaaattttgggtataacagttgtatatataatttaaggaatctacatattttaaccactgaaactcaacgtacaaacaacgtgaaaggaacatactcaaaaagcaatgaaattaaacaatgtatttacaactttaaaacaacgaacaatgttattactaaatataagtaatttttcttcatatttacaatctcttcctatcaatcccccaactttattcaaaatcaacataatgtgtgatctcttattattttacatgtcttaatgcaagagataagataaatttttgttttgacatgttttgttttgacatgtaaaattctattcttttacttgttgaacaactagtgtagtgtatactaatttataacaaactttgcaacaacacgaaaataatttgattttatgtaatattttcatgttgcaaaaaaaacagaaaaaaaaacttcacaataatatgaaaacaacttaatt

SEQ ID NO: 344745 - DNA, 654 bp, Cannabis indica
aaaaaaaaaagaagaaaaacccccaaatcagcccatcactttcagcaaaccaaccctagccgtccaccattgctccaccccagtcaatctccaagctcgaacccagccgcaccattcacccctgcacagaccattcccatccgcacactactcaacctcactcacaacccaccattcgaatcaccacgtccagctccagttcaccaaaatcgcaccaccttcgcatttccaagctcgaacccttcgcccagtcaacctacaccctccgcccaaccacatcgactcacaacccgaaccacaactctgcatccttcaccattccgtgagtcaccatcactagtccatccatccacaagctcgaactcgccttcatcacctcatcattaccaccgagccctcatttcgcacacctcgagctgctgaaattcgctcttgcacaaccacgaaccagctaccgtcacaagctctagcaagcacattcgaccgaggtattcactatcgagtgctattcacacgcatcatctcagcagcaagaagttgaagcctgcacatttcagccaagtaaaagtaaatccgggtttgagaatttaaattcaaaatttatttggttaaaaggtgttatttggtgaaaattgtggcctgtgtagctgaata

SEQ ID NO: 344746 - DNA, 538 bp, Cannabis indica
ctcgaagccacaagagaagcaaacacttagaacggaaatatcacatcatcaaagagtatgttgcaagaggggatgtactggtggagaaagtggacactgaggacaacctagttgatccattcaccaaagttttggtaggaactgcatttgaaaagcaccgactgaatttaggattaatggaaactgattgttttatattagtgcaagtgggagtttgttaggctttgtgccctaaataaaactctatttcaatgtaatatttatcatttaattatcaataaagagacagaagtattttcatcacttatttagtgtgtcatttggttcatgttatcatttatatgtttatttgatttataaatttatccaaacccttatcacattgatattcttgtttagtgtttcgtcagcatagtggaaagtaatcaagattgtgtgattaaatatctattccaagatttatcaatacacatggtttaactaatatgataatctacaaaatagtttacttgcaccttggataagtactatgtccttt

SEQ ID NO: 344747 - DNA, 743 bp, Cannabis indica
taccattacgctacactacaaaaaaaaaaagaaattagtttatatatacttaataactagacataatattattaccgtattataattatgtcattacaataaaattaacccactaattttttacttagggcaactccaatggccaaaacttaaatttagtattaaatcaaaaccaaaaaaatactattttagtactatatttttttataattacaatactaaaaattacattaaaatctatattctttgttataatgttattttattaatataaaaaatatatttacttcataaatgaaatatttaatttaaaaataaaattgaaacattttataagaaaaattacactaaatataaatttttaaagtgtcattggaaataactttaatcctaatatatattagaaaaaacttctttaaaacaaaattataacacatgtttacaattatttagcaaaatgaataataaaaaacaaaaggagaagatataataattcgtccaatcaattgtttagaaaaaaataaattagttttattttattatattcttttttatatgtatatatatcacataaatattattacatttttcagtcttattttctctattttgtaattttctaatttatttattcttttaatttatttgtgctctattcatattgtttttcctaaaaaaaattaaaagattaccaattgattgtttaatagttgtcataatatattattattatgtttattttt

SEQ ID NO: 344748 - DNA, 621 bp, Cannabis indica
agttatggttagaaataaactttctctctttatccatgaattccttactcatactcattcaattggaattattgattcaattttttaaaattatgtttcgtaattccacaatcaaatttttccatttgtaattgactcttggatacaaataacgagaatgtatatttttccctcgagtttttaattgagaggaaaagagaggttatccatttttttcatggatacactactcaaattcctacttctttaactgattttgtactaaataaagagattcttagctatttggaaatcgaaaagtatggcggatgatgaagatgagcacgcattgaaatgggccgcgatagagagactttcgacgtttgataggatgaagaaagggttgatcaagaagttgactaaagaaggaaaggtggtgcatgaagaggttgatgttacaaagcttggagttcaagaaaggaagcatgtcatagacaatgtgctcaaagttttcgaggaggataatgagagcttcttgagaaggcttagggaaaggactgacaggttagtgcttctttgcttggtttggtctttttgttgagtgtctccttgtttggatgctgagaaagtgatggaaaatgt

SEQ ID NO: 344749 - DNA, 632 bp, Cannabis indica
aaaaaatttgaactaaaaaattaatttcaaatactaaaataaatagatatttatcgatatattttgttaagggagtccattatagaattttctaatatcttatataataacgtttaggtctaactctataaacgccttttattaaaaaaaatcgtaccttaaattagagagaaatactattaatttcgacaacttcacttgagaagacgacggaaatcaatcaaaacaagagttgtttcgaattgatgaaaaataaaatacagaaaaactactacaaactaaaattaactaaaatttggtttaattcacgtaaaaattttagatttatgaaatgcaaatctcaaaaagttaaactagagttcccaaacaatgcaactcaagtataataaaaaaaaatcgtaaaaatatttaaaattccgtgaaactgtatttttgtaatttttttattgtttttgtgtatttgtgaaataattcaaaaaaaaatatattttttgtaaaattattcagcccatatatatataggaataattacataagataccatttttttttgtaaaatatttacatttttacattcaaagaatatttttttacatttttacatttaaagaatatttttttacatttttacg

SEQ ID NO: 344750 - DNA, 1319 bp, Cannabis indica
tttcaacccacccaattaacagaattggcggtttgtaacttttttgggttatttcagtttgtaatttttatcggtttttccggttcggtttagccggtttataaatttttttgtacagccctacccctaaccgctggaaagaggccccctcaggatgtttgccaaaaatgggaacccaaaggagtttccttagcaaacatcgggtgaaaaaaacccaaagcagcgaaagcagaagaaaagcgaaaaacacagaaatgtgggaacaaaaattgccccataccctaaataatttttcgacagaggggtcggtggcaaagtagaaggaaggaaaataacgaaacacaaataaaagagattctatacattacataacagactcactcaaggttattccccagaaatccaacactaaaccacaaagttctaccctagcatgaaaataaacagtaaagacatagagtgtccaagaaacttacatgaaagttgagagctggaggttggtgttgatcagcggtaaaaggtggattggcagcgacggaggaatagcagcaagaaatctatggtttctgaaattttttctcaaaggtgttcttatgaaaaaatggcaaagtggtgaaagtaaccaaataaaggagaaaggttggcctttatagaccagaacgggtgcaaagtagttgtgatcaggcatcatcgtacggtgggaatcgtaatcgatttgcattctacagatccaacggttgggattaatgctcattagggcagctaaaaattcttgagtatttgtctgacaccgattaaatgtgtcggatcattaatggatgagaagcgaatcgttgcttgcaaaaagcaataaattttaatgatgactatcataaacgaagcccatgcgcctaaagcacgtgccaggaaatcaatgagacaaccggaggcaccagacaagcctcgtttactgtacaccaaacgaggcttggggggtaaatgttgccctctaattttcccaaataggtggaccagtgtaacattgacacgtggagctgagaggctcaactcttaaagaaattgactaagtctttggcaacaggagtgtcataaggagataactctcagagaagatatgagaaggctccacgtactcccggaggcacggggccatgctaaggcacctccacgaggtactggactctatttgaacagtcacctcgcattaaatgtcgcatgggagaaaacgtattggaactaccataagcaatatgactgatggcgtaacctctctttcgcaactattcgatgtgatgaatgaggctagtgacggctacttt

SEQ ID NO: 344751 - DNA, 762 bp, Cannabis indica
caaggcaaaaaactcattagaaatatcaaataatctttcataaaaattagacaaagttttagcttctaacattctcaattcatcaaacctagtttgcaacatggtaaaacgtgatctttttacatcagcgataccttcaaactaagtttgaaggatttcccacgcttcctttccagattcacaagatgaaattaattaagagagccttcaccgacaccattaaaaatagcatgtaaagccttattattttaacgagacaatttttcatcttcaatggtccaattaagttcaggttttacctttgtattaccttcatcatcactttcagtaggttttgtccagcctgtaagtatagctctccaagccttctcatcttgtgatttgataaatgctctcatcctgacctttcaataaggatagttcgattcattcaacataggtggtcgagagatagagcttctttctttaaacaatgacatctcacacaaaataaattaaacggaataaatttgagatctcactaagaatttagtgacctactcttataccaattgaaattccgtactttaatattcctagtttaattatttaaataagtgtttaattaaatgtaaaataatgatactgatactgaaaacagttttttcgtagttacagaaaacaactctataactctaaagtaaaccagaaaaacaaacagtgtagaaaagtaaaaatacacaaggttttcgtacgtggtttcaacaatccttccagattgtt

SEQ ID NO: 344752 - DNA, 518 bp, Cannabis indica
aaccatttgaaataagaaaagtacttaaccttttataccaagctctaggagcttactttaaaccacacaaagcctttttcaatttataaacatggttagggtatttgtgattttgaaagctgggaggttaagagacatagacctcttccataatgtacccatttaagaatgcactttttatatccatttagtacaagataaaattcttgtggcatgcaaaagttaacaacattcttatggactcaagtcttgctaccaagggaaaggtttccacataatcaattcattcttcttgattgttaccttgggccactaatctagccttgttacgcataattatcccatgcccatctaccttgtttctatagacacattttgtttcaatcactaattgatgtgatggtcttggaactaactctcaaacattatttcttatgaattgatttatttttcttgcgtagctagaagccaaaattaatggaattcagcctctttaaaattctttggttcaatttgag

SEQ ID NO: 344753 - DNA, 1033 bp, Cannabis indica
aagaacgtactttctaacatgtttttttttttgaaaaagaggaatctttattcaaaaacgagaaagctacaaataaccaaggcaagagccaaaactaagaactcggtagctgccaaaacagccacaagccacacccaaaaacactaccaattcttaattacatttagtaaatacaagtttctttgacaaattttgaaacgacctttactcataattctaagttgaacactttcttaacttccaagctaagacttctaggagaagcacaagtcaactcaaaatacaacagttcctatttttccacagctggtacaaggtagctgctgtaaccatgttcaggacccgattttggaggtcctttgccttgaatctgcacctgctaataagatcagcaatcaatataggccaattataaactcccgaccaagagttcacatcctcaagaacctgtttagcaaatatacaactgaaaagagcatggtcatgagtttcaaactcaatttcacaaacagggcacatagtattcttcaaaggcaccaacttacaaaggaaatctctagtgatcagctgggagtttacaatttgccagtaaacaaatctgtgcttaggcagcaacaagttgtcccaaatagctctgacatactcaactttaggcccctctaaaagaaggttgtagaacttttttgctctgagatttctactagtcacaacaagcctcaacatggtttcattcgtactatcgcgaagattcaacaacttcttaaagtaccaactggtatctcaaaatttccattccttttagatagatagagttaatccactttatccacaaacaatcttgtttgttagataaagcgcaaagaaatttcgccattagagccttgttccattttttgccttcttggaaaccaactacaccaagaccctttgggaggcaaactttttcccaagaggcacggtgaagcttgctcttgttcccttttgttccccaaaggaagttcctacaacttttatcaatggcagccgtgacctt

SEQ ID NO: 344754 - DNA, 1594 bp, Cannabis indica
atttatgtctacatggcgtagacctatgtgttgcactcacacatctaattaaatcaacgtggcgtagacctacgtgttgctctcacacgtctaattactttaagaccttagaatttgttcatctcagttatggttactgagtccaacatgattatgccttaagcggataacccttgaatctcattacatataacatgacatggcatttccatacatatatcactagggtaataaccctaggcaactataccgttcctggtaataaccctaaacccggttactaaacaatcatacatatcactttcaatataggcgccactgcgcatactctacgtgttagtcactgtcttacctgttgtcctgcaactgacagaaattctgaatccccgggtgctcctgatcaggtgctggtaatcctagtcacataaatctgggattttcacaactagggttaacccctgattccatactgataaaattcaatcatggcatttaaaatttaaataatcatacagagcttggaacgagctttccaacgatataaagaaatcacaaatcggagttcggaatcaaaagatatgaattttcaaaattcaactcaaaactgcccaaaaatatcagggcaggccgcggcatgcccaagtcatgctgcggcacctgggatgaactcccaggttccattagcaggggcgggccgcggcatgctcagagcatgccgcgacatctgggttccaaacccaaaaccagcaagcttcaaacacgatttcagcaaccaatcttcacccaaatcacctcaaataacattcaaactcccaaaacatgttcacaacttatcaagctcaaaggtagggtattaaaatacacaatccataaatcaatttccaatgataaaccccacaattcagattgcataaaacaacacaaatcttgcctaaacttaacaagattccaagttcaagaacatgaactcaaacccaacacagtcttattaaaattccagcaacataacaccaatttaatatgaaattccaacctagaaacatcataaaatctctgcccaaacccaacaatgaagcatataacaacaacaagctcaatttcaacaagattaacaccaatccacttaacatgcaacaaagaacattcaaaacttaaaagagcatgcttttcaattctaaactcagttacaaattaaaaaaattgaagagtagggagaagaactacctcaaaatttaagccacaatcaagctaaattcccaaatacaaagcttaatccaacaccaatatcaagcaattcacaccaatttagctttgaaaattttgagacggttagggagagaaagagggttcgggtgagagggagaagcaaccagaaaaatcatctatttccctcaaaaatcaatttttattcaatgtaaatcaaatatggtcaaaagaccattttgcccctagggcctaaatacacacatacaccatcacaagggtattttagtcatttcatactcaattacctccaaataaatttcagatttcatattatcaaataaaatgccaacattaaatcccaaattgcatttcggacccgaacccagtt

SEQ ID NO: 344755 - DNA, 848 bp, Cannabis indica
tttggttgtcccgtcatttcgaaaaatgacggctgcaattattactttttattgcatttatggtgccacgtcacaaaactcctcggtttttgtgtaggcgtggccatcgttggccgttagattgggcgaccttaggcattctggttgccacgtgtcgtaatcccaattaataagggatatgggtatttaaaccctttgatacgaatcaaaacttccatttttccctcttgttcttaacttcctccttccctcctttacagagacttcaaacccactttcattctttgcccagatttctaccactctttctacaatattctcaatctcagaagtgatcgagagcaatcgcagaaaccaaaactaaaggttagtttcaaatcattgcattttcgttttctgtttggagaaaaaatgctttactttctgggttttggtatttttgaggagtttttaggaatgtatgcttgtatggggtatgttcatgaggctatgtgttttaggtaaaaaacctgggtaaattcatagaatatgacctgtaaactgacataaccgcacacgatatacttgaataggcactgtttcacgtcttgaatactcgcgggtattcagatgaacaactcgaatagtcgcgggtattcagatgaacaacccgaatactagcaggtattcagatgaataattcgaatactcgcgtattgccaagatttattttcttctgattgatggctagatcttttaggatttttgtatgtcgtgggttgagttgcgagggtatcaatcgctgttccaaatggtgggtgtatctcagtattctaatggtcatatatgcgattatatgccccttgaga

SEQ ID NO: 344756 - DNA, 1566 bp, Cannabis indica
agaaagatcgtgtgatcaatgctgaatgcaaggatcgtggaattgaggctgagtacactaatagtgggatcgtgtgtatgccatatccacgtaagttgatccctgagttacagggattgagatgatgactcatgatgtgaaagctgaattcgctaagtattgagtgctctgcacggattgctggatatctgatcctagatgtgccagtgaggcatcctgctcggtccattcttcccgagaagatgctccaagtggactccacgtgtcaccattcttgtgatgccacgtcagagtgaaaaaattgggataacaatacaaataaaagttcttgaacatagtatcacagtaccttatttgagtgggagaattttaaaattctaagccatcttcatttggatgacacttgtgataggaactttagaattcaaatgagaaagtaaatctaaccattcatatggatagaaataacttatcagaattttaaggataagataggagaatttgcaagtctattcgaatgacttaagcaaaattcgttatcctcatgaaatgttgtatggtatctctaatgattacttaatcttacggaagtatttacattaatattaatactagaatgctatgttgatgacttaacctagaaggaacttacaatttcagactaggataatatgtcacaataggatataccggaaaaacaatagtaagaggttaaatgtacttctatgtatgaatttaatcagactcctactgttgagtgggagccatttaagatgtaatcaaacaaggaacattaggagacaatcaagaaatttctgaaagtgacctatatgttagataataggaattatattagaatccttatatctacagcatctcataaccgattcgagatggtagttactctgggggtggaggaattattctagaaggatgaagaacccatctataataatttaagctccatcagtaaagataaataacttcgttgtttcgaaaaacacttgaaagttattcaactgaaggaaaatctacactgttttatctctattcaattttggatagaattagagacatgtcttctgtatattcagatgcacttaataagcagtaaagaattcgacatccctaaatgcgtaatgcatatagtaaatgttgttgcataatgttttatgaacacaaaggaagtaatggtgaagaaagcagtagcttaccacaaacttacagttcctgtaatttgggtttagtcaaataaactacacttgatctaaatatcaagacaattgattcattgagaagcactacttgttttatgttagtgcaagtgggagtttgttgggattttatgccctaaatagaacccatttaaatgtaatctgatttgtttttaatataagattagaagtcatttatgtttacatgtagtttccatgtttatggtttaatatatacaaaatctattaagttcagaacatatagttattcacaattacagtgaagtcaacacagtggaatgtgattgtgattatatgcttcaaaagataatgtccctaattcattagtgca

SEQ ID NO: 344757 - DNA, 1709 bp, Cannabis indica
gaaaataaagttcctaatattcttgtttaccacgtgtatttaaaaaactttaaacgtatttttggcactgtaaattatttaaaaaaatttaaaaatgtacggggatgatgttgtaagtataacgaacgccgccataaaaaatatttaaacaataatattccaatatgtgtttttgggcacaaaaattaactaaaaagttgtaataagaagttaaccgtagcacttctcttattatatatataaaacgaaaaatgttaaaaagtaccagtggtgtctagcactctcttaagtatcaatattgctattagttcaattaaatattgagtcccatataatttaatataataatttttagagagtactactagctaatcgtaaaataacatatttagaatatgctaaaaaccactaatattcaataataatgctcatacaaaattaataacaaattaattgccataattaagaatactttcgcatttacattttaggggtctatttaatgagtgagttgtcttattctatctattcttatccataattaatattaatttaatgaataataaaactctaagatgtttatggatgcattaaatgccttttttttttcttactaattttagtaaaatacatggattttccattattgaaaaataaatagaaaacaaacacagaaatatgacatttttttaaaaaaatgagtgattttgtattgaaatatgtggataaatttttgctaattaaattatgttatttcaccataaacacacaaattatgctgtacagaatgtttatacgttattttaaaataaaataaatatctgtgaaactttaatgtatgattaaagtaaatatttaatattcattattggaagaattcatgattactttcttatgaagtaacttgatttctactttttttttcatccaaaaataaataaaaaaattccaaagtttatgaaaaattaaaaaaaaaaaatcatttatcaattataagaagaataattagtaattttgtttccagaactttccaaattacttgattcttttaatagtcccttaaaatatacatgcttgttaaaatttttcttgaacttttatatttacagaagtttagtcattctgctaggttttatctcattatttcgtttaaatgctgatatgtctttataaattagcaattttaacttctaaactttgacaactatcaaaataaatatgagaaagattcaatttttttagtaaatcctaaaaaattaattagatctttaagaaaatcattttgaatgtttacaaaaattaaaaacaaaaaagaaatcaaaactttaaaactaattaagcgattttaaaaaaaaaaaattatttttataaaagtttcatttagatataaaaaagtatattcaaaatttaatttttgttaaaaataaattttatgagaacaagtttgattttatttttttctcaaaaaatctagattcttttaaataacatattttttaaaaaaatatatatttatattttattaaattctaattatttttcttattttttaagatataaatttataaatataaataagattgattttatcttcacgaaattttagttcattaaatttttaataattttggtttgtatattataaaatatgtgtttatacaaaataaagtttaataatttaagttttttttttggtatgaataagtgca

SEQ ID NO: 344758 - DNA, 607 bp, Cannabis indica
ttatatgctgaatattggatacattaaaagtaagtatgactcatgtatgtatttcaataatcaaacctatttgctactctatgttaatctttagcaaagaaaagtaagagattgacaagttgaaaaggaaactcagtgatgagtttaagatgaaagatctaggcaaaacaaagagaattctttggatagacataaagagacctaagcctggcatgatagtactttctcaagctgcctacctacagaaagtattgaacaagtttggcatggacaagtgcaaaccagttgcaacaccacttgctcaacacttcaagttgtttgcatctcagtcaccaaaaatagatgcagaaagagccaagatgagcaatgttccctatgaaagttgtgttgggagtctcatgtactccatggtgtgttcaagacctgactttagctcatgccatgagtgtggtaagtaggtacgtttcaaacctaggccctgaacattgggaagcactgaaatggattatgaggtaccttaaagatactctggacgctggtattgtgttcagtaaggagaaccagtacaaggaagaaatcactagttttgtggactcagatttttgca

SEQ ID NO: 344759 - DNA, 646 bp, Cannabis indica
tggaaacttcttgtaagagaagacagaaagtttatttttttatggaaactttgactattattattttccttaatgagatcgattgtgtcttgataagatcagattaaacactgtttatggaaggtattaagaatacatgatcggatacatttatggcaagtttctttttctggtctgatttactgcgacaaaatttggttatgatactgcaaatcaggattttatttaggaaagttttgtacagctgtagattcgagtttgtggctatctctagggtttctatattctataaatagaacctagagagcagtcattcgaatcaactcttctagctttcattttttgtattttctcatttgtaaagggagagttctttttatgagaacttagttgctcatctaggttctagtgttttcatatttgttcttactctgtcttagggttggttagaacacttgattgaacaagagagaggtcttcgggagaacacttattgaagccttacttcgggaggaagtaagcacgcacacttaaaagacaaagggagtttactgcttgaaggtgtttctgagatcagattcataaagtgcattacaaaagactgcgacaataatttagaaggagtctaaacttgtttaaatcaatt

SEQ ID NO: 344760 - DNA, 1083 bp, Cannabis indica
atcaagaaaaaatatctcctctactttgctactttgtttttcagatttagtcatattcttagaaaaatagtatttgttgaaacaaacactttcttatcttaatgaccataggatggtccacccctaatcacttagaatagctatcaaacatgcaaaccttacttaacagttctagcttttcttaaggtcacgatcaaggcatccatgattctagtaatggtatacactaagtacacaatcattccatcattctaaaaaaaaattctatcactagggtattcccctagaaagacttaggcaacttctagtaactaatcataaaccttatactatcatcaatatgcaaactggatttctggggaggtaagtttgaatgcaattccaaaaatcaacttaatgatctttgaactccatatccaaatatttttccaccccttagttcgcaagatctttaaccacttaccttaatgtttttcaacattactagaaattcatgaaatttcttaaacctttcaaatttctttgcataaggtaaaatttagagtaatcgtctaaaaaatataacgaaaactcatatccacctctgaatgtatatccatattcgaatatcgatgatcttactttcaagtggatatatgcatattttctctttgcagatgatgatcttgtcaaaaccactatgaataagatgcaaatgccatagatatataggaatgtgattggggtctttgattacttaggtctagttacaataaagagttcttagaatagtccaagtggatcttggtcacagaatataaaactcataattcatacattaacatacagtttggatccattaacagaaaatggatattaaacaacttgtgaaagtcatactgtattgtccaatgtattcaaggaaactgaaattaaaatttcaatttggaatctacaatttaaagtcaaagacttaaatttataccaaatatatatattagtaattattctagcttggaccaccactactaatctaactgtaagtttaagttacctatagtaagcatatataagtaggagatttctaagattgaggatttatat

SEQ ID NO: 344761 - DNA, 1752 bp, Cannabis indica
tatagttatgttattatttatgtttttcttactgagtctgtcgactcacaaatactgttttcatgtgtaggtaagagcaaggctaaggttgagcagtcgtgagagcgagcgaatgaaggttgtacatgtcagggcggttaggcatggagcgtacgatctttgggatagctggttgtatattggtacgaggtctcctaccccatttttgaccatcttgaattcaatggctgcatcagttttggcatttgagcaattgaaggcagcgtcccaggttgattgtcaacctgggtgctgggaccagctccaagtcaacttgggtgctgggccctatttctaggggctcgagattgttgttttctccccaagtttccttgaatgttcattatatctgatgattgaaaaaattctaggaacacatttttgtgaacttgatcgaaaacaatccaggttgacaatatatcatcctaggcgctaggcgcagcaccaagtgttaacctgggcactaggtcccccttttggctcattaaatgttttgtttggtctcgagaaatagttgaatctcaatattttttgaaaacggtgaagattctcagaagtattcttgaaaaactccatctaaagtggcctaggttgaaaaaatgtaaacatggccctatttttggcacccatgaagtgttgtttcttctccgaaaggacttattttcctattttttatgaagacaaagaagatccaaaagtcggattgtcgatctgatattcggaaggtgcctagattgataatttgtcaacttgggcgctagggtgctcggggccctagggcactaggtgctcaaaaatgaacttgctctgattctgaatctgatgccttaaatatgtctgtggtatgtatctagttgatgtcccattgcaagtgaaaaacccatttctactaagacggtctcataaactaaaccctagttgggaatgtcaacataggagttgcctgaaaccctatgtgcccaggtttgcttccaagttgtaggttcgtgtaatttcaactctcggggcttggactaggttgctccatgtattgatggtacgtaatactgaaagatagtgagtttgattcaagttattgaagtctaaatttccattgtagagttcccaaaatcaacttgggctgagggctagggacccctcccagaccgacttgctatgacttgggactactcaactccgagatgtcatctttcttgccatgtgtcagacattgatgtccacatcatcagggctactcttggtgtaaacaactaattagtttgattggatgttgcggatgtattagatttttggacacccgatccaacatccaatctaatccaattggatatttgaaaaataacatccaatctgatccgatcacaattagatatcaaatatttgacagtcgattataattggaacggttggttgtaataggaacgatcgattgtcattggattagatcaatttatgcacacccctacatgcaagacataaaaaaagtagatgctatggggcaccttaaggtgacaaacaccacaagagatagcatactcctattgatgtattttaatatcaggttttatgtattttaatttaataaatgatatgaaaaattgataatcagtaatagggtgccacgtggatgtaatgtgggacacttaggtggcgtttggttgggaggaatgaaaatataggaataggaatgggaatgagaattggaattagaat

SEQ ID NO: 344762 - DNA, 833 bp, Cannabis indica
aacattttccccccaagtctttacgggactttcgaagttgcgtgtagacttcatccgacctatctttgcgtttgaatgggtgacacgtgtcaagcgcgtctgttcgcgactggatgtgaggctgattgggtgttccttcagtttcagctaataaatgctctgatgcatttaatatttcaaaatttgattttctctcaccatgtttgacaggtgcacttgattgcttttgatttcccatattcgcttttgggaggaaccaaggcgtctgcggttcttttgaaatgattaccccttttcattgtttgcctataaataccagtgggcatttgtacacaaactcattttcacaaaccttccttaataagtaattttagagcgaaaagagaggtttttggcttcaagtttgctgaagtgccttcatcaaaattgctcatttggctttccgtaatctgaatccagacatctgatccttgagtaagttcttgatttcccttatgtttactttgcacacttgctatttgaatgcaccttcgactttgttgtagatgatatgtagaaaaccctaagtttagaaactctacgattttcctttgtcatggttcatgcgatttcaccgtccgtaatgcttgcgttttgaactgcataatgcctgtctttcatcttgcttattctaagcttcatgaaattttttaccgtaactcgagaaaatttcaaacttcctgagttttgacttttcgttgaatattcttattctttaatctgttgagtactcctagtcggcatatttgcttgttttcatgttcgatatctcgagcaaacactcatcttgtgtg

SEQ ID NO: 344763 - DNA, 998 bp, Cannabis indica
taacaaggtgcatcttgttttcttgttttttgatagcccattgcaaaagaactccatagttaagcgtgcttgacctggggtagggtcaaagcacgctggaaggcatccgaggaagttttcctaggaagcatgacagtgaggacaaagcacgctggaaacactcgtgttagtttgtaggttcagtcattagtccatgaagctgtaacaccctaactagcataggcgtgttagcgcgatttttaatatactgtgcagctcattgctaatcaaccaggttattggaaaacgtgaataattaaaagtttgcttatttaattaaaatataacaaataacttttataaacttctgggatcccgtttacaaaatactgttacaaaagtttactacataattacaaagatttgtcgccaagcgactaaacaacagaagccctgacgtcccgaggatcgtacgctgcaggcctaaccgccccgacatgtacaatcttcacatgctccctctcacggctcctcagatttagccttgcccttacctacaaatagcaatagcactttgagtcaacaaactcagtaagaaaagcataacataataaacattctaatatcccgggttataatcaggcacccatacacctaaccataaccctaactgaatcaggaacgttcttgacaaagtatgactaactgcgaactcaacctatactcagtactctaatcgtaatgatgtggtagcagttaaatcacactatctgaataacctagcatatatgtgatggtatctcggtgcaactctatgtacacctcactgttgccctgatatgctatagatttgcgtaacacatatctgatatgttattctgacgacaactaacatgtacgctaaacatgtataaacatatggatgacattataattatcttaccttaattccaaattcaggtgtgccggccaacctgagtggaacaactgctcggtgaattacaggctcctaattcaca

SEQ ID NO: 344764 - DNA, 711 bp, Cannabis indica
cgcggtgtatggcttagtagaataacaatctaatattttagtatagcgggtcggtttagttagacattaggaatgtcgggagtggtcgggaatttagaatttcctaaaagtaccgttagttttatgccttttagtatgggaggggtaaaatggtctttttacccatttgtgttttgtcctttagtggactttattttaagttaataatcaaatttttaatgtaaatattgggctgagtatatcaagtaattaagtcattttcttcattttatgaaaccaagaaaagttagaaaaaaaaaataactccattttcactctcaagtctctctctctctttcggccccctttgagcagtaagggttgggtatttttctttgaatttcaagtaaattctcagcaagtttagtgattcctagttgttggtaagcttctatcaacccttcttttagtttcttgaagtttaaggaagtaattatttgcatgcttgatgattttgatgttgtagctgctgtgtatgtttgttgttattttcagaagtttagatatgtttaattgagtgaattcaagctggttttgttgttagttagttggatttaactaagtgtaaatctttgaactcaaaactttggattttaatggtaaaatggtgttttagctactgtagttattggttgtgtttgggtttgttttctgatgttatattatggttat

SEQ ID NO: 344765 - DNA, 691 bp, Cannabis indica
gatctgatccaagatccaatgtatccgaatgtttcagatcagaggtaattattcggatcagagttccaatctgctccaactaaatgaatctttttgacatgcctaagatattttctattattattaagttaaattatgccttttttttccatcttctaataataatggattcacaatttagtcacatatacaaattgaacaaaatgtaggattatatttatagtcggtatataatatgagtgactactcaataattataataatatatataaactaatcaagtccgattctcactataaaaaactattattttcagtgacaattttttagtcataacataaattttttgtgactgaatgtgacttttagtcataacaataaaatacttgtgactaaaacataatatttaattacaaattgtcactaatttagttttagtcacaacaaatattgtgactaaaaacatatttagtcataacaaattgtaatttttgtgaccaatgcttttagccacggaccttttactaacaatacaataatgataatttataattagccacaattttcttagactaattagtaatttttccccctgaactttgacatgtactaaatcgtgctccctgaacttttttggccgttaaaaatttcccctcaactattgagattgttaaatttaaggacttttgtc

SEQ ID NO: 344766 - DNA, 502 bp, Cannabis indica
ggtgcgtctacatattcccagactttgttctttttcatggaatccatttctgaatccatgccggctgaccatcgtttctgttctggacttgccattgcctgtttataggttaatggttcgtcttcaataccgtcaccaacgaccatattgatttcaccatctaagccataacgagacggttttgtagaaaccctcccactacgacgaggagcggtgatcttctgaacaggaactttagtagtagttttctcagttgtttcgactgagggagtgggattatcctcttcttgagtggaagaggacggaacattggaaggagttatatctgaaagcatttcctctaatacaactttacttttcggtttgttgtctttaatatagttttcttcaagaaaagtagcatttgtagaaacaaacactttgttatccttgtaactataaaatagtccacccctagtctctttagaatttccaacaaacatgcaaacttcagttcgcgatt

SEQ ID NO: 344767 - DNA, 521 bp, Cannabis indica
tggtagtattttttaatgttccattccaataccgtggtactagaacaagttgcattttttcatcatacttacccaatttgtatgctcctgattcgagaacttcaactacctgatattatccttcccagttaggtctgagcacacctgctgtattgtctttggtgtttagaaatactcttcttaggacaatatctcccataaagaatttccgagccttcacttatttattgaaataccgagctactttttgttgatgggctatcaactttaagtttgttgtggttcacttctcttcaatttcatcaagtgattcggccaggagtacgtgatttacttcttggtcgtacgttaatattctgtgggatggtggctcgagctctacaggtagcatagtttcatatccatatgccatagcaaatggggtctgtccgattgctgttttctcagttgtttgatacgaccatagaacttcaagaaattcctccggcaagtttcctttagcatcttcaagtcttttcttt

SEQ ID NO: 344768 - DNA, 639 bp, Cannabis indica
cctatttaagttacttgtgagttaagttaacttcccatttcaagcctttctttctcctcttccttcgagcagctgcaaccagccattagggggactatttttcttcagcaatcttctcttttcagagctaaactcaaacctcaagccaaccttgaaccttaaggtaagttcctccttatgttttggtgcatttctaggtttctaagctaggttttgttattctttttgaaagttttcagggttgtaggtttagatgaggtttaagtatgttatcttagttgaattaggtctgttggtgtatgtttaaattgaattcatggctgtcgggattggtttgtgagtgaggaagctaaaagaacttagttttcttcacttgagtatatgattttaagttagagattgaactactgtaatttgcagcttgggttatgctatatttatgctattatacagttctggaaagtttggttaggtttggaggagttttaggtcgaaattggagaagcgaaacttttgttcctggtctgccagaaccggtcgaccggttgcttgcaggggaaattttccgggtttccttcaggttcagttttggcccgggaagttgtgtaccatctgttttaaattaaatatgggatgctt

SEQ ID NO: 344769 - DNA, 1141 bp, Cannabis indica
tacaaagaacacgaataacctcttgagattgaacctaatcataacaggattaagatcattttgatctaggatcaactaggcgatattgacttgaatagatattacggtaagtttaataaatctaagtcaaagttcaatatcggtcccttctgatgcatactccatgcatccaacctgagctttactttaaccaatgctctggaaagaacatagcatttctccaaatgcaagtaaactctgttgtagattatcatatcagtaaaaccctatgtctgataaatctaggaaactttattcacatagtcatgtttactttccaatgtgttgacaacacaataaacaggatcaagtatgtgaaaagggtttcagatgaatttatacattatgtacatataatcatgaaataaatcatgtgaaccatgcaacattaaatgttatttctgatctatattaataagtaaatctgattatattgaaatgagttttatttagggcataaaacccaacagccattacctgaatataggggccaaacctctataaataattgtgtcttaatattaattatcattccacacatgacagtcataagcgaaatttgatcctagttagactccacgtcagttggctaaatccacagtcaacacttatagtgtttaattctgggagtgaatacaattagatctaaatatataatgggaattatagattaactattcacattgaattaatggcacataaagaattcaagatgtagttagaagggtaaaacataagttttgaccaactctaattatgaactaataattggaggaggaactacttatgttaattatatcaatgcactgctagaaagaattctataatataagtctatattttcaacgagtgtaattctatatttatggtcaagtaataataaaattaataaactgagttattgatgagttcaatagtaatttagagttaattggagcttcaaatataggtccatggtcctcggatcatatctatagcaaattgtatagggcaaggtttaatttgaggaataaattaaaaaagtaatttctatgagataggtccatggtcctcggatcatatctatagcaaattgaaaaagttgttgagttttatgccctaa

SEQ ID NO: 344770 - DNA, 994 bp, Cannabis indica
ctagctggtctaaaaccttcagaccttgagcttgacaggtcaaggggatcaccattaatggcatacatagatgccttgcccttgcctaagttcaagatgtcggcatggaagatatataccgggtgagaagacccactagcacacatcaaatatttcgagatgcaacttgatctctagaaaattactagtgatgtgcggtgttgcatattcctgacatattactcagaaacagctcaataatggtactttaagctggctccaacaaagttcatttcctagaatgagttttcccaagaattctacacatagttctcgttcttaaggtttataccatcatagctagaagaccttctcaaagtcaaacaacgataaggagaacctttaaaggattgcatctaaagattcatggctgaggccaccaatgttaaaggcctaataaaagaaggccgatatatggccatactatggggatccttccactgagttacttctggaaagatatgaaaaagatctcaacgaacaacatgaaggagttccttgacagagctggcaatttatcaagctagaggaagctgtctgacaagccagattgggtaagtcagaattaggcagtcttaggtcatcctgcagccctatgacttgccaggcacataggcaagcactagaaattttgcccatttctctagtgccaaaaacattgggggcaagcgcaacaacaacacctctggaagaaacagtggaaataaggggaagtacaacacttctcccatgccacaaaaccagacacacaacgagaagaagtacacctgcttcaccttcctaacagagaaacctaaggccatcttcatggccacttagggaataatcccgtagaagaagctgcctccaatcaaatgggagatgagcaagagggacttgtcaaagttatgtcagtttcacaacagctttggccatgacagcaacagaatcaaaacttgaagagggaaattgaatt

SEQ ID NO: 344771 - DNA, 701 bp, Cannabis indica
ttatgtataagtggtgatgagaaaagaaattactattctcttagaatgaatgtttgtaaattataagtatttcattaaaaaaaaattctatgagaaatatatgaatacttgcaacaatttaaatgtggggggaatttatgaaaaaaaagatacaagaataaattattgaggggagtgattgaggaatacaaatgagaattatttgagcgaatattatatatgtatgatatagtatgatttgagcctaaattaaccttctattatacttttcaccatagccttacattataagctttataaagtcccattgatctttagattgtgtgtatttacattagtataaaataattcgataattaggttttggaatgaattttcattcaaatatacatttattttgagataaatattgattgtcggctatgcatgcatgaattgatttaaacattagcagtatgatgagttgattgatcacacactcatagaagaattgagtttaaaaaatgattatcttgagttaaaattctaatgattgaaaagtttagattttcttagaattataagtagatatataatttttaaaactaaaattacttttcataaagaccaatttacttaagcatcatacattttatcattaacctactcgaggatcagcaagagtcaagtgtaagagaatttgataagtcgatattttgtct

SEQ ID NO: 344772 - DNA, 680 bp, Cannabis indica
gccttattgtatttagacatgtgtgagcaacacgtaggtctatgccacgtagacataaatagacgtgtgagagtaacacgtaggattacatcacgtaaacataaacaggcatgtcacacagatagattagaataacaatactgtttttatattatatgatgagcatatcattgatatattttatactgttttgctgggcttggctcaggggtgctctactgtgcaggaaaggttaagactgttgttgatcggccatgagtgcaggagctggactaagaatgtacatgtccgggccatatcaaaccaagcaggttagggtctactagtgttgttttatgagactctgttttgccgcataggccggcttatggaaaaggataataacattttgtaaatgttttgggatccaacttctgtaactttagtttataaagcttaaaatattacaagtttgttttccattcctattgtttttaaagtttaaattatgcgctaattctattagttatcccgtttatgagataagggtttcataagcatcttgggtagcgtgcctaattatttagggcattacaatttagtatcagagcgccaaggttttaaacttcatgtagaccgaccgaacatgttcattcattgacagagacaagctcgactcatggtgcagtaagtattgagag

SEQ ID NO: 344773 - DNA, 735 bp, Cannabis indica
tttaggcattatgtaagcatctagagtatttattttttatgtgatgccatgcattaaatgctatttgattaacgaatatttatatggggtaaatatatgaattaggatttaaggcaataagtgcgtaagtgtggtatcggtgcttaactcgctagggttgttgattacaagggtactagtaatggaccgtccataatcatctagaccacagggtgagcaagtagagcgtggggctgcccaaaccgatccactagcaccacctccaccttcacaaacttcgggggataatgcgggggtcggtaatgctaatcctcctgccgactgacagcaaatgtttcaagaaatgcgaagtgtcatactttgtcaagaagaagagttgcaacgattaaggaaatcggctgcccttgttgatcaagtgtaaccaccagcacatgtgccagtggtggataaccacgtgtttgttatgccgcaccgagattctgtgtttgagcggttcgtgaagctgcagcctctgactttctaggaggtattgatataataaaggtcgagtagtggatgagcactgttacccgtatcctcgataatatgggggtgacgggaagtgaaagagtgaactgtgcagccttcatgtcacaagatcatgcccgcgtctggtgggatattgtgggtcgaacacgggatgtcattgtaatgacctgggaagaatttaaaagtttgtttgaagaaaagttttac

SEQ ID NO: 344774 - DNA, 1016 bp, Cannabis indica
atatatatatatacgagagatatatatgtacacatctggaaagatttgaatggtgtagaaatattaggtagaaaatagtttattctttcatttgtatatgtgccattaattgaatgctttgttacattctgaaaagttaggtagatttaaataattgtaataataattgaattagatattgttgttattatttactgtacaggaaatattattattattatttgggaagaaaagtttcaattaaaaccaagagatgtaaagtttcgagaaggagcaaatttatcgattaatagatcgtagccaatttttattgaaaaccaaacaacgccctacagacaaaagttagcagtggcaacaaagtgccacttccatacataccagaaaacatcttaaaactactattataagtagcccaagctcctaaatctaacatagccgcacctcataaatcttagaaaggttattgagagtggcatcaaacagtccccgagccaaccacacaggcgacttaccagccagcagacccttcaccaccatttgcaatccgagaaaatagagacattcgaccaaccttgctgtagaattctgcagcacccctgctggattggcaccagttctgcttcaaaggaagacattaccatcctttcaaccgaaaaagcctccaccactgaacccgagtgatcccaaattatcactgcaacaaccccgaagttaccctaaaaggcagcgtcaacaaaaatattatattcataccacggtaaatttcaaaaaagatccaacacactagtcgcaggattagggaggatggtgccccgcggggacccgcccctaatggggaacggggcggggacgcgatcaaattttgtccccgaatgttaaacggggcggggacgaggatgacactccccgccccgacggagacccgtttaatttattaattattttatattaatattttatattttataaatgcgtttgtattttttttagtaaattaatatcatttttacaatttt

SEQ ID NO: 344775 - DNA, 674 bp, Cannabis indica
ctagatctgggactcagactaggacaagaaccaagacgaagaaccaaacacgaaccgagaccaagacctgggacccaaaattagaacttgaacaagaatcgcagaaccaggaccctagaacaagactacgaccatgaccaggacacggacccagacctagaaccgaagacagaactagcttcaaacccaaactgaaactggaactcgggtccggacacggtcgtgtacccattccggaactgagacccggacctggacctaaatctgggacccgatcccaaacacagacttggaactagatagggatcgaaatgctggacatagatctggaccgagatcctgacacagacccaaacttggacgggcactcgggacccgaacatggacctggacccgaacgttgacccagatcggggtccaaacctggacacaaacccggacataaactcggacccgaactcaaacacccacacctagaatcagacccaaagctagacccagattcggacctaaacttgaacctagactaagatcagaaccaaggacttagacccagaactgaatccagactcagatcgggattggaacttgggactcggacacaacctagacaaagatccaggaggcgaacccacacccggagcttgatatggatctagactaaaatccagacc

SEQ ID NO: 344776 - DNA, 783 bp, Cannabis indica
caaataatattttattaatttttactgcagaataatgcagacaatatttttggaggaatgactctcctatgcggagtagtgggaacattatttggaggttggattttgagttatacaggaaattcgattaattatgctttcaaggtatattacacactattctttataaatatataaattacaactttcatttttttaaaagaaaatttcaataaaatatatatatcctacattatgtggtatcatatatacttactatttcatctttcttttttattagaaaatttcaataaaataactattttccaaattttagtcaattatttactattatttttattctaaattaatatttaaaatcttgcagattcaatctttctcaacctacttaggcacatttttatgtttgggtgcctttttcaccaccaatagaatcctatttattggattatttggtatgggtgaggttgcattgtttgttgttcaggtataatacaaactatatttttaatataaatttaccatctatacatatattattgttagttatataagtatgacagtagtattaaggataaacaatatatttatgtttctttttcttactaagttattgactactaaactaattgtacttacttatcatattctatctatatatatatttgaattgttcataattattctcttttctaggagttttaatggaaccagtttttttatagggtaaatactattttagaccctctgttttacaaaagttaccaattggaccctgtgttt

SEQ ID NO: 344777 - DNA, 697 bp, Cannabis indica
attattaatttatatgtttttttgttgctccgttgacctttttctttgtctccacaagagtagacatagctcttgtgagcgatcttagacgttcttcctaggctgacagggaatcccagagaaaagttggcgcagtttcggatgaatccaggagggaagttggcgtggtttctattagggaatccaaccaacccaagacccaaacctgcaccataagacctttgtgccaacctctctctggtatcgagaaatttcttgtggttgggaataaggtctcggctgcagaaaatgggatcttctgatgaggggaatgaggtctatgctgaggttgagccttctacatgtagacggtctttctcgagctacgtgtagtcggtctttctacaagctatgtgtagacggtctttctcgaagctatatgaagacgatctttcttgagtttagcaaccctccccttgcattctttgcttaggaagatgacttaatggtttgcccctagtggcatttttgtaaagacaagttcgtaacccaatttgggttttcttatcttatatgccttgtactattttcattcgaacttaatacaattgtgttttcttgcgtttttattcacaatgtaaacaactatattttgatcaaatgtatagtacttttgtgtttttccattgctcgtaatcttcttgtttaggtagttagt

SEQ ID NO: 344778 - DNA, 1091 bp, Cannabis indica
atttgtagtttttttagtttacagtgtagataataataatgtttatgaattcaaaatacttttacttagtttatgacgtttaatatagttttgtaataacattataaatgtcggttttataatatatttgatattatatttagtattatttcgatttttaatttaaatttaatttttttaaaaaaaaacacttttgtcggcgtgtaacatgcgccggcaaaagtattattttattaataattaaatttaatatattcttttgtcggcgcatatgtcgccggcatagttaaattttattattttttaattattttaatttagttttgtcggcgactaaactcgccgacaaaaattaggtgccaaattggcatttggcgcctaatctccgtcaaaagttttgtcggcgacgtaactcgccggcaaaacgtcgacaaggacacatcacccgacggacctattttcggcaaagcctttataccggcaaacaaatgcgccggtgtaagtacttttgtcggcgcatgtcgtaatgtcgccggaaaaaggtcatacgccgatgagccattgccgacaacttttttaccggcgagaaatgtcgctggtaaagcttcgccggcgagttactcttacaatataaggccaaactccatttttcttagaatggttgattatatttgttcaatgaaaaagaataaaagaattaattaagtctacgaaaaaggataacacaaacaacaattgttttctactaagtgaaaaattgaattattgtgtaattactattaattagtttctataatagtagagccctattgagaattatgggtttccatctcaaaattaattggtgatgagtggagtagctcatgttcttatatatagctcaatatttttacattttgatccatgtgggacaatattgagagtactattttgctcgcttgcggttggctaactctttgataggtgtggatcaaaaagcccgttagggatatggctctgataccataattaaaatcttaaggttctatctcaaaaccaattagtgatgagtggagtagtccatgttcttatatatagctcaatatttttac

SEQ ID NO: 344779 - DNA, 533 bp, Cannabis indica
ggaaagccatgatgagcatgaccaccatgaaaggaatggaatccataaggaaaaccagaagttgtgccataaacagtagcatcagggaaaccatgaaagtgcatgttaaacaatgatggtattaatccaccaaaggcagtagccaaagtgaagtttcccattcttgcagttgccatggggacaaaccctcccataaatccaaacccattatttgtaaactgatttgcatctgacggaggagttgttggaggtctcttgctggcggggcgatgaggaatatcgatacccgaataagatttcgatcttgggtcagactgagttttgtcgcggccatagaggggggccaacttctcctcttgaataagagccttacaaacagggaattcctgtgattgtgagtggtgatgaagccatttgtataaacaaggccaacaaaagaggtagccacaaagagtaacgatagggtcttgagctaattcaaagcaaatattgcattcaaaatcaccagcatcattggctccatttcccgagca

SEQ ID NO: 344780 - DNA, 1110 bp, Cannabis indica
ggatcatttttacgtgaaaaattgaagctttaaggccccatacgaaaattgccatttttggctccattattgatggtacaccggaattggagaagatgactccgatctgacgcattggagctgttatgttggatagttcttgatcgttttgaggtgctaagtactgtggaaagcttccccaatctaaaggatgcgtcaagagcaatcggggacaaatttacactttgccggcaataaaaccgacgtgaacatcggcgaccacgatctgggtagttctgatgtgttttttcctaacttttttttgttagattttgattctacatattattttagggtgtttggtaaagtttcataattttcttgcaattatttaatttattatgaattatttgatttatttttttaaattaattaggttaaatacttaggttacttagaaaaatctaagtttattttagatgattaattatgagatataaaatgttaaaaaattgatagattttaattttagtcaattttacatttttcatgaattatttgtattatttataaacttaattatgaaaaatacctacgtagctcagaaaattcaaagtaaaatatttgtggcttattacaaattataaacggtgttagaatggttagatttagtttttgattatttttgtattttacatgaatttatttagttaatacttaaaataattatgaaaaatagttaagtaagacaaaaaaaaaaaaaatatatttttgtaatgctatttactatctatggtacgaaataagtaaggtttttataatttattgattgttgtaggtatttattataattatttgtgactaattaactatttaattagattttaaatagaataaatagtaaaaattgtgttcactgtttggggaacctttcaatataatgctaaaaatataattatagtgttttggaattaatttgagactatgttgagatattttgctatttttggttaattatttaggattttatgtatttttttaacaacaaatttatacataatcatagatagtatttcacacatgtttctaagtagatttgaatatgtttttatgatctgtataaatagttaa

SEQ ID NO: 344781 - DNA, 1645 bp, Cannabis indica
gcttgaagtttagcttgattgttcaattttgagttacaggggctattagggttaggttgatttgtaattgagtttttaagtttattttgagttgagaatgagttcttgatgttgtttttgtcgtgtgttgtggtgaatgaccaagtttgagtttgaaaactttgggtcattaatgacatgttttgattttatgtaaatttctgggatttactgcttggaatatgttgtggggtgttgtattaggtgttctggaaagtttggtgaggtttgggcgcgttttggacaggtttttggattgcttggggaaacctggtgcaaaccggttaaccggtttgccaagtcctgtaaaaccggttaactggttttgggacaggtttcccaagcaatccattttgtcgattcgtgttatttttagagccttggttgggtaatttcttgtttcttagggtattgtagatttagttatcaatagcagaaccttaagttggaggtttgggtttcccagattagggttttggcacgtcgtttacccgtttatgttatgtgattagggcattcatccagcatgaagttttccgttcaggtcgactagcttacttgattacttgaattcaaagacgaggtaaaaatagcgtagaacatatgatatatatatgtgaatgtatgtatgatatatatatgcatgcttattatggctagtacactaccaacacgtgtacgaaagtggtacaaagtgcattggtatagcgtacaatgtttaaagagtacgttacggtgttaccagcacaagtacgggaaagtacagggtgtgtgtggtacaacacttagtggtactcagggtacgagataaaccctaccaacactcgtacagtattggtacgtagtgtatgtggtacagtggttgtaccctagtaaagaacgttattactcatttgttaagccttgtaaataagtgtatgggtgcctaggtacaagtcgatattatatgatttgttttatgcttttcgtactgagtctgtcgactcacagttgctacttccatgtgtaggtaaaggaaaggcaaaggctgaacaagagtgagctttgagctaggatggtgcttgtacatgtcatggcggcacgacctggagtgttcggtcttgtgacatttggggttttattttgtagtcattgtgcgaccagactaaatatatttggataatgttgtaaaagtttaaatacgggatcccagtttttgtaaataaatgtataaaagtttatcaattaaatataaagttttactttgacacgattttcaaggaaaattatttgattagcaaatgtggcactgtaactgaaaaatcactgtagcgcgcctaagcatcaaggcgttacagtaaaaaccgtggaacctcccattatattcacagaggaagaggagaagaacgtgagatgtcctcacatcgatccgttggtgataacaattcaagttgccaataacaggatcaagagagtgttaatagaaattcggagctcagtaaatatcatttataagaagactcttaagaaaatggggctcgaaaaggccaaattagggccttgcatgatgaacctttgcggattcaccggagacagcatcgctagccttggcataatcgagctcaca

SEQ ID NO: 344782 - DNA, 879 bp, Cannabis indica
agcttccaataagtagatttataatttaccaagtaaattccctaacttattatttccttcttgggccactatagattcaaaattgcactctcaattatatacaacactctatatgtaccaagatatagatacgttatgattatccattgttacaatcctaatagttaaagattcactatagatgatctacattgaatagggacaaatttaccgttctaccctttaatgtattttatccttaaaacacttagctacatagatatgatatttcattaaacaaatataattactgaaatgaggcctcaatcacttctctctatcaagccaagctcaacggaaatcattatttcacttctaaatacttatagaagctatagattctatatctatgattagcgctcccactcaattatactaccatgtccttaatctatatgtcacgagaagatccaattggtcgactttaacgaataaattgaagaacataaataatacaactaacattgaaactaaccatatcaggattaagatctatagacttaagatcaaccagtattattgacttagaaagatataacaataagtttatgatatcttatccaagttcaatatcggtccaatccaatgcatactccatacatccaatactggtacactttgccaatgccctggaaaggacataacacctatccaaggtgtaagtatgtcttatcgccgattatcatgtcagtctaaatccagtgtactgacaaatcatgggacttaaacttttaaacatacaatcatgattatattccactatgctcacaatactataatcataaataaatatatgttttggactttatagaatttatacattaaacataatcatgaaat

SEQ ID NO: 344783 - DNA, 783 bp, Cannabis indica
gtttagtatgtgtgacaaggcttagtgctatttttgatttttatgtgttaagtattgtttttttttttttttttttgcttagtttggatgttatgtgtttaacttttttatgatgaatggtatgttttgcggtgaatgatatgtgattaaattctttttttatgatgaatggtatgatgaatgctatgttttattttgtcaattccttgccacccttttgatgaattaaaatagagagaaattctatgattattttttttttggcatagccttaatttttttttttggaatatctaatactttttaaacttaagtataaaattgaagggggagttacaaaatcatgcaaggtaaaactaaaaggtaaattttcttttacccttgcacacattaaggggaggctaatctaatatatattgcttcaatattttttatctctcattttcaaaataatcaaatatttgatatcattaaaaagggagagattgttaattcaaacttttaggtctccttattttgatgattaacaaatatttgattatcatttgttactaatattttgttgattttgtagcataattaaaaggtaaaataaaggcaaaattaactccaagaacgaaatggtaattttactaaaattctcaaaagtgatccgaagtggattcaacaagtatatcaactacttcgtacttgataagagcaaagtattcatcaagggatcaagaatttaagatcctattcaaaagaggacttcaaaagctcaaagtcaaaagtcaacccgaa

SEQ ID NO: 344784 - DNA, 1276 bp, Cannabis indica
gattattgatttgtttttgagcccaaaatttatagcgttccaatcaaaacaagaaaaacagaaaacaaatgaagtacccctcaactcaaggcacaaaatcaatggcagctcagcgtcatgaatttgtaagtagacttcaaataattcatttattgaaataataatttttacagaatctaacactgataacattacagaaggagcccgaaaaatatgttataccaacttggagagacagccatctgaggaaggataaaacttgggtcaatgatgctgctaaagagaaatatgtgagttacactaatatttcattttttttcttaaaattatcacataattgattatttaacaatttttatttatgtttaggagcaactcactcgtgaaatggaggaagagatggcgagaagtaggcttcaaagccaatctggcagtgattctggatcttcggaggtgccgtctgacatccaattcaaggtcatgggtgacaggagtgactatattcgaggagtcggttacaacatagcaaagaaggggaaaagatcaacaacaacatctagctcttccagccaaagtcagactcaatctcaagcagggtctactctttctcaagacgttggtattatggctgagatgtttcagagattgcgtgaacgctttcctccgggacaggacacttctgatctgtatgacccgcgatttgacagattcctccagcaatatttacctacccaacctcagggtagtgcaacatgtccaaggccgcaacaacaacctttacagcagactcagcaatctcctaatgtgcagggaagtgcctcccaatctcctcttattccgaacatgtttggacgctcctcccagtctcctccatttttctactctgatttttttggaggatcacagtcccaacagccgatgttgggccaatttgggagttcatctcagcagccgatgttttttgggggtccaatgcagcaaacttctccgggtcaatttttcggttcacaaaatccatatttttttcctggtcagtttcagcaacaacccccgaacttctcgccacaacaatctccaaatgtttcgcaacaacaacaatctccgaatttagcacaacaacgacagactcgacaatttgcggagattttatctgctcagcaaccatattacccatcaccgccagtatcgcaagctcaggacaatgcaccaaatcctgatattaacttaaacgctactggctcaaattttgaagatgatttgtttgatcaagacaata

SEQ ID NO: 344785 - DNA, 603 bp, Cannabis indica
tttaatcacacaatcttgattgctttccactgtgttgacatcacaataataaagtacataaatgtgataaggatttggatgaatttataaatcaaataaacatataaatgataacatgaaccaaatgacacattaaataagtgatgaaaatacttctgtctctttattgataatagaataataaagattacattgaaatggatttttatttagggcataaagcccaacaatagagtgatatgcccacacatagcaagtcaagtactcaatcataatcagtaagacagtggtaaccaacccgaaggagagaaagatatctaggcttagatcttgataatactctgcgacagaaaggaacaagggttagtgataagagcaaaaggggtcattatattccgctacaatcaatgtaagattttctaaactcttatgtgtttaattttattattttagagatatacatatttagaatgttaatcaacatacttgttagtaaatctagatccaagtaaaatattcccaacaactggcctcagagccatggtaatgatttactttcatgtaatatgaatttaaaaatgatgaatattgtttatgtgttga

SEQ ID NO: 344786 - DNA, 1205 bp, Cannabis indica
gccttttttgtttagatcccataagaattttacccaatcccacacacaaataccagtgtcacaaatagggtaaataccccaaggagaggatcgccaaaggtgaaaagcgaagttacaagataggaaaaggtgctccatagtttctgcttccgtaccacacagggggcacctctcatcttcaataggaaatctcctacctataaccgagcggatcggaagggctttggatagaatacaccaccaaagaaccttgagcctctcagggattttacaattccacagtttgttccacatggagggggccacctcacttggattcactctatcctcagccagagcacgataggctgatttacaggagaaacgaccattattttccaaggtccagaaccagctgtctttgcccgtgccggtaggatttcctcctttgaggattgcagagacagtattacgatcgaaaaaactattaagcttttggatgttccatccaccattaggctgtaataactcagcaacctttgactctctattcagaacccgccccaccggcgtgggagtaaaaccttttagatgagcaatccaaggatcagaccagatgttcgtctcctgaccattagtaacaagcctgcaagcaccttttcgaataatagatttggacttagtcacatttttccaaaaccacgaatcagaaggcttcggatcacactctaggaaggacttgcccttcaggtatttggcttcgaggatacggcagcataaagatttgttacctgaaaggaggttccatccccatttagcaaggaaagcctgattcatttctttggatttgcgaaatcctaggcctcctaacgacttaggaaggcaaagtttatcccaggcttttaggtacaaaccatggttccccttctccgagccccaccagaaatctcgcaccagcccatcaaccttagctgcaagtcggttagacaacttggtagtttgcatagcatacagtggcaaagataaccccaccgactttataagagtcgctcgccccgctttcgagagcgtctttgccttccaaccatgaagtttctcagtcagattatccagaatgaagttaaaatcagcgtctttttgtcttgatctgaataaggggagcccaaggtacttaacgttaccttctggtgatccaactcccagcgtttccttgatcctctgtttca

SEQ ID NO: 344787 - DNA, 676 bp, Cannabis indica
tctatggaagaggttcggaatggattccactatactcggagacatgcttttgtcaaagtctcggacttattcttagaaggttcgagagtgtggaatgaagagcttattagagctagctttgatgaagatgtggcctcggctattctaggcatcaggccgttgttgagcagtggagatatcaccttttggaaggggtccaagtctgggcatttcacggtgaaaagtggctattgggtaagtcaatgtggcagatttaaaagacccctcaaggtctgggagagattatggcagtctaatattcagatgacttgcagtgtttcttctcggatgcatctatcttgaatggggctgctggtgttgcagctgtcaaggttaatgttgctgatgttggggattcatgggttgcttctcgcttccatacggtttctggggttctcgaaggggagctgttggcaatttacttggctctacaaatggcgtgcgatttgggtgctaaaaagatcaaagtcctgtcggactctaaggtggcgatcatggccttgaaaaatggttgtttgccttatgcttggggcacttaccctgtttttgaatcttgtcgatgtatttgtaagtgttttgatcttgttgtgtttgtgcattgccctcggtctgagaaccgtgtggctgatgctgtagc

SEQ ID NO: 344788 - DNA, 501 bp, Cannabis indica
taagaacttttaaaatctcataaaaagtgtaatttcctcttctttttttcatcaagcgtccctttctccatatcatataaatatatatatatatatattaggggaaataaatacaaaaacattacttaaagagcaagctggactcagaattaaaattaagagaggtatattttttttaagtaatttgcagtaaaagtccttaacaagttcactttgttacaaattagtcctcaagctcgagaaatggcgacaatagtccttaaggtcacactctttataagtttgatagtcctaaatttaactgctctgttaacttattcaaaagtaccacgtgctgaagtcttattggtccaaataataattttaattaaaaaataatttaaattaaaaaaataaaaataaataatgtattctgaaatcataaaaactattattattattccccttcttctccttcctccagcaacacccaatcccaactcttcatctctctctctctct

SEQ ID NO: 344789 - DNA, 846 bp, Cannabis indica
aaaaccaatgcccccgaacatagactttacaaaaaaaaattagaattctcatcatgcaagtcattagtcaaattggcatgaaattctttgacaatattttcaatataccctccaaaacaaatgagagtattttcccattgatggtattgaacaaacttaacaataccatataccctatgagcatgcaaattataattcctctcactttcaaattttcgagtagcataaagattccaatcacgctcattatctcgataataaaatctagaatttacagcttgagatggagagatattaccaggagaagaactctgcataggctgcttgcctttggcagcagcaaaagccttggctgctgaagatgcacgagaaggtgctagaacagattttgtcaaaggaggctcaggttcgagttcagattcttcactgtcagaggagactccaaagttttcaggaatctctttttcagaatggagagaatcagatttggtcttggagtctcagaggagacctccataggttcttcttcttcagaactcgaagaaaccgaagggggattcattttcagtttcttggcagaatgaatgggtctctcatggcttcgtttagagcgaagttgtaacaccctaactagcataggcgtattacatgatttttaaacatactgtgcagctcgttgctaatcaacgaggtttatggaaattgtgattaattaaaatttttactttttaattaaacttataaaatatttatacaaaatactcgggatcccgattacaaaacattttacaaacgttcactgactatacaaaatacttgtcgcctagcgactaattacaaaaatag

SEQ ID NO: 344790 - DNA, 877 bp, Cannabis indica
gtattttcatgctgctgctagctcaagatggaaaaataatttcattcatgagttaaaagatgagaccggttcttgggttcagtgggggtcaggtttgtctcaggttatggtagactactacactgatatttttcattctagggggtcgaatggtgcggagcttcttgatgttatacaaccatccataacatatgaggataatgttgctcttttacagctagttgtggaggaggaggtaaggcatgctgtcttccaaatgcacctagacaagtcacctgggcctgatggattgacgcctgctttctatcagaagtgctgacatattgtgggtaaggatgttgttaagatggttcaggatttcttccgatctaagttcatgcctcggggtctaaatgctactaatcttgttctcattccgaagaagaagtctccttctgttatgggcgatctgaggcctatttctctttgcaatgtatcatataaaatcatttcgaaagtcatggctaatcggctcaaaaacttattatcaaagatcatctcggagtttcagagtgcgtttattcctgggaggctcattactgataatgttcttggttcgtttgagatattgcattatcttagacgtaagcaacaagggaagaatgattgtatagctctaaaacttgatatgagtaaggcatacgataggatggaatggtctttcttacaagctattttattacggatgggctttgcagaggcttggattgacatgatcacggaatgtcttcgaatgatttcgtataatattgttcatggtggagaaagtttgggtcctttatcccatctcggggaatccgccaggaggatccgttgtcgctgtatctgtttatcatct

SEQ ID NO: 344791 - DNA, 632 bp, Cannabis indica
atcttaataatcttgaaaaaaagattagaagttcataactagattgaaataaaaattacaaaataacatacttgatatgctcttaaaaatgtaaaaatagcagtaagaaaatggtgtagaaaagaaatggtagaagtgaagaggaaagttgtgtggaatgaagagttgatggatgaatagtgtcttgaaatggtcttccaacaccatatttataagaaaaatggactcattaaattgattaagataaaataattaaattaattaatttaattggtgttgggaagagaagatataaatagagtaaatataagagcattgaaaaaaaatattttgtaagaatgtaaaagtggtaaaatgtagggttaaaataaattaagaatgtttatttaggtgagaaaaattaggaaatagaaataaattttatgtgtaatgtgggaaaaaaatatgggttttggactcttatgtgtgtaattttcagatgataggtatgtaatgaacgctttagtaatttggattagtaaagtcaattagcactaattttctgatatttttataattatttatgaatttaattaattgtgggccccattattagaaatgggcactagagttataatttctcaattccggag

SEQ ID NO: 344792 - DNA, 694 bp, Cannabis indica
atgacattcacacacaatgggtatgttgtgaagtcggggtccttcagtttgagttgtatgtagaaatgcaggctttgatcatcctttatcctcaatggttggtatccttccttcacttgatatttcagttgcaaaacagtgttttcttggttgcattccaggacatctttcagcttctgttgtaattcttcatagttacaattggctgaaatgtaatgtccactagcttcataattttcataattcattcgatcatcaaattgtccattgtagaagactaggaatggaatgtctttcttttcctgtgattttgaaatggttattagtgcaaggcaacgattttaaaactggtttgattctgttatgaaatagagtacaaacttacttctatttctgtccctttgttcaagcattgtatttcctgtcctgattcctgcttttgccattttttttttttgttgctgttaataaactataaggaaactaaaataaaactattaagaaacgtcaaaaaatatttcagaaactaaccatttctcaaagtgttttctcctttctcttttccaaaataaattcctgcaaaaaatgtaattaaactattataaaatgattatgcaactgtaaatcaacttaaaaaccacaactctttactcaaattaacatagtgtttcctcattgtcacttttcatcatgt

SEQ ID NO: 344793 - DNA, 1065 bp, Cannabis indica
attcaaattgagtcaaaattactaacatcttgctaatttaccatccagtgtgtacaaaaggtttggtcgaacccaaaaccccgaacagataaaagagtatacttgtaaaaaacaagtgaccaagagtcatacctgtacaaagcatttggtaaagataaaacagccacaatttcacgatgattataaacagggaatgaaattcattaaagataataaaagcacataataccgggattaaaagttgcctggtcagccttttgtttctaaaatgaaacataatttcaagtttaaagaccgcttggccggtcatgatgtcttaaaaaaagggccttaaggccgaataagatatataaaaaagaaggataaaaagagaagtagttaaacagctggagtcccaggctcttggttcgggtcttctgggcgggtaggagctagaggatctgttgactgagtggaaggaacatcaacattatggccagaggtagaagtagtcgcctcaggttcaccataagccacttgggaagcgcagaacttgagatacatgtatttggcttcacccaagtaatcaaaatttgccttagggttagccttccaaaaatcataaaagagctccaggccggctatctctaaggcatgaactttctcttccagcttcaccacctcagctgtaagctcctcctccttagacttcttctctcttccagccgacggaagacagctcgaagggccgtcctttaatcttggagactattcacttctgcaaataaggtggcgatagtctcttcaagtcggttagaagcctcgagatccttagtcaactcagttattttcttcagagcagtaaaaagcttcttgttgactttgcccaactccatccgaacagctccaaggtccaccctggcgtcatcagcatccttgttggccaagtccacctccgccctcatggtgttggataaagctgcgttccaagaagaagcagacttagctcgggagtatgtgtaagcaaactttagaccagcgtacacagaaaaaaaactttaaggtctgaaccaaataaagaagaat

SEQ ID NO: 344794 - DNA, 969 bp, Cannabis indica
ccgactacgggttttgtccaagcccttggtcttgatctggatccaaatctcgggtcccagtctggttccatttctggtgccaggtcacgagctgggtccgaggttcaaagttcgggtctgggtcaggtgctagatcccggtcctagttctttttcccaagtccctatcctagttctgggtccaggtttgggttattgtgtgggtttgggtcccggtctaggttcgtgttcgagtgcttgtctccaatcgggtttaggtctatgtttgagttttgatctgggttcgggtttgggtttaggtccgggtctcagtcctagtcctagttcagttctagttccattttggattctgagttcaagttggggtttgagttccagtcggagttcgagtcctggtctgagttcgggtttgggttcggatttcagtctaggtccagatcaggctccgggtgttggttcgcgtcctgggtcttggtctaggttgggtcctagtcccaagtttcaatcccaatcatagtctaaattcagttctgggtctaactccttggttctgatcctggtctaggttcgagtttgggtccgggttcggctctagctttgggtctgattttaggtgtgggtgtttgagttcgggtcggattctgtgtacgggtttgtgtcgaagtcttgaccccgatttgggtctaagtttgggtacaggtccaagttcgggtcctgattgcaggtccaagttttggtctcggtcaagatctccatcgagatctagttcaagcatttcgatcctagtctgggtcttggtccgagtcaaggttcgtatccggatccctatctaggtccaagtttgtgtttgggatcgggtcgaagatttaggtccaggtccggtctcagtttcggtctgggtacacgaccgtgtctgggcctgagttccactcttagtttgggtctgaggctaggtctgtgttcggttcta

SEQ ID NO: 344795 - DNA, 530 bp, Cannabis indica
atagagcgttctatatgactcagagtgcaattccaagttctatggtggatgcaataaggaattaataagtcagggaatttacttggtaaattctagttctgcttattggaagcccggttgtataggcccatggtccccatactagttgagaccatactgcttgtaaaactcagataattgattttaattaatcaattataattctagaattagactatgtctagtttatgaattttcactaagcaagggcttaaaagtgaagaaaatagattctagggcttagttattaattaagagacttcattaagtctaattaataaatatgataaatggaaattttatttgattattaataaaatagttttagcatataagtgattaaagttagaaaaatggcatttttgagaaaataaggaaaaattgttgaaaaatggcaaaattccaaagtagggcccactttctatggccggctactttgagagagaattaccatttaatttttcaatattttaatgcctaataaattctaa

SEQ ID NO: 344796 - DNA, 700 bp, Cannabis indica
gagaaggttggactggtggcataacgtcagcttaagctctttcagcagttcaaaatgtgttccatgtttacatgttacgaaagtacgtttctgatcctactcatgtgttgagttttagaatcttgagctacaaccagacctatcatacgaagaatagccactttagattctagacagaaaagataaggttcttcggaacaagacaatagctttggtcaaggtactttggagaaataacaagctggaggaagacacctgggagttagagtttgacatgagggctcagtatccagagttattcacattagatttcgaggatgaaatccttttaacagtgaataattataaagaacgcttagctttaatttggaaattagtagataattcgggtataattatgaaattagaatattaattataaattatcattttatggagatttatttgaattcagaatgtattttatatgccatatatggacttttatgtttttgcatgttttgtgcccaacaatatcgaaacgcagcgtttgaccattagaatcacattttagtatttttagtacagcgaggtattatagttagacaatggaaatgccgagaatagtcgagattttagaattgaccaaaataaccctaagtgaattagaagctttttagacagtgaagggtaaaatagtctttttggccatttgatcctt

SEQ ID NO: 344797 - DNA, 980 bp, Cannabis indica
aattaaattaatttcatcattttacccttctcgggtcataattactaaaatgcccctggctcaccaacggggtcttaacatataattaatcaaataaattctcatatattgaactatataataatataattcctcaattattcataattatctaattaggattttgctaatccatttcataattttagggtattatacttacacactatgattgagtatttgagttgttatgggtgagcatgtactttttcactataaggctcgaaaataatgaagaaggagagagagggagatttgaaatctatagaaggaggctctcaagtttctagctgtctcacaaagttaggaaaactaggataataggttggatcagaatgagaatcatcttattccttatataggatttctcctagagtttgatttaaattatatggaattaaaaaagataaaaattgacaaaaattctcttaagtggctagccatacaaagtgggtcccactagttagaattttgtcattttattcaacaatttatcttttctttcactaatgtcatattttccgatttcaatcctttaaatgtcaaactatttatttaataattaaaattaattatcaaataaaattactatttaatttatttattaattagacttaataaagtttcttaattaacaaataaaccttaaaacatcttatctttacaattaaacccttgcttaatgaaaattcataaataagacatagtctaattttaaaattataattgattaattaaaatcaattaactgaatcttacaagcaatattatctcaactagtgtggggaccgatgggcctatataatcaggtttccaataagtagatctagaagttgccaatttaattctctaacttattaagtagacatagtctaattttagaattgtaattgattattaaaatcaattactgaatctataagcaatatatctcagctagt

SEQ ID NO: 344798 - DNA, 789 bp, Cannabis indica
agatcaagaaaaatttgttgtttactgcgatgcatccataaagggtctgggatgtgttctgatgtaagctgacaaagttatagcttatgcctctcgtcagcagaataagtatgaacaacgctacccaacacatgacctagagcttgctgttgtggtttttactctaaagatatggcgacattatctttatggtgaaaaatatgagatttatactgatcataaaagtctcgagtaatttttcacccagaaagatttaaacatgaggcagagaaggtggctagaacttgttaaagactacgactgtgagattctgtatcaccctgggaaagccaatgtggtggctgatgcactgagtagaagaggtctcgagtagatttccactactattatgatagcccatcaactatcttctgagtttgttagtacagggattaagtttgtagttggaaaattacacaacttaacactccagtctgatttgcaagaaagaatcagaaagacacagttagaggattctgagctagttaagattcgagatgaggtaatggctggtcggcctaaagacttttcaatctcgaataatggaatgttactgtataaagcacgagtttgtgttcctagtattgatgagcttaagaaagagatccttgatgaagctcacaccacaccttattcactgcatctgggaaccaccaaaatgtatcaggatttaaaaccctacttttggtggtatggcatgaaaagagatgtggtagactacgtgtccaaatgcttaacatgtcagcaaat

SEQ ID NO: 344799 - DNA, 970 bp, Cannabis indica
cttaagtagatattaaaaatttttaaagtgtcggtgcaatactcaatgttttgagcaacttgtgtgtggtgaatggttgactatagatatatacccacgctatgtggctcacgccaaacaaaagtcaacatttaaagccaaaaccatatataaagataaaggccccgatggccaagtaaaaaggttaaagacataaatgtctcaaaagtaaagttacgggattaaagactgcccggacagtcatgaatctctgaagagtactagtgggcataaaatctgtaaaagtagaaatacatcaataggaaccatcaagtaagtcattaaggggacagtcatctgttgcctcaaccccaaagttgaggtatgaatcggcctgaatgcaagctgtctgcgccttctccctggcttctgcctcctcacgattgcgacaataagatagcatactttccatgttcttacccagataattaaagtcagccttcttgttgtttagccagaatttgaagaaaacatcggtggagaggtctccgatctgtttcacctccgcagctagcttctcacactccttggcattaatgttgttttcctcgacaaccttggcatgagcctccttctcactttcaagctcacccctgaaacgctccttctcagcagtaaccctttcaacggaagtttctagatcacaaatcttctgggagtattcctggcgaagggcatcaagttcaagttggagtgaggccgctccttgcttgttgtgctcctcttgtagggcgagaaccctagattgaccataagaagtaatggtggcagcctgttacacatcattacataaatgttagataatggtaaaaggaaagaattttcacaagtaggagaaacttaccctaatcatctcgcggcaccaaagagcaacgatctgggcagggggcaaacaatctagcctagacatggtcttgtccatgatgtccat

SEQ ID NO: 344800 - DNA, 801 bp, Cannabis indica
tcgccctcgagtaaaactaaaaactaagacaaagcaaaaacaacacgacggataactgagcctaccaaaaaaattaaactcccactgccacttgtgcaacttcaatcaattggccaaaccagaatttcaatttaactactataggaattaacttggatgcataagttagagaaaattatgtatggatgcaaaacacttcaattggaaaaacatatcacactcattctactcttacccacgttccgccaaccgatgttcaatatgcttgcatgacctacctctctcccctaatgttgacaacccctgctcggaatcaaaagatctttcttggttgaaacatcatggcttaggtgaaaggtaggtaaaaggtcatttaggctttgttataccataagcaaaatataacaaacaaacacccacaattatccatatttttatcccaaagaaacttgtaaaatattgagaacttccacttcatgtgcctaccatcatgtttttttttccttcttctttaaatcgatgcttttttttcttcttcttttcttcttcttttctttttttttatttctctttgtttttaatgatgagtaagacactttcacattacataacttcctcaatctcccatttctaaaataatacccactcataacacttaattccctcaaacttatttaaaagcttatggcataataaggtacattgggaattaaaataaataatagaaacaaattaaggctcaataaaaatggttaaaattttagaatcaggctaaggctcaactttggttatactaaggac

SEQ ID NO: 344801 - DNA, 712 bp, Cannabis indica
agttacagagttgtattctgtaactacagaaaaactgttttcagtaccagtttcattattccgcatttaattaatcacttaattaaataattaaactgggaatattaaaatacggaatttcaatttgtatcagagcaggtcactaaattcttagtgagatctcaaatttattccgtttaatttgttttgtgtgagatgtctttgtttgcagaaggaagctctatctctcgaccacctttgttgaatgaatcgaactatccttattggaaggtcaagataagagcattatcaaatcacaagatgagaaggcttggagagctatacttacaggcttgacacaacttgctgaaagtgatgataaaggtaatactaaggtaaaacctaaactcaattggactatcgaagatgaaaaactgtctcgttagaataataaggctttacatgctatttttgataatgttggtgaatgctttattaaattaatttcatcttgtgaatttgcaaaggaggcgtgggaaatccttcagattcagtttgaaggtaccgctgatgtaaaaagatcacgttttaccatgttgaaaactagatttgatgaattgagaatgttagaaactgaaattttgtcttatttttatgaaagattatctgatatttctaatgagttttttgccttgggagaaaaattagatgaatctgtcttggttcggaaaat

SEQ ID NO: 344802 - DNA, 855 bp, Cannabis indica
tattaatttttcgtctactttcaagtaaatatatttgcagaacaaaacaaaaaatattttaaaacatacattgcgatttccatacaatcatcaaatatgcacataaaccatccaaatcaacacaaacatttttaaatccatatttcatgaaagtaaatcaataccattactctaaggccagttgttggattatgttttaccaggatctaaatttactaccttgtatgttacttaacatcctaaaatatgaattttctaaaacaatgtaatataaacacatataaagtttgagaaaccttacattgggtgccgaggaataaaatgactccttccgctcagatctctaactattgtatcctttctgtagcatagcatcaccaagatctgagcccgattctccttctcttgaatgggattcttcactgtcttacataatatgattgagtaccacttgatgtgtgtgggcacgtactctatcactatagggttcaaaatattgaagagagaaagagagagagaatggattcgaaaaaagagagaagagatggctaaaaatttgactgaaggcaagtgaattcatcatcttttaatttgagaccatcactatctatttataggaatccaactaggtttaggtttaaattattgggcattaaaaaaattgataaaataaatgccatactttccaattcaaccatttaaatctcaaaactatttatttaataattaaaattaattatcaaataaaatttctatttaatatatttattaattagacttaataaagtctcttaattgacaaataaactctagaatctcttttcttcacaactaagccctaacttagtgaaaatt

SEQ ID NO: 344803 - DNA, 726 bp, Cannabis indica
gaggaatgtgaaaaagctttacaagagctaaaagcataacttgcaaagccccccgtactcacaaaacctctggacggagaagaacttggaatatacttagctgtcacggagcatgttgtgagtgccgtgctaatcagagaagagaacaacatacaacacccagactattacatcagtaaaagactcattgaggccgaaggccgatacccattgatagaaaaactcgcttactatcttattctagcaacaagaaagttaaggccttattttcaagctcacccttttcgggtgtacactgaccaaccactacgccaaatattgcaaaagccagatgcctctggacggcttctcaagtgggcggtggagttgggccaatacgaaaaccccgaacagcaatcaaaggcctagccttagcagactttgtggtagaatgcacaggcaaggaagaaagcgtactagaaagtgacctcgagtcggtacaaacacctcagccaagtaacagtgaagataagccgacttagaaactacatgtagacgggtcggctacagatcagctatctggtgcaggaattgcccttgtcacatctatgggcaacacctgcacgctgcactcaagtttggatttaaagcatctaataatgaagtcgagtatgaagctctaatcgttggcctaaaactagctctagagatgaaagccgaacacattgaaatctgtagtgattcata

SEQ ID NO: 344804 - DNA, 635 bp, Cannabis indica
atatgttcaaaagtttaattcccatgatttttcagttcactgaatttagactgacatgataatcggcgataaggtatacttagatcttggataagtgttatgtccttttcaaggcattggccaagtttaccagtatcagatgtatggagtatacattagattagactaatattgatcttggaatatatatcataaacttactgttatatctttctaagtcaatatcactaattgatcttaggtctatggatcttaatcttgatatggttaggttcagtttagttgtgttatttatgctcttcaaattgttcgtggaagctacccaatggttctggcggatatttacatcttaggaacatggtaatgtaattgagtggagtgctaatcatatatatagaatctatagcttctataactatttagaagtgaaacgataatttcgttcgagcttggctgaatagagataaatgattgatgcctcatttcagtgattatattagtttactaaactatcatttataggtagctaagtgttttaatgacaaaatacatttaagggtagaacagtaaatttgtccatattcaatgtagatcatctatagaggatctttgactattaggattgtaacaatgga

SEQ ID NO: 344805 - DNA, 1169 bp, Cannabis indica
acactcggagtcactcggggctcctgaaagaattttacagcaccctcggctctcaaagctttttcagccatttcagcatatgtggttgcttcagtggtagtgatcaccagatcatgcctgatcttcacattcaaaccggccaagtacttctctttcttaataaaatcacttggcatgattcccacatcgagcttggctagacggtcaaacttggtagtatactcagtaactaacatcccctcggtttgcaccaactcagtaaactctttccacttagcactgcggacagcttcattgtagtatttagagttaaacaactctttaaattcttcccaggtcataactgtgacgtcccgagtgagggttatcaactcccaccacacgagagcgtcctcctagaattgaaaagtggcgcaggtcacctgatcattactaaccactcccataaagttgagaatacgttcaatcactatgagccactgctcatccttcatcacatcaggacctcccagaaacactggaggtgcttgtttacggaacctttcatacagtggctccatacggttgccaacaacaggttgttctgctggcaccactggaactgcaacggcctgagcaacttacttaggaggcacggtaggaggaccttgctgcctcaacctctaaatttcttcatccttctggcggattcgatcttgcgtttctacaaacctctgctcccaatccagaggagcttttggtggattgactggtcgaccaccctgtgctctgccacgaccacggccgcgaccacggggattctggggattttcatttccctgaccgcctccggtctcaaccatgttacattgaattcttgtatttcgcggggcgtccattttataggacttagcctgcgaacccataagccaggcaggttagacagcgatcaacaacttaataccgctcttatgaacttaaaggcaacacacttaaaacaaataattataatctaatatgctccctaacatgctgtcataatcatttagaatactaagcaactacgggcttactgaaccgtgagccgagctttctctgatgaagattgtacatgttttggcaagcttcagtagacaaacctggcggctctgataccaaaattgtaacgccccaatgctaaggcacgctac

SEQ ID NO: 344806 - DNA, 773 bp, Cannabis indica
gtagacccggaaccgtaacctgaccaggacctagacctaaacccggacctggacccggatcccaacccagacttggactcgaacccaaactcagacccaaacatggaactggaattaggataacgaactggggccaggacctaaaactacaccccagtcttgatcctgaatccaaactcagacgtgggacccaggacttggacaagaacaagaccgggacccgtgatagggatccagatcttaactcaagatccgggaaacggggcttgcaacagacccgtagtcggtgcttggatctaggacttagactaggacccgaacccagacgaggatccaaacccggacccagacctagacctaggacctgaaattagaacctgaacaagaacttccgaaccaggaccatagaataagactaggactgtgaccaggactcggacctagacctagaaccgaactcgaatcttgccatagacccaaactgagacagatgtcgggcccagacccggacctaaatgtgggatccgatcccaaacacaaactcagacctagattggggtccaaatacgaactctaagtccgacaaagacccacaccgagattgaaacgcgagacctagatctggactgagatcctgacccaaacccaaacctagacccgcactagggacactaacttggacctacacccgaacccagacttggacaaggattgagaccccaacccagacccaaacccaaactcgaacccgaacccagacacagaatccgagt

SEQ ID NO: 344807 - DNA, 1125 bp, Cannabis indica
agaatgaaactcgtgcaaaccctcgtaagaagaaaaaagtgagttagaccttgagaggaagggcagggttcggccacaatcatgacaagagtgatctacaagagcatctgaacctaaaaaagcatgacctccgttgattcaagacaaaagaattcattccatttgcgaatgagcaggttagagaataagtccagagtacatcaaatcacgaaacccaggagacaactggggcacgatactgttggaaaacttgatttagaagcctcaggatcaatgaaaaaagatgattctaaaacgctgcctaatgacaagaaacccaacaagtatatccctttttatacagaatacaccgagctcaatgaaactcgggaaaagatctacctcacatatgtacaagaagccgtttttggcaagccaagacctatgaaacatgtgaggcgcaagagggatccaagtaagcggtgtgaataccatggtgatattggtcataccacagaagagtgtcgtcagttgaaagatgagatagaaagtctcatatcgcaaggacaccttcatcgatatataaagggacaggaagatgcctatgatcagttcgatcagcccaataactcgagcgactgaaggttataaaccctcatccatgagaagaagggacactttggttatctcgagagggagagggtcgcaagagtatgaaaaacagttactctggtaaaagcaaacttgtaaaagaattgcaacgtgagtatatactggctcgttatggttgccataactggacgtcaaccagtggcagtcgaagacagaactaaaaccaggattactcaacttggaaccccgatatatttcacggatcgaccttgaatattgaaacgattgtgggagaatgttggggattgaccctggacatcaaaacctgttttatcaaaaccagatgttcctggaagattgataaaataaacaattgaactggggaagttcttttgagattaatgattgtaaatcacaaaactgatggaatattttgaattccatttgtaaataaaataatcatttctttgaaacaagtaattacaaagcgcaaaatctttaaaattacttaaggggcatatatgtatgattaac

SEQ ID NO: 344808 - DNA, 486 bp, Cannabis indica
atatcaaaaaattaataataatctattaaaaaataaatattattaatttaaaattgatattgaactttaaatatattaaaaataatattttaaattgaaattagggtttgaaacaaaatttcaaaatttgggaaaaaatccccaaaaatcgcattttttgggtgcacacaccctggctgccctcaaaacagcctgcaagcagcccatttcgcgcgcgggagaagggatttgtaggctgctgcgccgagaactctcggcagttgcagcatcagctagggcgcatcgtgtctaaaggagggttgtaggccgagttcagacatggagctgtcccaagcacgtgctcgcgcggatcctccttgtctgaaggtctgtgcatgcgaatggggtaccctcgacaccatatgcacccgatttttcaaacaatcataactctatcattttttatcggaattgagttccgtaaaaacaaaaattgcttaatttttc

SEQ ID NO: 344809 - DNA, 878 bp, Cannabis indica
cctagggtttttgttaaaaaaaaattatggaaaggggggtaaattagtctttggtaaaatcaaatagtgcctttgactttttaggctgctactttgtttttttttttaataaaaagaaatgaaattaaaagaaaagagatgaaaaatctcatttaggaagaaaacttccaaggcaaggaagccacttctcttcttcctctctctcttcgtgacttagagctagccaaaccaggggattcattttgatttctctcagcttttgagcagatttgatacccaagatcatccttgaagctttggaggtaagttcttttccttggggattaaaatttttactaattaaggttggttttggatgagggttttgagatttcgtggctgtaggtttagtttgggttgagatgatgtttttaggtctgttttggagtgtgttgaagtttgaatcaagtgattttaatggctgcttagattgaatgtatttgattaagcaattttagcttaattttcatgtgagatggtgaatttgagctaaatgatgaattgtgattaattgatgagttggatatgttgtatttggtatattgaactattctggaaatgcaatttaggtctgtgatggttttggttcgagcaggggaagaaaacccagaaattttctagtctgacagcaaccggtcgaccggttaccagcaggggaaaatttctcgggatttctccgaacccagttttgactcggggtagaacctagtacctgccttgattgtttttgagttatttgagctattttaaagttgtttaaggctaagtctaatcggtttaaaatagggttttaatccggaaaatatcaagttaaggtattcatttgagttttaattgtc

SEQ ID NO: 344810 - DNA, 601 bp, Cannabis indica
aaataaaagctagatcaaccatgaggtggtagtcttccccagcaatgtacatattgacctcaccggcctacatgccgagttgccaggagttgtttggactgattgtatctaatgtgtattttgattttatgtctaaatggttgtcacatatatttttctagcaaaactttttataatagggattctcggaacaacctttttatgccgttataatgttcgtttttactattttgttttagtcaagtttttaatattatcacgatttttaataattaattattctactaatattaaactagtttataaaatcatagacgtggtgtccctatagattagggcgttacagaacttgtgacacgtggcagtatagctcgctaaaaggaagaccaagtcagcatccaaaccaacgaaggccccaacactaaaacggggatcgagtgacaatccagctcgctctcgagagctagctagccacccctagtcatccctatggccgaccaggccaggaaacagcttcatcgccagccagcctggccaggaaaaggagatggctgaccaaggatgtaacaccctaactaccataggcgtattacgtgatttt

SEQ ID NO: 344811 - DNA, 874 bp, Cannabis indica
ttttgaaaactaaaaattaaagtattgtttcaaatatcatataatttaaaaataaactttcttagttatataaataatgtaaaataaacttttttaaatttgttcaaattatttgtgctgctaatatgataatgagttatattaaaaaactagtattattttatgagtgtgtgtatataatacgtaaatgcatcaaatgataataaaataaaataatgaataattgagactttaaataaaaaagttataagtaaacttagattaataatattgaatattaaatatgtcaataaatagtatatattacatataatatatatgttcggtcggttatctgtttaatcggtcggtttgcgaatgacattaaaaccgaccatgttaaggcggttttaaccaaagacagtttttttcgattttttattttttcggtgttcggacggtcggtttactcagtttggtcgatttattgaattttttgctcacccctaacgtcaggttttggttccaatttggtgtcacaaggtacgggttcgggtccaattttgggtgtgggactaagttcagttctggatgtgggttcgggtctttgtcagggatcgggtccagggctgggtcccaaatcaagacaccgactacgggttttgtccaagccctgggtctagattcagatcccaatctcgggtcccattcatgttccatttctggtgccgggtcatcagcttggacctaggttcaagttcgggtctgggttgggtaccaggtgccggtcgtagttctgtttcccaggtccctatcctgattctgggtctaggtcctggttattgtgtgggtttgggtctcggtttaggttcgggttcgagtcctagtctcggtt

SEQ ID NO: 344812 - DNA, 612 bp, Cannabis indica
gttttttttttttgaataaattagggaatttattaattaataataaactcattcaaaataatagaacgcacttcaggggaacaatcctccaattgaaggacacaatctgtagagaaacaagagtctcttgccaaacaatgagccaacttgtttgcagatcgtttgataaaacataactcaacaaaagataaagccaaaagtaaaatcccaacatcttgaacaataagaccaaactgtgaggacataaaaacattaatttggactacttggacacacaccaaactatccgtttctaacactacattgtcccagggatgagttgtaatccaactcaaagcttctttaatgcctatgatcttaacaatttcgggttggacatacccaacctttcccttcttgaaagcttatactatggttccatgatgatctcgagctacatagcccactccaaactgcccctcttgttcaaataaagtcccatcaacattaactttaatcttgtttaacacaagtgcaatccaacgctcacagttccaccccccatcattcaaaggagacaatgaaaggcccttccttccctgagcaaacgtgtattgatcaagcatgattcta

SEQ ID NO: 344813 - DNA, 637 bp, Cannabis indica
ataacctaatatatatacatatagataatagtaaaaaggtacgtgcgaggcacgtatattaaattttatgctaagtattttttattttatttaaaagtgatacaattaaaaattaaagaaaaatattattagttattaggtaagattattattatgtatacaaataatataatatataatcttgacaattaaaagtaaatactgaatgcaatatatgatgatctcaatacactaagataccttgaatatctctttgtatgcacttttttttgacaattcaagtactgagtccattcctgaatccaataaaaaattataaaagtcctaaaattgatcacaacaacaacaaaaaaagaagaaaagaagtaaggtcatgatgtcatagaatgttcatacaaatgattacacattttatgttcataagtaccgcttcattgctgttagagcttataataccttcaagttcaccctgtgaatttattgcttccttatactgaccctcctgaattaattgcctaatcttctcagataaactgttttgtgaaatgaggtttttgattagataccagaaaagcttttccaatctcaagaacataagaaccaaaattaaaaaaagaacctttgtgattgcttaaat

SEQ ID NO: 344814 - DNA, 819 bp, Cannabis indica
aaaataattaaagttgaaaattaattatttaaataattttagatcaacttaaatcaattaaatgtttcattaatgctgaattaaaataaatagactgaaatatattacattttaatcagaaaataaagaaattagttagtgaaaatctatattgttattttctgtttgtttgaagtttttttctagttaaatttaattaaatagaaaattaatatttaagttgattttattcaagaaacttaaatatttgataattttcgtaatatttaattaaataggaaaattatatttatgttgaaaatttattaattaattaattttggacgaacataaattagaataatttttcacgatttattttattttattttatgaaatttcgaaaatttatttgatttcaatacattggattttcgaattttgctatatatatttatagaaaattaaatttgaattaaaaattaatttttaattaattttggatcaacttaaattgaattatttttgaaatatttattgaaaattattactaagatggaaaataatttaatttattttcagatcaatctaagtataatttattttctaaattgaaaactttaattaaataaatatatatttaaaataaatagcgtaaaataaatattagaatgaaaatacaacttcttaaaaataatgagctttagttataaggatattcgatctccattgttggtcctacatggttaaatattttctaatataacctcgagatgctagacttcgtccgccttgtggatggttattcgttgaagtatttaacaccgtaacgatctctta

SEQ ID NO: 344815 - DNA, 796 bp, Cannabis indica
gctgcccatgttgcaagcccagaattgggaaaacaggttcgcagaaaggcaagccagaatcgaggaacaagataacgaaatttagcgattgtgacagcagggtgctcttgcagtgcctgttctagaaattccagtggcacctgcccctgctgtccaggccgaaccagtggtcgcagtgaatcggatggaacctctgtatgaaaggttccgtaaactggcacctccggtttttctgggaggtccggatgttatgaaagccgagcagtggctaacagtgattacaaagatattgaatttcatgggcatcaccgggaatggtagaatggtctgtgccacttttcattttcaagaagatgcgttagtgtggtgggacatggtgtccatgatacatgatgttactacgatgacctgggaaaatttccaggaacttttcgatgccaagtattataatgaggccgtcagaagtgccaagagaaaagagttcacccacctgacccagaaagaaaatatgagtgttactgagtacacaacgcagtttgaccagttggcgaggttggcctcgggaattgtgccaatcgattttagtaaaaaggagaagtatctggatggattaaatgcgaagattcgacatgatttgatgattaccaccgacgacaaaaccacctatactgaaatggtggaaaggcactgcgagctgagggcgcagttggatgcatgacagagtctgctaggactccagtggttggcaaggctcctacccctcctgcatcaggctttagcaggggaggtagtggtt

SEQ ID NO: 344816 - DNA, 743 bp, Cannabis indica
gctggtctacggtggaaaataggagagggacgacacatcaaatgtgctactgacccgtggataccaaaccatcagagtttcttaccaatttattaccatggaccgcctgaagctcttgtttccagtttgatcactgaggatcgacaatgggactgcaatatgttgcagcagcttttttcaagtgttgatgttgaccgtattctcacaatcccactaagttttttctccacagaagacaaactcatatggcatcctcatatttcaggtatctacaatgtacattcaggatatcattttgctgccacacttgaagaaacaaacccctcctccccatcaacctctcccacggcctggtggaactatttttggaaattacagctgccacaaaaaatcaaaatatttgtttggagagtattgcatgaagcactacctgttgctacttccttggtgaggcggaaaataattactgactccacatgttccttatgtcgtcttgcttgggagtcaatcggtcatgcactttttgggtgcaaatatgctagagcagtttggcgagcctcgaacctccattttgactggactacggctacacagatgcacaagggtgattttttaattcaccttaccacgctacattcagtcaccaaaatggaatcgattttctgtattctctggtgtatttggtctgagagaaatcgggtagttcatggacaaagagccaaaccagcaactcatttagcttc

SEQ ID NO: 344817 - DNA, 606 bp, Cannabis indica
gacaatcatgttcttcaagttattacacttagttattatatgtgtattatatgctaagtgttcttataaccgtctcaccttgtcaatgccttctgacgcaaaatggtttctcgtcaatacgtgaatcaatagtttgtacatccttgtctcgcttaagactgtatagtcagcgagttatagatatactctattaattccacatttaatgagttattttattttctatttaatgatttaattatcaatatatttgttgattcatattccttgagattgacacatgtcaccttctgaagtacagccggattttaggtgtaacaataaaagatcagaaatcattttatgttgcatggttcacattatttatttcaggattacatatatatttaatgtataaattctattaaatcaagatcatatatttatcatgattatattgtcgtcagctcagtcaaatataatcatgattgtatgtttaaaagtttaagtctcgtgatttatcagtacactagatttagactgacatgatagtcagcgataacgtatacttgcacattggataagtgttatgttcattctaggatattggcaaagtataccagtatc

SEQ ID NO: 344818 - DNA, 566 bp, Cannabis indica
gttttctggagttaaagcaatgcttgattaccgctccagtactaactcttctttcagatgaggaaaagtttgtggtttattgtgatgcctcgagacagggtctcggctatgtgcttatgcaagctagaaaggtaatagcctatgcttcttggcagttaaaggagtacgagcagaggtaccctactcataatttagaactcgcagcagtggtttttgcgctaaagatttggcggcattatctatatggcgagaactgtgaaatatacactgatcacaagagtctgaaatacttctttacccagagagatctgaatatgagacagagacgctgactagagttggtgaaggattatgattgtgatatcctgtatcaccctggtaaggccaatgtggttactgatgccttgagcagaaagggtcagagtcagttgagcgttgtgaaacaaatctatcaatagatagcaaatgagatgacccgagctaagattgaattggttgtggggtaactggctaatattaccctacaatccactcttttagaatgaatcaaagaagtacaaatgcaa

SEQ ID NO: 344819 - DNA, 1035 bp, Cannabis indica
atccaggaggaggctgagtaaagggaggcccttgctaaggcgaagctcgaggaggaggccaaacagagggaagcccaagcagaggcgaggctccaagaggaggtctaacggacggaggccgagctggaggggaggcatcgggaggcgctgaaggtggaaggtgaggctgtcgccagggccaggcgcgagcttcgggaggctaaggaggccatggacgaaatggctgccaaggtgaggtccttagaggagttgcaccaggcggacttgcagtccaagcccaatttggctgtggagatgaaggagctgaaggacttcagagaccaggccttgaagaaggctaaaagagatgagctccagcccctgtctcctgcaagcgctgcgtcaagcgcttcgatgatggcgtctatatgacctggtcgacaaatggccatatcaagctcgacttctatcccaagcctgaggagggtattgctaaatttcaggagaagaagaagaaacttgatgccatgcttgaggcgaagctggggcctcgcctttctcctcgcgctgactaggccgcagaatccagcccattttgccaagattatatctcttttttttttatttacagctatttttcttttattcaagacaatcttaaatatgtagccgttttattaaggggagacaattgcttatggcctgtccccgggccctttgtaatatatatatttttttttacctgcccttagggccaggatttttatatatatgatcttttttcatgcatattttttcttttggacctgccctttgggtcaggatattttgttttttacttttggcctgttttacatctatttacatctgtccgtacggtatgccttagtacccccctgagtggcatgaaaactttgtttttaaggcactcagttttatttaaaatttagaggttgcatatattttgcctgtacaaattctttaaacaaggcctaagttaacatatttggactattggtaatacttccggagatgatcggcgttccaggcccttgg

SEQ ID NO: 344820 - DNA, 846 bp, Cannabis indica
gcggatcaaatacactacgagcaatatagtgaaacgaaaataaataacatagtaataaaatagaaataagtaaagaaatgtaaaatttaatatttattaattaataaatatattgttttaatgaataattattttatttttatgtataattaaaattaaacatatataataaaaatatattttcattataattttttaaaataatatataagatttttgtacttaattaaacagtttaatttaaataacgaaaatatgactatatattactctataatcaaattattttgaacacttcattccaaatgtcccttattctatccatagctataaatatgtgtgggcttaggagtgttcatccaatccaattcgcactattttgctcgtagtgtatttgatccgctctgtgcagatttcatattttagatctaattcaatttgcacaatagctcaaattcaatccaattcaatctataaaagtacagattagatcagttattttgcattggttattttttaattttaagttatttagtttttatgaaaaaaaatatatatttttttcacataattagcaacaagataaaataaattattattattttatgtcttcaacaacaaattaaaataaataaaataccaaataataaattcaaagaaagaaaaaaaattgtatttataaagaaattatatataagaatagaatatactatttaatttattaagttttaaaatatagatatattatatgtattagatatttaaattactattttttactatattaaattttaattgtatatataattttaatttttttataatatgtgtggattcgattggatc

SEQ ID NO: 344821 - DNA, 984 bp, Cannabis indica
agaaactcgcttactgctgccttattctagcaacaagaaagttaagtccctattttcaagctcatcctgtttgggtatacactgaccaaccattacactaaatattggaaaagctagacgcctctggatggttactcaagtgggcagtggagctgggtcaatacgaaattaggctaaggcaaggttatgtctggcctacaatgattgaagattcaaaggcctttgttaagaaatgtgacaaaagccagagatcttcaaagataccttgagctccgcccaacgagttaactcagatgcaaagtccatggccttttgccatttggggaattaacctgatcggacaattacccaaaggcaagggaggagtgtagtatgcagtggtagcggttgattacttcactaagtagacgaaagccgaaccactcgcaaccattacatctaagaaagttcgagactttgttgtgaagaacataatctgccggtttggattaccgtacaaaatagtctgagacaacggcaaacagtttgacagccagtccttcactgatttttgtgtgaaccatggtatcatcaaaagtttctccgcagtggcacatcctcaagagaattgtcaagttgaagtagtcaataagaccctgaaagatacattaaagaaaagacttgaggttgctaaaggaaattggccggaggaggtccctgaagttctatggtcgtatcgaacaactaaaaaaaggtcaaccggacaaactccatttgcagtggcatatgtatatgaagctatgctgcccgtagaactcgagccgccatcccacagaagattaacatacaaccaagaaataaatcatgtactcctggccggatcacttaatgaaatcgaagagaaatgaaccacgaacaaaccttaaagttgatagcccatcaacaaaagtagcccggtatttcagggcatcgagcatcttctgagacatgtctgcaaggaataaa

SEQ ID NO: 344822 - DNA, 587 bp, Cannabis indica
ttattaaattctgtagtaaatttcttgtgtaaaaggctatatatttagttaatgaaaatctgcgttaacagtttgatgctttcattgagaaccttggtgataaaaactttgaaaaaatccgtccttataaacacaattacaaatccatatcaatggctgataacattccacacgaaggaaatcatccagaggaaactacccatcgtcttagaaaagaacctatgtgatctcaaagaaccaacacatctaaaatgccaatgatcagggaggaatgatggtaatttcaatgttattggtgagcaaatccccgacagaagaagtgaagatgcctatgatcctaccagatacttcgacaatgcctggctgaattaaaccgacaaaatgctaagttggagcgaaaagtcacgacagccagggctacacagggaacagttccttaaaaccatcctaatccaaccgtaaggagaccccaaggaagacctcaaggatccaggatcaggaggcaggagaataaccaagggaatcccataatgctttggaagaacaacctgggaatgtgagggatgtcccaatggatagagaaaatc

SEQ ID NO: 344823 - DNA, 532 bp, Cannabis indica
catacagggtccattctattcaccgctaacactggttcgccctggacaacagggacaggtgccactggaacttctgtaacaggcactgtaggagcaccttgttgtctcaatcgctggatttcattatcttgttccttaattctggcttgcatttttgcaaacctattttcccatgtctgggattcctgagtagcttggtcagcatgggcagcctgtggcagattaacttcatcccggccatgagccctgcccctgggacctctacctcggccccgagcatttgggggaaacttagctccctgaccttcatttgacccgaccgaattgccctgactcttggtatttcgcctggcgtccatctagtctgaacagcctgtgtaactaagagttggcatatcagatcatgatcaacgaggtcttactaatgccgcttaattaggaaattaaaatcatgcgcctattctactatcaggctactacatgctcctaacagctttctaaatcatactatttaaataaactactaaagcaa

SEQ ID NO: 344824 - DNA, 681 bp, Cannabis indica
ttaaaaaattcttctggatgccaaaacaaattatggatgcattagtacatcccttttaagggaatgcattgtagaatcaccctataatattacttctatttaattattttttttaatcgcttcttttgtaattgaatatttatttaaaaaattaaaataatacactaaaaaaatgaaaagacacatatattattatttttatttaattacttttttaattacttggcattaatataattagtatcaaataaaaaaatattaagaaaaatctaaaaaattagaaaaaataagagagcaagaaaatataagaaagtttatacatgctgcaatgtcatcgtgcctaacaattgcattacatagtcacatagatatataaatagattgatattaataattgtaatttattattgaaagttgaaataatgttttatacattttttattaattgatcagtgaaaaaaattatgcgtgttattagtaactattaatttcgttttaaaaagtagtgatcattgatttctaataaaaaaatacacctcgacaatttttctcaaaatatattttaataaattaattgttaataattaaaaaaaaatctatatatgtaagaccaagaataataagatagatcatattttttttaatgcatttatattattttttagaaactttagttttttt

SEQ ID NO: 344825 - DNA, 553 bp, Cannabis indica
tatgatagggatttttgactcctgttaaccacagattggtatccaggataagaaagtccacggggtaatagaatttgtcaacttgaataagaacatcctcaacaattccccgaggcttcttgatagaacgatcagccaactgtaagacaacagaagtaggcttgatttcaccaagaccaagttgcgagtagacagaataaggcatgagattaacactcactcctaagtctagcaaagcttggctaaattcatcagtcccggtttgaagggaaatggtgggacaactaggatctttgtattttggcggtgtcttttgttcaattaccgcactaacttgctcagtcaagaatgcagtctttttgacatgatgcttcctttttacagtgcaaagatccttgataatttcagtataggctggcacttgtttgatgacgtgaagcaaaggaagattaatcttcacttatgtcaagtgctcaaagatttctcctcgattttcaagatttttcccagcaggtctcaaagcctggggaaatggaacttttgcagaagcatt

SEQ ID NO: 344826 - DNA, 520 bp, Cannabis indica
ccgcactaagaagagcttcatcgccacaattaaaattgttgttcccatctcaattctctttgccatttctgggttttgtgtggtcttcaaaatttggctgaagagaagaaaagtccagcctccaagtgatcaaacagcgatgaagaacggagacatgttttcaatatggaattacgatggaaaaattgcattcgaagatatcatacgagcaactgaagactttgacattagatattgcatcggaactggtggttacggtagtgtgtatagagcacaactacctaatggcaaagtaattgccttgaaaaagcttcacagtttcgaggctgaacactcaactctgagacagagcttttctaatgaggttcaaacattgactgaaatacgtcataaaaacattattcgactccatggattttgtttgcacaagaggagcatgtttttgatttatgagtacatggaaagagggagcttgttctgcgtgttgagcaatgatacagaggctgtggatttgagttgg

SEQ ID NO: 344827 - DNA, 588 bp, Cannabis indica
caacaccatgacccaaatcatatcacatttaaaagtagttgtcctttcataatagagcaccaattacacacattaagagagatgtctctcttttcatgttacagcacaacataaacagacgtaaagcaagggtgagatctctctcctccgtagtattaaaaactcatatgtattcatttttaatgcttattacatgttacacaatcaagtactttaaaatgatatgaaagtcatttacatttgaaagaattccaatatttaaaaatgaaacaaaacaaaaatcattcttagaatttagaaatgaaacacaacatagacaacaaacaaacacatatgataagtaactttattaaggctttttatagatttataaatatttcactaaggagaatgtctatcgaatgctttaatatcaagcaatattagtcaaatttaccatggtagttactctatccgagctgaaaaaatagatttttctaccaaaaaaaatgaagaaaaagctccacatatgacaagagtatgctaatctattatcacttaacattaacaatttcttacataattttggttatgagtgactaatgtacc

SEQ ID NO: 344828 - DNA, 511 bp, Cannabis indica
tactggcgcgggacattggttggttctcgttgagtttcacgaatctcaaccattttggcctgcaaaaaatttcatgaaactgttaaagttaaatagaaattaaaatataaaaatgatttattaaaaaaatataaaattacttacatgcagttgttgtgtgtgctcatcgcgccatttgttgtccttgcagtggaactttgtaaaagtatccacagcactgggaagttcccccatctggggatcagcctatttttaaacaaaattgaaaattagaagaatattatcaaaaattgcttattaacaaaatattactatgttgaaaatatcataccccgctcacaatgtgaccaattatggtcttagatccccatccaccttaaaccttcatctgtcctcggttttttatattttgttcagctcttgcttgtaatttaacgtatatttgttgttagcaaattgagaaaaaatattaagtaaatagaaattatatattacaactttcaatttatac

SEQ ID NO: 344829 - DNA, 551 bp, Cannabis indica
aaaaaaatagatactgtttcatccaatcgcaatcctcagagtatgcaagtcttgaccccaaatcttgatctttcccagtcccaacttaccacttctcaatgttaacaactcatttcaatgttggttcaacagttacaacctacaacagatgcctccacatcagttgacacaccaggtgtcaacaattttactggtaaaatcgatcctctttctttcaattcttggatcattgacagtggtgctactcaccacgtttgttctcatttacaatgttttcagaaaatccctcataatccacatgccaaaactgtcaacttgccaaatggcacttcagttaagatagaaaaagttggaactgttgtaatcaactcaaatttgacactctttaatgttttagatgcccttgtattcaaatttaacttgctatctgttactgcactattggaatctacttctaattacatgtattttacttctaatgaatacttcattcagtggccttctcggacattgaggatttgttgggttttatgccctaaataaaactcttt

SEQ ID NO: 344830 - DNA, 623 bp, Cannabis indica
aaaaattaaaaaagttatgaattttggaaaaatcgggttgaagaggtgtcgagtgggtgcatcgaatgcaccaggcactcggagaacaccccatccgcgcgcgtcctttagacaatttttgtctaaagcctcggacacgcacgctgcacacgcccatgtgaccctgatgtctgcccacgaagaccctacaagcgccgaggattctcgcccatgtccctccttccgcgcgcgtgtctctgggatttgcagcttcctggggctgcacgtgcagcctactgggctgcctacacccaaaaaacccgaactttgagggatttttccctaaaattcgatttttccaatattcaaaccccaaaattaaaataaaatattattttttaatatatttgaacttaaatatcatttttgaattaataatatttattttttaatagattattattaagggaaatttgcgacataaatactcattttgttcattttgttgctaataagtacccaaatttaaacaattgcggcacaaatactcaaaactcaattttaacaattgcggcacacgtgtcatcatctcattatttattattttttttttacctaatttattaaaacaatacaaacataaa

SEQ ID NO: 344831 - DNA, 1145 bp, Cannabis indica
tatgaattgaccttgaagacattttaatcaataacaatcattaacaatcaaaccaaacatgcatgaggtacaacaaaattgagactatgcgcattcatctccttttgtacctgtcacttcagtaaacaacacatgcatgcatacatatgacaacaataactagaagtgactacaatatcattatgcatgttcaaaatacaagtcatgagcattccatacaagatactagcatgttcaatacataatagaaaaactcccactgagctcaacagctaggcttctaacaatcccattcgagcaacatgctccaaaaatacacatatgggtaagcctttcgttagtgggtctgctaacatgccagtgctaggcgtgtattcaatggaaataagagactctgtaactttctctttaacaaaatagtactttatgtcaatgtgtttagaacgggaagtacttctaacatttctagagaaagctactgctgcggaattatcacaatacaatttcagcggcctcgagatagagtccataacacccaatgctgaaatgaagttccgcagccatattgcctgacaagtagcctcataacacgccatatactctgcctccattgttgaggatgctgtgagtgtctgtttgacacttttccacgaaacagctcctccagccatcatgaaaatgtagcctgatgtggatttcttatcatccacgcatcctgcataatcggcgtcactaaacccaactatatcaagagtgtcagctcgccgataagtcaacatatgatccttggtaccctgaagataccgcatgaccttcttagccgctttccaatggctaagtccaggatcactcaagtatctacccaacacgccaacaacaaaagcaatatcagggcgtgtgcatacttgagcgtacatcaggctacccacaactgacgcataaggaaccactttcatttcatctctctctttgtcattttgtggacattggcccgtttgagaatttgtcacctttcactattggtgcctttcgagatgaacaagtatgcatattgaatcttttcaaaatcctatcaatataagttctttgagacaactaaagaatacctttagatctatcccaaggatctgtatcccaagtacata

SEQ ID NO: 344832 - DNA, 1180 bp, Cannabis indica
agtaaattatttaaaaaaatttcaaaatttttttcaaatttgcaaataatcctaaataactacaacatacatatacaatcatgaaaaaaaaaaatgaactaaaaagttataccaaaacaaatagggatctactacaaaaaaatttctatactatatacatgactcaatgcccaaaattaaggttggttcaatgtagatgtaaaacaataatattgaaataaattaatagtctggaggtagctactgtctcgagatgcttcaagctacatcacgcatatatttatattgttacttttataaattatttttacaaaaacaaaaaaaccactcttaaggaccacgaggactctcctttagaaattggaatataatatatggtaattaattaaaaggaaaatcatcttacatattatttttttttattatttttactgttttagattgctatagttgttatatgtgattgctacgtaaattggattttttataaaaatacaaaaaaaataatttaaaatataaaaataaaaaaacccaaattaaaatatatagctagtgtcatttatttattgaaaatattacattgctaactttatcacatataatcttagcagatgctataaatcaatattgtaatcattagatggaacttgacttttaatttcttccaaattatttttaaatcacaaaagctaaaagggaaggaataagaaatataaatatcatcaattaatggagcttttgtaatatatttgttcttctttcatttagagcttttctttcttcctagaagaaaaaaagtaatcatatatatgttatatataggggaaaacctgtttatatctttatatattaaaagtgtctatctaacgaataaaagaatattctgttaaatttaacgattagctttgatctgccgttaataaataaacccaataattaaaccaaaaattaaacaatcttttaaatattaataatctctttttaaattaaaaaaatcatcttagccacatatctctctaactaacttatcttgggagaatattaataatttttttttttaaaaaaaaaaaaaatatagatatttaacttatatgtttgtgattatttttagttttatttttaattttaccaccaagaggagaaggttgaaaaatattagaatatgaaaatattattggtg

SEQ ID NO: 344833 - DNA, 329 bp, Cannabis indica
tatgcatactgttatactaatattacctcaattcaaaatttaggtgtgccggtcaacctgagtcgaacgaactgcacgacgatttacaggctcctaaaccgtaacaatcataacactgataagtgatacactaaatcacttcccgggtaaactagaaactagaagtttccgtatcgataaaaagcatggcaataccctaaacaacataaaaatgggaagaactagggttcccaatttttcaccaaccggtagaccggttctacaactggaattccgtttttgggaattcttagaagccccatccggtagaccggatgctgcaggcttca

SEQ ID NO: 344834 - DNA, 611 bp, Cannabis indica
gcaaaatggtcaaactaatccccgaaaattctaaacgcctcaactatttaacaataatactccgataacaatttaaattataaaatacgactttctaggcccaacgtcgcttccacagcttccgaacacaatcacagaaattaggtaattcaatattaaatagcataaaaacatatatgacatataaaacatatttctaaaatatgcattccataattattaatacttaaaccttaaataattaataatataaagtactattcataggcggtctttacaaagttttatgacaagaatgattatatttttgtatctatttgtactagaaattagtttcaggttagttatgttggactttaatttggggttacattgactttaattggttttattgaaacttggattgattgaatagttttttactgtattagtccatattgttggtgatcaatagttaatgggtttagtatttgtatctataaagtctaggtaaagcagaagtgttggtttttctagttaactgaaacctttgacgagcaagtccagtccaaactacggttatgtagctaagtttccttcctaactctataaatacatattgtctcatcaca

SEQ ID NO: 344835 - DNA, 632 bp, Cannabis indica
aaaaaaattgattctcaattaaaaaattaaaaagtaaaaaacagttttatagaacatatttttgtaaaatattttcactttttcaattttaaaaatagaaaactgattaaaaagtgttaccaaacggcacctttattaattaataatttcgttcaaaataatagaacgtacttcagcagaacaatcctccaactgaagcacacaatctgtagaaaaacaagagtctcttgccagcaatgagccaacttgtttgcagatcgtttaacaaaacacaactgaatatatgagaaaactaaaaacaaattacgagcatcttgaacaagtaaatcaaattgagaaatcataaaaaaaattattttggatagtttggacacagaccaagctatctgtttccaaaataacgtggtctcatgggtgatatgcaatccaacttaaagcttctttgatgcctattatttccgcaatttcaggttgaacacgaccaatcttccctttagtgaaagcttctagcatattaccatgatgatcccgagctacgcaacccatatcaaacccaccctcttgatcaaacaaagccccatcaacattaactttgatcttatgtaacataagtgcattccaatgctcagaat

SEQ ID NO: 344836 - DNA, 457 bp, Cannabis indica
gtgcctaaacttcgcactcaaaccggccaaatacttttctttcttgctaaagtcagttggcacgattccctcaacgagcatggccagacggtcaacttttgttgtatactcggtgacagacattccctcagtttgaaccaattcggtgaactctttccgctttgcactgcggacagcttcattataatattcagaattaaacaactccttgaactcttcccaggttataactgtgacgtcccgggtgagggttatcaattcccaccacacgagggcgtcttcctgaaactggaaagtggggcatgtcacccgatcattaccaaccactcccataaagttgaggatacgctcgatcactgtgagccactgctcagccttcattacatcaggacctcccagaaacactggaggttcctgcttccagaacctttcatacaacggctccatacggttgcca

SEQ ID NO: 344837 - DNA, 755 bp, Cannabis indica
attaggcaaacaaacataaaaaagaatgtgaagcctctgtcttgatctggctccaactcaaaagctagaagcacacacccctcaaactcttaaagcatcctttgagcatctgtaggcatgatctgtgaaagaattataggaaaattattaaaatcagcagcaatacataactatcactacaattttaaatgaaaatttatactttattagttccggaaacaaactaatcatacactcatataaataatattgaaagacgtatatgtaagagtaggacaaagaccatgtttattctctgtatagagagaaagcatacccctgcaaaatttcaacatgtagacagagcaaataacaaatattttcacctttacatcgtcaatcatcgacctcagctttaatttctctctgtagatcttccttgtattccttaaacgtgcctggaaagttccgtacagtaccatcttcgaccacccaaatttcactcttctcttcgtcctcgcacacacgtgatatcagcctagaatcatgactgaccagcacaactccaccagtaaattcatcaagtgcgtcagctagagcatcaatactctgcatatccaagtgatttgtgggttcatccaacagcaaaatgtggggttttgacatggatattgatgtgaagacaacacgggatttctgtcctccagagagagatctacagcagtgaaagttccactctacattatcttgcaacagagagagatctacagcagtga

SEQ ID NO: 344838 - DNA, 1200 bp, Cannabis indica
aaaataaacaaaagttcacaaaagtatccccataacaaaataaattctaataatggcaaattccatctcaagataccaaacacaccattaatattaagtctttggacattaatattaattttaagcgctactcttgttctagtaatcaaacatttacaataaatcttgtcaaataatttgtcaatctttggactgtacatattgttcacatggaaatcttatcattgtcatatatttatcactacaggtatgagtgcactgaaaataagtataaccttccttttgggccggtcaatacttatatgagaaacacaaacacacacaaatatctaatatttctcatgagcaatctacgcaagggaggttactttggcgacatcatgtttcaattaactcatttagaacgaaagacaaactttagtattttagtataccaaatttgaacaaatgtatatatataaatattgatccaaaaaaattaattgtttttatttttaaattgaaatataatccaaagtgaaactatatgtatatataatctgaaaaaattaattcagatatcaatgaataaacatatgtgataatcaataaaaatttcaatatacatgataaatattaaaaatgtaacatgtcaattcttaatttatttgtatatcattacaatctatgtatataaaccaagaaaacatcttctattacggcaaaatatcaagacttaaaacaaaaaactgtaaaacccaataaatgagccatgaagatcttaaacctaatgggaagaataaatctcacactaaatttgtcttttaatgtataatagcatgttacacaccaatacaacccaccgaatacaatgaaaattaaaacaaacgaaattttatacattgcattgataatatattcattgttcataataatataaatctcaatgattagccaaagaccataaactgaatatatattcattaaatcaaaaattgaatcaaatatatcaatcatcttgagaaaattggtttttgataattaaataaacaatcacgaaattataaccctaaatcatcaatgatgaaaaaaaaaattaatttttaaaacttttagaaatcctcaaatttttaaatcacgaaccttaaatccttaaagaattaattaaaggtggctctgataccacttgttagaatttttcatcactcataaaatatgcaa

SEQ ID NO: 344839 - DNA, 626 bp, Cannabis indica
tcgtcttcgggattttgagcatctggaggaggacggggctaacgtgtgttgcgagtttccaccattgctgcttcaatttataagattgttgtctgtttgaagacgcttcctttaagtctcaatgaaagcaccaaaatgttgaccgaggttttcggcaaccgattaaataatacataggttaggctgtaggaagtttaatgcatgagatttttacgtggttggggcattaatgcgccttagtccacgaatctttgttattaatgagagtatttatttatagagaatgttcttggtgaatttctctcctactttctctctttgattcctctggacctagaatcctcgacccctgcctcagtgcacttgtggggtatttatagtatttttctggggtgatccctaagaatgaatcacttgtctttctatacaggcttaatagggacacatattcccagcagatacaaaataggaaatacatgacctttaccgtaggtatcttaggggttaggtggatataatcttttttctcttctggattgatgtgatttctcataaagtattcgtcattagcctcattaatcattgcacaatagctgagaaaggggggttacgccatctgtcatatc

SEQ ID NO: 344840 - DNA, 758 bp, Cannabis indica
ttgtcttttcaggtgtgttctgacaggttggcacggtatagtcacacccgagaatttcgggccgaaccgggttcgggcccgaaatgtaaattgaattgattatttggcattttatttgacatgtgataatctgaaatttatttggcaatatttgagtgtgaaatggcatttatgcccttaaaattgagtatgtatgttatatagccctaagggcaaaatggtcatttgaccataagggatttactttgaattaaatgatttttgaaaggaaaaggaattatttttctggttttatctctctctcacccgaaccctctcttttcctaaagcccttttgattttcaaagttgattgttgagaattgcttggagttgggtgtgaattggagctttagaattgtggattcttgagcttgaagtttaggtaacttcttgctgagtttttgttgaattttaatagtggtatcttgctgaaattattatggtaaaagcatgttttaagttgtatcttgctcttgtgattgcatgttcttaagtgttgttataatcttgatgaattgagtgtgaaaaatttttgggatttaagttcttgagcatggattttgattctagggtattttctagtattgaattatgtgttgctatgatattttcatggctggaaaatggtagaaatagttgaaggtgatgctcttgttcaaagagttggatgtgccatgtttatgcatgatttgagatggcttttgcaatctgaattct

SEQ ID NO: 344841 - DNA, 475 bp, Cannabis indica
aaagcaagatatccctcaaattgggccagatatcttgctctaaaatgcaaccaccagggttaagtcgagattgccttgcaatagcatgagcaactcgatttgctgatcgtttgacaaatcgtatctttacattatttaaagatgaaaacaacatacgacaatcttctataacaattccaaaagtagaagacatcttttggttacttcttattgcttgcacggataaaagactgtctgactcaagttccacattctcccaatttttcccttttatctagctaagagcttcttttatccccaatgcttcaacttcttcagccggatagctaccagaaaattgactagttttggccttaaggaacttaccaatgtggtctctaaccacaaggccgtagccctatgagttgtcatttgggaagagtgtcgcgtctacattaatcttgaggttattagttgcaggtggtgtccatagctc

SEQ ID NO: 344842 - DNA, 842 bp, Cannabis indica
acaaattcaattgacccaaagataactctctctagaagaagaacaaatatccctaaattacattgaaagtgatactgtacaaacaacaaaaatgactgatgtaaaataataataaaataatgatatattaaattacaaaaattgtataattattattatttaaaatcatttaattaaaaattctgcatttattataatatataatacaattaagttataaaaaaaaaaaatatatggaagtcggtacataaataataataacataaaaaaggaaagaaagtaattactaagagattaatgtaataaaattatattatatttactaatctgaaatttttcctatattatatactaatcatcattactcataatcattaaatccaagattaatattttatttagagcatctaaaataagataaacacacacatgccttctattgatgatccatttatggagccattttggttccaagaatgtctaacaaggatcaacacaaactcaagattagagtaacattacagaggagcacaatatggagctatcccctcttttcttctcataaccattaacctaaaccctttcacttaagacatatatatatgtcacaccttcttaacccaaaggggttatacactaattgggcttaagtggtacaataatgatacactataatttaatgagtcaattatagttttaaggttactctaatgtgcctctaacataataaataattattaaccatccaattattgttgttgacaaatattgggcacatagttaataattgtgtttatggtatattaaacctatgattatattagtccacaataataattcta

SEQ ID NO: 344843 - DNA, 569 bp, Cannabis indica
ttgttcatctgttctcaagagtctatcatatcacactataataaatatcactaaatatgatgtaacaaattcatgtacaatatgagttttttgtaattaaattaggtgagatataatatttaattacaccaataacaatcataattttatgtagtattagacaccactgatatttgtatttacttattttatttatacgtattgttatattcagtgctcaataatttaaaaaatttccttttatttctctacccacaatttcaattcgctacaaaagattaataacgaaaatctagattgttataatatttagggccagtttggcacagctgtactatggaaaaaagtagttgtaactgtgctatgagaaaaaataactgtaactgtgctgtgagaaaaaacagttgtagcagaactgtggagaaaagctgaactgagtgtttggtaaattataaatttcaaagtattgtgagttgttaaggtctattataatgataatgataatgttataatctagtttattataatcacaaatatgtaaaaacttattttatattattttatttttt

SEQ ID NO: 344844 - DNA, 595 bp, Cannabis indica
tttttttaaaagaaaaaaaatggttaataatactctgtaataattattaaattaaattatataagatttaatatttaattatacgtgttagaatataacatttttgaaatgtaaaataattaaataatatatacggttggtaaaggcctaaagggaactgtctattagactaataatacaatctctttatgattagtgtcatggtagttaggctgccaatgccattgaatgaccttaattcccacttgtgcatgcctactacgcaagtgttgaaagtaattgacttgactaataccttacatggtgtttggtggagtagtataagggaaatttcattaataatacatgataaaattcctaatatcaaaatttatactaactactaatttgtacaaaaaaatgttattaatttcttaaatactcaaaatacttttttatttaatttccttccctaactgtctctcttttcctattctatctttttgtcgttctctctctccaccacaccaagaacccaaccggtgtgataaaaacccaacccaaaggcctaaagtatcatccccttcctcaatctcgcatttctctctctctctct

SEQ ID NO: 344845 - DNA, 706 bp, Cannabis indica
aaactatagactttggtactccatctaatcttactatctccttaacgtataaatcctcatactgatccactgaaaaggctattttaactggtagaaaatgtgcagactttataaattgatctaccacaacccaaattgaatcaaataaccccgtggttcaagctaatccaaccacaaagtccatcgtaatatcttcccacttccattcaggtagtgttaaaggctgcaaataacctaccggtctttgatgttcaaccttaatctactgacaagttaggcattgcgatacaaattctaccacattcttcttcatttcgctccaccagaagtagggtttcaaatcttgatacatcttggtggtgctgggatgcaagggatatggagtaatatgagcctcttcaagaatttcatttctaagttccgcactacttggaagacaaaccctagtcttcaacaacaacattccagtgtctgatactataaagtatctaacttgaccagctgatacctcttctgtgagtttcactaactttggatcagttaactgggtagctttaattcgttctaacagatcagattgtagcgtcaagttatgaagttttcctacaacaaactcgatgcttcatctgaccatgtcctctgctaattgaggtgaaatctgaaccatactagttacttatctgggacccttcctgctcagggcatc

SEQ ID NO: 344846 - DNA, 554 bp, Cannabis indica
acctgaggaggaattaggatcggcagtaggcagattagtggattgagatgctaagagattgagtagttgttgatattggtttggtgttaattgaggcagcatagtgttgttgtcattcacatccgaaccagtgtcatttgtggtctgaaattgattggctgcagcaccttttgatttttctagtttgttgtatccaggagggtatatcttgtaacacttttcaatggtgtgcccgtgcatattgcaatgagtgcaaaaaggtctaccacgtttctgtccttggttcttggaagcttcggattttccagggtttctttctccttgaaaggcaaaagccatgttggagttgggatcggcagtagcaatttgccccctctttgattctcttcctgtgacactaaatgaaaaaccctattaatttcaggcaaaggatccataactagaatattacctctcacttgtgaataaagatccgataatcccatgagaaaggacatgatgtactccatattgtggtgttcttgtaatttcttgactcctccacaagtacagcc

SEQ ID NO: 344847 - DNA, 995 bp, Cannabis indica
ttgctggaatagaagtcttaaatacgaattcaaccaaaggttgataaatctgtattgcctcacacacagactgtaccatagctctatattttaattcagcactggatctagacacaacattttgtttcttactcttccaagagatcaaattgcccacaataaatacataatatcctgaagtggattgtttatctaccttggatcctgtctaatctgcatcagagaaatactcaatcttggtatgtccatgatccttataaactatacctcgtcttggtgctcctttcaagtaacataaaatttgctctaatgttgcccaatgatgaattgttggagaagacataaactgactaatgacactaattgggaatgtaatatttagatcaatcacggttagataattcaactttccaaccaatctgcgatattttttaggatctttaaatggtttcccatcacgtgtaagatgcacatctggattcattggagcattacaaggttttgcacccaattttcctgtcatagttaataaatcaagtacatacttcctttgagacagaataataccttgtttactccgagtaacttcaatacccaagaaatacttgagctctcttaaatccttcgtgtgaaactaggtatgaatgaaagacttaagggatgagatgccttcaatattatttccagtaatgatgatgtcatcaacatacaccactagcaaaatgataccagtagttgatcttttatagaaaaaagaatgatctgacttatttttcaacaaacaaaatttcttaacaacttgactaaatttaccaaaccaagcatgagggctttgtttcaatccatataaagatttacaaagacgacaaactcttcctaactctccctgagcaacaaacccaagaggttgctccatatacacttcatcctcaagatctccatgaagaaaagcatttttaatatcaagttgatgcaaaggccaatgatgagtagct

SEQ ID NO: 344848 - DNA, 1045 bp, Cannabis indica
aattggaaaattggcattttgagaaaataagatgagaaaatgagaaaatggtaaaattacaaagtggggcccattatccattccttggccagccactttgtatggattttaccatttaattttttcattattttaatgccaaataaatctaacctaaccctaggtggtttcctataaataggtagtaatgactttagggaaaagatgatgcatctcattccttcagataaaatttgagcctccttcctaccctagccgaaaccacctctctctctctctcttcctctcttttaagccaagcctatagtgaatgaatgagttcccacacacatcaagtagtactcaatcatagtgtatggctgtgaagaatccagtttcaagagaaggagattcggactcagatcttggtgatactctattacagaaaggatacaagggttagagatctgagtggaaggagacattatattccgctgcaactactgtaaggtttcttatactttatatgtgtttattttatatcgttttagaagttcatatttaggatgttttaataacatatttgttagtaaatctaagatcctggtaaaataattccaatagcaataaccttttgagcctaaaaaaaatctcttgttcatcctttttcacatcatagcatattgatgtcttatgtatttgtaaaagtgtgagacttttgttgggagaaaatattgatggctatatataagttgagaaaaaaattattattttcttaaaataaatttttgtaagttgtaagtatttcataaaaatatcaataaaaaataaatgaatacttgcaacaaattacgtgtgggggaataataagtattatgtcgaaaaaaaagaaaagatacaagattgaattattgaggagagtgattggagaatacaaatgtgaattatttgagagaatgtcatatatgtatgttatggagtgatttaagcctaaatttacctttttttttatcaaactttcaccctagccttacattataaggctataaagttctattgatcttta

SEQ ID NO: 344849 - DNA, 899 bp, Cannabis indica
caaaagaaggcctactggccgaatagacatatacaaaaaaatacatatagagaaggcaatcaaatagcaggagtcccaggctcttgataaggatcaactgggtctaaaggagccagaggatcatcggtctaggcggaaggagcaacaacattctggtcggtaggagaagtggaagtggtcgcctcagggttctcattgaccgcctgagccatgcagtaatcgaaaaacatgtctttggaagtgccaaggcaatcaaaatttcctttgggattggccttccagaagtcataaaaaatctcgagaccagctgtctctaaggtatccactttcttcccgagcatctccagcttggattttcggctctcaatctctgccttaagttcctcctccctggtcttcttgtccttggcctcatcctccaacctacgaagaagagtccaaagaccctctctctcgtctttgagactggtaattttctgagacaaagaaacattgtccgcctcaagctgtgcagttgatggcgcattgtaataccctaggattaaagaaatggattagcaaaaccctaactagataattgagtattattgtagaattatattattatataatttattatatgcgaattaatatgagaaatgacatgttaagaccccattggtgagccaggggcattttagtaattttgacatgagaagggtaaaactgtgaatttaatttatttatgtgcttatgaactatattatcatatagtatatctgttgtgtcctttttcaggtgtgttctgacaagttgtcgcggtatagtcacaaccgggtatttcgggccaaatcgggttcggggtcgaaatataattctgggataaattattggcattttatttatgtgtgaataatctg

SEQ ID NO: 344850 - DNA, 737 bp, Cannabis indica
aacacttatccaaggtgtaagaatacctatcgctgattatcatgcaatctaaatccagtgaactgacaaatcagggaataaactttcgaacatgtaataaagattatattctactgtgctgacaacactataatcattaacaaattcatatgttctggacagaaatagaattcatacattatatacatataatcctgaaataaatcatgtgaaccatgcaacataaaatcttatttctgatctttattaataagtaaatctgattatattaaaatgagttttatttagggcacaaaacccaacagatcgaccatggcaggctacggggttccgctggtttggattggtcggaagctcctcagcctttgaatccatcgtttccggctccagttgaggcttgaagtcttttggaacaaatagaaatgggttggtgcgtctaggtaaggtgagtttggaaagatgaacttctaaactcaaaagggacattctagcaggaaagagatgatctctgaaaatgggtctcaccaaaaagctagaggtttgtgaaacatgacaagcttgagccgcccttttgtacacaaagtttagtgacaagaaagctaaagattgggaaaactgacggtcggaagatgggcagaatatgaagagacgattcataatgatcctcgaaaccgtacaaccgccaaaatcaaaggatgtatttttttccaagaaaagattttggctaaaatgccctc

SEQ ID NO: 344851 - DNA, 738 bp, Cannabis indica
cttttttttttctctcagtttccttttctttcttttctcttctttttttttcaagaaaacaaatcaagtagttcgacaattctttctagctaatgacacaaaaaaaggaaaccaattagacaagctctgttaaacaattatggaaattgtagaaacaagagtggtgaaacaaaacaaggaaagtgatttatgacacaaataacgaaacaaagaatttaacattaacaaattggagcttgagaattttgaatttttgaatttcaagaaaaataagggaaactaatgaaaacaagaaaaaaaaatagaaacaagaaatcaacaaaaatcaaattatggctctagaattttttttggattttttttttttaagaaaagaagggaaactaaagaaagacactagagaattatcaatgctctagtagtttcagatttgacaaggaaaaacagagaacacgaaacatgaattgaacatgaatatagatcacaaagttaacatgattatagaacatgaattgaataaaaaaaatgaaagatagacaaaactcgatgatcctaagctctgttaccaaatgatacggaccacaccaatagttgtgatgaaacccgacaccaattatattggcatccaagaactcttgaattttgggatgtggagtcgcgacctgatgcttagttaagcatgaaccttggtatgaaggaatatgccataaacagtgatggaaatgttgggttttatgc

SEQ ID NO: 344852 - DNA, 1417 bp, Cannabis indica
gttaatgaaacatacttattagtaaatctagatcctggtaaaacatttccaacaccattatctatcatagtccagaccattgttttatttgctatttgtacttccacgactaatggatcattgtgcaggaggcaaacatcgacagcatcttcttcagtgaaggttatagtgggtttccctacccgtggtatttttggcttcctttcttctacagccagaaccacttcctttggttcgtgttttaaagttcgggcatacctctcctgagctttgcttgaatctccagcaatatgtgggcccccaatgataacttgtaaatgcccgtccattggtggacagcagtaacaggtcttggttgttgtctgtttgggcgggcctttgattctggtcgaccttgacatacttttgcacatgctagttattttttcttatcaagaattgaatttcccgctttagattgttgcactcgttagtgtcatggccatagtctccatgaaaatggcaaaatttagacatgtctcgtttgtttatgtcttttttcatgggagcaggtttttcgtacgggactacagactgagtagccatgtagattgtctccaggtagtcagtcaagatagagaaagcagtgaacttggaaggattttctctaggggtttgttcaacttttcctgtgaacttttccttttatccattgtcttgtctaccgttgttgttagatcttttgctgcctggatttgaactactagggtactgggggttttgggtagacgcccttgccaaaggagcctgtggctggcccggtctaggctcgacatctgcctgttgaatggcctcttcaagtttgatgaaaccatctgctcggtcgagaaaatctgccatagagtctacaggacaacttttcttaatatctttccatagttttctgagcacttcgatgccccccagtattgcggccaaactttttcaattaatcgtgctgctttcgtagcctttgtcataaatctgcttatgtaggctcggagaggctatcctggtctttgcttcacttcgaccaggtcttctaaatgcaatgggagttggcgagaagaagagaattgtgcatgaaactctgaggagaaggctttctaggagttgtaccttcttggtggttacttgaaataccactactgtgcagcttctgaaagtgtggcagggaatactctgcagtgcacatctcctcgtaccccctgcaaatccatttgcatttcaaaatacttgaggtgtggtaagggatcttttttctctgtgtacatcttctaggttggcattttgaacttgaggggtagctctagaacattgatctcaggcgtgaagggtgatccacgtgctcggtccaactcaggatcagtgagcttttggtcggccaggccttggaaca

SEQ ID NO: 344853 - DNA, 709 bp, Cannabis indica
aggatagtcaaaactggcttgcttagggtcaggtagaagagttgaagacctctagctctttctttacttggtctaacaaccatgaagagaggagtcaagtgtattcgaagttggatagagtgttcgctaacaaaagttggttagattgtttcccgaacacagaagttagtttcagatggggagctctctcagatcacagtttttgtcttgtaaagcatatcaaggttagtaaccgtggtactaaacctttccgcttttgcaattactggttgcttaaagagggttacaaagagaatgtgcttactgcttggaataagtacaatattactgatttgaaaagtttacaccaacaactttttaggattaaacatatcctaaaaaactgctatgtaaataaacatgagaatgttactggtacctataaagaagcccgtgagaggtatattgaagctcaagaagccttggccacaaacccgctttgtcctacagcagctagaaaagaaaaggagactcatgctcagttcaaagaagcctgaaatcagtacattagttacctgcaccagaactctaaagtttgttggttaaaacttggagatgaaaacactagctattttcattctatcatgaaaaagaggagagctgagaataaaatttgttcttataatgttgatggggttgtagttgacgagtatgacaaggtggttgagca

SEQ ID NO: 344854 - DNA, 745 bp, Cannabis indica
cgaggtttgcgaattccgtgttctaagccttggtatgaagtcgatcatgtgttattcatcataaatcttaggaaggaaagtcattggatgtttggtcgtcttgacttgaatgaggggattttgtttctttataattctttgaggactaccaaaatgaatgttgcagctacgaatgcaatgaaggcttattctgtgttgctccctttgttttttgatctttttggattttggaataataggtcacatgctcttgatttaggttctgaccctaaagctcctctaagagttgtggagattagtggtcttccgtctcagcagaaaaagtgagttgtttcttttaagtttattttatgttgtttttagttgcttaactgttttttccttttttggtttttagtgattgcgtagcatttgttgctacatttgtcgagttcttcatccatggaaaagatgttcttgcgaattttgacatcaaagtttatcgtactcgacttgctgcccttttcttctcatatggacaaaggaaaattgatgaaagtattgatagcgaggatgagaagcaaagcaagtcttataaggcttctaaattgaaaaagtagggtcttttaatttagtgagaatttggtgttattggttgactctattatcagccaattgttagttattttatgtttctaggtattatattttgttttatactctggatcttgttttaaacttttaggatatttgacattaatcatta

SEQ ID NO: 344855 - DNA, 817 bp, Cannabis indica
taaaatcgaagtcaacattttggtgctttcattgagaggaggatcatgaatcgctctttattcaacatcaaaccgccaatacgatggtgcaaactcgtagaggcctaactgatccggaaaattcacagacgctcgatcctacatcgcaaaacccacggagcacaagggttccgcctgctgttaatcctggacagacgacaagcgtggtgaatggtgaaacagttcctatagatggaattgcgcctggtgtgcaagagactgcgaataacagttctgcacccaaccagggcgtccataatacgactgtttcgcctggaaccaatgcccaaatgactatcggagatgccaccaaattacaaaatctccgtgacgtgctccgactcatggaaggtcataacaacaccctgcatcatgatcaggacgaactgcgtgatgtagtaaatctcgcattcgacgaaccaaggcgtatgtttgccgaatggagagataaagagatggaggcattaagggctcatcatgcagagattgaagatcgtagtcggcaagccaccgtgctgataggaagagcctaccaaactgtaggtcagcaatcgccgaacgtcattcccctaggagaaacggacgaggatctaatgatgaatacttcccagactactaatgttcagccgcccaatccccggtcacgagttccactcgtgggcctagcggtaggcgagcagaccttgtctggtaattcatcaggaggagtcatacctgatggctccaacaagatcaatggtgccattccaccgtcaaccaagcgaatcaatcgctaagg

SEQ ID NO: 344856 - DNA, 785 bp, Cannabis indica
tgaccaagattttgagaagtctcaccaaagcctaccaaggcaaagtagttgccatccaagaagccaaggacctctcaactctaccattggaagagctcattggttctctcatgaatcatgagattttcatgaatgctcaagaagaagaggaagtcgataaaaagaagaagaacaccattgcattcaaatccacttcacatgatgatagtgaagctagtgagcatggtgatagtgatatggaggatataaccctactcacaaagaactttaagaagtttttgaagttcaagaagaatgcaaatagattttacaaagggagtaactcaagggagagctcaagaaaagatgatcaaattacttgctatgaatgcaaaaagcccggtcatatgaaaacggattgtcccttgagaaagaggaatagaagaagggcaatggtggctacttggagtgaaagcgagaaagaaagttccgaagatgaacaacatgagatagccaacacttgctttatggccattgatgataaggtaagtaatcctaaccatacaagtgattttgaaagtgaaagtgatgatgatgcacttgatatgtcttatgatgaattatcaaaatccttcaatgatttgtttgttgattttgaaaaattgcttgctaagaactcaactcaaagaaagaaaataagtttattgcttgaagaagttgaggctttgaaagtcaaagaaaatgagtttttgattgaaacccaatgcaaaaattgttccttatttgaaaaagatgttgtaaacttg

SEQ ID NO: 344857 - DNA, 492 bp, Cannabis indica
gatccagcggggcggggcggggcagatccttatatgatctggatcaggtcggatcagatccgacccgccccattgacattcctatttttgacgtggtgatcagagtcactcatgaataataatgcagcaatccacaatcggcggcggaacctccttgaaccaggatagctcattatctaaccgaaggacatgtttgtcaaaccatgagctgaacaattcttatcgcgagccacatgagataaaactgcccccaaaaatttagaaaataaagctataacatcctcaaataacacccccaactcattagaaaatatccttcctttgttgatagctattaccagagaaaataaatttgaataaacttttctaattgaaattttgcacgaatgagcccaattaagtcctaccaaagagccaaagtttcggcttgtagtactgaaatactacctgaaaaaaaaaaaaagccaaaaaataataggtattagaaaagac

SEQ ID NO: 344858 - DNA, 898 bp, Cannabis indica
tttttttttttatatatttttatgttatatttttgttattttgttgttaatttttgttatttttatattattttttatgttttaatgttattttaatgttttttattattatttttatgtagttttttgtttataaatataaatttttatgtttatgtttatataagggataataatttaggagtaaaacttttccaaaaaatatttgaccctatttttattgtgttgttcaaaaaaaaaattgtgttaaaaattttatttatgtaacaagatttgactacaaataaattaaaattaaagaggttagagacctttctttggctgaaataaagaggttagagacttattagagtggtgtggtgtggggtgcggaccccaccgaagatctaactctgaaactttgcatgtggaggcttttattgcctaatttgatgtcccagaaaccacatgaaaaattcaatactatttcaatgtatttgttttaatttaattggtctcaagcaaaatgtcgagtggaatagtacgcgcctatttcatttcaatctatgtaaactaaaatataactttttagaaatatgatacctcatttcaaaaaaaaaaaaaaaaagaaatatgatacctggttttttgtttttaaaagcatttaataaatgatttattgaaataatttatttatgttttatctaaatacatagaaattgggccagcaacactatgataagggttcaaattctaataattagtatttgttttctaatatttagattttatatttttctcttagaaaaaaaaaaaaacattttccttctaataattgaactcaaactaattaaaagctttaacatcctaactattgcaggttttattcaaaaaaaaaaaaaaaaacgaaaaaaaaatc

SEQ ID NO: 344859 - DNA, 855 bp, Cannabis indica
agtttagaaccttatttcatagtgtgaaatattttagagaaaataaattatcgggattgagcggggttatggaattgaccattttacccctaatcttggaaaatatttaattttaaccttaagggcatttaagtttttttgagggatagtgtagtggctgcctagggaggtgacaagtggcttttaatttcagcaagggtttagttagagaaaatccatttctctttggaagaaaaatcaaaaaaattggaatttcactctcttgaaccctctctctttctctctctcggctgggaccaaaatcaaaggagtttgttgttgattgttggatttcagcaaggatttcaaagaagaaaatcaatctaaggtaagttccaatgaacccttcttagtttgcaagttttttaagttacgttgaaatggtgatattgtaaattaggggctgttaaggtttgaagtgcctagggttcaaattctaaggttggtttgagttgattgaagtccctagcagctgattttattgcttgatgttagttttaagcaagcttgagttttgaaactcaagctttgagctttaatggcatgatttgatttgttggtttgttctgtgatttattggttggaaatggttgtttatacattgtataggtgtactggagagtttggtaaggtttgggattgaattgagttaagggagatgatttttgggttcccagcacagaaccggaattccggttctgggggaccagtaccaaccggtcgaccggatggtgacccagaaccggatttccggttgggaaccggtctgcctgttgggggaaattccagaaccctagttttggccaattttgagat

SEQ ID NO: 344860 - DNA, 758 bp, Cannabis indica
agaagaataacacacaaaaagcttgaccaaggctcaaggacctttgtcctaaaagtcatttcctccctcatatggacacttagggaaactctagaaatgctcttaaggatttatcaagcctcatatgctcaacctagtgtactctaaggatgagcataacctcacaaggttctaaccacaacaaatggtttcaactacttctctaacaagtgaacaatatatatgacctctatttatagagtttttcactcccatatgaacatgaatgaccaccataaagcccttggatgttaccaattataaattgggcatttataatattaaatgggtgattttgaagagttttggaatgttagaaagactcacaaacgtttgtgcttgtatgctgaaaaaacagtaagtagtactagttaccatttttttaagctttagccaatttttctccaaagtgttccaaatcactttcacttgattttgaactatttattcaccttataactgaataaatcaagtctccaacatctatatttttaatagctatcattcatttacattcataaacaattagtaacatcttttactaatttaagagtgaaaaagatgtgagagttacatattcaagtgatcattaaattaaaagatttgcaactcctattttgtgatcattctacacattttgtaactccataatgtatgttacaatttgacaaaattaatattttgtcacacttaattatttaatctaaatattatattat

SEQ ID NO: 344861 - DNA, 499 bp, Cannabis indica
gagaatcaaggtagtttctatgatcttaaccttgttttaattgctgaaatattgtggaaaaggcatgtttgggtttgtgaatttcatgttgttgatgaatctgatgataggttgcatgcttagtgaattggatgtttaagcttgttaatctcttgtgttgtgttggtttgagcttagagtataattcaaagttgtttttcatgcttaatccaattgttgcttatggtttttactgcttgaaaaggttggattgttgttgatgaagctcttgttcaagagcttagtatagccatgattgtgcatgaattcttgagggtttgttgctggattttgaagcttgatgctatgatttaaattccttcttgattgctagcatctatattggttaatttgtgggtttggttatgaaattggagtgatttggttaggttttgtaaaggccgcttagtttaatttggaaattagcagttaatctcgtttaattatgaagattatttat

SEQ ID NO: 344862 - DNA, 521 bp, Cannabis indica
aattgggttaggtgagaaatgaagattttgagctaaatcacctttttttccccttttgtaactgaggaatgtttttaattattaaccggaaaacatgtaaaaatgatttctttattcaattttctattttatgaagacaatcattttgtactctttttcttttcactttctattttggaattatttactattaaatttttttgagtgcatacttatccttaaaaaaaatatctttacgttgtaaaaaaaataaaaaatctcaaaatcccataaaaaaaataaattaaataaaaatagactttttttaaataaaatttctattaataattaataagtaaatgagatatatcctattacaccctattacatgcagatataaaaatatgttaattaaacagtttacattaaataagataaaagttctaataatattttggaattattgcatagaaaatataaattttatttacaaaaatacttccataaagtaaagacaacatttatacattttatgtaatttt

SEQ ID NO: 344863 - DNA, 1962 bp, Cannabis indica
aactcattacaaataacaataatatgtttcaaattctcttaatcaactgtaatgactgcatacttagaatataaaattgattaaaaattagtatgataattgtcttatatgattatatatgtattgttattcgtgtttttggcaaggaacacgtggattccaaataaaagcttaaggctcattaatgggctcaaataacataaactgggccaaggatcaattttgctttctgagagaacaacaacataactcacccaaaagaggttccgtcaagcctagtcagcatccaaaaggtctatctccgtgtatttggaagatgtcctcggcgtgtattcggaagcccaatattattttttgtttctgccaaatcgcacaagattaggaattactttcctagaatctcgaacagaggatgatctctcactaaaaacggaaactaaataattggcaatcaagtaattaatatgtcattaattacccataaatataggaaacggtatgaacaactagcttcgtgataaggctttcacatcagcatacacaagatgcctcatgggttgggcttacttaataagcccaaagtcaatgtattatttgtaaaatcttatgagctctataacactataaatactcactgaatcattcatgcaaaggattgaaaattcttgacttacttgctcgaaaaaagaatagagtgttcatactcattgtatacccataggttttcctatgcaatctcataataatattgactcgtgactaaaactcattaatgtcccaatcatgtaaaatatatgagtgtcttcttcatatatgtctctttaaattatattttctttacttcttacattaaaataatcagttttttgaaaaacttgataaacatgtataatatgtaatgtgggccttatttttaaaaaataggcatttgagttataattcttcaattagagagattttatttaattttaggtaggggtgtgcataaaaatacacctaatccaattgcaaccgaccatcccatcacaaccaaccgccaaatattgaatatccaattgtgatcaaattatattagatgttatttttgaatatccaattggatcgaatcagatgttggatgaagtgtccaaaaatctaatacatccaacatttaatcaaattaattagtattttgatttaatttagatgaataattaaattatatgttgtcatatacttaaaatatatgtatgtatatatgaaaattaaaatataaaaattttaccttttttattagatttgatggatccaattcaatcctataaatattagatctgaaacattggatggatccaattcgatccaaaaaatactaggtctaaaatattagataaatctgaatcaatccaacaaatatgtataagaaatgcatccaatggatagaaccgatccattaatccaacatccaatggatgttagatcgattaaatgactgaaattaattggatcggatgagatgataaaatctaacatccaatatataattggatcagatctggataggtccaaaaacattgaatgtggtctgatgaacacccctaattctaggtgtattataaatgataaacatgaattttgattttttttatgatttatgctcggtaacggtaggatgatgatcaagaacgtttttaataaaagtacaacatctgtatcacatgcactaagtatcattactgtattagtgttggtaggactgaaccgtacccaaagtacccctaagtgttataccacgtgcactacatacttaaccgtactagtgttggtaacaccagattgtaccctttgaacatcatattctataccaatgcactcagtaccactactgtaatagtattggtagtatatgaatcacataacatcatgcatacaatacacatacacatacacatatacatatatatgttctatgctagtcttacc

SEQ ID NO: 344864 - DNA, 1549 bp, Cannabis indica
ttgatgtccttattaaataggggtatttttattattacactttaaaatatatatatattttttttgtatttttatagaattccacacaaaaacttctataacaactaacagagctacctaaatcgtaactaaaatccatatagcaacacacatagaaaccatcggagcaacctaaaccgtaaatttgaaagaaaaaaaaaattttaaaaatagtatatggggtaattctcctattaaatatatgagtaatttgcaacataaaaacttaaatttaatttttcgattacaaataaatacctaatttaatttttagtggtaataatacttaagttataattttggaacttttgtaagtacttggctattaaatgctaagtaaattgccacgtggtaattcctaattggtccaggtcattaaaaatttatttttttaaaaagaaattagttaataagaaaatgatacgtggataatgacttaacatttaacggtcagatacttacggagtttcaaaattataacttaagtattattacaaccaaaaattaaacttaggtatttatttataaccagatgacttaaacaaatatttatactgcaaattattctaaataaatatttttttcaactttatatttaatatagatatattttatggacattaatgtttaaaaatacatattatatatatttttttgaacattaataatttgatgccttaggtcttagcaatgagctcgtatttttgaaggttctgtgtggacgccaaagtcttcacttgcatgtaatgttcttcttcgtttttaatcttcactcataatctgtatccttacatgtaacgtaccaaacagtagtaccaaacttcctaacaaaatagccgaaccctttcttcattgcatataagccaacaactatctttaaatgctctttgtctctaaaaaactttcttaaatgtaactccccgcttatataatgactatgatcctcaatgtcttctctagtaaataacttcttcttaaatttaccgtaacttgtcgaaagaaaaaaattgattgctaaatccagtctcattggtccctctagcaacactaggaccactagcatcattggtccccctagcattactagttccgtctggacaactactactagtaccaggtgtttgacaattttctctatggggcattcttttctgtgtcggttgcctggatagtatttggtacgatagtggagtcaagttcaaagctacagcaatagggacttttgtatcttggtcgtctcttccataatcattgccctcaacatagcattcagggtttggaccatcacaaaaaccatcaataaagggcatttgtgctataatgtcaacactcgacatcatagtatttaattcaagtaacacatcagcaaccaacacctctggatatatttccaaaacaaaactcacaacctcgttacgagtgtccttaacagtacttggtgtgggactaggatcaatacaaacactcttccttaacaaactcacaagcaagagatgtaaatcatctggct

SEQ ID NO: 344865 - DNA, 734 bp, Cannabis indica
ctaagaactcattattgtaactaaacctaattcatcaaaagaccacaatcacataatatatatctatagcatttgtatcttgttcatagtagttttgacaagattaatctctgtaaagaatcaatatgctaatatccacttgaaagtaggatcatcggtattcaaacatatgaatgtacattcaggggtggataatatgagttgtcgttaaattcttaaaatgatcattttatattttacattatgaaaaagaatttgaaatgtttgagaaatttcatgaatttctagtaatgttgagaaacattaaggtaagtggttagatatcttacaaactgatagtggtggagaaatatttagtggatgtgcagttcaaaaatcattaagttgaactttaaattgtattcaaacttacctccaaagaaattcagatttcatattgataaaagtaaaaggtctataattagttactattagttgcataagtccttctaaggatataccctagtgataggaaaacttcagaatgatagaattttcgtatacttagtgtacaccattactagattcagggatgtcctcatcataaacttaagaaaagctagaactgttaacttaagtttgcatgtttgatagctattctaaagtgattaggggtggaccatcctatgttcattaagataagaaagtgtttgttttaacaaatactactttcctaagaatatgactaaatctga

SEQ ID NO: 344866 - DNA, 968 bp, Cannabis indica
aaaaaaaaaacatgaaagcttaaaacaatatttaaattgttcttattataaatgctgttaactcaggaatctagactagacttttaagccaactcgttcgctagattagcgagaatgaaaaagtagtaaaataattaataagagagacacaacaatttatagaagttcacccctatatcgcgatagtaatggggctacgtctactttgagtttttatttcttatgagatggtaattacagcaatagctaagtatcagaaactccaaactctagaaagagaaagtctagatatatagaagccctgatcttgtgggtagttttctcaatgtgaaaaatgagctaagagggctcttcttttgggaaatttgaatttatatgcatacatttagggtatattaaatttttgaacacaaacttactaaaattaaaaaatataggcacactttacattcatacccattatatccttctcttttctcttctcttctaacttcaccatccatactccgtattcccatctatattgatggtggtccgatggggatccgatggtggcccgatgctacccatatttttattatttttttttatgtttttgtaataaaaaatagcattaggtgaccatcggaccactatcggaccatatctgctacctatttttttattttattttttatgtttttgtacataaaaaagttgtatcaggtgaccatcagactaccatcggaccaccatccgaccatatctacatttatagatgttaagctccattcattaagctcgttaggaaggcattttgccaccatcggaccccatctgaccatatcatctggctaccatcggactgtcttcaacttttactcattttaacgacaggaagacattggaccactatcaaacctgacaaaaaaaccaattttttgcccaaaactcagatttgacaagttttgaccctaaatctaacatct

SEQ ID NO: 344867 - DNA, 535 bp, Cannabis indica
aactccttcaagactcctcccactagtagctccagagaagactcattgtcggcaccggccaactgctcactaacctcaggaaccaaccggttcatgtagtgagcgagcatttccttgctctttttggcctccggaagcactggcaaaggtggagtagaggtccgcaccagttcagacccacctgtcgattggtcagacctatccaaactcccacttcgagactccgtcggctgggcaacttctagagtggaggggtttgcaaccgtcagctcctcaaaaagatcgatgacttccctagcagacgtcttttccttggaagaagttccctcaccgcctttagacttcttggccgggggagatgtgctggcgcttctgccaatcctcttcctcagagcatcgagcatcttctgagacatgtcgtcacagaacaaaaagcaacatggttagagaaaatagacattagaaacatgaggcataataatcaagcagctcaaaaacaagatgaagtagtgtgcaaggtgattgcccgaacaag

SEQ ID NO: 344868 - DNA, 561 bp, Cannabis indica
aattggttcgaaaggttcgtggtgttctcccctgaagattcatgtccaaagttacctcaatcgaagaaatgagaaacattgagaaactcgatcttaatgaactcatcgggtccttgcaaaattatgagctgtcactgtccaggtggaagaaaaccaagaaacacaaggaggtggtgaaagaaaaatcagatgcgagtattgcaattattcaccaagaaaataagaaaccagttctagaaaaattgaatggcattactgacgaaactattgccttgttgacgataaactatggaaaattcttgaaaaagaactacagaagaaattccccagctgacaaagaaaattttctcaagaaaaacaaaggtgtaaatttcaaacaaggacaagctcctactgatcaaaaaggtcgaggaattaagtgcagagagtgtgatggatatggccacatccaggctgagtgcgccaacacactaaaaaagaagaaggaccttccagcaacctcgagtgatagtgaagaagaaaagaactccactgccaatgaaggatctgatgaggataagc

SEQ ID NO: 344869 - DNA, 878 bp, Cannabis indica
atcatcctcgtcttcgttctagcccacctccttcctcaagtgaaggacattctccaaaccctgtacccaaccatagaatgatggctcgtacaaagaaaataacgcgtctggctgacgcatctgaccctcaagtggctaggcacgcaactttgcccagcgccgaataggatccagccgtccagatggaggggatcatgaaggggacgctgaggtccagcagatcgaggagcaggaagatgtacgccctgccagttccaccgaggcggaggaataggcagaggttgaacccccaaactatggggagtacaacgtggctggggagccagtcgatgctgacggagatgtcttggttgagggcgtggactacgtctgtgaggaacttgctattgcagttcctcatagaaggaaaggtgccttgggcgccatgttggtaagccctccgtctagggttactgaggcgcgccttcggactctcgaccaggacggataccttggcgaacatgattgctacattcctgcccacaacaaatcgtgccacagatctagaaaaggggatgtgcgcctggtcgggtgcccatggtcagcaaggggcattgatgcctttgcatcaatacttcaagaatgtggcggacttcttcggcatctgcccgacccaattcactactaagggcatcaaatatctgtctaccctctttgtcctctacgcttcccataaatggggtatgccttctcctcacgaagttgcctggttctttgatttgaagtccaccccagcaaggcaggttgggtactctattctctcaaccaggcttcaagtggttgacgggcatggacgactcggccatcagcaagattgggcattttgctgatgagtactt

SEQ ID NO: 344870 - DNA, 667 bp, Cannabis indica
aataggaccataacttgattttttgtgaaattaaacttaataataatcctagaggtgttatgacaaaactggttaaattttctacatctgttcgtgttaggaattgtcttcaagttgattatatcaaaaaaattgtcaaaaactgaactcaggatcctatttgtaccattttaaaaaatatagggttcattttgtcatttaacaaaacagagggtccaatctgtaacttttacaaaacacagggtccaaaatagaatttacccttattagttccatgattactcaactataaacatagaattgaactcttagtaattatagaattatatttattgagttttactgtagtgtccattgataaaataaattccagtgatttaacctccttctgtttgttcgtaattagttttggttaaattactattttaccattctaattacttctttatcctttagttctaataattcactggtcaaagtgtaatttagatccaatctaaatttgcctggaactttttaattctagaattaacacataaagggaaccaacattcgattcgttaaggaaagtcaggattctataattgtagattatgtttccagacatccacattattagattctcaaaacagaagttgtaagaatcatcttctttgagaaactttaa

SEQ ID NO: 344871 - DNA, 1613 bp, Cannabis indica
agagagagagagaaaagagagaatatggcttttagacttagcaatttggaggctaagtgacctaggtttctaggctagggttaaggcctttatataggaggcctaaaccctagattacagtttaaatccctggatatttgcataggttgttagataattacaaaatactaaagtgcccttgaaagtagatattatctagctgctctattgggcctttagggtccaatttgcagccgaagtgtgttgtccacgtgagagttgtacaaaaattcctgccaggtcaatcttagcttgccatggacctacaagagaggtctaactacctaaggcctgtaggatctggccggacaatgcctataggatctggcaagacaagtctttgtaggatctggcaggacaaggcctccaggatctggtaggtcactatagctccaccaagagaaggctaacctttgattgtggatgctatccttttgcaagttgaggatatattttgtacaccatttccttgtagagaccaggttcccttggtcgaacggaagatcccttggtccaaaagtcacttcttggccaaccagcttgtgcacagatcctggccggcctataggctcaccctggtcgccttatgggcttctctaggccagccaatgatgttgatacaactccttgagggcttgcttcactccattcagttgctgcttgatcattttgctatatcttgcatgaaggccctgttctgctattggtagggttttactccagatgtactctatctttggcttacgtgaacatgccacgttaggtgaacaaaacttaggataacattttccccccaagtccctgttcaaacatctggtcggatagggactttctagccatcgtcttgtctgtagtagtctttattgagcagccttgtctagccaagtgttagctttttgcgtgacatgcttttggatctttgatcttctctctctatatacatctcatcttctcttcttgggtatctcttttttgtatcttccattaacaagtttcaagtttttttaagcttttggaaactttttgattcatgttagtttgtaatctctttggtagatagattctcatgacaattttggaatgtgtaatgtatgactttttgatagaaaggattcgattttggccttcgttatgattcttgactctttgagtcatgaagaatacaaggctcatatttgagttttaaaagaaaaatacacattgggattcaaaacttaccttcgccggcctaggaggtcttgcttaagacttggctgcccctaaggtttaatcgtgggagttggccagctttagggttttatcctataaagcttgcctgttcatgcttgggtttagtgaccctagccaaccctttgaaggcttaagaacctagcccaacatgggccttggttccaagtgggtagccagtttttgtcctcttgtgactttggcaagagtttgtctctgtaggcatatacaaccttagtctcatacatggttttcttagaaactttgtatgaagcttcatggtgagtctattatagtcaaatgttcaacttaagactcaacatggcttggttcccgtaaggaactct

SEQ ID NO: 344872 - DNA, 973 bp, Cannabis indica
ttttttaaataaaaaataaaaaggttaatgacatggaccaatgcatgagtgacacgtggatactaacttggcacataacggagaggtacctatggaagttccagaagtgtgacggaaggtatttttaccgccaaaaatacgacttaggtatttatctgctactcgggagaaaacttaagtatttttgccgcaaattactcttttatttttaaagatcttatgttatattaacttaaaccaatatttagtatttattgcttgaaccattaaaattcgctaccaaagaaagtagcaagtcgattggaacagactccaaatcgaagatacaaccaagaaaaaatatggaagctctagcacagttatatgagctaccacatttgctgatcgtttaacaaataatacagaaatcgtttttaattcaagcaacagttttttacactcttggataatttgaccaaacattgaaatcatattcacctcacttcttatcgcttggactaccgttaagcaatccgtttcgagtgtaacatgctgccaattatgtctcttgatccaacttaacgcttcacgaatgccaattgcttcagctacctcgggtgtaaccgaaccagaaaagagtgccatcttcccctcaattagcataccaaaatgatctcttgccactaagccacagccataactgttaccaccgtcaaagagagcagcgtcaacatttaccttgatagaatttacactgggtacaatccaatgctcagcaccgtcgtccgctctaaggcttgaccatgacgtctcaattcgagaattttgagcattcttccattgttcaaggtaacccgttgcttgcactacaatgctagctgcagtaacacttttgtaacgtccccgcttcaagcctccattgggtccttacacccacggaataaatggctcttatacacaagtacgtcactctggctgcttcctggattgatga

SEQ ID NO: 344873 - DNA, 700 bp, Cannabis indica
ctaaaactttccaagagccaacttgaaattacaattgctgagcggcttccgacagagtggcaggaaagattctgcagcatacatctcctcgtaccccttgcaaatccatttgcattttgaagtacttgagattggaaaggggatcttctctcccagtgtacatcttacacgtcagtattttaaatttgtggggcaacaacaggagattaatcttaggtgagaaagaagtttcgcatgcacagtccagctcaagatcattgtttctttgtctagccatgccgtgaaacatatttttcagttcgtctagctgagcctatacggctgggctaacatgctcgacattctggtcaatttgaattacaccagcatctttctgagcgggaatttgagtatgggtttcgggctacaagattgtcgtaagattttgatcgtctactcccttccttctgttcagatcattccttaggtgatgggtcgcccccaacctttcaaatatagaagtgcttggttgcctcagcaatggattcacttggttgacgggtggaatggaaccatttatctagttggaaccatcaggtatgacttctcctgatgaagtactagacaaggtttgctcgcctaccgcttcgcccacgagtggaactcgtgaccggggattgggcgactcaccatttgcagtctgagaagcattcatcgctgg

SEQ ID NO: 344874 - DNA, 1037 bp, Cannabis indica
aaatcacatgttcaaaaccctaattcgaaaaacccgaacctataactctaggctctgttatatttattagggattacaataactcaagaaatagggaaacacccaactaaggcactaaaatggacgagaattgagaaaacggtatatttggggaaccctgccaaaaccagtttaccgaatttacaggtactggtaaaccggtaaacctgtttataccagtcctccccaaaaatcttatttcttactcaaaactctaccaaatgcaaccaaactttccaaagtacctaaacaatttacataaaacataatccaaccagaaaatcccagaaaaagccactgaattcaaatatggcattaaggatgaaagtttaggtttctaaattcaaacttgcataaatccaatcccatacaccaaaacaagctgcaaaaagctaaatctaactcaaataaaccttacatttctgttagaatattagttgtatattagttgtaaaataattagggtaatcgatatttagtagtttcctattttattggtagtttcccatttagtctcctagctttgtatataaatatgtactactctatgaaatatacacacaattcgattcactattttctacaatttcaaactacacaaaaactaaaccctaacaacccctaattttaaaaatcatatactcaaaccaattaaaacttttaaaaacaaagagcaaataaactagggacctcaacctcaagaacacttcgtgcttagcctggagtgattttcccttggcttttggttggttcgaagagagagaagggaaagagagaggttacctctttgattttcatatttttcttatttttctctttattttcttcaaaatgagaacagtttatctaattaatctcttgctgaataaagaggctaggtgtcatcaacctaggcagccactaaatcactcattggctaattgctaaaatgccctttaacttaaaactaggtattttcaagactaggggtaaaatggtcaaattccataaccccgctc

SEQ ID NO: 344875 - DNA, 845 bp, Cannabis indica
tttttttttgttaaaaaaattacacatgtttttattaattttgaaaaaatactattttttttatataagagtccaaattttttttctatagctcattaaatttcaagacggatccccaaagttgagtttttgtacaatgttacattttttttaatctttctccctacattataatttatatgtactatcacactacacgtactttcgagaaaattacattgtatagccacattacttaatttattttaatttttacctttattttcatattctctaaaaaatactcacttttatagatgatgtttctattatacctcttagattaatataaattatgtgctagaaataactagaaggtgaaaatatattgggcaactcattcataaaagtggatatattttaataaaatttaatatgagggtatttttgattaatgaatacaaaaaaagagatattcctcaacttctccccctactttcagcactttcattttgtcgattcagagactacgttgtaggccgaccctaagcataggcgggctaggctcgtgtgtagggcccactcattttaggagcttaataaaaaaaatacattttaaaaaatatacatatatttttaataatttttaaaaataccatttataaggctcaaatttcttgttttttttttgcttatagtccatttcaactcaagaccagcccttgtcgtagtacaccatgttatatattttgatgacatacattgtatgtaaataacatagaaaacaactagagaaaatagaagaaattacattctatacccttttatattgtcctcttttatttttaccctcttttttaaagtct

SEQ ID NO: 344876 - DNA, 553 bp, Cannabis indica
ttccaaatttttaaaatagcaaagaattcctgaaagtggtcatataccggaattctttattcaaattctaaaatactgtattctgaactacaagtggcttgatccttcacaaagaaggtatgtaggcagctcagctaattaaatggactgagttcagctgcaattccaaatttaccccaaatttcccaaatttattttaattatttaatgtcattgtaattggaatcaaagggtatttcctttaaataaaaggattgtaattaagagattatttttataatcttggatgggtcgaacttaaattaataaactcttatgctataattttggcataggtgaaattgtgttttgcatttatttttaatattctaaatgtgaaatttttgcttaacaggagtacatgcgaggagagccaacagtcaaagattttggcttattctatgagataaagagcattggccattacaatggcttctattgctttagtaaattggccaattctgaaataaatggggtagaatgcatagtttccaatatggggataggaaatcaa

SEQ ID NO: 344877 - DNA, 445 bp, Cannabis indica
tgggcactcactctatcactcaacgtatgaaaatattataaagaaggaagagaggggttggttcgaaaatagaaggaacgatggctcaggaaatttttttctgaaggcaagaaatttcatcatcgtttagtgtgagccatcactatttatttatagaaaaccactaggtttaggttaggatttattaggcattaaaataatggaaatattaagtggaaaaaccctttcaagaggtcggccatggttagtgggccccacttgggtattttcctaattttgataatttttcctttttttctcaaaaatgccattttttttcaattctaatcaattaaaagccaaaactaattatttaataattaaaactaattatcaaacgaaatttccatttaatatatttattaattagacttaataaagtctcttgattaataaataagaccta

SEQ ID NO: 344878 - DNA, 432 bp, Cannabis indica
ctctttctcttcttcttgttctctctctctctcattgccctaccctagccgccatccccgtcaaagccaccatcaccatccaccacagccccaaagcccttccacttcaattatcgacccttcaccgagtccagtcacctcttcttcatctccttccgccactcctctttcctcctcatcccaactcctcattccatcatcaaatgacaacgaatttcactaataagacaacctctgcaactgccccggttgattttgcgtccccttccttaaattcgcaatcttcttctcctcctcctcatactctgattttgcctccaccaccactatcaacttatatttttgtcgttccttatgttggatattattttaccaggatcttagatctactcacaagtatgttgtttaataccctaaatatgaactttctaa

SEQ ID NO: 344879 - DNA, 649 bp, Cannabis indica
agcaaagatcaagtagcagatttattcactaaaggactcagcacaacgagatttcaaaagttgagagaccaactcaatatgaagagtcggtgttgaggaggagtgttaaaagatcaacacctactctacaagtatctagaatttttttatcattttggtaatattatagaattttctagaatcatagagagttaatagtcataagaagtttcaagaatgttttaggctataataaattgacaatttgctagaacattctagcataataatgtaccatcctttgagtagtacgtataaataggggagtaggccctttggtggtgcatggtgagttgagtgtacaagtgaagtgtgtcctagtgtatttaactaagtctcaacaaaactctaaaagagtgtcccatcaaatagtgtgcaactaaacctttaagtgtgagtgtctagtaaataaaagagtgtgtgctttgtgtgtattgtgatcaagttaaagtgttcaagtcttggtgtaattgcttttacaataataaagtaattacgttttcacgtgttatgttgtccaacacagctaatgtttgaaaatacatacctcaaaatagaacgagagatttttttttttttgaaaggaaaccgatacaggttaaaataacaa

SEQ ID NO: 344880 - DNA, 618 bp, Cannabis indica
agaacgagagatttttttttttttgaaaggaaaccgatacaggttaaaataacaaaggtaacaaagttacgcaaccagaggaggattttcttccatctataacagttcattgtctatcctaagggcatgcagagataccccaggagaactagacaataaaactataatatcataaaagaaaacctcaaaactgagagttgtcacttccgatccactagtaaaacacctacaaaataaagaggaaaaaattaatacataataaatatttaataaaaataaaatttcccttacaaataaaataaaataaaatatgaaaattttataaaaatagtcacatagagttctctaatgtaaatactagaacttatctattctcatctccattgctgacagtgactacactacattttgatgtgttattattagacctacctgaccttataaaattaaaactagccatataataactttacaaaattaaaactagctatgttagccttgcaaaactaaaactagtcatactgaccttataaaatttaaaactagccatactggccttataaaaccaaaaactagtcatactagccttacaaaaccaaaactagtcatactggcctt

SEQ ID NO: 344881 - DNA, 451 bp, Cannabis indica
ccattatacaataccaaaactctcaagaaggatgatggctcaccgaaagctgatgaatccaaatttcgaagtctaattggcagcctactatatctaactgctacaagaccagacataatgtacgcagttagtctcccatcaagattcatgcatgatccaagtcaagttcactacggagcagccaagcgaatcctcagatacttgcaaggaacaaaattctacggaatatggtacggagttacaagtgactcaaaacttgtgggctacacagatagtgactgggcaggatccatggacgacatgaagagcatgttaggatatgccttcaaacttggatcaggaatattttcataagtatcaaagaagcaagcaactgttgcgcaatcatcagcagaagcagagtacattgcagcagcaatgactacaagccaagctatatggctcaaaagaa

SEQ ID NO: 344882 - DNA, 505 bp, Cannabis indica
cctagttcggttctagttccatttgtgattctgagttcgagtttgggattgagttagggtcagagttcgagtccttgtctgaatttgggttcgtgtccggattttagtctaggtccatatcaggctctgggtgtgggttcgcgtcctgggtcctggtctagactgggtcccagtcccaagttccaaccccgatctgagtcttgattcagttatgggtctaagtccttgctgctgatgccagtctgggttagagtttgggtccgggttcgggtctagcttttggtcttattctaggggtgggttgaagtttgggtccgagtttctgtccgggtctggacgccgatctcgatctaggttcggctccaagtccaagttcgggtctcgagtgggggtccaagtttgggtctaggtcaagatctcggtccagatctaggtccaacatttcgatctgaaactgggtcttggtctgagtacaagctcgtatccggatccctatctaggtcca

SEQ ID NO: 344883 - DNA, 630 bp, Cannabis indica
aggctcttgtatactttatttatatagaacaagtaatacagagataacagaattctgttatgaatgagttgtgcaagagtggcaactcttacctaaacccacagctcactaactaactttgtaacagactttaactacctgttaactacctgtactaataaaaactgatattgaaaattgaaattaggaacacaaaggacatcagtcaaaatgacataaggagataaatgaatagatccaacctatgtcaatggagcatgtctcccatcaggcaaattaacaaaagaacagcaagtacttttcttgatatcaacaaatagtgcaatatcaaggcagacatgatatgtggcctttgtatcagtgatccatttgccattataagcaagattagtcttaccagaaaagtgttacacaattagttggtttgaattgatagataaaaggagaatcttggaggttgtttggctttacagtttaaaaactgttttttgtcttttaaaactgaaaacagattttaaaaactattagaagtcgtttggcaaaaatttttaaaaactagaaaacatcaaaatgttgttttcaattttcaaaaacaattttttttgtctaacatattatattatatatttt

SEQ ID NO: 344884 - DNA, 1485 bp, Cannabis indica
aagttcaaaacagttatttaccacacataagaaaaaacagtttcttgtgcaataaaatatttgaaccttattttcggaactgtaaactattcgatttttttaaaaaatttacaagtgatcctatataactacaatatacgcgatcatgaaaaagaaaatagtttaaaaaactcttttgaatgctaaaacacgttaagaatctaccgaaacaaccctttagaagcgtactacaaacaaacctagcattttattacatacatattttgtgtacacctatcattgttagtagggtaaatactattttggactctgtattttacaaaagttactaattggaccctttattttgttaaatgacaaaatagactatgtactttttaaattgtacaaataggaccctgaactgatttttgttaaaataaaatttaatataaatcagatttaaatgtgttataacaaaactgtttatattttctatatctgttcatgttaggaattatcttcaagttggttatattaaaagaaaagttgtcgaaaataaagttcatagtcttatttttaccattttgaaaaatacagagtccattttgtcatttaacaaaaacagaggcataattgtaaatgagatgattcattttaattatcattaataaaaactaaatgagggcataatcgtaactatttttaaacataacttataagattacacatgtcacttaattagaaaaagagtgtaaaaaagagtgaaaaagaagagcattgctattaagcaccactggtgcctagcaccttctcgacatttcacgttgcaattggttagcgatacttcctaaaagctattatattaaattatgtagaacctgatacttagttaaaccaataacaatattaacacataaaaaggtactaaacaccactagtgtcctttagcatttttcacaaaagaaagtttctctatcattcctcaataaataatatttatgactatatttattgcatgacacatgtcataaggatataagttagacaagaaatattgtacatccattgacttgacaatagttttttcaaactgtcggttccacttttgatttaaaaatattattatattactgagtataatattttagaaatatctacactccttataagatagtttcggtaattcttctatctgtttccatatttaattttttttttttatgatcgcataatactatgaactcagaaaatgataagatagtaaataaaaaggttaaaacattttatacatcataattcatttactatttgcaattttaatatggggattgcatatgttgtagctatttaggattatttgtaaatctttaaatttttttaaatagtttacagtgtcaaaaataaagtttaaacagtttcttaccacacgtatatgaaaaaatagtttcttgtgcaataaaatatttaacttattttttgaactgtaaactattcaattttttt

SEQ ID NO: 344885 - DNA, 553 bp, Cannabis indica
aaaagaaaataaaaaaggtaaaaaaaatacctagaaaccttctcttctacactgcttcaacagtctacccagaaacatcatcgtcatcctcttgtgcgtttgtaaccccagcattcaagctttccaaatcgagagggagaacaagctgcactcaaattgggatgcaataaacaaacaatagatgtcgttgatgccctgatctcaaccaagaccaagtatcttgtcgatgcctcacccgtatctccactaggtgcggtaaagtctgtttgggccatggacggtcggagttgctccgtctggctatgagtaagagagggactgagagagtggagagaactcaagcgagatcgagagggagaacaagcttcggtgtgctctgatgcttgcgatcctggtggtggaaatctcgtccatcggttgtggtagaatgcctcaccggggtcgggcggaggtgcgtcggagatgaaacctacgagaagagagagatgagaccgaggttcagttttaggtttcttttgatttttttttattttattctctttataatttttaa

SEQ ID NO: 344886 - DNA, 656 bp, Cannabis indica
gtagacaaaaaattaataaatttaggttttacagaaattaatttggattttcatgaatgagttatgattttttgaatttggatgaaaatatctaaactgagcaacccgatacgcgcgcggacaagggttcacgcggcttcagacaagcctatgtccgagtttattagaaaagggttgtcctaagcccctcctgacagaggtttacccccaagtaggctgctagcagccattccatcgcccacatgcaagtgcaatcttgtttttgtgatatcttttgattcaaaaatcatttttcattgaaacaaaattcaaaatttggttgaattttgtgtagaatctaaattttcaattaaaaatctaattatcagaataaaattaattttttaataattaaaattaattttagatattagtagcttttgaatttgaaaatttgattttccacaaactagccttatggttatttttgaaatttttgattattttgtctattttatttattttattataagatcaataatactatttattattaatttgaaatgatcttattttgatattgaaatattaataaaatttagaaataatctagttaaagtttaaaatttgctaaccatatcagattttcaaatttattattttttaaatatatattt

SEQ ID NO: 344887 - DNA, 557 bp, Cannabis indica
taaaagaaaaaagagaattattaattatgtggcttttacattactttttccaaaacttactattttttaaaaaaaattaacatttatggagaaatataagtaactttaaaaatataatttatatataaaaaaaaacatggcttcaactaaattttgtacaaaaacatgaaaaattaaaactcatcttaacaatttcaataaaaaaaaaatcataaataattgcttattttagaaagaaaatccataatttttgcacactttataaagaagccataaaatcttaattttctccttgttgtccgtgttggacaggttcaacgagaatgtacaacttgggcaaagcccgatagggttatttaaagcttaacatgatgcttccatcaactaattagcaatttttcctcccgaactttgacatgtactaaatcacgcctcctgaacttttttggccgttaaaaattccctctgaactattaagattgttagatttataaggacttttatctaattttagtaaaaaaattactaacattaatgaaagttcaggagcatgattt

SEQ ID NO: 344888 - DNA, 873 bp, Cannabis indica
gagaagctacaaaataacaacttcataattgaagctttctacccggcttgggttgccaatctcgtactggtatccaagccgaaaaaaaatggcgagtgtgtattgatttcatagacctcaacaaggtgtggcccaaagactgttttctacttccaaaaatcaatcagcttgtggacgcaatagtaggacactaaatattgggattcatggacgcttattcggggtacaaccaaattaaaatgcgtccaccagacaaagaacatacaagtttccgaacagatataggtctatattgctataaagtcatgccacttggtctcaaaaatgatggagacacataacaaagattggtaaacaagatgtttaaagcctagatcgggcgaaacatggaagtatatgtggatcacatgctcgtcaaatgtaggaatgctggggggcacatagatgacctggacgaatgcttcaaagtcctcaggaaatacaacatgaaactcactcccttaaagtgctactttggagaaagctagggtaagtttctgggctttattgtcagcccccgaggaattgaagccaatctggagaagcttcaagccctcctggatatgaaatcgtcaaccagaaccaaggaagtacaaagttcaacaaacaagtgtgttccattcttcaaagtcgtgcaagaaaacaagcaatttgagtggatggagtaatgtgaaatagcttttcatgtggtaaaaacgcaacttgcaaaacctctcgtactcttgaaacctctagatggagaagaacttggcatatgcttggctatcactgagaatgctgcaagtgccgtgctgatcaaagaggaaacaatatacaacatccggtctattacat

SEQ ID NO: 344889 - DNA, 647 bp, Cannabis indica
tataagataaataatagttcaaatatttatctatatacatagtctactgtaaaacgtacagcaaattaaaaaaaaactgagctactaaaataatttttttcctatcattgaccttttttttctaaaaaaaaatacatcattgacctagtaaattaatattttttgagcaatagtatattaatttatgattgtacacatatttggtaccgtatgtcttatttaaatacaaatttggaaccttgtattatcaataatacttattaagtagtctgtattttaaaaacatacatatttagtaccctaacctcaaaatttattgataaaattttattaatacaatcaaactgtctttaattttacaaagtttggattcaaatttaattatttagttatatataaatgagaactgtttggtcaaatttaaaaaacgatattgatgaaattttactttaggatactaaatatgtataatttcaaaatataaggtaccaaataagtattattgaaatatattttcaaagaaaaaatagggtactaaatgagtataatctcttaatgtattgaatctcgttttatgctatactaaataaaaaaaataattaaaaaatactgtattagaagtggagtgaattttcacttgtataaga

SEQ ID NO: 344890 - DNA, 1076 bp, Cannabis indica
gaaattggagtatttaaattgatagatgccctaaactggggttttaagatggagggtcaatcaattggagagttctcgaaggagtaaattgtttactatgggattgaagaggtgttgagacgaggttgaggacggttacttcgtagacaggtgtaccaataataagaaaccttatgagtcacactggtgcaccctctttttagtagcagaaaatctaatacaacatgtaccacataggactaggcccacagaaacaataatagccaataacaacaaaggattttgtacgtacccgtacttttaattttggggtgtttatggtagaatttttcaaaaactttaagtgtatttataattttattaattattattatttggagttatttagtaagaagtataacatttataatatatatttgttaaaaaaattattgttataaaaataaataaatagggtaatataaaaaaatattagagtatcctattttacttattgtcatcatcgtatcttatcgaaatttcaaattttgatataacatatgtttgttatatcaactttattttttttatatataatattttaataatattatgagattttttactcaaaaaattaatatatattgtaaaattttaattttataaggattttctaattatttttagttttaaaatatagatcatttgaataaattaatgtaaattttacaagtggttataatatattttttaaaacaatatatatttgtatgaaatctattaattatagtgagaaaataaatagaattgtgtttttaagcaaatttaatttcatatggtatgttatagatattttttaattaaattatttaatttttaagttttttataatcatttaatctaataatgtaaatgttaaataaacttacacatgtaactattgtgggaagtctatgtaaagtgaatcaattaataagtgaataaaaaaatgtaaattaaaatagaacaaaaatcagtaaacaataaagaacactaaggctttaatagcctattaccaacaagtgttttcattttttttttgaacaataaacttttca

SEQ ID NO: 344891 - DNA, 562 bp, Cannabis indica
ccctagtttttattaactgtcaatttcttaaataattgcttcttactagttttcttatttttaattctttcttaatttttatttaaccaaatagaagtaaaagtttaattttaatgtacttaaatacaatccctgtgggatcgacctcactcctagtgagtttactacttgtaacgatacgtacacttgcgtgtacaaaatatcacaatagtgggcccaatgcttgtgtaaaaaaatagaatttgatatggcccgatgggtccgatggtgggcctgatggggcctgatgcctgtgtaaaaaatagaatttgatatggctcgatgggcccgatagtgggcccgatggctcgatagtgtagtgaaataaaaagagaaaagaagagagagggggctgatgtaaatgtggggtattttagggatattataaaatgtgtcatatcccacaaatatcaaatattatgagtttaggaaaaaattttcaagaatatgtaagcataaaaaatcaaatttcccaatcaaatcaatgaaactttaaacaatcaaacaattagcaataacaaga

SEQ ID NO: 344892 - DNA, 587 bp, Cannabis indica
aatcgcaccaattcactttcacagcattcacaataaaattcttgcactcttcaccaaatcagatttaagacattacacacattccacgaatcaattcgccatggtaaattttccctgtataagttattcacaatcccatatatccaagactcaacactttccccacttcaccaactcaaaattccaagcatttacactaataactaccatcacaaacagccacgacaaagaaccacaccattattctaatatcacactaaaaatttaaaagtcccaccactaatttcaaattattaatgtacccaatttaaatctttcccacacattatccactactcagcagccataatgtgattcaattaagaaaaatgagaattttttttacccaatcactcttgacaatgctttttgtggcagctttgacttcctctgcatttcactagcaaaaatgaatacaatggtggtcgtaatggcagctgcttgtgtttgaaatgaagtgaaggtgaacagtgagatgggctgagtgaagagcgaaggggacatggttgattgaagttggttcgcatgggtgatggagatggtgattt

SEQ ID NO: 344893 - DNA, 673 bp, Cannabis indica
gtgtaagtaagctttatcgctgactatcacatcagtgtaaatctagtgcactgatgaatcaagggacattatcttttgaagcatataatcacaattaccttccactgtgtttacatcactataattgtgaataaccgtatgttccagactcaacagaaatcgtatacattaaaccataaacatgaaaagtacatgtaaacataaatgacttctaatcttctattgataacaaatcagattgtattgtaatagtttttatttagggcataaaatcccaacaaaaagctgtgctgaatttcaattgagtacccatgggtcgatgtagactatcccaaaatcttgatgtgaacttcggatcctatcagaaacaatggacgttgggacaccatggagacgaacaatttctctaacatataactcaacatactgatcaatggagaagttcgtccgaataggtaagaagtgcgctgactttataaacctatccattatgacccacacaaagtcttactatcccgttgtcctaggaaatccaaccacagagtccatggcaatgtcttcctatttccattccagaagattcagtggctgcaacaaccctgcaggcctctggtgttcaactttcacttgctaacaagttaaacacctcacaacataatcagcaatatcattc

SEQ ID NO: 344894 - DNA, 999 bp, Cannabis indica
cgggaagaagaaaaaactcagcatcccgtgtactacgtcagtaagcgcatgataggggcgacgacgtgataccccatcattgaaaaactagtcttttgcctcctaatggcctcaagaaagttgaggccttatttccaagctcacccaatcaaggtgttgaccaatcacccactccggcaagtcctaccaaagccagaggcatccggaaggctcctcaaatgggcaatggagttaagtcaatttgacttacactacgttccccgtattttcataaagggacaagcgctagcagacttcatcaccgagtgtaatgaagccgaagcaaccgcaaacgcgccaataccgtcggtcctggcatggaaagtatttgtagacggagcctccaacgaaaatggatccggagcgggggtggcaatgatatctccgaatggacttcgactccaagcagctctacggttcgacttcaaggcttcaaacaatgaggccgagtacgaagccttgatagcagggctgagattagcaaaggctgtgggggccaaaagagtagaagtctacagcgactcccaactggtcgtgaaccaggtgtcgggagagtatcagacgcgcggcgaaagaatggacgcgtatatggcgatagtccgggaactgctccacgagttcacggagtataaagtagaaagaatccccagggaaaagaacactcacgcggactgtctggctaagttagcctcagacagtgagattgaggaactgggggtagtacccgtggaacgcttggcagagccaagcatcaaaataaaagagggcatagcaacggttgggcaagaacccaactggatggtccccatcatagaatacataacgaaaggtgagttgccccaagaaagggcacaatctagaaaaattcagtatcaggctcaccgttacgtaatgatggataaaattctctaccgaagaggactcagcatgccttatttaaggtgtgtatcggaccctgaa

SEQ ID NO: 344895 - DNA, 749 bp, Cannabis indica
atgttgaaaaaaacctggttttatcatttggcttgctgtgacatgtttatcaatgactcggtaaaatttctttttccttttaaaactttttatagttgttttatcattgttttttagtttggttactgttattaagattttgtaatattttttaacttttcttttgtgtttctttattgttttgtttcagcatatgaacactatcttctgttaccttagaaaaaaagggaaatattcttctgctgttacactgaattttacaacaactgactgccttttcgatgatttcatttaatcgttatatcataagttttacaaagccaaggcaatgaaaaaaaagatgtctcacatacatgctgctcacccaatagcgcatcatataagagggcatgcaaattccgtgttctaagccttggtatgaagccgatcatgttctattcatcattaatcttaggaaggaaagccattgggtttttggccgtcttgatttgaatgaggggattatatttctttataattctttgaggactaccaaaatgaattctgcagctaggaatgcaatcaaggcttattttgttttactccctttatttttaaatctacttggattttggaagaataggtcccatgttcctgatttaggttctgaccctaaagctcctctaagagttgtggagattgctggtctttcatctcagcaaaaaaaagtgagttgttgtttttaagtttgttttatgttgtataatagt

SEQ ID NO: 344896 - DNA, 576 bp, Cannabis indica
cataacaatactaattgtattacatacaacatactatgcagtacaatatacatttcttaccttcaatccaggtcaatacatttcggccaacccaagtggaaaactatcctcgatgatctcggtcctatttcacaacaacgataaaccaataagtgtttatcccaaaacactgcttatgttcacataagacaatcaatggttttctaccaaaccccgcagtataaatataataaaataaaacttatgttctaaaatttacaccattttgtagagctcgttacaagcttcgaaacggtatatagaatgtccaaaacggacatctgaatcaaaagttatgataaaaatacgatttctgatctcttagaaatttctaaaaattataaaactcaaaaatcccaattttcgcactcaccgaaacactaccaaaacttatccaaatcatgccaaacttgacagggcgcatatataccataaatattaccatttttacataatagaaataaaaatcgacctcttaaatgaaaaactccattaatgttcggactaagctttaaaaagttccaaactcgatttcta

SEQ ID NO: 344897 - DNA, 670 bp, Cannabis indica
ttactatcttttcgacaattttcttgtcgtaatcagttacaaggtttgttctcttggtccgagatttgatccaaacacagtggcgtggggatcttgaacgtcgaaatcctttttctacattattttataacaattaaatgagtacaattacattttaaagcacattattagaaattattgattacttaccacatctttccttacgttcaccattccactctgaccattgatgtctggattggatttttaccgaacgttccctttgcaccttactctattcctacaatgccaaaaaaatacattacatacatgtacttgtatttaagagtttatcttagtacaaatataattagcgtacctgaaattcaggacttagtcgcctttcaacaaatttcaaccaatcagtaaggtcaatttccagatgattttcagggacttgtgccagtcgttgaacatcctttccttctaatgtgggtgttatgacatcttttgttattctattcttgaagtctttcattaacttcccatcaaggatcagacaatcatgtttgaaatcatccgacactataaaacccgtctagtttaaagtaaaacaaacacgattgttaacatctgaattaataaaaaaaaatcaaaattctcacaaataatcgcttacctgtatatcttt

SEQ ID NO: 344898 - DNA, 546 bp, Cannabis indica
caaaatcaataagctccacctggccaatggaggtattgtctctgacgatgagggcatcacccgtgaaatggaatcccactttaaccagctcttctcgtccacgaacccctcggaggaggatatcaacaaggccctgcaaggcattacaatctctctctcagatttggacaaatctatccttgctgaggagttttccttggacgaaattgaaaaagcttttttccaacttcctccagataaagcccctggtcctgatggtttcaattctaaattctacaaatccaactggatatctgtcaggcatgatgttctcaaagcagcaaccagctttctcaatgggaatggggacatcacccctctaaataccactctcatcacccttattcccaaagacaaacgacctacttccctgtctgatttccggccgatcagtctctgcaatatcatctacaaagttatctccaagactcttgcaaatcggcttaaacatgttcttaacactttgatttcccccaaccaaagcgcttttcttccggatagacttat

SEQ ID NO: 344899 - DNA, 550 bp, Cannabis indica
tatgtcttatttatgaattttcactaagctagtgctaaattatgaagaaaagagattctagggtttatttgttaattaagagactttaataagtctaattaataaatatattcaatggaaattttatttgataattaattttaattattaaataagttgtttttggcatttaagtggttgaattggaaaatatggcatttgtgaaagaatatgataaatagttgaaaaattgcaaaattacaagtggtgggcccacatcctaggccggccactaaagcatatttttaccttttatttatcgattttttgatgccaaataattcaaacctaaacctagaaggattcctataaatagataatgaggaactcaaaactgatagcctaagttacactagccttcagtcaaattttgagccttctctttctctctctatttcaaatccttctctcgctctttctcttcaatatttcatcccttatagtgatagagcacattcccacacatagaaagttggtactcaattatagtgtgtaagactgtgaagaatcc

SEQ ID NO: 344900 - DNA, 1093 bp, Cannabis indica
tccagcaccagtagtatttgaggaattttcagcatcactggaaatagtagatccaacaggtccagaagttaaatttctttgtctttcttcttgaacaaccgaagcataagctttgttcacagtgggaagaggatctctcatcaatatctgtgatctcacattgctgaaagaatcgttcaaaccaaccaagaactcaagaagtcgatcctcctcctgctgttcgagtatgaccttcatagcaccacaactacaaacaggttgtggtctaagctcacggatctgatcccataatgatttcaatctggtaaaatagctagtcacactatttgaaccctgcacaaggttctacatagtcttctttgcctaaaaaattctaggagcattcctttcattgaatctctcatgtaattcagaccaggtctcagctgcattatcaagatacatgatactattagcaatctctccagaaattgcatgaagtatccaagaaattagagtactgttacatctacaccaagcatcaaaatcttcatgtttctcatctggctgtggaagcttgccattgacgaacttcattttgtttttagcaacaagagcaatcatcatggatcttctccaggtactgtaattttcgctccctgtcaagatctttggcacaagaaccgcaactggattatcaccattcaagagaaagaaaggattcgataaatcatttgcagtgctggatctcgaatttttaccaagaacagagtactcgttcgaatcatttgatgcattaccagtatctcgattatttcgagtttgagctccaccaccacgtgccattgaagaaggaacaaagaaacaatgagacagaaacaagaaaaagatgaagacgaaggccaaccaacaatggcggctctaataccatatcagaaatccataacagagaaatagaggagtaaatagaatctgttattcatttgctcaagaaaaaatacgaatacaatcttgctacttatagtagctgatattggttacaactgtcataaccaactctctatcctacaactaactaataactaaccaaaaacatgttggatatttattttac

SEQ ID NO: 344901 - DNA, 512 bp, Cannabis indica
gttatttttaagagactatttagactctttttttctttattagaaagaaacaatttaacaaatattatgaaaaaatttacatttgattttgtggtattggtggaataggaatgtcatctctccccaaaagtgaatttggcatgacaattataaataaataaatagactaattaagtaagacactttttttaatattaagattttgacaaaataataaataaatttttgtaactaattaagtaagattagattaaataataaaaatattttattcaaccaccacataaagttaaaaaaaactcattttattacaaataaaaataaagattaatagactttatttatactatatagtataacacccaacatgattcctaaacaatgtgggactattttgaaaacatgtatcataaactttcttcacaaaatgagaaaacctcacaaatgagtaaaaatagaatgaaaatcatataaaatgccacataatttttttgtgctttcctttatataga

SEQ ID NO: 344902 - DNA, 619 bp, Cannabis indica
attcaatccgcataagtgcggatttttaattttctaatccaatctaatatgcacaagtgcagatatatccgcactttacagattggattggattagttattttatgaacatccctaattaccatcataattttcattcttatttttttttatcccatcatatgtatacataaatactctactttaatgagtaaaagaagtgggctattggagctacatcattgttgctggtggactatagtttaataagtcaacatatagtcattagggtgttaccatgtacctcaaatgtagttaataaaattgatcattctattatgatcctaattacataatcggcattgtaccttgcatataatgataatttatgtaattatcattatatgttaatatcgacacggagtgagcaatacttaattatgttaatctatataaaatattctaacaatgttaactctcatattttagctaaaaaggattaattaaggtttgagaaggagttagttttgaatggtgcaattccaactctcaatgttgtgcaacttgttcttaagtgttgatttcaatgaaagttacattttattaaaatataataaaaaaagggaaatttgataaattat

SEQ ID NO: 344903 - DNA, 878 bp, Cannabis indica
gtaatgggttttatttagggcacaaaacccaacagtcaccagggcaagtgtcaggccagggtctgtttccactgtagggtagtgggtcacatgaagaggaattgtccacagctgctacgactagagcaaaagaaggatgatacacccgctcctgcccgagtgtttgccctgactcaagctgaggctgatgctggtccttccactgtgacaggtcagctttctgttgctggtactttattgactgttctaattgattctggtgcgacgcattcttatatttcaagtagaataattgagaaattgaatagacctagtgatgtgctttctagaggttttggaactttgctgcctactggggagttggttatctccagcaggtgggtgagatcccttccagtatttgtggaaggaagggagttatcagttgatctgatagaactaaatttggaggactttgatgttattttgggtatggattggcttgcaaaatacaacgccactattgattgcaagagaaaaatggtaacttttcagcctgagggcgaggacccctttgtatttgtgggtaagatgcagggatcccagattcccttaatttcagcgcttaaggcaagagatttgttgtgtaaggggtgcattggcttcttatcaaatgttgtggatattaccagggaaccaccagcggaatcagagcatgtcccagtggtttgagaatttctagatgtgttcccagaagagttaccaagattgccaccgaaatgtgaaattaatattgagattgatctaatactaggagcagagcctatatcaagagctccttacaggatggcacctgcagagctgaaagagttaaaagttcaattacaggggatgatgga

SEQ ID NO: 344904 - DNA, 741 bp, Cannabis indica
aaaactgctgatgacataattatgcatatctgaattccataaatatcaataataaattatttaaatatctataaataatttcctgattaacataaataactgctaatttccaaattaactaagcgggctttacaacgctagtcgtaacttttgattttcctttctcgttagataggttataaatcaaagattacaatggtttgatccctttctcgtcagaaaggtttgatcaaggtattataacgattcgacccctctttcgtcgaaaaggtttggtcagggagttataacagttcgacccatcttccgtcaaaaaggtttggttgaggcctttcataaagttttcgaattttttgaacctatgggtttgcattgtactatgtatttccagatcaatttcggtaaatcatacatacatgccctcaagtaattttaaatattttacgctttgtaattacttgtttgaaagaaatgattattttattcacaactgaaatttaaaatattccatcagtaatgtgatttacaatcattaatctcaaaagaacttccccagttcaattgtttattttatcaatcttccaggaacatctggttttgataaaacgggttttgatgtccagggtcaatccccaacattctcccacaatcatttcaatattcaaggtcgatccctgacatatactggggttccaggtagagtaatcctagttttagttctgtcttcgactgccactggtt

SEQ ID NO: 344905 - DNA, 1153 bp, Cannabis indica
agatcctggtaaaataaattccaacaataatatcataaatatagcatatcccaagctgcaaattacactagttcaatctctagctcaaattcatatgatcaagtgaagaaaactaagttcctttagcttcctcattaatcaatcccaacagccatgaattcaattaaaacatacacaattagacttaattcaactagaatatcacactcaaaccacaactaagtctacagccctgaaaacttacaagaattatcaaaacctagccttagaacctaggatttcaccaacaaaacacaaggaggaacttacctcaagatctaggttggcttggggattaaattctgcttgagatgagaaaaaaaatggctggaaacaaccctctatgttggctggctggtagcagctgctcgaaggaagaggagaagaagcttgcttttctctttttgtttttaagttactttccttggaagttactatataaagagttttttattttttttataaccagccctaaaatcaaatgggcaaaatactaattaaccccctaaagactaatctaccctcaaacttttttttcaaaaaatacttagggcattttggtaatttctctaatctaccaacccgacattctaataaaattctaaactgatccaaaatattctcaaaataattcttccattaatgtcgtgacattactaaccacatcgctaaatttccacaattgccgggcccgaaaaatattttatttcattaaataaattctcaacatttaccctaagtaagatcataatcttacttctcttctaaaataattacatatttaataaaatatgtctatttaaatattatttattttccgggatattacatggagccccatcttctcgtaagcagttttaaacaaaatatttgaagaagccccattatcgatcatggttctagacaccattttgtttgctatctggacttccacgaccagcaggtcgttgtgcggaaatcttatctggacagcatcttcgtcgttgaatgttatggttggctctcctgctcgtggaactttgggcttcctttcttccacggccaggatgacttcttcttgctcgtattgagctgtgcgggcatatcgttctcgagctttgcccgtgtctccagc

SEQ ID NO: 344906 - DNA, 503 bp, Cannabis indica
aaaaatcgcacaataatcgcatagaaatcaccaaaaatgtcatttctaagtttaacaaaactttcaacacttaaatcgcataaaatgtcgcacaaaatcgctcaatatcgcataaaaatcccaattccaaaaaaaacttcagtaactcacattatatcgccaaaaatcgccaaaatgtcccccaaaatcgcataaaaaactatctcatacaataacctaacagaattgcattacgtcgcacaaaatcgcatagaaatcgcacaataatctaaaaacccaggacctatgcacactcgtattacgtcgcacaaaatcgcataaaatcgcacaataaataaaaaacccagaaaacagctattgctcgaaacccatattcttcccacagttttattgcacaatttatcacaaataacataaaaaatagcaactttcaattcaataccagaatcaaccacaaatgtatgcattttaaaggataaaattcaaagaaaaattccaaaaaa

SEQ ID NO: 344907 - DNA, 548 bp, Cannabis indica
gcgtcggtagcgaatttcgcgaaaaccgacgctgaaagggcttaaaaaccgcctctaaagggagtttttgtagtagtgactatatatacatgtattaattacaggtatataaatttgtaaaatattagtatgtagaataaataaaatagaacattcttaatattaatggacacacatctcttattcttttccattttagaaattacaagtaaattttgatactttagtttcctaactttattatcagtgtattttaatttgagtaatttgcggtataaatacacaagtttaactgtcatttgcaaataaatacctaagtttaattttagttggtaataataactaagttatatttttaaactctgtaagtacatgaccattaaatattaagttattatccacgtgtcattttcttattggtatatttaaattaatttttttaaaaatttaatgacttagaccaattaagaattgctacgtgcaatttacttaacacttaacaaccaggtacctacaaaagttccaaaattacaacttaggtattatta

SEQ ID NO: 344908 - DNA, 638 bp, Cannabis indica
ttagttgtatttttagttttattttaatgtcactataaaaaaactgttatttatagtgataatataaattttttgtgactaaatatgacttttagtcacaacaaaagcttacttgtgactaaaagatagtatttaattacaagttgtcactaatttagttttaatcacaataaattgtaatttttgtactaataccttaactcacggatattttagtcacaacataagaatgataatttatatttagtcacaacaaaaattgtgactaaaaataaaaatttttgtagtatgtattttttaaattttataaattaaaggaaataaattattttttaattttgttttattttaaaaaaaatatttaaagttttaaaattttgaagaaaataaatataaagtttaagaatattaaaattaaacctactattaatttaaaattaatttaagttcatcaattaatttaaaacaaataatatcaatatttatatatatttaaattaatttaaaataaataatattaatatttataaaactaaccttactaatatacctttaaatttaacggaatattcttatattttaaaatatttcgttaaaaactgttatataaacacattttatatataaaaatataaatt

SEQ ID NO: 344909 - DNA, 537 bp, Cannabis indica
ttttgcccctcccacactaaatgtcataaaattgctttaaggggtatttttggaaaattttaatatcccgactattcccgacattcccaatgtcaaaacaattgtcccgctactaaaaatactaagatgtgattctaatagccatacaccgggttccaaaattgtcgggcacaaaatatgcaaaattatgaaatttctatatgtgacataaaaatacattctcaattcaaataaatcatcataaataattaattccgtattaataaataatcttcataataaagtcctaattatctgctaattttcaaattaaagctaatcggtctttacagtcatcctgcatcaggacagaccctaaatcctctgtagatgcatcacagtataccacatacttttctttatctgatggtaaggctaacaccggtgttgtgactagtcgcttctttcgttcatggaaactggcttcacacttatcagaccacacaaactgttggttcttcttagtcaattctggcaatggcatggagatcttagaaa

SEQ ID NO: 344910 - DNA, 818 bp, Cannabis indica
attccactctatcgtaagccttggacatatccaatttcaaagccatttttcttccgtttccaaaccttttagtcttcatgcaatgaaggctttcaaacccgattattgcattatcttgtatgagtctacccccccacaaaggcactttgctcctcagaaattacttaatgcagactattcttcattcggccagcaaggcattttgccacgattttgtagatcacattacatagacttattggtctaaattctgacattcgggttggctttggcaacttaggaataaggcatataagagtgtcattaatttcatccacttgcattccttcattaagaattcccaagcacactttggaaacctcaggtccaatcaatgcccaatattttctgtaaaaaagcccaggtaatccgtcgctgcccggagcttttaatggatgaatattacgcattgccttgaacacctcctcttcggtgaatggttccagcagataatcatttgttgctcgagatatacggtgcgggataattctttgaaactcttgcaactcattcatactagctggagtggaagtgaataattgtttgaagtagtcacacgccacccgacccatgtttcggtttcccgtgatccattgaagccggtcatctatcaacccgtggatggtgttctttgcttttctattgctcgccttcctatggaaaaactttgtgttcttgtccccatcttttaaccaaagcgctctactcgttgcttccaaaacttctcctctttgtcagccaaaactctttgttccgttccaattcctgcatttgttgcc

SEQ ID NO: 344911 - DNA, 1155 bp, Cannabis indica
acatcaggtataaaccgaggactgcgatcaaggggcaagccttggcagattttatcctcgagttcccaagcaccgaagtggcactcatagacgacaaggttgacactgctgtgcccaatggagaagtatggacgttgtacgtcgatggggcttcaaatagcgaaggttctggtggcggaatcctactaatcagtcacagaaattttaaggtacacgctgctttacgctttgaattttctgcatctaacaatgaagccgaatatgaggctttaattgcaggattgaagcttgctctcgagatgagaattgagtatctacaggctttcagcgattcccaaatcatagtatgttaggtgaatggagaatatctggccagaggcaggaggttggttaagtatttagccatagtatgcgaactgatgcaaaaattcaagaaagtagtcgtgtctcgagtaccgcatgctcataattcacacgcagacgcattggcccgtttggcctcgactagagaagccgaactgcttaatgtaatcccggtggatgtattgactcacccaaagataaatcaagaagtaatcatggaaatagataccgcccaagaagtcacctggatgactccaataatcgcatatctagaaaggggtatcttacctgatgacaagatggaagcaaagaagctgcgacaacaagctgcctgatatgttatatatgatggaaggttatatcgcagaagttttagtcagccgttactcaagtgtatcgacggagaagactgcgactatatactacgataggtacatgggggtatttgtggcaatcatacaggaggtaattccctttctctaaaaatcatgcgacaagggtattactggcctaccttgcaacaagatgctttcactttcgcaaagaaatgcgacaaatgtcagcgaatagccacatacgtccaccaacctccaagcaacttgcattccatcacaagtccttggcctttcacagtgtgggggatcgacttaataggcaaactacctacaggaaaaggcagagtcaagtatgttgtagtcgcagtagactattttacaagatgggttgaagccaaagtactcgcaaccattataacgactaagttgcgcgagtttgtctacaactccataatct

SEQ ID NO: 344912 - DNA, 592 bp, Cannabis indica
tccacattactagagcggtcattacaacctgccactgaagccatttcttgagctgttgcagacattttgctgcaatattgcagcagaaaaacaagtgttccaggtcttccttgccatccctacaaagtaagcatccatcctcagctgttagattgattttgcatagtctatctcttgttcttagcctattttgcactgctatccacatgaaaaagctaggtcgagacatgttcattttattccaaacaacccgagcccattgtactttatctccttcacaattgattaagctataggccttggagatttagaaattcctttcattcatcaattgttggaattccatagattgcttaagcttttccttggctgtcactatctttttccaataccaacttgcttgtagtggagcttggtaactccaccaatcttcctctttgatgtacacattgtgtacccatttgatacacaagttatcttctttatttgcaattgcccaaatgtacttggtcatggctgccaggttccaatcttccactttcctgaacccaattcctcctgttgattttgattgacataccgaatcccaagc

SEQ ID NO: 344913 - DNA, 539 bp, Cannabis indica
caaatgacaaaaacgaggtgcgaaaactattgtatacagtgcctcgctacacattgatcgaaggcaaactatatagaagagggtatttaatgcccctactttggtgtgttcctctcgcagaagcaaatgaaatcattagagaaatccatgaaggcttatatggggatcatgtgggctggcaaagtctgtctaagaagatcattcgacaaggttattactggccgacaattaataaggacacacatgagtttgtcaagaaatgtgataagtgttagatgtttccacatatacctcgcgtaccaccaatagaacttagaatgatgacctcgccttacccatttgctatatgggggatcgacctaattggggcattacccacttggcaaggaggagctaagtatgcggtggtagcagtggacttcttcactaaaatggatggaggtcgagcccctcatatcaataatctacaagaaagtccttgactttgtcatcaagaacattataagtaggtttggaattcccatgaagatagtatccga

SEQ ID NO: 344914 - DNA, 616 bp, Cannabis indica
aaaaaaatccttctaaggtgtcttttttgtgtgttttttttaaagtacatttttgtttttctcttttctattgtttcatgtcatttgtcagtgatgataatcatttttgtgttgtcgacttctttttcttcttcctggttgttttcaagctgttgtaccatttctgcagccacaagctttgcgtagtcggtgaagtcaaaatattcatttactcctgtagttttttttgtgttgttttttggttgttggatggttgtctctgatgtcacagtccctgtctctagaaaaaatgtatcatcttgaattgtgtgtgcaaatagttgttgcttggaagttgttcctgggttgtttccaggttgctgcaaatcttcctgtgctgagttgttgtcatatgctgccatcatcatatttttatctgtgaaatcaactattaaacaactattttgaagcatacgttagttaataaggataaattcaacatttcttgtttggagatcccaaacaacaattattttactggaaaacaacttataaacaactgtttacagattcaaatcctgtagcatctaattatatgcattaatattttttttgatgcaatttgttgttgtttttt

SEQ ID NO: 344915 - DNA, 740 bp, Cannabis indica
tcgtgcataccacgtggcatcattttttttaaatcattggatgcttctgtcaagcctgacaacaggtctttctcatctttcgacagaggttcactcgcggaagtaataccacatataggcagtaaaaggagagcatagacatcttctaatgttacagaaaactcaacccaattcaccaaaaatgtgtgagtcgtatgacaccagcaactcgctaattggtttaaaattgtcacatcaaaaaatatctcaataccagtgcatacccacatggaagataatatactcactgattttaaaggttcctgaaaacgtattgacacagaagtagtccattccttccaaccattggctgcgccagaaagtgatcgatagtcaatttcaaaatcattgccttcataatgacaacgcaatggaagatcttggccagaaattatatgatctctcgctgagtcctgataaaggtaaaccctgtcttcctcatagataatagaaaataattcatcacgagaaggtggagcgtcatcagatgaaactgtactctctaaagttaaagaaactgtctttcttttatggcccatagtatggagttccattcaatctgcacaaacacatacacaaaagaaactcattttatccacagccatatacattacaattcataatatatatatatatatatatgaaattatgcatactacagtaaagagaagcaacacaagtttcctactaaaaaaaaaaga

SEQ ID NO: 344916 - DNA, 647 bp, Cannabis indica
atttccatgttatgaaagtatgttcctaatttgacacatgtacttaaatacaagaacttgaacttgcagcaggacatgggttatatagctgtgtgcctgatagaaaagagaacaaaagttttacgaaattagactatgctcttagtcaaaatcctgtggagtgatagttttgatagagaagtgacatgagagttggagacgggcatgcagaaatagtaccccgagttattctttggtaagttaatttcgaggactccacatttgaggtaaggaaattaagtagaaaatcataagttttctatatgtaataacattcataggaagagtgagaattaatgtaaaagagaagttaactaagattttgtgcctgactctttattgtttgttatttaatgtactgtataatatatatttaaaataatatatttataagattcatattatttgtgtatgtttacagtattagagcacgactattgttaaaggtatttataagattcatattatttaagtatgtatataaataatatgtttataagattcacattatttagttataatcgttatgttatttaaataatgtatagtagtttgatattatttaaattaataagtagattatagtttatgtgacatgatttgaccga

SEQ ID NO: 344917 - DNA, 825 bp, Cannabis indica
agatagggaagttccaatcattttagggaggccatttcttgccacgggaagaactttgatagatgttgaaaagggagagcttaccatgagagctcaagatgagcaagccacattcaaggtctttcatcctatgcgtgctccggatgcaataggagaatgcttagcaattggagatatggatcctaacatggttgaggagtccaaattcaaaaatagtaagaaggtgagaaagaagattccccttaaagaaattgctaaggatcacgagccgcaagaaagcaaagacaaaacatcatttgaccctaaaaaaccacccaaaaagaagagaaagaaaaagaagtttagtagaaaattttggtctcaaatgtttgaagttgggcaacaagtgatttttgctaactctttaacgaaggctactcatggacgactagattcaaggtgtgatggatctttcttggtggtgagagtgtaccccgatggggtggtagaactacgtgatgcactttcaagaagaaaatttttggtgaaaggccaaggagtgaagtttgggagtggtgaggttgatcgagcaaagacctccatcacattggaagaggcttgaggaagaagggtctcgggttgtcatggctttagtgaatcacatttgggcaacccaagagcggaggaacaagattatatttagttatatatatgctatgtaataagtttggggtgtgccaccccttgaaaaaaaaaatagagaagatgtatttacaattaagtttggggtgtgccaccccttgaaaaaaaaaaagaaaaaaattattatatgcatacttatataat

SEQ ID NO: 344918 - DNA, 1168 bp, Cannabis indica
atatttaaatatgtgaaaaagaggtattatctcctcattttaagggatattagtctattttgaactagatcttttataagctctcacctatataaagagcattaggccagattagaaacctaagtcctatgttctaagctctcatctcgaaaccctagttctctctttcttctacacgccacctacagtatacaagaaactaagtctatttctcacctcagttattcgagatctgtcttacattgctctcattattgtaacattcatagagagacacactagaaattatagggtaacatcctgtaatctgtgtagtattatctctcaaattaatacaactaaaaggggagtaggtcattacctgctaatcaaggggatcaaacctctataaattgttgtgtctattttattacttgtttttattatttacacgttgtgatttcaatcataaataaggctatgctgccagttgaccaaatttgatgtcaactattagttttagtcaaattaccattttacctttctaattacttttttatcatttacttctatagattcactagtggaagtataatttagatcccatctaaatttgtgcacaatattccagttccagaattaacatataaagggaactagtattctatccgttaggaaagtcaggattctataagtgtaagaattatcttctatgagaaactttaataagtgaatcaaagaaactaataacatgaataggagttcatgataactcaggttttaggccgatcatctattgatcatcgttatgatatgaattaagtttttatagtaaatgacatgttcataaagatagcttcatttatatcggtccttgtcatatataatctatattatatacatcaccttcactttgatgtctcattacatccgtaatccgaactaagattacttgcacagaagagcaggcatcagtgaaccgtactaggagccattgattaaagatcttataaatttgatatgttactaactgttttattcatagttaagtggtcttagttctctgtacagctacaagccactgttagacaatttatatatatataaactgaaatatatatgattaagtataaagtgcggaattaataaaacatatatgtactataactaaggatcgaaatacctccag

SEQ ID NO: 344919 - DNA, 860 bp, Cannabis indica
gtttttatattctatgtcttaaattcgttactttatttttttctattattttttttattaattactaattatatatatatatatatcaaaactttagttatatttatataacttttgagtaatattttacagataatcatataaaaaaattattaaaaacattagaatttaaatatttatttataaatacttaaattttatatcacatcctataaataaattaatatataatcttaattttgtatgttttaatatttttaattataaaatttataatattcaacattatatttaagttttattattatttaacttatttataattgataaattcatatcttattttaataataataaattatttagctttttaatatgtcgtgtcgtgcttttcgagcttgtcgtgtgtcgtgtttttcgtgcttctcgtgtcgtgttgtgattaaggatatatttttatatcatgtcatttcgattcgtaacatcgtgtggtgtcgtaccaaaacccatatttttttgtgcctagtcgtacttatgccaatttcgtatcgtgtgaaaagtctaatccatatttacaatactaattgagttaaccatgtctgaatgtatattttattttgcatattacaataacattttacttcaaatattataattgataaattgtttaaaatcttggtaaaaagaatgaattgttcagtgtccttaaagttatacacaaaacaagttaaaactcttaattcaaacataattttattataatacacagtaaaacagacatcgtaccaaaatttaacatgattttttatataaaaaaaataaggagaattacctcatatactgttttttttaaaaaaaaa

SEQ ID NO: 344920 - DNA, 673 bp, Cannabis indica
acttcttcaagcaaggccatggacaccttatcggccgcaacaggagaggtcgggtctgaatttgctcaagcatatggagttgcttgctggcacaaacttcaaactcttctttccccagattgggattttctcaatcttaggacttctaaagagatgctttcaaggagcttggactataatttcatggtacattggctttgttattataattatattattcttcctataactctttcatattcatctgtttgcaattctccaggcttcttttgcttgcaatcgactactctctgagcggctcgaatacttggagggcgaggtcataaattactatcccaaggcaaggttgtgagtaagcatcgggacgaggcccgataggaaaatacacgccttaagcaagaagccgagaaagcaaacgaggaagccgagaaggcaaaagaggaaatcgagaaggcaaaagaggaagctgagaagaccgtcaaagcccaagccgatgagtttgagaagaagctcgctgaaaaagaagtcgagaccgtagaacaatgcgacaaggttggtcttcacaccgtgtctcgtgcgtggatggcgaaccctaatatggacaccagtttcttagaggagaatgttgggttttgtgccctaaataaaactcattacaatctgattagttatc

SEQ ID NO: 344921 - DNA, 985 bp, Cannabis indica
cttaagactttgggtacttatgtcgctatttacccattaattaactatatatatagttcattttaattatagtgatttaccaaccatagccagaaatcatacagttaattaatttaattttatcatctgataaaaaaatttactttcagaaaatgtaactaatgaaaaattataattcttatgttatcattaaaagtttcgtgactaaatttataaaaatcgtaatttattgtgactaaatctaaattagtggtaatttatatttaaataatatatttgtagtcacaaataattttttattataactaaaagttatatttagttacaaaaaatttatattatgactaaaaagttatcatactaagagcatctctaatagtagcattctttaaagatgctaaaaatttacacatcatctaaaaatataatattttattttatctattttccacatcatatttggcacttttatttctaaaactactccaatgtataacaccttttaaaaatactataattatgatctcacacattattatttaatatatatcctaatttttagatacaataacatttagcttcaattttttattaaaaaataatgaataatatcaaacaacatagcatccatgtaaatttctaaaatgatatcctcttctctctaatagtataacatcttaatattttgtcacgtaatatgtctacttcactaagcatcctctaaagttttactattggagatgctctaaaagacactagtgatgtctattaccttcttgcgtgtcaatatcgatattaatgtaattaagtatctgatcgcatataattttatgtaataacttttaagtagtatcgctaatcaattataaaataatatatccagaaagtgttagctagacaccattaaacccacaataatgctctataaatatagttttttttttttttgaaaaatgaaatatcaacttcattaaaactagcattc

SEQ ID NO: 344922 - DNA, 365 bp, Cannabis indica
taatagagagatcatgcatactgcatactacaaaatttcttaacatttcagagggaaagtaatgctgaaattttactctgtggctctgagaaaatttatagaagcaacgttggaatgtgtcattctcaagtttgacaacaaaaacacaactaatattaaacacctgaatgatccgagttgtccaattcaattaaagtgacatgcttaaacttatgtaaatatatctttatatattaaaagtgtctatctaacggcatttcttggtttaacatttcttagtttaacagaatatacttaaaaataaagaatattctgttaaatttaacgattaggtttgatctctcgttaaaaaataaacccaataa

SEQ ID NO: 344923 - DNA, 558 bp, Cannabis indica
ataactgctaaaaaagcactagactttgttatcaaaaacatagtgtgtccatatggcttgcctcaaaagatagtctcagacaacgagaagcactttgactgcaaagaatttaccgacttctgtaaccaacacggagtcatcaaagaccacaaacaaatggacaagcagaagccgtcaataaaatcctaaaggtcaccctaaagaagaagctgctagcctacaaaaacaattggcctgaagaattgccaagagtgttatgggcctactggaccaccccaagagccacaaccagccactcgccattctcaatggcatacggttatcaggtaattgtcccagtggaaacgttattcccatcccataggaggacgacttacgatccaacaacaaacaaggctttattacaagaagcgctggatcaaattgacaaactctgggatgagtctcaaatacgaatggcagcttatcaaaagaaggtggccaaacacttcaactcgaaggtcaaaaatagaaaattcactattggtgatctagtcctaagaatggtctttcaagcca

SEQ ID NO: 344924 - DNA, 905 bp, Cannabis indica
tgcggtttttgcgggttttttttcgcagtgcgggtgcggtttgggaaatttgaaaaaccacatgtgcggattggtttgaaaaaatagtcaaaaaccgcaccacccgcaccgcgaacacccttaaaaataagtacgtacagtattattcttttgaaaaatgctaaagggcactagtggtatttatagcaccctcctatgtgaaagtatcgctattggttcaactaagtatcgggtcatacataatttaatataatagtttttaggaagtattgctagccaatcgcaacgtgacatgtcgagaaggtgctaggcaccacaggtgcgtaatagcaatgctctattctttggtacagtaccttattttttattttttttctaaaaaaagacaataagtattcaatggttacagtaataattaaattttcttataatctattaaagtatttcactaataggatttatttttttaatttttaaactaaattaattatatacttaaaataaataatttttaattaaaatatttaataaaatcttttcgaaaattattattaatatatttttttattttttatttcaagaaaataaataaaatgaggctagtatcaggttacaagtaatttattaatcatttttagtaaattttttaaattaatcacaactttttaataatgatctaatgactaaaagtaaatgtaatcattatggtcatatatttgatataattattgaaactttctcaaatatatatatacacactattagtaacatgtaatgcatgtttccttagagttatattagagttgttattacttaattattaatttaaataataataataaaaattaaatctaatacaatttaataatattttttaaatatataaattcaatttttttttttta

SEQ ID NO: 344925 - DNA, 558 bp, Cannabis indica
aaaactcacttaagcttaagaagtgtctaaagagtagtgagacactaaaactccacctatatggactagggtggtgccgcctcttatgagaattggaagttattctctagggagtccatgaattgggattttatacatggccattaacggtgcaaaagcgagacatgcggtctcaagtgagcattagcaagagtgtgtgtgttatcgccagtttgtactaaaggaatagtagtttaatgcgacgacaactaaaatttcatcaaactttgtggtaattatactaaggtaaaattcaaatccctggttacccactactggcatcccgatagatcttcgggaaaaatcaaggaattcgcataccaatctcgtatcttcaggtccagatgacacaggttggatggtagccactacggtgatagggaatcccaaacaacccctacacatcagatctttagcttttaaaagtgttattcttggtatgcgcgtcccctgaactttacccacaaacactttcgggttggcactgtcgggctcaaacaccaccatcttctgtttgca

SEQ ID NO: 344926 - DNA, 754 bp, Cannabis indica
gaaccaaacccgaacccagacctagacctgggacacaaaattagaacctgaacaagaatcgccgaaccaggacactagaacaagactaggaccgtgaccatgacccggacccaaaactagaaccgaacacagaactagcctgagacccaaactgacactggcactcgtgcccagaacagtcctgtacccagacttgaactgagacacggacctggacctaaatctgggacctgatcccaaacacatacttcgacctagatcgggatccagatacgaaactagactcggaccaagacccagactgtgatcgaaatgctggacctagatttggaccgagatcctgacccagacccaaacttggacccacactagggacccgaacttggacctggaccagaactagacccagatcgggttccagacctggacacaaacccggacacagactcgcacccgaactcaaacaccaacacctagaatcggaccaaaagctagacccggacccagacccaactcgaacccagaccaggatcagaaccaaggacttagacccagaactgaatccaaactctgatcgggattggaacttgggactcggaaccaacctagaccaagacctaggacgcgaacccacacccggaacctcatctggacctagactgaaattaggacccgaacccaaacttagagcaggactcgaactctgacccgaactcaaacagaaattcgaactcagaatcgcaaatggaactag

SEQ ID NO: 344927 - DNA, 535 bp, Cannabis indica
gtgttattcttggtatgcgcgtcccctgaactttacccacaaacactttcgggttggcactgtcgggctcaaacaccaccatcttctgtttgcaatcgattgttgccccatacttagacaggttatccattcctaggattatgtcaaaatcagacagttgtaactcaattagattgacggttaactcataaccgtcaatccaaaaggacaaggaccgaatccaccgagtggatactattaggtctcccaaaggtaacagggtaccaaaccccgaagcatatacatcacatggtttatgaaagctttctattactctactcgacacataagagtgaatagctctcgaatcaaataacacattatatgaacaaccatttatagttaactgacctgtcaccactaacggactagcatcaacatcagcccgagtcatagtaaatattgttgggttttgtgccctaaataaaactcatttcaatataatcagatttacttgttaataaagatcaaaaataacattttatgttgcatggtt

SEQ ID NO: 344928 - DNA, 641 bp, Cannabis indica
tcacggccggatatcacctacgctgtgaatgtcctcagccaattcatggcttctcctcggactccccatatgcaagctttacaacacctcctcagatatttaaaagggagtcctggtcaaggcatcatgtattccgccaactcttcccttcatcttagaggattttccgactccgattgggcttcttgtcctattacaaggcgatcaactacgggtttttgtgtttttatcggcgactgcctcatatcatggaaaactaagaaacaaaacaccatttcacgcagctcagccgaagccgaatacagagcacttgcagccaccacaagtgagttaacttggctgcaatacctgctgaaagacctccacatcccacaaccgaatccagcctttatctactgtgacaatcagtcagcgatacacatcgctaacaaccccaccttccatgaacgcaccaaacatattgaactggactgccactttgtccgtgacaaaatcaaccagtccactattcgacttattccggttccaagcaatctccaactcgcagatgcttttaccaagccattaccagcatccactctctcggttcatactagcaagatggctgtccaaaacttgtaccgtccaccttgagggggggg

SEQ ID NO: 344929 - DNA, 741 bp, Cannabis indica
ctaatcaaaatatgtgtgtcatatcgattttgtggtgtattgagtatagtctagagttaaaagagtttgaactacatataccaataacttcttccatctctaagtgttataaagattctgtggagttttgaatatagtctagagttcaatagatataaaagatctttgaactgcatatattaataattttttccacccctatcaaattaaaagatcttttaatcaaacaaaatcttaataattacttaaaaatgaaaattattcataaatattgaatttaaattctaattgtttatgtggtattatctcttcccaaagattaatatgccatagattttgtatcaataataaaatacaaaacacataaacttgataaatatataaatattatttggttggcatacaagttaaagaatatgaagcttaatttcataaaagcaattcataatgaaaatctctaaaagagaaaattttattaatactctaaataatatcataataaattgtctgcaataatatgaaatagggaattaaattcccatactaagaattgaaactaaatttttcgaataactaaaacaataaattcaaaaattaaagaagaaaaattagcttcatcttcaacttagacaatctccaccctgttgggttttatgccctaaataaaactccatttcaatgtaatccagtttattcaacatcaataaagaaacataagtatgttttggttcatcttatcaa

SEQ ID NO: 344930 - DNA, 817 bp, Cannabis indica
acaaccaaagttatactcacaacttagccatcttaaacttggtgacatctctgagaagacaattcccccaagctgtcatagcgtacgccgattattggactgcttaccaaacagtcatgcaaagtccagccaagtttggcattaacaagtctttcaaagcttgttgtggtgcgggtgatgaaccatataacgttgatgtattttctttctgtgggacaccttctaccaaagcttgtcaaaacccatctcagtatgttaattgggatggagttcacctcactgaagctatgtataaagtggtctctgatatgttcctaaaaggatcacttatgaaccctcgttttagttacttgttagatagaaaactacaccaagtataaaaaacgtcgatgattgttatatgtatatatatatgtatatatctttctgaaccccctcttgatattatgtaaccttccatttttctactttctaaactatctaattctattccaccttcatattccatgaacttattttttatgggtgtactcttttgtttaactcatgtaagatctgatcattcggagtgagttagacccccaatttgatgggccgtaaggcttatccaaagtgttcagatctcttatcagatatcgaattagatccaactcacgctctaataatatttgttctagatcgatgctgacttgcaaacacatagacaaatataaccttcaaatgcaaaaatgaagaaaaccttaaattggaactaatttatgaaaaaagagtaaaaaaaaacaaattacactatacataaacaaacaacataaattta

SEQ ID NO: 344931 - DNA, 1075 bp, Cannabis indica
gtgaggacgtgggatgtttgtgcgcatgccgtcatttctgagcatgcacagagaagtggtggtggcagcttcagttccaagtatgagacttgggagacctgcttgagtgcaacttgatcattagtttatctgattaggattcaccacatctgtagtgttcatgggaattccaattttgagtggaaacaaagtatctggacctacagttcgtgggtcttgagggcaaccctaatatgcagatggtctaataggagttcttcttgttttaaccatggggcttgattagatacgatattcatgctctcaatgaaagtaccaaactgttgacctcaaaaagtgatcaactgacagcgggatcgtatagatctgatgcttgcacgtgtttgcacaaacaagaatgaaaagtagtatacacacaaatttattatagaggttcgacctccttgtgatagcgggtaatgacctactctccttttagttgtattaataccgatggctaatattatctagatcactatagatggaatctgctatagcacccttaagaatactgataactctagaaattagagttattttcacatttttttaaactaaaattagtttagttcttaagttttaaatttatttagtgagttcttaattatttttgaatttattagtattatacccaaaattcggcaagcacatcagaggaagacacgtgtaaagctagaaagaataaagaactcaaatacgcaatcataattacacttgaaatggaatgactcgttaaaagcataattaatagagtatgtttacaactcggcggactgaacagtcttatgcgagataaaaatgtacaaattgttgcgttatgcttcgacaagaaaccatgtaactttaggtgtacaagacgaggcactaacctcgttacgtggaggagatatgatgacaatgaagatacttagcatatagtgtacggtatacaaactaagtataaccagtgggtgaaccaaagcgagatataagcgaggtgtccaactcgccgtaaaagggcatgcacacgaaaaagatcatctcgccaccagaaact

SEQ ID NO: 344932 - DNA, 899 bp, Cannabis indica
aataataactaactttaatagcccccctcaagatggagtgtaaatgttaattactcccatcttggatacaatgttattgaattgggaaggtaggagaggctttgtaaaaataatcagttatattgttgtgagatgagacatgcattagttggagggagccttgttggaccttttctcttatgaagtgacaatcaatttccacatgtttagtgcgcttgtggtagatagggttttcacttatatgaattgcagctgtgttgtcacaatacatctttggtggagtagaaatggaaacaccaaagtctttgagaagagcgaggatccaagtgagctccgatgtagcattggccatggcccgttattcagcttcaacagaagaacgagagacaacatgttgttttttaattccaggcgatgagagatcggccaaggaagatacaataccctgaaactaaacaccttgtgtcttgactgttgccccaatcagcatcagcaaagaaagaaagatgtacattggcagaggagagacttgtttcaacataggcagtgatgttgagggtaccgttggagggaaaaaggccttggcctagagtttttttttttttttttttgagatattgtaaaactctataagaagcttgtaggtgagggacccgtggacaggcaagaaattaactaagatggttgactgcgtaagtgatatcagaccttgtgatagtgaggtatattagtttgccaatgaggctacgataggcaatttgatttgtcagtgtggatcctttatccttgttgactttcaggtttatttctgttaacgcagattttcgttaaccagatatgagccttaggtgataaatttgcatagaaaaataaaaaaagtaaagaaaaaagtatgaaca

SEQ ID NO: 344933 - DNA, 1212 bp, Cannabis indica
taaaaatacttgagaacaaagctaatttaatgcacaaaagagctaaataactctattttcatagagttatcattagcacaacgctgactgctcttttagaggctgctagatatatgtagagtggttctacatccttaggttttgctaagagcaaaggtgaggcgagatattccttaagttgtccaagtgcatcttcacattcctttgtccactcaaattccttcgtttttctcagtttggagaagaacaagtgacaacattcagaagattttgaaataaaatggctgagtgctgctatcctcctggaaaggcgttcaatgtccttgattaattttggtgattgaatgttttgtatggagcgtatatctaatttaccaatctttgatatgttgcactggcgttttttagtccaaaaggcatgaccttgtaacagaaggtcccttgttctatgatgaatgatgtcttctcttaattatctaactgcataaggatctaggtgtacccagaaaatgcattcatgaagctaaggagctcgtgcccatccatagcatcaacaagcatgtcaatgtgagggagcgagaatgaatctttggggcacgccttgttgaggtttgtgaaatcgatacaaattctccactttccattctttttttggacgacaactacattggccagccattctggactgttgacttctctgactgatccaatgtcgatgagcttttgaatttcttcattgatcactttgttgcattcgggaacaaactttcttcttttttccttgactggagggaaattggggtctacctgaaacttatgcataaaattgttaaagtctatacctgtcagatctttgtgagaccaagcaaagctgtcacgatgcctaatgagaaattcgatcaactttgcttgaagttttggtgtgagcttggccccaatttgtactttgtgctctgcgaattccttactaatgctcacttcatctagttcctccatgttaggctcatctagatcaatcattgcatttgactgttgtagttgctataaggttgattgtttttcttttagggtgctctgataaccctctcgcgctgctctttttgcctccgatattatttttatttcccatggtgttggaaatttgataacttggtggtatgtggatggcacaactttcatctcattagaaataacatttaatgttgcatggtt

SEQ ID NO: 344934 - DNA, 1008 bp, Cannabis indica
gtcagcaagcgcatataggggcggagacacgatacccggtgatcgagaaattagttttttagcctcctaatggcctcaagaaaactaagaccttatttctaggctcacccaatcaaagtgttagccaaccacccgctccgacaagcctgcaaaaaccagaggcatccgggagactcctcaaatgggatatggagttaagccagttcgatctacattacatgccacgcacctccataaaagggcaggcgctagcatacttcatcacagagtgccacgaagtagaggctaatgctaacatacctgtaccacaagtcccggcgtggaaagtatttgtggatggcgcctccaatgagaatggatccggagcaggggttgcaatgatatccccaaacgtacttcgactccaggcagccctacggtttgaattcacagcttctaacaatgaggctgaatacgaagccctgatagcaggactgagattagcaaaagtcgtgggggccaaaagagtggaagtctacagcgattcacaactggtagtaaaccaggtgtcgggagaatatcagacgcgcggagaaaagatgactgcatatgtagcaatagtccaagaacttctccacgagttcacggactatgaagtagaaagaatccccagagaaaagaacgctcacgcagactgtttggctaagttagcttcagacagcgaaattgaaaaactgggggcagtgcccgtggaacacttggcggggccaagcattaaaatcaagaataccataacaacagttgagcaagagcccagctggatagtccccatcatcgaatacataacgaaaggcgagttgccccaagagaaggcactatccaaaaggatacaatatcaagtgcaccgttatatgatgatggataaaactctctatcgaagaggactcagcatgccgtatttaaggtgtgtatcagactctgaagctaagaaattatgctagaggtccatgaggggttctgtggagatca

SEQ ID NO: 344935 - DNA, 603 bp, Cannabis indica
aggcttggtttttatttatttctctttttgtttctgaaaatggccttttggccgagacaatagtttgccccttgtggcattttttgtaaagataaatttgcgaagttggatggccaactttgctttttaatgcctcgtacttttaagtttgaacttcaatatgtagttttttacttgagtttcattcaaaatttaaacaatcatattttgatcatgcataaaagtttcttaggggttcccattgctcgtatttctttttgacgttgagtagttaatagcctacttaatgcgcgagcgatttagcatctgctctgcacttcgatttgtgagcagtaatctgtttcaagaaatcttgaatatattttaatgaccttgccattttgtatatatttttattgcttacacgagtagttacgtcttctacccacgtgttaagtttgagtacttttttcaagacactgtctcgtttaatactttcctctagcgcgagccgttagtatttagctttatatgcgagttatgaggtatatctcttttataacttttaattttcctttctcgtcaaataggttttaaatcaaaagttatagttgtttgatccct

SEQ ID NO: 344936 - DNA, 776 bp, Cannabis indica
ttttgtaaaattgtaaatcaccttgtttaaatcatcaattttagccttcaagtttaccatctctttttcaaataaggaacaatttttgcattaggtttcaatcaaaatttctttttcttttactttcaaaatctcaacttgttaaagcaataagcttatttcctttttttgagttgattttttagcaagcaatttttcaaaatcaaaaaaacaaaaacaaatcatgaaaagattttgataattcatgataagacatatcaagcacatcatcatcactttcactttcaaaatcaatggtttggttaaaaatacttactaatttatcatcgatttccatgtagcacatgtgagctacctcttgttgttcatctttggagctttctacctcgctttcactccaagtagctataattgctcttcttttattcttctttctcaaaggacaatatatttttacatggctgggctttttgcattaatagtgaatgatttgatcatcttttcttaagctctcgcttgagttactccctttgtgaaatttatgttcattcttcttgaacttcagaaacttcttaaagttctttgagagtagggctatatcctccatttcactatcaccatcctcaatatcttcactatcaacatgtgaagtggatttgaatgtaattgtgttcttcttcttcttatcaacttccttttctagttcttgagcactcatgcaaatctcaattcataagagaaccattgagctcttctaatggtagagttgagaggtc

SEQ ID NO: 344937 - DNA, 772 bp, Cannabis indica
catcccattttttgcactgtgatgttgcagcacatgctggtgacacttccatatctgcttgagatggatgctctgagcagggcagcgcatacacctgaacagacgatatcttcccagccgagcagtggataattcgagcagcgcattaacacttagcaattccaaaatgtgcatcgtgaagcacaagagcaatttctataaatttgggatcgtatcacagagatataacaagctatccaaatcctacaatctgtgtattctaaatatgtaatatatgttcttaccaattatagatattgtaagcaaaagggaaaccttccctcaggcatatagccctatagatagtgatccattctcactggtaaaggggtcgaaataattactttagtgaaatctaagagagcatactcagagattttattgtgagagcttcaagagaggaaacacggagttctttgttcttgagttaatgcaaatcaaggggagtaggctattaccgaactgaacagggccgaacctctttaaaaacattgtgttctttatttatttgcttatattatacataaatcatattctttatcactgattattagactcattgtcgttggctaaaagcaaggtcaataccaactttacaaaaatactgtgtataaagtttaaagattataaaaatactgtgttttggtaaaataaaaaaatagctcagaaacaagtaaaaaaagaatacctagaacaacttaacaaacaagaaaaatataattacaaagcaaca

SEQ ID NO: 344938 - DNA, 828 bp, Cannabis indica
gaatttatacattaaatataatcatgaaataaatcatgtgaaccatacaatatagaatgcgatttttgatctttattaattaataaacctaattatattgaaatgacttttatttagggcacaaaatccaatactatgtaattaagagtgaaattctaaatctatagtggcgcaaggaggaatcaatagttacttggtaaattctaaagctgcttattggaagcttgattatataggcccatggtccccacactagttgagataatactacttgcagactcaattaattggttttaattaatcaattataattttaaaattagactatgtcttattaatgaattttactaagcaatgacttaattataaaaaaaaaagggttttatggtttatttattaattaaaagactgagtaaagtctaattaataaataagttaaatgataactttatttgatgattaattttaattattaaataaatagttttggcatttataggattaaaattgaaaaatatggcattagtgagataaaagataaatggtttaaaaatatggcaaaattataactagtggggcccattactatggccggccactatatgctttattttgctattattttatcattttttattccatataatttaaatcctaaccctaggtgaaatagtataaaaagaataggatgttctcattctcatccaactttataacctagtttacattctgtcagacaactagagtttttgagatcctcctttccttcactaatttcgaaatcctctctctccctcttcatatattttgagtctatagtgaaagagt

SEQ ID NO: 344939 - DNA, 917 bp, Cannabis indica
accatgcaaccatcgtctgattgaaaccttcgtctgatgcaaccaccgcgcaaccacgcagcaaccactctgcaaccatcgtctgattgtgtaagtgatgatagtgtaagtggtattttggtaattaaaattacataaaaggtataaatgttgactttaccttatggatgtatttttggaaataaaatgtcaatttatattttctgtgtaataattccatgataaaatatagtattatttttacaataattgattatcaattactaattaattaattttttgtttctaattactgaaaagggtttagaaaaacaaataaataaagcaaaacaaataattaaaaattaaagaaataagcaatgattgttatgatctttaattattcttttttttacttcttaatacaattatctaattctattcttcttattcaattgacaaattaaatcaaatagttcagacttacaaacccaatttatgtaagaactccatatataaagtttaatcacaaataaagcattaaacaaagtaacttataaactcatacaaataatctaaatacttttgtcttaaatcaattcgcatctataacaatcaaagtatatttaaatctcacttttcagaattttgatttgaattcatagataacaattataggtgatcagctaataattgcaaatctaaatcaaattgcatgtaattaaaataagagcataagatgaaattaaataattacattaatccataaaataaactcaagtggttcacataataatccttaaaagaaaattagttcataaaagtcattctttaataaaaaaaagattcaattaagaacataaaagataaagatatatgagaaagaacattattggagtcttccaattgagatgcacatttccctcacggggatgggg

SEQ ID NO: 344940 - DNA, 970 bp, Cannabis indica
ggaagaaaaaaaaataaaattatcatgtcaacccaccttcataatttaattaaaaaaaataataatatgccaaacatgatattttttttaaaaaaaaaaaaataataataataacaaaacaaaatatgatatttttgttaaagttttttatttggcttgggaaaattcaagcaacttaattttgatgcaatcttaatcaatcgtgatactatatattatttaactagtaaataggctctgcttcccgtgcggcgattaaattattatataaatattaattgaacagtaaaatcagtacgtatcaaataattttaaatttatttttatgtattgtgtgttatgtaactatggtaaagagtcaattttttatgttttggttcaatgttcctttgttcattcatgttggattaaatttgcgttgggggttggccattctgcagcaaccaacttttttgactagtttatggaagtgttggcagtaggcaatatagggttagttgaaaaaactgtcatggttggttgggcaatttagaaggctcgaaatgatatgctatggaatggtaaaagctgtagtgctagctgctgatgttgtttggctggctcgtaccatacttcgacaatggacttgtgctcaatctaagcggttagattttgtttctctggcctacaaccgtattgacacaagggataactggtccaaaccagctgctggatagttaaaaattaatgtggatggggctgtttttgaagacacaaataagatttgtactggttttgtagcacgcggctgtgatggtcgtataatcgaggcatttttaactatttcctccataagttgccaacctgaaattgcaaaaattctaagtgtcaaagaggcacttagttggataaagaggaataacaagtcaaatgtcattttagagacggattgcattttagttgttcgagctattcttagttcggtctctat

SEQ ID NO: 344941 - DNA, 539 bp, Cannabis indica
taacttttccctttctgacactttcaataaaaaacaaatctagaacttcgtagtcatctcttcctttaatctttactttataattctctctcaaaacttcgcagtcatcaacaacaatcggagccatcttgaggttcaaaccacaccgtagccataaactcccttgcgtagctgcaacggccagtagtgctgctgtggttgtctcccttcttcgcctacccttccttactttcaagaattcgtatggtgaagacgtagtgctgatgtttatagcagaggcggtgatgatgatgtagctcaaatggttgtagcagagtcggttccggcaattgttgtaaatgtcttgtaaaggtctagtactactatatttgtattcaatagagagtgtagacctcggtgactttaagaaagaaggaatagagttgtgttgcaagggtagtttaagaaagttaattaaaaaaataggtagaaattaactaaaaaacttttgagggtaattttggttaattaacccaaaaaaaaaaggtaattatcaactt

SEQ ID NO: 344942 - DNA, 965 bp, Cannabis indica
cttaattttttgaaattcaaaactatatttcaaatatagttgttggggattgaattttatcatttataatgtgtataagtgatataaaataaagtaggaatgatttgaaataggtaggagtgttatttacaaaagctgaaaaactttttactaatggggtgatttggtaactagtaaccagttactatttttttcagcattaatagtaaaactttttttactattgggatggctttattaacaactcccataaccttcaaatcacccatttaatcacatttacacctcattaagaaatggtaacaaccattgggtgtgagatatttgaatttcaaagtttgtgatcctaaacactataaatagaggccttggttcaccctttgagacacactcttctcttctatctttcaaacactataaatacaggccttggttcaccctttgagacacactcttctcttctatcttccaaacacaaagctagagagttctaaggcttgataattcctagaagtatttccacaaagccctaagtgtttcatagagggggaaataatcttcttggataatagtgtagaaactttgttcaagtttttggtgatccccatctccactttgggtgcttgttcttctttttatattgttctcttgttctcctctaaacactcctatatataaatactatcatatatatatatatatttatatcttgactatataggattgtatatattatatatacgtaccatatatacactctctatatacactctttacatctctactatatatcatctattatatatattctatatcatatatatatactattatatatataagcttttatatagtttacatctacttgtatctttaagttttgagttataactcttttcttttatttgtattttgtgctttgagattgtaactctttatttaatatattgttcttgtaatatttt

SEQ ID NO: 344943 - DNA, 989 bp, Cannabis indica
acttttttgcatttcagacctgtatttttctgatgaacttgttctctgtttgctttacaacaaaaaaaaatgttatttttattgctttttagagcatttcgtattgggtttatatatatttttattattttctcgaaagatgctagatttttatggctcgcgattgattttcgttattttttttatcttctaaatctatgagattatgtatgtatttatcaagatggtattgcttttttttagtggaagtgatcattttaagttcattgttttctttctttctttatttatttatgtcgagagtaaaatactttcaatatgttcagataaataataaaagaatgtacatattattggctataatttttctcagtttccagagtgattattgttttttggtgttcttattttgttttacaggaatttcatatttttttatctgtatctcacatttattagcctcttttcttatgcttgaggcttttttattcttgagaggtgcattcaaaggattgaaaacatttaaattgtgttgtgtgactaatgtactgcactgttgatttgtctttggcgttttgttttaatctttggttgtttacttttgtagtgaaggagtccaggaatgaggttggccgtggaggtggacgtggtgggggacgtggatatggacgaggtcgcggtggtgctggtggtttcaatcgggattctaatgagaattcctttggcaacaatgggttttctggaggatacaacagaccatctgaagagggagaatcagggaaaacctctgaaaggcgtggctatggtgctccccgcggtgcattccgtggtggacgccgtggtggttttagcaacggtgaggctggtgaaggagaacgtcctcgaagatcttatgaacgtcgcagtggaactggacgtgggttagtattttacttcagcatttttttgttgactgatcattgtctattagttttattttaaaattcatt

SEQ ID NO: 344944 - DNA, 677 bp, Cannabis indica
gagtgagtgcccacacacatcaagtggtatctcaatcatagtgtgtaaggctaagaataatccagattcaagagaaggacattcaggcttagatcttggtgatactctgctacagaaaggatacatgggtgagagatctcagtggaaggagacattatatttcgctgcaaccactgtaaggtttcttatactttatatgtgtttatttcatatcgttttagaagttcatatttaggatgttaaagaacatacttgttagtatttctaagatcctggttaaataattccaataggtaagggcaaggctaaagctgaggagccttgagaacgagtaggtgaagattgtacatgtcaaggcagttaggcctggagcgtatgatctttgggacaccagggccttttgctgtatagtcgctaggtgacaaaacttttgtatatgtgcatagcaaacttttataaatgtattttgtaacaggatcccgaaattttatatatgtattactttaagtttattaattaaataagaaagtttcaattaatcacacttttcattaatctttttgattagcaacgagctgcacaatacgtttaaaatcacgttaactgcctaattagttaaggtgatacaatttggtatcagagccgccaagttgtcttccgaagatcgtcacgacatg

SEQ ID NO: 344945 - DNA, 589 bp, Cannabis indica
actaaaaatgaatattttgagaatacacaataatttgaaaattcaaaataaagaatgaaaaagtaaaatattcaatcaaataaaatgtggattcactacaagaaatataacttttactggcacataattgcaccgacaaaagcatactaaacatcctggtaaactttattggcatagtctacgaatgtctgtcggtaaaagagccttttccgacgcaattcacatttacaccgacaatattgacttgtaccagtgttaatatgtctaggaaaaactaaatgtcagtataaattatggtcccaaatccgctaatcgatggctaaaataacgtttgcctgtacaataatgcactagcaaaagtttcgcacctttttcttaattggcgcgagaaacttttatcggcgcataaatgtgctgataaagagttttttttaatttattatattttaataatttataataatattttaattatttttaaagaagcataattaaaaaaacgaaattgacattgataatcaaaaagtattctgattgaactaatataaaaacatggtcgattttgtactaaaattagcaagtaataaaa

SEQ ID NO: 344946 - DNA, 578 bp, Cannabis indica
taatggttgtttagggcataggatagacccttttttttttctttttgtctcccttatcgtgtaaagccgtcttctgtgagtttactgcacacgacatttgtccagggaatccttccagggtttcctgtgtgacacgtgtccggagggggcccccttccaaccgttaggggacccccattccctttttcttaatttagggtttggtatggggcctaactgctggaattttactctttttacagaatagaaaaaatgtttgcttctggctcaaagtcctcgaaaaaaagtggtaagcgcatggctacccttgaagaggtctccctgggacccgttgcccaggaggggtataagtcccaggcgaccggatgggaagcggcggagctttactctaccttgacccgtccccatcaattggagaacattgtggaggttgttggaatcaagccttccacctcagggacttaccaccggccacctcgcgacgcggagacgcccaaccacaactacgacaacttcggggcctggagccaaacgcatctgatggccggggccatgcttcctcttcaggattattttgt

SEQ ID NO: 344947 - DNA, 703 bp, Cannabis indica
aaagcaccaaaatgttgacttcgcttttagccaacgacaatgagtcttttaataagcgataaacgatatgtcgtaataagaatacgtaataaagcaaataataataataagaagacacataaattttatagaggttcagccccgagcagttcggtaatagcctaatcctcgttagttgtattgacttaagaataaggaagaagaatccttttcttatagctcttacaatagtatctctgaatatataattcttagatagccttagcttatagcgtttcggcgtattcatttttttctctcccttgcccagtgaacattcctcactatttatagggcaggaaacttgaggaggaagagtttcctctctcgttacaaagcgcataaacacaaagatcgtgggatcattgctgaatgctaggatcgtgggattgaggccgtatacaccgatagtggaatcgtgtgtatgccatatccacgcaagttgatccctgagttatagggattgagctggtgactcacgaagtgcttggctgaattggctaagtgttgctcattctgcacggctcgttgagtattccattatggacatgccagcgaggcatcctgctcggcatgttgatccgaccaggtgctctaagttgatgccacgtgtcaccattcttgtgatgccacgtcaaagtgccaattttgggataacaggtat

SEQ ID NO: 344948 - DNA, 710 bp, Cannabis indica
taaatttgattaattgatgaataaaagaggcatttttcaacttaccccttaatttttctcatttagattttattaactattaaactacgtaccaagttaggtctatcttgtggaaaaaatgctttaattttgaagataatgcatatggaatagttgaaaaatgtgtgcaagagtaattaggtactttaaaggtaactataaggtaaccagttaccatgagggagttaccttatactattttccttctttttttttaaccttttttttttgtattttttcaataagataatttttttgatttttttgaaagaaaaaaaaaagttaatatttttacaaacttatgccttaaaaatcataaaagtgaaaattccttttttttttggagatcattttacaaatacacaaaaaaaacaaaaaaaaaaaaaattacaaaaatatagttatacagaattttaaatatttttatcatttatttatagaaaatacgatcttttaatgtatttttatgttgtactcttgttaatttgttattgatttgttgttatttgtatattatttgttgttgttgttattgtgttatttagatgttatttttcttttacttttatgtatattttcttattattttcgtgttatttatataaaacattgtaagaatatagaaaaaaaatatcgttcaaaataaaaatgtaaatattttaccaaaaaaa

SEQ ID NO: 344949 - DNA, 654 bp, Cannabis indica
aacatttggagatttcttaatttacatatttggcttagcatctcaactaggctacctccactaacaacgagatgttttaaattaatgagattatgcatatctttaggcaaagtttcaagttgatcacaatcttctaatttcaaactctgcaaattgtacaatttagttacagatttgggcaacatcacaatcttggtgccagaaatatctaaatagcgaagatgttttagttcaccgattgaatcagataactcagttatatgaaggccacgaaaagataatactctcaaacatttcaacatcgatagcagattctgcactacttccttagaaatactgatttcagaatatcttgaatcaaatgttaaaaaggttcgcaaacgagtagcttcaaaatcatagctagatattttgttatcaatataaatttccatgtcacatccaaggtgacgtgtcttcttctcaagcctatcaatgtcatcattttcctctaacaaacaattatattttccagaaatagttctagccaaatcaactataagatcatgcatgacaaaaatgaatttacctgtcttggtagtctttatctttgtaaaaaatgacatagatactaaatcatcaaaatactcatagccaacttcttccattctcata

SEQ ID NO: 344950 - DNA, 1361 bp, Cannabis indica
ttctctttctatatctatttttttttattttcaatccgaaacctagcgatctaagctccagtattagcatgataccaaatcctcgaagagggaaagcttaatgtatggtttaatttcattttaagtttaaaaacaattggtttcgtataggagttttgtgaattagaatagttataaaggttctgaccttataagattgttcccgaatagtcatgggactagttttgatattttcttgttgaatttgaggtaattttgagttaaaaatcgagtttgaaactttttaaagcttagtctgaacattaatgacatttttcatttaagggctcaattttttacgtaaagatggtaatatttatagtatatatgtgccctgtgaagtttgaagtgattttaataaattttggtaccaataagaatatgcaatgtgtacatagatgtacatggtggcagtcttagttggcgtcctaattggcacttaactggaaaatttaactgttattttaagtttgcaaacagagctaaactaaagggggtttcatcactaaaaaaaaaaaaagagggttatgtgtatacaaactgaaacataaaggggtttagccgcaaatttctttattttttatattgttttgattttgttttcttattactttcatgcaattttcttgtattttttatagaataccgtaaaaatataaaaaattaaaatgtaaaaatataaaaattttacaaaatttaatatcatatgtaattatcctttttataattaccactgattcctgaattttttttttacaaacttgataagcttttgagaaaataaaattaataaataaataaaagaaagaaaagcaaattaatgaagaagataattaaaaaaaagtctcagaggttttttttttaatcaaaaagagaaaacttcaatagacaagattatttagaagtacatttctaaaagcataattaatagaaagttctaaaaaatatgatcagatggaaaataggaagctctaacaaaacaatgagaccatttgcagtttaacaaaaataattgaacaatgtcttaaagtagataacaatcttcgacaatggcactgaaataagagtttgatacagttactactgttccttaactaactgtttagttagttaattagttaaaactgttactattgtttctttgtaacagctttcagttgctttctgttttctttaattattgcttttgccttgtactcatcctctatataaatgaaatcatttctcaaggctagttagcttttgctagtcttaaattgcaatctcatagattggattctggtagattttagcatagaaaagctcttacatggtatcagatt

SEQ ID NO: 344951 - DNA, 607 bp, Cannabis indica
acgtagtccaccacatctcttttcatcccatgccaccagtagtagggttttaaatcctggtacattttggtggttcccggatgcaatgaataaggtgtggtatgagcttcgtcaagtatcactttcttaagctcatcaacattaggaacacaaactcgagctttgtataacaacattccactgtttgagactgaaaaatatttaggctgaccaaccattacctcgcctcgaaccttaactagctcgggtcttccaattgcgctctcctgattctttccaataaatcagattgaagtgtcaaattatgcaatttcccaactacgaattcaatccctgcactaaccatttcaaaggcttgttgagggactgtcatcatcgtggtgcaaacctacccgggagcttttctgcttaaagcatcggccacaacattggccttcccggggtgatatagaatctcacagtcatagtccttaaccaattccagccaccttctctgcctcatattcaaatccatctgggtgaaaaagtatttgagactcttatgatcagtataaatctcacacttctcaccataaaggtaatggcgccatatctttagagcaaaaac

SEQ ID NO: 344952 - DNA, 1186 bp, Cannabis indica
tcaggggatcttgttgctcagctgataccaaaaacctatgaacatttcgtggatacaattctatatggcaaagaaaccttgaccatgatagaggtcaatgcagcactcaactcaaaggaaatgcagaagaaaaatgatgagagaactaatggtattgcagacagtttatttgtgagaaccagaagtaatacaaaagatttcaggggtggatataacaagacaaatcataagaacaatcagagtacaaaactaaagcaaaatccaagcaagaaaagcagtgttactactgcaaaaaggaaggacatttcagagatgaatgtagggcactcaaggcaaaattggagagagaaaagggacaagaaagaggtgctgcaggcattgtttttgatggttatgagtctgcagaagctttggttgtgacaagtcaagaatctggttgtgaatggattcttgactctgggtgctcatttcatatgacaccaaggagggaactgtttagtgacttcaagaagattgagggtggatcagttctgctaggagacaataaaccttgtaagatttcaggaatgggaagtgtgttgatcaaaatgaatgatggtcaaatcaagctcatacaagaagtcagatatgtccctgaactaaagagaaatttactttcaattagtgaacttgtatctaaaggctgcattgtaaagatagatggttcaatgaaagtaatgaagggtactaggatagtaatgaagggagatattaaaaatggaatttactatctgcaaggatagacagttgttggaaaatcgaatttagttgtcaagagcagtgataatttcaacacaaggctatggcacatgaggctaggtcatgttagtgagagaggtctctatgaattggagaaacagggtattctcaaaggtaaacttggtaaagaatttagattttgtgaagaatgtgtgtaaggtaagtgcagcagagtgaaattcactccatgactacacacaaccaattataattaggttattatggttaaaatatctataaaaatatctagatttacggtaaatctagatcctggtaaaatatttccaacaaaacttcaaacttttgaatttgaaaatattatggttaaaatatcctggttaacttgttgacagatctaatgatctgattttaacccatggttcaattg

SEQ ID NO: 344953 - DNA, 608 bp, Cannabis indica
ccgatgcactcgctcgactggccagtattaccttggcagccaaggtaaacttgatacccgctcaattctttaaagaattaagcattcctatttcaaaagaaatatacatgttggacaaccatccaatatggatgaaacccataataacatacctctaaaaaaaaaccttgccagaaagcaaagataagggggatagctactgggtgtccaatcctgaactgcataacgtacagacgtggtatcccaatactacctctacgatgtgttaccaagtaagaagttgaacaggtattaacaggagtgcataaaggctctacatcaatcatgtcgggggcaaagtcaattgagtgtacgtgggattaaactgtcctagaccgcaacatcgacctggcctccaaaaggctggctgaccatggcctcaataggctggccgaccatggaattaataacctggccaaccactacctccacaagctggccgaccatagcctcatccaactggccaaacgatgctcccttagcctggtcgggcaccgggtttgtaatttggcaggcctcatccaccagcagcctgctctcatgctctcatacttttggtctactatgac

SEQ ID NO: 344954 - DNA, 619 bp, Cannabis indica
aaaaaaatataggataaatcatcataggtaggtagaaggaatactataaaaaacttaaaacttcatatacaaattttacttctatataatcaaaaccagttttctgattttctcataaaaaaaccaattttttgatgaaaaaacgagttaaaaataatattattaaggcaataaattaagaaatcagttactttcatgtagttaaaactagtttcgtaataaagaaactagttacgaataccaaaattcatataaaatttgtttattatgaaactagtttttcagtttgagaaactagtatctagatctccaactgcgatgaaatgtgttcgatccttcaaggttttagtggtgaaaatctcatattcagggttcatttgagtcgtcggttgctggatgtgtgggtcgccagtcgtcgaatatatcgttggtgagcagaggtcgataggtggactattgatggatgaggtagatagggtacttgaatgaaagaaaagaaatagctttaaaattgtatttttttgaaataatttatctaaatattaaatatgaactttaaactataaatttatacatatatggtataaaaaaataccataaaataatttaaaaattaaaa

SEQ ID NO: 344955 - DNA, 572 bp, Cannabis indica
aataattactatttttccaattcaaaatagatttttttgaacatctttatacaactctttatccctacccttaacaatgtttcaaggtggcgattcggggaccatagacctatgattctaagctccaataaatcagattatttattgagtctcatcaaccaaataatcgattgtttattaatttcatgattattccactataagtatggaattgcactcttagtaattataaaattatatttactgagtttaattgtagtgtccattgatataatcaatttcagtgactagacctccatatgttggttcgtaattaaatttggtcaaaataccatttcacccttctaattacttctctatcctttagttttcattaactcactagtggaagtataatttagatcccatctaaattttgtgcacaacattcgagttccagaattagcaactaaagggaaccaacattcgatctgttaagaaagtcaggattccataattatacataatgttcccagccatccatattattagattcccaaaatagaagttttaagaatcatcttctctgagaa

SEQ ID NO: 344956 - DNA, 1212 bp, Cannabis indica
  modified_base (1027)..(1027): a, c, t, g, unknown or other
agagagtaggaggagagagaggacgggggggctagttagagagaagtggggggaaagtgaaaggataggggtaattttgggagaatattagaaaaattggcatatatttactatgtttaaattttggtttaagtaaacaccacttctaacttttaagcataatatatcaaatttcccttttaaaattgttttatacgcacaaattattttatataaaatttatagaatttctttaataattataatatatattatatgaaatgcaactatataataaaagtgttcttcatttttttttaaaatattataatttaaatttaaactcattaccatatctcctttatcaattatcttatattaaatgtgtttatatatcataatttttttttattgtaaattaaattaaactcattccacatatttaaaaaaaaaatatctttctattattactttttttatataaaaaaaatctattattatttgttaatataaaaaagaaagtgtatgacatttctaaaacaataaaaaattttataaaattaaaaatattacagtaattaaattaaaattataattaacaataaattttaaataaaattttgaatataattatatattttttttataaagaatacttaaattaaatattttaataaaaactaattttaattattaaataacataaaaaaaagtaattatacaactaaaaatatacataactaaaataaaaattaagaatataactaaataaacgtgcattgcacgtaatagggatattgacagcaaaaccatccgaactttatatattttaacacttaaccacaaaaattgtttttggtggcaaaactatctaaactcccattctgttttgctctgtacccctctgtccaaaaatcacggttaaatgccacagctgattgcccacttgtacacgtggaaatttttagtggttcgcgtaatattaattattaaaatattataaaaaattaatttaaaattataaaaaaaaattaactataaataatanattttttttccttttattctacttcttcctctaactaaaaaaaaaaaaaaaaacaaaaaaacctaagctcatccatccattcccagtcgcctcccctctaattgaaaaaactctagcacccagccgcctccttttacctctcgagcttaagtagctccctcgtcgttcacagtgcgagtccggga

SEQ ID NO: 344957 - DNA, 277 bp, Cannabis indica
tgaattgaacagatattacagtaagtttaatatatctgaatcaaagttcaatatcggtcctttccgatgcatactccgtacatccaacccaagctttactttgaccaatgctctggaaagaacatagcacttatccaagatgcaagtaaactatgttgtagattgtcaaatcagtaaaaccctatgtactgataaatctaggaatatatctttaatcacataatcttgattactttccactgtgctgacgacacaataaacaagaacataaatgtga

SEQ ID NO: 344958 - DNA, 497 bp, Cannabis indica
tattctaattatgtaattaatgctctttgcaagtatagatattgtaagcaaaagggaaaccttcgatcatgcattaagcccctataaacagtgatctagcttcactgtaaaagagatcaaaagaattgctttagagagagatctaaaagaaacactcagagatttcattgtgagagctttgagagggaaaacactatgttctttgttctcaagtcaatataatctaaggggagtaggctattaccgaactaaaggggctcaacctcttcaaaacctagtgttctttattgcttattggtttttgctctgtttttattatatttttaatcgcttcataattgactcattttcattgactaaaaacgtggtcaacatatattgaaggagaattgtaaggaagccatgtggcatcatatccttttaataatctatgtattcaagtttgtagacattttttaatttttttcattttattttctacttttcaacaattttta

SEQ ID NO: 344959 - DNA, 603 bp, Cannabis indica
ggaacaaaggtttgctgagatgcaagccagattagcacaacaagaagatgagattcagagactcaggcaacgggacgctcctgttgagtttcccccacaaccgcctgctgcgattcctgcggtgccagcagagcaacaagttgctggtaaccgtatggagcctttatatgagcggttcaggaagcatgcacctccagtgtttctgggaggtcctaatgtactcaaagcagaacagtggctgactgttatcgaaagaatattgaatttcatgggagtggtcggaaattacagagtggcatgtgccacatttcaattctagaaggatgccttggtgtggtgggagatggtatccctcacaaagaatgttgctaggatgacctgggaggaatttcgggatttatttaatgctaaatactacaatgaggcagtccacagtgcaaagcaaaaagagtttgttgagttggtacaaggtgagggtatgtcagtgactgaatacacgaccaagtttgatcgtttggctaagttagccttcgggattgtaccaacagacttcagtaaaaaagaaaagtacttggcagggttgaatgccaagattaagcatga

SEQ ID NO: 344960 - DNA, 965 bp, Cannabis indica
ggagtagtggatctcattgaaagatgtttgaagcttattagtgaaggtaccatgagtatgtcttcctatggcgagatagattcctcgctattcgttgctcagattcatccaactgttatgcttagtttgtataatgtatattatacgctaagtgttttaatagtcatcatgtctcgtctatgtctcttcatgcgtagcgaggttgatgcctcgctttgcattactgacaccgtctttatgatcgtgtcttcacatatgaaatggtttctcgtcaatatgtgagataatagtttgatcatccgtgtctcgcacaaggcttttcagtcagcaagttatagatatactctatcaactctacatttaatgagttattccattttaataatctttaatataattatcattatatttgttgattcgtattctcccaggttgacatgtgtcctcctctgaagtgacagctgaatttcgggtataacaatcgccccttagaaagttctttttagatgaaaattactttttaaatgattacagagggtatttttatcataaccccttttgaaaaaatgcatgtcctctgattttggcggttctgtgatttcgaggtacatcagcatttaatgaccatattttccacttctttttcaaattctaccagttggatcaatcgtttccatgatctaacgaagattaacccaagagtataaaatgaaaaaaggaaccacctttgcattacttttgccatttcaaaaactctaaaaaaaattcaagcttttttgcagaaaaaccattcttagattttcccgaaaccttgcatgccatctttgtcattaacatttttcctacgagttttatctgatttgattttttacttcaagcattcggagggatcttcacgacatttgttgttttttaggttgcagatccgctcatcgtcccaaaaaccaactccaaacagtaagtga

SEQ ID NO: 344961 - DNA, 878 bp, Cannabis indica
tatatttatatatattctggacttaatagaatttatatattaaatataatcatgaaataaatcatgtgaaccatgcaacataaaagtgatttctgatcttttattaattagtaaatctaattatattgaaatgaattttatttagggcacaaacccaacaaactcccacttgcactaatataaaacaaaagtgcatttcaaataatctcaatagcttgatatccagatcaggtgtagtatgtagtattctctctgtaacgggatctgacaggctgtattcaatacaaactttctccaccattatatttccttaatcagaaaatccttgatattgtaaacttcatctctatatgtctaccctctagggtaactggattctttactttttagcaactacttctgtgttggtcatgaagtaacactagtagttaattcattattggtacaatgccaaaaactatatagaacttttcaaaggctgaataagtatctttcctacaactttaacattcagtctcactggtagagctagagacttcagataggttttacacttctccaaaatcactgttccaccccgagagtaatcaccatctcatcagtagactttctagcattgatgtaagtctatgatcctaatttggtgtagtataagagtattaaatacatcttaagttttacttgattgtcttccaatattctttttctggattaatttgatacttgctcattactcccactcaacagcaagtgtctggtctaatgcattgcaaagcatatctgagacctctcactgttgatcctaaggaattatttccttggccttttatcttttctggaacagttgaaacttttccttagataaataaaatctatgt

SEQ ID NO: 344962 - DNA, 593 bp, Cannabis indica
ctgagatatgggaagcatgcacacccaaatattttaagaaaatcatagtctagttgtttatgaaacaagcattgatatggtgtgtagttatcaatcactggtgatggaagcctgttaataacataagtagcatgctggaaggcataccaccagtaggagagatccagactagattgagcttgtaacgccctgtccaacagggacgccacgtgtgtgtgcaatttaataaaattcttatatagttactatataattataccaaaagtgtggttaattaaattttgataattaaaaatttgacacatagactatatgataaaagataggtggtattaatcatggggtctccctgttttcaaaatattcacaaacttgtttaatagtgtttttacaacataaacattgtttcaaaatagagcatcctgattattgggccgaaacactgcggctgatatgtacattgctgctatgaccccgaactcatggctgctcaacctttgctttccccttacctgcaccataaagcactcgtgagtcacagagactcagcaagaaaaagtgaacaaacaataactgaaaaatgattatcaatt

SEQ ID NO: 344963 - DNA, 623 bp, Cannabis indica
ttttgatatcaagcatatcaaaacttaacactaatttatacaccaagtatgtctaaactacaatttattttaagacactaagcatgtctcagatatacacattttagttttattcaccaagcatgtctaaactttttcatattggagtatgcacccccaaattttaacatttcattatcaagataatattttgtatattgatttaaaatatagatgacctccatatctctataatttctcttaaatttaattttcttcttaaaattattttcaccaaaatttgatactaagtatgtcaaacttttcacacatgcacatagccaaaatgtatttagaatttgaattcaaaattaactaaattaatcaacaacatctcaatatatattgattaaacttgtggctcaccccatatttttactataaagtgaaattccaataacactttaaaataaatctctacattttattttaatctcaatatatatatttaagaataatattttggttatcatttcaaagtttatcatgaatcttttgagattacatgataatctctcaaaataccatttttatgtattttcctctcttttaattaaaataacttttaaggtcactttaaaaaa

SEQ ID NO: 344964 - DNA, 1032 bp, Cannabis indica
tttttgttttcaaaattttgatcttaataaaaattaaaaagtgaaaataattttataaaacatgtttttgaaaaatatttttatttttctaattttaataacagaaaactaattaaaaaagtgttatcaaacgccaccttaatactccataaaaataccaccgttgtaagtgtaaggccactaaaagtttgaaataactaaaacaacaacatcgctaagtaatataattgaacaaaatatcatgaaaataaatatacaaaataaccaaatgttacatattcaacacaaaacaaaatccactaaaaatataattaatacatatattttattttttaatattttttattatataaataaatataaataattttttaatatacataaatgtaattggattgattttgagattgacatccaataaccgatctaatccaattagaatctaacttttaacatcaaatctaatctaattgtaattgaatatttaattttttttgtaattagattggatcgcttcggttcgattagattggattggatgttgtccaccgctaacaaaaatactaaaaaattttcaaaaatatattttttatgttttatttacaattttacgatctaaaatttttatttacataaatatacttgtaaagttttaaaattacaaaaatacaattttttcagcaaaaagtaaaaaaacaatgagaattcaatttcacaataactacaaaataattaaaaataatcttatgaaaactataaaataactaaaaaattaatttattatttttattaacgagatatttttataaataaaaaattttaaaagtgtaaattttttcttttaaaattttagtttattaggtaaattttttaaaattgttaattattcttttaattattaccacacaaaaagtttattttgagcttaggcttaatgtggcgtgactatccattattctatttatctcatcttttgtttgtttaaatccattatctataagaatatttttatttaaggaaatatatttctat

SEQ ID NO: 344965 - DNA, 1016 bp, Cannabis indica
atttagagaaaaataaggaaaagcgcaaattgaagaaacctttcttcccttctctctctctctctctcttcgaaccagccaaagaccaggggaatttttgcttattcctggggttttcatcaaggaattcagagagaatcaaggtaaggtaaccctagaaccatggtttttgaacttttaaagctttaaagtttggtttgaatatgtgatttttagctttaggggctattagggtttagctcttgcataattcaacttttaagcttgatttaagatagaattagcttcttgcagctggttgtagtgtgttttgtttgaattgagcaagtttgagcttctgaaacccaaacattggtctttaatggcatatttgaattcagtgggtttttctgggatttactggttggaatatattgtgtatgccctgtttaggtactctacaaggtttggtagcatttggtggagttttgagcaacatttgggttttttgggggacactggtataaaccagtttactagttgaccagtacctgtaaaatcggttaaccgattttggaaggttccccgaacaacccattttctcaattctgatccattttagtgccttagttgggtattttcctatttcctaggctagtgtagttcctagtgaagataagagaaccttgagttgtaggtatgggtttcccgggttagggttttggaaatgtgatttacttggctttattatgtgattatggcatcagcatgagactttccgtttaggtcggccaactcacttgaatcgggaaaaaaggtaagaattgtgtataatgtgtaatatgaatttgcaaatgtatgtatatgttaagtgtatatgcattcttttatgtttgtaacactaccaacacttgtactgtaaagaccgcttagtttaaatttggaaattagaagataattagtgtttaattatgaaaattatttatggatatttaaataattatttatgttgacttatttgaattcagaatggattt

SEQ ID NO: 344966 - DNA, 671 bp, Cannabis indica
ttatatagatatatagattgatagatagattatgttgtttgagtttttttagttcatattctctataattagtgtaacaccctatttatttaggcgtgctacagtgctttcttaattacagtgcaacctttgctaatcaaagggtttaataaaaatcgtgatttgaataattttttttataataatataaattgtacaacatgttacaaaaatctgggatcccgttttacattttatagataaatacataatagcttatgagcccatgttgtcccgaagatcagaacactccaggtctaaccgttgagatatgtacaatcttcactaagctccagactcactaataatcagttcaagacaagcctttacctgcacatcaaaatgcagcaaatgtgagtcaacagactcagtaagaaaagcacgaaacatataacataatatcgactagtatttggtgcccatacacctatccacaaggcttaccaaatgattaagaacgttcttaatggttagtgctattgaccatgatatcacccactaccagcactatgatcgcactgcgggaccggcactatcttcgtaccgctatgatagcatcaatagcacccaagagtataattggccatgatatcactcttaaccaaaactgtgcccgtactgccgaaccgaca

SEQ ID NO: 344967 - DNA, 448 bp, Cannabis indica
aaattattaataataatatgaaataagataatatatttataattttactatgtattataattatatttttaagtaactatttattattatactaaaaaattaaattagccacacgaagagcggctatattgcctagttaactaataaaaattataaaaaatacatttactacatgttatttttttaaaaaaaatatatatataataattaaattaagttatataatttttttagtaatgcatattattatattgtaataaaaacgaataaatatatttaattattaaatatatacaacaatatttgatatatcgtattactgaaaattaatatactgtagtaataaaattatataccacaaaaaaatataataatattaaattaatattcaaaaaatatatatatatatcatgttaataaaattaaatctaccacttttaaaatatgt

SEQ ID NO: 344968 - DNA, 611 bp, Cannabis indica
ctttatttttttgttacataaattatctagattataacacatttttatattagcgattaaaaattcatttttctaaaaaaatattatattaataaataataaataatagaatagaaaataaaactttttcaacctcataaaaataatatataaaatataataattatcattaagaatagcattaataatgtggtgaatagtcacaaagaaattcttcttattttatggagatattttaaatctaaatataattaataataataataataataataataataataataataataataataataataagtaacaagataatgtaactttcaatttattaaatattgagatattttttaagttattattaatatttttttttattattatactaaaaaaattaaaacagtcacgcttacaaattaattaaataaaatatattttacaaataaattgccaaaaaattctaacactaattaattggtgttggtctacatttttataaggttgtaagttactagggtgtcgtttggtaacctttttgttttttaattttttaagggtaaatttgtatattatatgcttaaaataatttatccactaaaaatatgcta

SEQ ID NO: 344969 - DNA, 1030 bp, Cannabis indica
agatcagattattattattattacattatatcaattaatatcattttcagctgcttattatgtatgtaatatatatttgtttatttatcaatataacaatgttctactttacatatagtttataataaaaaaaatatcactataaaaaatcttacttttagtcacaacaaaatttgagactaaaagtaaaaaaattgcgagtaattataaaatatcattaattcttatgttgtgactaaaatgtccgtagctaaatgtattagtcacaaaaattataatttattataattaaatgtgtttttagttgcaatatttgttgtggctaaaattaaattagtaacaacttgtaactaaatgctatattttagttacaagtaacattttgttgtgactaaaagttacatttagtcacaattttctttttattgttttattgtgactaaaaaattgtcactaaaaataactgttttttgtagtggatattaaaaagcttttggtactcttcttcttcctattatcatccacaaattatttttcttttacttttgttttttgttggttaatgtgacagtcagtagtcccgtgatccgtaaggggaaatacgggtaagctgtacaatctcactccgcctggggaaggtcaagtgggatgattctgagactgtgtaggtatgggagtacacagttaaagagagcttaaatggattgattggtattacctatattaacaaggtgcatcttgtttttcggtagcccatcacgaaagaactccacagttaagcgtgcttgacttggggcaatttcaggattagtgatctcctggaaaattttcctaagaagcgtgcgagtgaggacaatgctggaaacacttgtgttggtatatgtagggtcagtcatcaatccaggaagcattcagagtggcttactcgtgtataagagccattattctgtagatgtaatggcctaatgaaaggttgaagcggggacgttacagttaatttgagaattagcaacatattaatgaagttact

SEQ ID NO: 344970 - DNA, 1172 bp, Cannabis indica
catgtacaatcttcacctgctcggtctcacggctcctcagctttagccttgcccttacctacacatagcaatagcactgtgagtcgacagactcagtaagaaaagcataacataataaacttactgaatctcgggttataatcaggcgcccatacacctaacgaaccataaccctaactgaataaggaacgttcttgacaaagtatgattaaccacgaatgcagcctatacttagtactctaatcgcactgatgtggtagcaattcatccatactatctgatagcctaacatatatctgatggcatctcggtgcaactctatgtacacctcactgttgccttgatatgctaatctgatggctatataaattttgcctaacatacatataatatgttattctgacggcaactaacatgtacactaaacatgtataagcatatgcatgacattatactaatcttacctcgatttcgaattcaggtgtgtcggtcaacttgagtggaacagctactcggcgaattataggctcctaaatcacatcaatcgcaacataggtgagtgacacgctaaatcgcttttcggggacttaaacttgaaactaaaagtttccctatcgataaaaaacatggcaataccctaaataacacaaaaatgggaaaaactagggttcccaaaattgcccccaactcgtagagcggttcccccaccggaattccagttctggaaaaattcctgggagccaaccggaattccggttcctataggcccctctgaattgaaattccggttcagtgcaggaatgaccaaaaattctataactcaaccaaaacaacccaatccacatgaaaccttccaaacctgttctaagcatcctaaagatcaatttcaaagtaacaaaacacaacttcatgcacaaatacaaaaaccaccattgatgagccaagcttgagttcaaaaactcaaagcttgctcatcctactaactagctatcaaaacctactcaaatcaccttaaacaaacatactttaactactgaaaacataattaaactccagcagcaagaacagtgaccaaaaacccaaaaaacatgcattaatctttttcttcaaaaataagaaactaaagagggaactataagaggcttacctagagttcaagatcccttaaaatc

SEQ ID NO: 344971 - DNA, 586 bp, Cannabis indica
agatcggatcggatccatctttttagatccaatatttattagattttattcaattcaatctaaacaaaaaggtaaaattttaatctaatttttatatatgcatacatattttaagtataacaacataaaacctaattaggcatcttaactaagtaaaaatactaatgagtttgattgaatttagatgtgttagatttttagacatcacatctaatatctaatctgatccaattgatattcaaaatatcatctaatctgatccaataataattggatatctaatatttagcagttagatttaatttaatcagtcaataataattaaattagatcgatttatgcatactctggtgtactaaaattttgtattttaaaatttccagttttattatttaattaaatgcttaattaaatgcagaataatgaaactggtactgaaacagtttttttgtagctacagaaaataactctgtaactccagaagaaactagaaaaacaaacagtgcagaaaagtaaaagtccacggggccacgcctagagataagattcattagatagatctcaaaaatacaaagtaattgactta

SEQ ID NO: 344972 - DNA, 912 bp, Cannabis indica
ttttattaattattatatttatttttgaaatgtgatagtataagttctcctacaccacatgatttaaatagttggttatgagaagagattgtaggtttatgatcttttttaagttacttatggacttagctctacactttatttagggcaattttaatcggactgtatatactatatatagtgtataatttatctctaatctaacattatagaattgctaaaagaaaatattagcatttttatcagtgtcatatgttatgtgtaattaagtattgggtcctatataacttaagaaatagtttttagaaaatattagagcatctccaatggtaatattttagataatgcttgatgaggtgaaaaatttaggttgcaaaatataaggatgtcattggaaaagaatgctattcttgaaatttgaattgatgtcacacaatggcattgatgttatgtttttttttatacaataaaaaattaaaggtgcaatatatataatagtttaataataaaaatatatatataataatgtgtgagatcatgattatagtatttttaaatgtattataccattggagtattttagaagtaaatgtgccaaaaataatgtggaagaacataaaataaaataaaatattatatatttagatgatatgtaaatctatagcatcttcaaagaatgttaccattagagatgcttttactaaccaatcgtaggacgctacctataaaagatattgggcactactagtgcccaataacaatgctctataataacataattcagttggaccattttaataaaggctaattaggatttttgccccctgaactttgacatgtaccaaatcatgccccctgaactattgagattgttggatttaaggacttctttctaattttagtaaaaaagtc

SEQ ID NO: 344973 - DNA, 991 bp, Cannabis indica
atcccagctggttttgagggttttgaaagagagagaaaacttgagagtgaaatttaatcttttggaaatttcttattttcttataaaatgaaaaaattaatctttattatcatagtaatatcagcttataactcataaaagaaaaccaattaattaataaaactaagtccaaaaagactattttgccttcccctaccaaaaccacttaaaacgcactaagagtattttgaaaattctaaattcccgactaatctcgacattcctattggctaaatatatcgcctcgctaaacttaaatactaagatgtgattctactaagccatacgccgcgttccaatgttgtcggtcactaaacatgcaaaattatgaaatttctctatatgacatataaaatgcattctgaattcaaataaatcatcataaattaatcatttaaaattaataactaattttcataattaaatcctaataatctgctaatttctaaatttaagccaagtggtctttacaagcccgcacctgctcgtgtgtttgccatcactcaagctgatgttgcagccattccttctgtggtgacaggtttgtttcctgtcaacaactccttttatactgcgttatttgattcaagagctacacaggtaattgatcttttgggtaggccttatgattttcttgaaagagagtttggaaccctaatgcctagcggggagttgattatctccaataggcacattaggtctatgcaagttaggatcgaagatagggagttgagtgttgaccttatataattggaattaataaagtttgacacactactacaattttacgttttagtgacactattaagtggcatgcacttttgtgcgcgtcactataaagataggaatgatttttagtgacatgcataactaggctcttattgtttggtgttagtcacctagaatgtgtgtcactaaaaatatgaagggtcactaaagagtaaaatccaaa

SEQ ID NO: 344974 - DNA, 527 bp, Cannabis indica
cttaggaaaaaggtaaatattcttccgatgtgacgttgaattttgcgacaactgattgtctctttgatgattccatccaagctttgtaccacaaatataacaaagccaagtcaatgaagactaagatgtcacacattcacgctgcccacccaatagcgcattacattcgagctttgcgcattccgtgttctaagccttggtatgaagccgatcatgtgttattcatcatcaatctaaggagggaaagtcattgggtgtttggtcgtcttgacttgaatgaagggattctgtttctgtataattctctgaggactgcgaaaatgaatgctgcagctaggaatgccatgaaggcttattctgtgttgctgcctttgttttttgatctacttggtttctagaagaataggtcacatgctcctgctttaggttctgaccctacagctcctttaagaatcgtggagattagtggtctgccgtctcagcagaaaaagtgagtgtttcttttaagtttattttatcttgttttt

SEQ ID NO: 344975 - DNA, 612 bp, Cannabis indica
cataattaaacatgattaactactaatttccaaattaaactaagcggtctttacaaaaccagtctaccggttggagcaatttagggcactctagattttcctatttttacaatatttagggtattgtcatattatccatcgatagggaaacttttagttttgattttaagtccccgaaaaagtgatttagcgtgtcactcactagttttacgaataacttaggggcctataaatcgtcgagcagcaattctactcaagttgaccgacacacctgaatttgaaaatgaagtaagattagtataataatatgcatatgtgaatacatatttagcatacatgtttatgattaactgttagattacattagaatagcaatatcagtatacatagagctatactggataccgatgaatgtatgttggcttaagtactatttgatattatcacatcggtaccagtagagtaccgagtataggttgatattatggtcaatagtattgttgtatgaacgttcttgactcaatagtgtgtaagacgccgggaagggttatggtttgatgtatgggtgcctaatgtaatccggtttatatctatgttatgatttatactttt

SEQ ID NO: 344976 - DNA, 500 bp, Cannabis indica
aatatattttggaaaatatattgcgatttttttcaactatatataaactagggaatcaatatacttataaatactattgaacttgcattttgtggattctaatatcttaataatcttagtttacacatcttatttgaaaatcatcttaagttttttttattacttcttctattttattttttaaaacaaaaatcccatcaaataattgaaacttggttaattagaatatccttactttgtttaaaatgtttattttaatgttagtcaactcccatgggttcgtctccgtacttacatgaatattattttctgaaacgattcgtacacttgcaagtgtaaatattaaaacaatcacttttgggtacaactatagacttatgtaatttagggcctatttggttggccaataaaaattcaatctacaacttatttttttgtttttgattttttttttaaaaaaaaaagtttgaaattccgtattttaatattcccagtttgat

SEQ ID NO: 344977 - DNA, 572 bp, Cannabis indica
gcgcgcaccgagcagctgggagacgtactcactggtcatctcgaaggcaaaaggggccaaggtgggtccgaggaaacggttgaaccagtccgtcagggggtccatgttcagatcccacggattccggtagttctcctcgttaagagagtttttcacctcctcccgcaaaacctcctcaaggcctccacctcagcgtgcccccaggaatactcgtcaagggcataattgtacttggcaatctgaagctcttgcctctcttcatctccggggaccggagtcagcacaatgccatgaggcactgtaatttcctctgccttgggagggatcccggagtcatggctcggggctagagtgtccaccctccgcgggcgcttagaagactcctctgctaccatcttgcctttacgcttgcgcaccagagcaacctcttgctcttcttcaccttcttcaacttccccaggaagagcccattgctcttcttcaccttcttcagcttcctcaagaagtacctcctccttatccactaagtcaatagtgttcggaggggcactggaagaagccttcccgggggt

SEQ ID NO: 344978 - DNA, 770 bp, Cannabis indica
catcttgaggggggtattaagttctgagttatatcttatttcattctttttagttcttatgttcgtttattcctgagtgttagttatttgtgtttctaacagttagatctgattttcatccccttctttttctggttttgtgtcagatgttggttaggatattttgcctaagtttgtctaggtgttcttggtgtataaatactttgtatcactgtttcatttgaatatatacaaaattctattttctccattccacattaaaatcattactagcggcgttgttgttgttgttttgctgttgtttggatttggagtggttaatgaatccttgtaagaatgttatctcatcctcaaagctccatgttctactagaattctctatctttttcttcttcttcttctttgttatcgtcatcttattcttattgcgattatttttgtttgtcgtaatagtacgcttgctattacgactacgcttattgttggcgctaatgctggaattagtggtagctatttctggaacaatattgtgagttgaatctgagtctaagtctgtttccgaatttgtttcataataaaaaatgtagtaatcctcaaaagcatcaaaattaaaattttcatcaacatacaaagattttatattggctgaatggtatttttgtaagagtatgtccaaaaacgttatgtgtatttataaaatttatataacaacaacaataataatatctcaaaaaaaaaagtaatgacaataaatatatagatacaaagag

SEQ ID NO: 344979 - DNA, 515 bp, Cannabis indica
ttttttttaaatctttaagtttgttatttttatacagtgttaatataaattttaaattttatataaatttttgttactgctaaattaattaattatagtatatgttggttaattttataaatttactaattattggtaatttaagtttatttggattatttttcatgtttgtgtatgttatgttatagtatgatactttttgttttgttttatttgttttacatagtgactatttatggaggttgtcaaggtcacttttggagttacttacgtgagataatttttttttatttttctttgcttattttatgattgtttcctatagttactttacttgatgttacaaaatattttgtaagaactcattatttgttttgttatttttgtagggaaaattttcagtcattcaagcagagaacaagtatttttgatggaagggctaaattggtctctcttgtttgttggagctttctattcatttcaagaatctatttgtttagttttgatctcagctt

SEQ ID NO: 344980 - DNA, 549 bp, Cannabis indica
atttttgtttttaaaaaataaaattttaaaaacaaaaaatctacttttatttttctgtttttaaaattaaaaaacaaaagtgttaccaaacgccaccataattattctctttttgttgtttaggtgttctagttatttttagttgctttagttatttattttcttctatagtattttagtaattttgaaaattaaggtggtatttgggaatacttttgtttttaaattttttaattacaaaaataaaagtaaaatttttattttaaatttttgttattgaaaaataaaactgtgttctataaccacttttattttttaattttgaaaacaaaaaatataattgtattctgtaaattttatttttatttttatttgttgattttatttaagtcgagtttgaggctatgtccgggggcgagtccaagtctagggtcgggtctgggttcagtttccaaagtctaagttagattcggagtctaaaatattaattaaaaaaaattcaaaaaaatttaaaagtgatttttttttttaatttttaaaatttagatt

SEQ ID NO: 344981 - DNA, 552 bp, Cannabis indica
caaagtcccatttgtaccattttggaaaatacattatctattttggcatttaacaaaacagagggtccaattagtaacttttacaaaacacatggtccaaaatggtatttattttattttatatattcttcttattatgctaacaaaaattattatgtctattggttctgtctccactattttttttttatataataaaccatttatttcttaaaaattcgtagtttatattaattacagtaaaaattgataacaaagatggtaagtaatttttttttaaataaatactaatataacaacaattcaaattatttttttttaaaaaaataataataattaaattaaaaattaataatatttttaattattaatattattttatttttttaaaataaatatatcattaaatattattataatatgtataaagttttaattgtatacaagcagtcttatagtaagagtatacacctacatcataataactacaacatctaaaatcaatggtaaaaaaaaaaattccctaccagtagagaacttttactaagtcct

SEQ ID NO: 344982 - DNA, 742 bp, Cannabis indica
tgcaacttgttcagccatggcaaacatgttgggggcaattgttaactgacagtaatcatgatttgaatcttgtccttcaatatcagattgctggttgaatggttcgtcgtgtatttgtagaaccagttactcccctgtcttggtttgctcttgtattggttggtctaaagattgattttccactatttgtatagtcatttcttctgtagttgtgatgcatagtggagaatcagttactccagcttgtgattttctcagctcaatgtagaactagagagaattgtcactcagtagcttcatcggtgttgtcctcagtgatatctggtaggatatgtctatgttgcttctgctgcagtttatctctatttttatcagctccatcaagtttgctagtgatgaattggttgaaattagaattcccgtcattgtgtagtcgtcataatttgtattttctctccattgacccccatatttgatgacacacatgatttgttccatacctgcaattttagaaaaaaaaagtaatatcagagtattattataatgttttgtttggaaccggttattttttttaaattataggtgttattgttttggttttaggtttttaactagttttttttttcactgattttttggtttttgtttgtcatttatgtttttgattacttttttgcatttttaaagaaaaattatttttaaaatttaagtgtaaattttttgttaagtggttttttttttt

SEQ ID NO: 344983 - DNA, 905 bp, Cannabis indica
taattccttgaatcaatagtgagaggtctcagatatgcttttgtatgcattagactagacacttgcttttgagtgggagtaattagtaagtatcagtttaatccaggaaaggaacattggaagacaatcaagtgaatcttaatattaagaagaggaactatatgttagtcgataagggtgtatttaatacccttagactacgccaaatcagatttatagacttgccttagtgctagaaagtctgctgatgagatggtgattactttgggggtgaactggttattttggagaagtgtaaaaatttatctaaagtctctaagtctatgtaaagaccgcttagtttaaatttggaaattagcagataattagtgtttaattataaaagttatttattaatattaaattaattatttatgatgatttatttgaattcagaatgcattttatatgtcatatagtgaaatctcatatttttgcatggtcggtgcccgacaacattggaacgcggtgtatggcttagtagaatcacatcttagtatttttgtatagcggggcagtttatttagacattgggaatgttgagaatagtcttgaatgtagaatttcccaaaatacccttagtacctcttttatgttattttggtgtggtggggcaaaattgttattttgccccatatgtattttgtcctttagtggacttagttgcattttatattcagtttttattggctatatttggctgatattaatccaagtaaaaccatttgataatcatttttacaaaaataaggaaatgaagcaaaaaaattgtattctctcaaaactctctctttctctctttcggcctagagcagctagggtgtggggattctttgtgattttcaagctggttttagcaaggtttt

SEQ ID NO: 344984 - DNA, 520 bp, Cannabis indica
cgtttttttttttttttttttttgacgtgggtcaattactcttatgtgaatccctttcaattgaaaattttacgttttttttttttttttatgtgtgagataaaaaaatttacttatttgactaaaattacaaacttgtaaagataatattcatcaaaaacattcacaaaaaaaaaaaaaagagcaaactaaaaaaaacaattaatcatgattttgatttttgtttttgaattttaacatgtaccaatgtttcataaatttttaaagctgttaaaaattcctaaattattgagattgttgaatacttttgtctaattttagtaaaaaaaatctaatatgaataaaagtttgggagaaataattttaatacatatcgaaattcaagagacataatttggtaaatatcaaagtctagagatcatcatttagtacatttaaaagtttaagggaaaaaaaatcccaattagccaaaaaaaaaaaaattacataaaacactatttttttgtaaaaaatttatatt

SEQ ID NO: 344985 - DNA, 618 bp, Cannabis indica
ccacccttcacgctagctctcagtgatagggctcaaaaaatcactcagctaccagatgatgcctagaatatcactttgttgacctcagaggacaactttatggagtacgggctctaccaaaaggatttcattccccagcctgtgaaggagaagaagagaaaatccagtgctggctgggctgagggagctcatcaagagaatgaactcattcaactcaagcgtgaagctaagttgaagggagttgcgggagccaagcagtctgctcaagagcatcttcagcaggaagatgaggttgaggaagagctgaagactctgctcaaaaggaagaagaaatttctgactgagcacaggccaatcaaacatacgattcatattatggagcccaatttacctagtcgccatcccctcctgaggaaggggaaagccgtcctagaggaccaagaggactcgtcaaatgatgatgctccatcaggtcttgctcggggagatgcttttgtcgatgtttaagacactccatcttgcctttaactttcccgattattatgctttcttatttcttatgctttttcctaaccatgttgcttttatttcgtaaacatgtctcagaaaatgcttgaa

SEQ ID NO: 344986 - DNA, 1166 bp, Cannabis indica
tgtgtacatgggataataatgaataatcgcctaaccgctctttgtctttaactatagacggttatgctaactgtgcgcaattttttttgttgtttgaatgatatctttcttaaatatcgttacacaaaaatgctaaagtgttgagctatgatgcatctcgcaaccttccttaaccgttgaaagaggtattagcgaggtggttacttcaatgcgttaagagcgaggtgagtgaatgttgaagttcttatcattcattgaacatactcgggagtatgtggattaatgagctgcaagctcatactcacgagtatgtggatcaatgagctacaagctcatactcacgagtatgtgaattaattagctggaagctcattgtctacttattccaaatagttccattgtgtactctatttatctcgagaaggacccgtttacatcactgatctcatcagtcaatagttattactcacgtctcgttattgtctatatggcaatgaatttgagtatttttagtaactgtatttctcaaggcaagtcatttaaagtgcatttaataatgcgtagttaaagttggttcatattctagctttgatacatgtgtcagcttcttattgctgccttaaatatcagtataatagtagggttacacgttatggcgttaagtgtattgcttctaaggccaagtctccttctactccagtagcttctcctaagaagagtactagctattttaatgtggtaggtatttaaatatttcttttaaatggtttttcttttgtatttgtttgtttgtgttataatttttgtggaaccaacttttttcttttatatttcttattctaatttgttgtttaactaactttgtttataaccgatttttttcaaaaggcttacctaaagattaaagcccagcatcgatttctaagttaattgcaaatttaaaactatcctaaagatattcaagaactcaatgctaacttgacagactcccaaattatttatttcaaacggcgttcatttttcactttcttgaagatggcgggtattgaaaggattaatgatctccctacattgctctagtgagagaggtccatcaagaaagggatgaagtttgaaaagtggttctatcagagcgtatgttcgatttggttagtgagtttgtgtta

SEQ ID NO: 344987 - DNA, 904 bp, Cannabis indica
gtaaaataatttccaacacgagcaagcaacaaaattaataacaacggtaaaccaataagtgtctatctcaaaacactgcttaatatttgcataagacaatctagaattttctatcaaatcccgcaatataaataaactaaaataaaacttatattttggatctaaaacatacacaatattgtagagttttttataagcttcgaaacggtatatagaacgtccaaaacgggcacccaagtgaaaagttatgacaaaaatactattttcgatctccttggaatttctagaaacgacaaaccgttttagtaaaaacggttaaccatttcctggcacaagaattctaaattttgcactctccaaaatactatcaaaatatatccaaatcattccaaacttcacaggacacatctataccatatatacaaataaaaattaaattcgagctcttaaacggaaaacgccattaaagctcaaacttaggctttgaaaagatctaaactcaatttgtaactcaaacaagtaaacatcaaaactagtctcatagctactcaagaacaatttcatgaagtcggaatctccataactgctataaatcacaaagtcactatataaaactaattgtattaaacttaaaacgaaatcaatcattaccttaagctttccctctttaatgatttactatcctactactactgtgcttgaattactaggtttcgagttgaaatcgaagaatatagattgaggagaagagggtttcatcgcaccgaagaaaagggtttcatttcgttcttttttgtaatgagtttttaaacttaacttatatatatatatataattgataagtttaaaaatataaactttattaataatgttataaatagtattaattatgtggatgtccaaa

SEQ ID NO: 344988 - DNA, 758 bp, Cannabis indica
ggtgaaagaaagttcttgggtcttgaggctgttcaaagaacaagtgaggcagttgataaaatttgagcgggaacgctcgaagctcaaagaagacagaagagttgtgctgatcgaaagcgtcgggatattgatattcagattggggatatggggtttctccgaatatcgccgatgaaaggcatcaaacgctttggtaagaaagcaaagcttagcccgaggttctttggactttttgaaatcctcgagaggatagagaaagtagcatacaggttggctatgcccccagcgctagtagctttacatgatgtgctccatgtttcaatgctttcaaaatatgtctcagactcgtcccatatcctgagttatgaagcattggaacttcagccagatttgtcctagagcaaccggtgcaaatacttggcagaagagagaaagtcttgagaaacaagacgattgcactagtaaaagtgttatggaggaatagtaaagtggaagaggcaacttgggaacttgagagggatatgcagcagaattatccagagttgttcaggtaaattttgggacgaaatttctataaggagggtgtaaatttaataccataacattatgtaatggattagcaaaaccctaactagataattatgtattactgaggaattataatattatataatttaatttatgtgaatttatatgatttatgacatgttaagaccctattggtaagttaggggcattttagtaattttgacccgaga

SEQ ID NO: 344989 - DNA, 502 bp, Cannabis indica
ccttgctaatcaaagggtttaaatgacaaatgtgatttatttaaacttttataaataaaataaattttacttaaataaacatatattttacaatttctaagatcccgtgtttaaactttttaacattttaaaatacactataagcaaaaggtgtcgctgaatgactacataatataagcctatgtcgtcccaaaaaactgaaccctccaaacctaaccatctcgatatgtacaattaccaatgagcttcagactcactattgccaagtctttgctttgcctttacctacacatgaaactatatatgtgggtcgacagatttagtaagaaaagcataaaacatatagtcatataatttatctcataattaaggcgcacatacacctagttacaagtttgacctacgtctaacacctataatgagtctcggacgttcttgacgatgattgtacatatcttaatggtctttggtgaacaacctagcggctctgataccaaaattg

SEQ ID NO: 344990 - DNA, 827 bp, Cannabis indica
ataagtttgattttttctttaaaaaatactagcttatttaaattctttattagattctcaataatttttgtttgatttcttaagatacgtgtttataaataaaataaagtttgaaaatatattttagaaattatcttagttttttttaataaaattaatattttttaactaattaatatttatccaactttttaataattattattatttttttcaaattgatagaatattgaaattgctttaaaaaatagaatattattaattttgtcgtatacattaggggcaaaattaggtagtgccaaaagtttaagggataaaaatgctaattattcaaaataaaatgggtcccattgcattttgtggatataaagaggggttcatgactactaaaatgtgatgtattgtaggagatttgaattgacttttaacatgaatctcactcatttaatattatgtttgattgatgtaaaaaaaccctcatttttctttattaaaaaattatacaataaattaaaacactcatttttcttttaaaaagaattaaaaaaaaaattcgacattttattattacacttatgtaattttaactaatcacttcactattttaatatgacattttattacacttatatcattttaactaatcacttcactattttattactttattactatattaatatttaattataatttatataatcatatatctaaatgtaatgtttaaaaggcgattagttttgttttgctttttaaagcattagattatttgtttttaacatttggcttggtaggcaatttcatcaaagagaattaattagtagtat

SEQ ID NO: 344991 - DNA, 690 bp, Cannabis indica
atatatatataatttatatgattaaatgaatatgaattctaatattggtataatggttttgtattaccaaatgtttgtatactgatttttattcgtggcagatgctagtagtgatttagatttcatcttatgaacaatgcattatgggttgattctgattgtgtttaaatgatagtatttgaataataaactatatgattattattattattattacttttctttttgagtccttgtgactcacaggttctatgtggtgtaggtaaaggcaaagaaaagctagattagccatgaggtgacatcttctccagcaatgtacatattgaccttgccagctaacgtgccgggttgccaagagttgttttgggttgtatctactatgtattttggttttatgtttcagaggcatcatcgtatatagttcttttgtaaaacttcttataacaatgctccccgaaacacgcttataaaatcacacacgtgacatccctatgggataaggcattacaacttggtatcaaaagcagccatagttttaaaggtcttgaagactggtcaaatgtgtacatttgttgcgatgacaggtcgactcatggtatagtaaatgcttatattatttgctattagattacctagactactataaattatgtttgaaaaagtagtatagtgataattatgataagaata

SEQ ID NO: 344992 - DNA, 820 bp, Cannabis indica
gtgcttgcacaaatagatgaactgctttagccttttgactgacatgtgtgacgttaggatctctttgaactggatcctggatgtagatacatggctggatagctggtgggacatactgtttgtccaggccccttcttctggttaagtcagtctttaggtcatgtgcggcacccaacctattaaatatcgaggtaccatgtggtcttggtttctaacttgtttggccgataggttggcgaaagatttcagtcggggtgaagttgtaaggtgtaactccatcaaaagagcagttaggaaggatctcgtcgtctactgtttggcccacaggttgaatctgtggctgtggattggacggctgaccgtcgtgagtttgggcggtatgcccagcagcatacccttctctaccacctagaggaatactagacgtaatagctagctattgattgacaacttagtaggccttccttatcagtacggtggcctaccttgtgcgatcatcaatagatgcttgctgagcccttaaggtttccatctccatgtccctccattctataaattgatgtctttactcgttaaatgcaacatttatagcggcgcagagatcttcctgatcatggtgcaaagcgttattgtgaccttgcatgagtccaagggctgctcagaggttttggattttaggatcgtctccaactatcctctaagcattagtggtggacgggcttaacgtgttgggaatggacagatcgactgttgaactagtgttccaagtctcttgcatgcttggtgttatccccagccagagggggaagtcacaccatga

SEQ ID NO: 344993 - DNA, 683 bp, Cannabis indica
ggatgaattaatatgacataaaaagaataatatttataacctacatggatgatgcctacatcatttataaacaatgtgggacatttagttccatgtgtttttgtagttgttttctaaataaaatagaaaaaattcacaaaattttaaaaatagaataaaagaaatctaagatgccacataaacttattttgtgctttcctttatattatatatagatattgattattatggcaatatattatagaaaatgaaggtgctatatatcaacattatcttgaagactacagtcactacaataattgtaactttatattctcagcataattttaatactatattttagtcacaaataatttgttgttgtgactaaaaatcatacttagttacaaaaaatttatgttattactaaaaatttgtcactaaaaatagttacttttatagtggggtatatattaacttaaagtttattgtaaatagaaattaaaaaaattgtatttttgcaaatactaatatacttctttaaaaaactgtaaataaaatgtgattgtaatgacttgtagaaacagaacagaaacaaaaataaattgtgcagaatttaaaacttgacatatataagagaattgtatgtggtatcagtgttctttcaaatactagtccacagggctatgttgggttttgtgccc

SEQ ID NO: 344994 - DNA, 1309 bp, Cannabis indica
tttttaatcatgtttttcttgttgaattagtgttggttattttgtgtatttgttttcataatttttgttctattttattagttggcagtattgttattttagttatcttaaattgttaattgcattaaacttgaaaggatgatatctttatggagtattaaacttaaatgaaggatgatctttagtttttacgtatttttctttattttctagattaatattaaaaattaaatatgtaattggatatccaattagaaaaccaatccaatctacttagtaattggatttgattggattttgaggtctaattggattagatcgaatgataattttccaaatccaataattggattggatcaaattaggagaaaaatattggattggatcggatgtccaaccttaaataccacaatttgatttacctttaattagttggcaaacacaaggcttaacaatattttttttagagctatagattttgatgatcacatcaaacgtataattctaggaacagaaaattttcttaagtctataaatggacttactcaacccacaaactttcccttcttatccttatattttgaaacttctaattaattcataaatgattttgtctaacattcctttaaagaaagttgtttgacatccatatttcatatttcataactgaaagtggcagttatgaataagagtatattgatggttttgattgtggtgactagactaaaagttttcccgtaatctacacgttctcactaggtgtaacccaatgctacaagtttaactttgtaagctttaactttgataactctatggtatagagttattttttataattttaaactaaaagtattgtgagaagagtagtgaaaatttgtttgtttgcttagttttagttagttttagtgttattttctatttagtagttaatttttaagtcttgtaaatattgatattgttgggtgtgtttttccaattaattgtgcttgtttgttgttgaaaaaggaagaattaaagtgataggaaaaagaaaaggaagcaggcaagagtggaacataagctgaaattgaggcagattgctgaagcaatgctgaagcaatctcaacatcctggcagtgacgtggaaacacgagtttcacttatccacctcagcaaattcggtccagtcactcaaattacactagctggctgatgtggaagaaaagggactaaacctagtgggccaaagtggaaaagtttgggcttctattttggcgtatgaagtttgtgttaggttttatgccctaaataaaacttcatttcaatgtaa

SEQ ID NO: 344995 - DNA, 510 bp, Cannabis indica
acctttcaaaatattataattatgatctcatatattattattcaatatattatttattttaattgtaagtattgttgtactatttttttttattatttttttattcttttattaaagagatagtatcaatctgatgtaatagaatcaacacaattttctatgatagtacctatttaacttcaatagtataatatcatagtattttaccaaataaacaatccacctaagtaaggatcttctaaaatttaactattataaatgctttaacaatccacatagcaacacaaaccgtaaaagtaaagaaaaaaaaaataatataccagatgattcaaaaaaaaaaaataataacaatactggtaatgggcttagaaattagaattcgtcatttaaatttcaaatttataaagtataaaaaaaaataataaatatttaataatgggtaaatagtggcatcagtacccaaagttttatgtttgtaagcatcataaacccaatgtttatttttagcgg

SEQ ID NO: 344996 - DNA, 2581 bp, Cannabis indica
atacttgtgagtagatctaagttcctggtaaaataacttccaacatcaactgggggagctagggaaacaatcaggatatgactcagatgaggaactcgagccataccatccagatatcatgaatactccttttccctagggatttaagaaccctcacatcttgtcatatgatgggaccaccgatttggtatcgtatttgaataacttcaacactataacgggagctagcaatgttacaaacaatttatgttgtattttgtttccgacctcattagttggagcagcgagcagctagttcaataaatttactcattattccattagttcttgggaacagctatcgaaggacttcaaaaagtagttccaggccacaagggataggcgacacgaagcgttctcactcgcctagagagattcttaaggcgtacttaagtcgttttagcacggcttctgcaagagtaagaaatttggatgatagtacacaacttactgcccttaaggcgaggatcactactgatctctccaccgctgggggaaaattgttagacgacctacaaggtcgtccagtgaagaacttcaccgagttgaacgagagggctcaggtgtttttttaaaaggaagaagctcaaatagagatgaactttttaaaaacttgctcgggaggcaaacccagcactatttcaacaaatgttgtctcgactaaagttgataactcaggttccttaggctcaaagaggaaagaagactttaaggggtcgtctaaagacatgaagaaataaaaaaagcacgacaagtacgtgccaatttatactacttataccaagcttaatgaaactcaggaaaatatttacctcgtgcatgagcaaaaggttgccttcagtaaacttgagcccatgaggcacgcgaggcataaaagaaatctgattaggtactacaagtacaataaagacattgagcacacaacagacgagtttcgtcagttgaaagatgagatagaaagtctcatcccgcgaggccacttcaagcaatatgtgaagagaaagggcaatggacataaccagcccaatctgcccaacaacccaagcaactagggattacaacctcctcctattgaaggagaggatatcttggttatctcggggggctacatattacaggagagggcaacaatgcccaaaagaggtatgtgaaggaaataaagaatgagcagtcagtatttgctccagaacatgaggttccctcacgttaatccattggtgattactatccaactcgccaataaaaggataaagagggtactaatagataatgggagttcagtgaacatcctttatagggaaacactaaagaagatggggctcgaaaaggccaaactgaggccttgcatggtaaatctatgcggattcactggcgacagtatcgctagtcaaggtataatcgagctcacaatgaccttgggtgaggtacctctatctgccataatcatgcaagacttcctagttgttgacctgccatcggcttacaatatattactgggtcgtccagcattaatcggactaagggcagttagttcgatcaagcatttatccctaaagtgtcaaacaccaaagggtgtgggagtggtgcaaggcaatcagatgctagctcacgattgctatctcatagagctacaacacagaaaattcagtcaccagataatggcagtattaaaagaggaaagtgaaaagaaggatgaagatcttgatccccggattcaagatgaaagaaagttattgcaaccaattgaagaattggaagaagttgttctcgacccaggatatcccacaaagtatgtttacattaggaagaacctagacgagcagtgaaatagcagcaaataagtttcttaagggcaaaccaggatcagttcgcctggagccatagagatatgatagggattgaccctaatattatctgccatcatttaaatgtcgatccaaactacccaacaaaggggtagaaaaggaaaccctttgattctgagagacaaggggtactcaaacaggaagtggataagttgttggtcaatgactttatacgcgaggtgttttatccctcgtggatagccaatcctattcttgtcccaaaacctaatggaacttggagaacttgtattgacttaaggtgtgcccaaaagattgttttccactacccgggattgaccagttggtagaggcaactgctgggcacgagcttttgtcatttgtggatgcatattctggatataaccaaataaaaatacatgtcccagattaggaacatacgagctttgtaaccaacatgggactttactgttacaaactcatgccgtttgggctgaagaatgctggggaaacatatcaatgattggtcaatgagatgtttgcgaatcatatcggacgaaacatggaggtttacgtcgatgatatgttaataaaataagtgaaaagcaggagtcataccatggaccttgcagaatgctttgaaatattaaagaagtataatatgaagcttaacccaaaaaaatgttcctatggagtttcctcaggaaaatttctaggat

SEQ ID NO: 344997 - DNA, 686 bp, Cannabis indica
gtgatccgttgtgagcctaaattgccaccggtccaaaaagccgtttgtgatccgttgtgagccaaagtgtcaccggtccaaacagatacttccgttgtctcccctttaacctccatttgggaccttttagccaatgtgccagtttccaatgttgggtctttgacctgttttaaaatccacaaattttgcgacgtgtacacccataaatttcccgatatttggccttgtgggattctttcaaatgtcacgttcggtcctgtagtctcttaaaggtcgttcgttatacccacactttcaaggcccaaaacgtgaggagggtgtattaagagttagtcccacattactaatgtgtggaaataaattgtgatatataagatgaaagggatactcctcccattgccaattggttttgagatggaacttcattcatcttattcccacattctaacaattaaaatcttcgtctgatgcaaccttcgggcaacaacccaacaactcacgatccatgcttcttgggtttgaaaccttcgtctgatgcaaccttcgacaacgacccggtagcaacccaacacaaccgaaacgaaacctaaccagaaagagaaccatcattaattccccgcgacttcacctgaaaaaacgactagaatcaatcaaaacaagggctgtttcgtattcatgaaaaaaaa

SEQ ID NO: 344998 - DNA, 949 bp, Cannabis indica
ttttgacttttctttgaacatttgagtactcctggtcggcatattttcttgtttatcgttcgatattccgaccaaacactcatcttgtgtgttgtcttttgtagatgaacctaggtgagttttgggagagcgaacatcggatcgaccaggacctgcttcaacttttgcacgaggatcatcctcgtcttcggcctagcccaccttcttctagtgaaggacattctccaaatcttatacccagccatagaatgatggctcgtacacaacgcgtttggctgacgcgtctcatccccccgtggctcggcacgccactttgcctagcgcgaaacaggatccagccgtccaagtggagggggatcatgaaggggacgctaaggtccaagagattgagaagcaggacgatgtacgtcgtaacagttcctacgaggcggaggaagaggcagagattgaacccccaaactacggggagtacaatgaggctggggagccagtcgatgctgacgggcgtggactatgtcagtgaggagcttactgttgcggttcctcatagaaggcaaggtgccttgggcgccaggtgggtaacccctttgtcaagggttactgaggctcgccttcaggctctcgaccagggcatatacctgggcaaattagactgctacattcctggccacaacaatcgtgccacaaatcctgaaagggggatgcgcgcctggtctggtgcccatgcccagcaaggggcattgatacctttgcatcaatattttaagaatatggcggacttctttggcctttgcccagcccagttcactcctaagggcattaaatatctgtctgccctcttcgacctctacgcttcctagaagtggggtatgccttctcctcacgaagtcagctggttttttgatttgaagtccacccctaagcaaggcaggtcagggtacttctattt

SEQ ID NO: 344999 - DNA, 543 bp, Cannabis indica
atgtcataaggttcacgtaaaaaaaatattaaggttgtgtttgttatgagttttgatttatatggggatgtgggcaaagaaatcacttttagggaatatgaaactatacccactaaaaatttgtggaacctattacattactacataaaaaaaatgcacctaaagagttcattttaagtgccatcacatcccaacactacctcataacaaacaccactaattagttaaattggatattagattatattgactttatttgattgtaattttaatatttagtggtcaataattattgaacactcatgtgctagaatatgttgcaaaataatatatatatatatatatatatatgacaaaaatacttaaatctaataatcttaataatctaaataatttgagaaaaccgtacttgaatgaatgggatttttcataaatttattccctttttttttttctagaattaaccaaaagaaagaagttatgagttttaaacttgaattttgattactaatttaatcaataatttaatcagttttctctttt

SEQ ID NO: 345000 - DNA, 1396 bp, Cannabis indica
tcgtctgttccccttcttctgtttaggtcttcccttaggtcacggggtgttcccaacctttcgaacacagaagaacctggctgccttagcgattggttcgcttggttggcaagtggaatggctccattattttgcgtggatccatcgagcatgactcctcctgatgaattcccggacaaggtctgtccgcctacctctacgcgcacgagtggaactcgtgaccggggattggacgactaacttttgtttgtctgggaagcattcactgttgggtcatcctcggtttctccaaagggaatgacgctcggcgcctgctggcctacagtctgataggctcttcgtatcagcatagtaggttgccgactacgatcttcgatttctgcatggtgagcccttaatgcctccatctctttgtccctccactcggcgaacatacgccttagttcgtcaaatgtaaggtttactgcgacacgtaattcctcctgatcgtgatgcagggtattgttgtgaccctgcatgagtccaagcgcagcacggaggttttacaattcggttgcatctccgatggtcgtctgggcgttgatgcatggtggaacagtcatgttatgaacgtcctggatgtgtgcggaaccgttgtttccggtctcttgcacaccaggcgcaatttcagtaacaggagttgttccatcatacaccacgcttcccgtctgtccaggattgacagcgggtggaaccgtcgaactccttgggtcctccaacatcagatccagtgtctgtgagttttctcggtcggacaggcctctacgagtttgcaccatcgtgtcgaaagagcattctgtgattcttctctcaatgaaagcaccaaaatgttgacttcgcttttagccaacgacaatgagtctttttgataagcgataaacgatgtgtcgtaataagaatacgtaataaagcaaataataataataataagacacaaaaattttatagagattcagccccgagcagttcggtagtagcctaatcctcgttagttgcattgacttaagaataaggaagaagattccttttcttatagctcttacaataatatctctgactatataattcttagatagtattagcttatagcgtttcggcgtatgatctctgttttacagttttcgatcaatcgcccttgcccagtgaacattcctcacgatttatagggcaagaaacttgaggagaaagagtttcctctctcgttacaaagcgcataaacacaaagatcgtgtgatcattactgaatgctaggatcgtgggattgaggtcgtatacaccgatagtggaatcgtgtgtatgccacatccacgcaagttgatccctgagttatagggattgagttggtgactcacgaagt

SEQ ID NO: 345001 - DNA, 566 bp, Cannabis indica
atcaatgattttgtgattaaaggaagagtaatggtggagaaaaggttgtgtaatatccgctaactccgaaagggtatttttgtaattttatttagctgagagtatttttttttattttacatatttatggatttaaatatgtatgggattatttttatgatgatataatatttgattttattggcatgtgcataatgcctaatagatacatatgtctggatattgttatatgggtatattattattattattattatcattattaacatattattattattattataattattattattattattattattattattattattattattattattattattattattattattattattattattattattattattattattaacgttatatacaacatacatacacgaacgattcaaccgaaccgaacgcctattttggtggaatgggaatcgctccacttcggttcaatgcgatattttgcttgggtttaaacacgatagaaattaggttttaaactctattttcgttcacccaaacagagaaccaacgagagagagagagag

SEQ ID NO: 345002 - DNA, 1438 bp, Cannabis indica
ctcgaagtatttgatgtgagtcaacgggtcttctcgtatgggctacagattttgaaaagataggggctggctggccataccttgggagagtgtatggtgaagatcatccatgccctgaagaccctggccagccattcctaggtatgggagttagcctaggtcgatcagatttacactcagctgttgtgtttgaccagccagacctgcattggatagggtctggccactcagtactcctccatggccagccagacctgcaaagggtagggtctggtcgcccgtgatgcttccttggccaaccagatctgcgctgggtagggtctggccgcctgtgactccatggtcgactggtgttggctatgtgttaattgggggtatatcacaccaatttctagagtttggtggattgagaaattgctattttgggtgtttacacccactctcggtcctcgtcggtcgaagatcgatctcagtgcacctctcttcccttgcagaggaagtgatgtaccctggccgaccatgtgtactcctgttgatggctggccagccaatggctgcacaatgggggttgctattgagccagagatccctggctagtcccccaagccgctgtttgccaggatttggctgttcttgccgtttgacctttgaggaaaggtttttcgtccctctggcagggaaagatatgtcctagttcctgaggaacttggcagcagtcttccttgaagtaaatccctaaggagatcttggcctcttctgtcggttctctaattgaatcgtcttattagattgatggactcccagttacagtgatctaattctacttggtgaggtcaaaggatgtactcttgatcatccatccatctcaggaattcatgtctttgctgagcgaaagcatcgcaattagtagcgtgtggttctttagttaggcttgcacgacctataacttcccttagtctggccaacttaaggtcttctcctaggtccaggtgaggctcgccaattgctggcttgcccacccctaggcctgtctctctactgtagaactagagttgaggtctagttgttgtccctgggggctattgtcccttggtccttcctttagtgggaggcgcgaatggtgggtctacacttggaggcatgggcctgccacttggatccatcgggatgctcgtgtcaggttggccaactatggtggccaaactttttgcgcctgttgtggtgacgagattaaccacatctgtagtattcatggggattccagttgtgactagaacccgagtgcctggatatgcgatctgtgggtcttgagggagacccaaagatgtagttggtgcaactggagttatcaaccgacagcgaggtcgtgcaaatccgatgcttgtcatgtgtgtgcacatataagaatgaaaataaataggcaataggattttttata

SEQ ID NO: 345003 - DNA, 671 bp, Cannabis indica
aaccccctttcttctcaaaactccttttaactcttaattttgggttgtgcttgcttggattaaggcttggggtttgtggcttttgtgattgagattgaaaagagttgtttttgcattttaaaaaggaaaaattctgggcttttcccctgccctagctgaaccccctctccctcttttcttcatattttttattttgctaagtgttggaaaattcatcttgaaagcttggattcttggtgggttttgtgcttagctttgtttggagcttgaggtagttcataaccccttttatttgttgatttttcctgctaaaatttattgttcaaaatcatgaaaatagtgtatgatgttcttggtttgcatgtggggagaattaatattaatcttgagaaatctgggtgtgaattgcttggttttgtaatggattatgttggttgggttctagatgagcttttagggtaattttcattttaaattcaagtttttatttgatgtgttgttgctggaaaaataagtttgatgcttgcttgaaagttgcttgaaggttcaagttcttgattaggaacttatgatgaactttgctctaggtttggagttttgatttcatgttgttgaatctgaatttctatacatgtggactgaaattttaagcttaataatttgtggtttaa

SEQ ID NO: 345004 - DNA, 1075 bp, Cannabis indica
gcgtctctgggactcgtagtgttttgtctggagttcgtactattagtgttagtccacgtcagcaaagatattttagattttaattgttcagatggtaacagctgtctatttcgggtttcttggtttggctgggtataaatacgatttctgggtattatgttgacgaactttttgatcgaagattagggattacgtttctttcttcttgtttcttctttatgttccatgggaggtgaccttggagcttgggagtattaatccaaagttgcagatcaaagcttgaagatgttgagttcagactgaagggatttcagtatcattttcatcaccagatctgaagggagttcagattgaagaagtgttgaagagagctcatcattcacacaaggggatcttatgtctccaatcaagggtcttggttggtatgggtatagattcactgtattttgtaaaagagtgtattgtttacaatattgttggtttttgtaagatacatcttttaatatagtgaaagttattaccctggttcggggaacccaagcactagccgcctagaatgagtttctagggcaggtgaagcttgtaaaattctggtgttgaatctttgattttgttctttttatattcaagcttaaatcaagataaaatcaatctaaatatgaaaaagataggttagacaagaacttggagtttacatagtcattcgtgtcattcaatttcataagagaaaatagaatgacatcataagtatatgatttataaaccatttatccaatgatatagtatctaagcgatttcttaatgaaaaagctaagaggtaaaataaaggatagtttcgattaaaataagaatccaacgatgacccagtaggcgagagttaaagttattcttattttataaatttattcactgtttcatattgtaaacactaatctaagttgtcatctttggatgtacaactagatatcacatatacaaatatttatctgtcgagatctaacacttttgtttgtctaatggatgataatcttttgggatttgtcccattaaaaaacaacaaactaagttagaccaa

SEQ ID NO: 345005 - DNA, 860 bp, Cannabis indica
ttagtttttctatctaattaaaaaaatctctcatttttatattatatgagttaggattgtttcattgagtgaaaaaaaaattaagaaaaaaagtttttcggcaaaaaaaggttaaatttgacttaagtattttttatataaatatatttttaataggggaattaccctatttactattttcttttttaactttttattcaaatttacggtttgggcttctaaagtggttgcagcgctagttgcaataggagtttctatacgattttttgttgcaatttaagttgcagcgctagttgcaatatgagtttctatgtataatttcgtaaaaacgcaaataaaattgttttgaagtgtaataataaaaaagcccctttttaatatagtgtaaaaagtaaagatttttttttcttttaattaagtagctaaattaagcacaaaaatttaaatttttcttttattattcgtcattagataatctaatagtttaattttgtttaaaattaatatttatagtgaaatgacttagtaatcatcaatggataatacccattaagaagtattccatatatatatgagaaatgtaagtaaatgactctatttctaactctatagatagttaatgtccattttttaaaataataaagcaaatgtccttttttactttttaatacctaaaatacctttcattatataaaatgtattatatgtattattcctttaatagaaattatgaaaaacaatcaatcaaaacctctctactgaatttttgtcaactactttttcactatataaaaggtattatatatttttttttttagtattttgctactgttgttgttgtctaatatgttatttaacca

SEQ ID NO: 345006 - DNA, 593 bp, Cannabis indica
tttttttgataaatcaatgaattgtattgcacaaaatggtatttgcaaactaatagcaccgaatcaagggcctagcttctatatacaagcaatttttcttctttacaaaacacttacaaaccaccaaaccaatctctatctatagccttgattttcctaggtaaaaacatgttaatccggttcttgagaatccattgtatatcatcaattaatctgcctgtatgcacctctgtttgctgccaaatgagttcatttttggctttccaaaggctgtaaaccagggcagcaacagctgctgccaacactttctttctaaaattcgagattttggccctcccgatccatttaatcaactgtggcaaggagctggtgtgagccttccaattcatccattgtttaatcaaagttaaacaatgatttgataccatgcaatcaaagaataggtgctgtccattttcaggagctgaattacaaaggcagtagctagcttggacttgaattccacatcgaagcaacctgtctttggtctttaacctattgaggatagccaaccaaaggatgacactatgtttcggtgtgttgaatctccccca

SEQ ID NO: 345007 - DNA, 1162 bp, Cannabis indica
attaggaattgccacgtgacaatttacttaacaattaacagtcaggtacttacaaaagtttcaaaaattataacttaggtattattactgaccgaaaatttaaacttaagtatttatttgcaactaggagttaaacttaagtatttatgccgcaaattactctttagttaaataatattttaaatattgtgtttctataaataaagtttaatgatacactgagtctaattgtaatcaaatgtttttaccttaattttaaaaatttctcttcccaatcttcaatagcgattgtgatatgatttatgatctaattacactaaaccaatccaattacaccgaactaattaaattcaatctaattacaaaaaaaatagacattcagttaaaataagattggaatgaatgtgagtagttgtattctagttggattagattaatttttggaagaaattttgaaaatctaattaaaaattgatctaatctaattacatgtaatacatattaaaaacatattgcatttcatatataataagaaaaatatttaaattttatttttatttgttggttgttaacttttaatgaatgtattatacttaattaaagaaatctctaaaaaaaaacctaataattcatgtatagtttagtctttatgtattttttttaattcgttgaatagaaataatatttataatagctacttatagtctaaaccatttaatttttttttctttttttactgtaattttttgaatttggatatttatttagcaataaatttaattaaatataataagtttatatgatttaaaaaataataataagtttatggataaaaccaattaggtactgatgacgtcaatatccaagttgtgttaaaaatcttatattggtgagtttctctaactctctacttatttagggccaatttgatacaatttttgaaaaagttaaaaactgctttttaaaaagttagaataaaaatatgttagataaaccgtcaaaaagtagctttttaaaaaatttatggagaagctataagtaaaagctaaagttggtacaaatctaactttaaaaaaaaaattgttttagattgaaagaatataataaatttatttgtactaaaactatatttacttatttattatatattaaaaataaaaaa

SEQ ID NO: 345008 - DNA, 500 bp, Cannabis indica
aacaaggatattcttttctttttgtcaataataatattgacattatgcttgacttccaaattattagaaattatttttattctgatagtctttacaaattgtcattggctcccttagctttctcttttaatgtcgtcaatattgtgagtaagagatcttatattaaggaaatatccttattgttttgtcacaaagattgggtcatatttctaaagaaaggattgatcacttagttaaagctgaaattattcctcttcttgatgcttttggttgggatacttgtgttgattgtactagtgaaaaattgactaatataagaaagaagactgccaaccatattcaatctttattagaaattatccactgacattagtggaccttattccaccaagttgtgtagaaacaaatattttataactttcatcgatgatttttctcgttatggttttacctacttgattaaagaaaaatctgacactcttgaaaaatcaaagtctttc

SEQ ID NO: 345009 - DNA, 909 bp, Cannabis indica
tccattcttcaacatcctgcgaagaaacaaaaagttcgaatggatagcagaatgtgaaaaagcttttcaagatctaaaggcacaacatgcaaaacctctcgtactttctaaacctctggactgcgaggagctgggaatatacctcgctgtcacggagcatgccgtgagtgccgtgctgatcagagaagagaacagcatacagcaccaagtctattacattagtaagagactcatcaaggccgagggtcgatattcgttgatagaaaaactcgcctactacctcattctagcaacaaggaagttgaggccttatttccaagctcatcctgttcgggtatataccgagcagccgttacaacaaatattgcaaaagccagatgcttctggaaggttactcaagtgggcggtagaattgggtcaatacgaaatcaacttccaaccctgaacagcaatcaaaggccaggcctggaaagcgtaccagaaagcaaccccgagccagcacctcagccaagtaataatgaagacaaaccaacctagaaactacatgtggatgggtcgcctacagatcaactatctggcactgggattgccctcgtcacgcctcgaggcaacacctgcacgttacggtcaagttcgaattcaaggcatctaacaacaaagtcgaatacgaggctctaatcgctggactaaaactagcccgggaaatgaaggtcgaacacattaaaatctgcagtgattcacagcttgtggtaaatcatgtatcaggcgaatacgaggcttggggagaaaaaatgatagcatatctgagcaaaatacacgactcgctcgcacaattcaaaagctatggtctcagaaaaattccaagagaagaaaatacaactgtagacgcgttagctcaattggcaagca

SEQ ID NO: 345010 - DNA, 699 bp, Cannabis indica
gatatatgtagtgagtttaaatttaaattataatgtttcaaagataaaagagatatgtttagtgagtttaaatttgaattgtaatgttttaaagataaaagaataaaaaaaaatgtgtgtattgagttaaaatttaaattgtaaaattttaatagtaaaaagaaaaaaaaatactttttattttatagctacaattaatataataatatatatatatatatattatatttataattcgagaattgttattgggcactaatggtgcttagcaccttgtacacgtgtcaccttgtaattggttagtgatactctctaaaagttattacattaaattatattagacttgatatttaattagaccaatagagatattgacatgtaagaagataggagtttttacaaaaatactagatttggggtaatactttttaattttactgccacacgacagaaattacatttatactaccctcccccttttttttcttttatactgtaaacaaccaaaaaaaagtaatgaggcctccatcttccacacccacagacagaaccaccacagcaacaccaggacagtcgaaaaacaaccattaattctgacaaaattaagcaaaagcagtgaaatcgacgtcaaataaataattatggcaaaatcactgtaaaacaacactaaaataaatcaaacaaaacaaaagaaaaaaa

SEQ ID NO: 345011 - DNA, 621 bp, Cannabis indica
aaataattatttctacatatttattatcacaatacatatgtatattatattatgctcatcatatatataatagacataactcatattcatgttatataatatatatatctcacatatatatatatcatatgtatatatgactatcatacaaaatagtaaatcacataatatgcaccgccatgctcacccatgaatgattttcacataaaatctcttatctttgtattctcaaaatcttgatttatctcctcttctattgaaaagggatagcttttgattcttagaaatatatttacaatggaagaaaatcaagacattacaactctattgcaatataatacaaggatcaacaaagagattaagtaaatgttacaatacataatatataatatatatacactatatattatatataagaaagctagaagaagatatatacactaaaaaaaactgttacttttagtgataactttttagtcacaacataaattttttgtgactaaatgtgacttttagtcataacaaaaaattacttgtgactaaaacatagtatttagttacaagttgtcactaatttagttttagccacaataaatattgtgactaaaaatacatttagtc

SEQ ID NO: 345012 - DNA, 923 bp, Cannabis indica
cgttctcgtattttaaagtttgtaccaagttcaaagctcctatgtggacaaaggaagatacaatagaaaatcatgagctaactacttgtttacaaagtaaggaagcaggagtgatagagcctggtaattttatgaaaacaaggaagaactgacaagtggtgggtagatttgcacttaataacaattttgagtggatggtgaagaagtcagcccctgatgtgctgtacgttacatgcaaggctcgaggaagaagatgcattctgacaactttgaggtcactgtatttcacaatgaacacacatgtaacctgaatgcgagatgttcagatcaccgtcaagcagcaccatgggtggttggccaccttattaaggggaagtacacccaagatggaactaagtacaaggctaaagacatatagagggacatgtttgacaactatggtattcagatgagttatgtgaaggcgtggaggtgtagggagatgggacttacgtatgctaggggtatgccagagttttcatacatgaagcttcctggatacttgtacatggtggagcagaagaatctaggtaccattactgacttgtatttagaggatgagcggtttaagtactgttttatatcactcggtgcatgtagaaggggatttactttgtgtcgtcctattttgagtattaatgacaccttattgaagacgaagtatggcggtataatgttagttgttgtggcatacgatatgaacaaccaattgttgtcgattgcttatgctatcgttgacagtgagaataacgactcttggacgtatttcttacagaagttgagggtagaaattggcgtggttgagaacttagtgtttgtgccagataggcatcaaagcattgatcatgccgttgaactcgtttttcccgaagtagtccactgtg

SEQ ID NO: 345013 - DNA, 1110 bp, Cannabis indica
ggggctcctacccctcctgcttcaagctttagcaggggaggtagtggtttagccctagattagaaaagaaaggcatccactgcaaccagtggctcgggtcagaataagaggttccgggggaaccaaggtcaaggtaatcgccccagtggcactgaaaccggatacacttacccagagtgccccagttgtaaacaagcaccatctgcgggagtgtaaagggcaggggtgctttcagtgtggcatgccagggcattacaagatggattgtccccagcttaggaccgaaaaccaaagactgcagcgaaacccattccagccagggtgttcgcgataactcgggctgatgcagaagccaacccctctgtggtaacatgtcagctctcggtcaacaactcttatttctctgtgttgttagactttggggccactcattcttttgtggctgctagaatttttagtgaattggacataccgcatgatagttatgaaacagggtttggaaccctactgcatggcggagagttagttatctccaaaagatggattaggtctatgccaatcagaatagaagatagagagttgagtgctgatttcatagagatgaatttagtggattttgatattataccgggaatggatttcttatcaaagtactcagccagtatttattgtaagaggaagatggtatcttccaacttgaaggtgaagaaccattttttttttgttggtttggttcagggatctcagatcccagtaatctcgatgctaacagttaggcaattgttacaagagggatgtctagggtttttggccgtagtattagataccactcgccctaaccctattcagctagaagacatcaaagtggtttgggaatttctagatgtttttctcgaggaacttctaggtttgccacctcatagagaaattaattttgtcattgacttggcacctggagaagaaccggtttctaaggctccctatagaatggctccagcagaacttaaagaattaaaaaattcaactccaggggttgcttgacatagggtttacccgacctagtgtgttaccctggggagaactccagtaatgtttgttaagaagaaagat

SEQ ID NO: 345014 - DNA, 959 bp, Cannabis indica
gaatcaatgaacggcgttaagatccctctgaatgcttgaagtcaaaaattaaaattaaacaaatcttataggaaaaatgttaatgataaaaatggcatgcaaggtttcgagcaaatctgggaatggttttttgtcaaagatgcttgaaaaaatttctagagtttctgaaatagaaagaataattcaaaggtggttccttttcccattttatactcctaagttaatctcggttagatcagagagataattgatcctacgttagaatttgaaagagaagttgaaaaaatggtcattaatttctaatacaccttgaaaccccaaaactgcaaaaatcaaaggacatgcattttttcaaaaaggattatgacaaaatataccttctgtaaaatcatttaaaaagcactttttattaaaaagaattttttaaggggcaattgttatacccaaattcggctggcacttcagaggaggacacgtgtcaattcgggagaatacgaatcaacaaatataatagtaattatattaaaggatattaaaagggaataacttattaaatgcagagctaaaagagtatatttacaacttgttgactgtaaagtcttaagcgagataaggatatacaaactattgtctcgcgcattgacgagaaactatttaacatcagaaatacaaaacgagacactaacctcgctatgtatgaagagatgtaaataggacatgttgactgttagaacacttagcgtataatgtacattataccaactaagcataacaattgaatgaacttggacaacagatagcgaagcatccatctcgttatattaaggcatactctcggtatcttcactaatcagcttcagacatcgttccatgagattcactgctccgtcgagtcagctctcttagatagaagctgacattcaaatggtgttgactgctgaagttcatcttgtcaccaa

SEQ ID NO: 345015 - DNA, 634 bp, Cannabis indica
agaaacacaaggcatgaaaatcaagaagctcaagaacagaataaagtaaaatgcaaggtgaccgccaacacaagactcagaattccatgatcacctgacatcgatcttatctcagacataacagctttcacttttccgaacacgggaagagatggtcgagcaggtgaaatgggctcccttttgcgaattgcatgttcaataggcctaggcgaggccggaagtttcttcttcctctttaatggagtcacctgctcttcctcagtctcatcttcgggattcaacggctcctaagcatattgtttggccctggcacatcctttcaacttagcttcacacttcagttgaatcaactcattctccgaatgagttcgttcagtccggctagcatcagatttcctcttcttccctgtcacatacttaggagttaagtcctggggataaagcccgtacctcacaagattatcatcggaggtcaacttgataaaattctagtcttcccccggcaatcgggcaactttttgagctcattccctaagagcaagagtgaggggaggacggtgatatatcagaatacgctgaaactgagtccgggtaatcctgggatcctcaaccatgaagtattcatcagcaaaac

SEQ ID NO: 345016 - DNA, 1004 bp, Cannabis indica
cccaatagaccttggccttaaggaatacaaccagcttttggctttatccttgagtgagaaacgaaagaacttcaatctcaccaagttaatgatgtcagcttggttgttgaatgtggccaccacctcttcgaaggcctgaatatgcacatatggactctcattttccataccatgaaaggttggtaaaagttgaatcatgccaggtttgaaatcgaagttgggcatattcatgggatacattatgcatgaaggtgtggccgtacgcgtaggatgtagataatcctgtagcgttcttggttggatttcctgttgttgagccatcattggaagtgcaggaagtatgggtgatggtggtgaatgagaacgagtggaagaagacgatttaggagagttttctaaaatttcaatttgttgttttacaaatctccctaatttgtctctatttcgtgacattcactttttttttgtgtgtgtattttcacttgttaaataatgtaaattacaactatgtaataatgcaagggtattcacacaagatattcccaggccgattgggaaggttgccaaggtaccgcttcgtcccacacttttactagaactccccggggttgctagaaagtgtagagggtactctatcacaaacctttaaagccaatctttcttagacagaatgatctcagtttgtaccacttttaccattacacaattgggtttacactaaaaagtttatgaaaatattttatgcacaattttttttttttagcctaaaggataaaagtctacaactaacctaaaataaataaaattaaaaaaaaaatggctaatcctaaaaaaaagtaacaaaataaaataatgtaaaaaaaaaaaaactaacaccctaatatagtagcaaaataataaatacaactaacaaactaaaaaaaaaaaactacttgcatctttttttttttttactaaaagagtgaagaagagaaaaaaaataataataatatatagtgattttt

SEQ ID NO: 345017 - DNA, 287 bp, Cannabis indica
ggtggtgaggtcggagtggtggtcggattttttatttggggaaaaaatacataaacaaagagggattgagtgggggagatagattttcagagaaatttagagagattgagagagatagagggggcggctgagagaaaacaagagagaagagagggggcggctgagagaaaaccagagagaagagagggggcggctgtttttagcccctgatacatattaatacttttaccggcgcatccaattgcgccggtaaaagtattaaaaaattgtaaacctaaacccaaaac

SEQ ID NO: 345018 - DNA, 784 bp, Cannabis indica
cacaataaacaggaacaagtatgtgaaaagggtttggatgaatttataaatcaaataattgacaaggtgaaccaaaacatacacaaacgaatgaaaaatacttctgtttctttattgatattgaataatccggattacattgaaatggagttttatttagggcataaagcccaacagaaccttgggcaccaactatcaaacctatgtataatacgatcaacgagaaggagattctaggtgtaaaagttatagcggttatctcgaaatgaaactagagtgtcacgctcggccctaagcacagtgggtgacaaaacacattgattacctcaggatgctccttctttggcttctcgaggggcagtgttctgaaggtattgcgcccgagccatgtgatcctgagcttcctcttcggctgggcaggatcctgttgccaagaagaatacttgggatatttataatcacaagtaaactccttgtcagcaaggagacccacagacctcaagttgacctcgctcaagaggaaatcaaacgacataagaccgtatgggagacccaacaagagcctgcgttgctcggccatctcaggagtaggggctgtcaaaaataaagcaaaattataattagctaaaccaaaataaaaaacatggactaatttaaccaagtcttttgcaaataatcacttacatattatgttgaaagcgattgtgccaattggggagagaccggtagtctagaagaattcatctttaaagggagttttatttggaaaatccacaatgatctt

SEQ ID NO: 345019 - DNA, 613 bp, Cannabis indica
gcctcaatcaaccattatccataatgagagtctacaaacagttagaaaacttgcatgatttagtatttgcaagtgatgtcaattgtgtttcacaattgaaaaatggatagagaaacatttcaaaggttatgtaacatacttagcactaggggaaatttaagaaaaacaagaaatgtctctgtcgaggagatggtagcaatgttcctatacattctagcacaccaccataagaatcgagttgttggttatagtttcaaaagatcaggaaaaactgttagcaaatattttcatgaatgtttaaatgcaatgattcgttgccaaaaagaattttggaaaacacctgagccaatattagagacctcaatcgatccaaggtggaaatggtttaaggtaagaattatagattcaaaattatagttgttgattgttaaatttaataatttctaattagtgcaataaatgtaatgtagaattgcctgggagcattagatggaacctatgtaaaagttcgggtacccgaagcagataagccaaggtatagaacaagaaaaggagagattgcaaccaacgttttaggagtttgttcacaggacatgcaatttatatatgtcct

SEQ ID NO: 345020 - DNA, 721 bp, Cannabis indica
gcaatcaaatccaagtcttgggagctgaaattacacgaacctgcactctggaagccaacctgggaacctaggatttcacctagtgtataggttgacattcctaactagggttttagttttcaggaccatcgtagtgcaaatgggtcaaaatttgcattgggacatttactaaacacataccatagacatagttgaggaatcagaatcagattcgaagcaagttcattttttaacacccggtgcttgggcaccgagcacccagattgacaatttatcaatctgggtgccttccaagtttcaaattaaagatccaacttttgcatcttctttgtcttcataaaaaaatgaggaaatatgtgagtttagggaagaaactgcacttcctgaaaatgcaataggggtattcataaaaatcgataaaccgaaaccaaccagaccgtaactgaattttcggttccacatcatcatcgaatttggcggtcggttttgattttggtttttttgacatagcggtcggttttggtttttaaaataaaaaaattggttaaactaaaaaattaccaaaaccgccaaaaactgcaataaaccgtccaaaaacgccaaaccgaaaaaccacttaaaactgccaaaaatcgtatggtcggttttatacggttataatttctaaacggtcggttacaattttcgtaaaataaaaaccgtaaccgaccggtcggttata

SEQ ID NO: 345021 - DNA, 658 bp, Cannabis indica
ggttgctggacattttgttgattaccatagcgaagatttggatgatttcgccaattaggtttataagatagtgagtgtggatcataaagctggcctaattgacaaggaaaatttcctactgcattcacatcttcagtttcatcttcaaacaatgtagggcaggtatcagtagtatgccccacaatctgacaaattccacatggcttcacctgttggcctaaagcaagttgttggatgacggaggtcaattgagctatttgttgactaagctggttctcaatgggtttgctcacttcattaacctgtcgtgatattgagggagagtccggcgagtgccaaactgttgtgaattggcagccatgtttgagataagatttttggcttctgttggagttttgtctaccaatgctcctccacttgctgcatctatcatacttctctcaaaaggtaagagaccttcataaaagtattgaattaagagttgttcactgatttggtggtgagggcaactagcacacaaccttttaaatctttcccaatattcataaagtgactctccagtaatttgttgaattccacagatttcttttcggatgcttccaactttagaggctgggaagtatcgctccaagaaaacagtcttcatgtcattccatgt

SEQ ID NO: 345022 - DNA, 549 bp, Cannabis indica
tctttactactatatatacataattttcagttaagatttctcaatctaatacatagtataatttctgtccccccactacttttgaaaaagctaaagctgtcaatgaaaacgactatgtattggttgataacaatgattttttaggaaataactatatatatatatatttatttaatttagtgggttgagaagtggttattacaatcttttagttaatttatgcgttgtcaaaatattttttttatagcgatattcattatagttacaatattattttgtaaatttttgaatttttttgaatggtttacagtatcgagtttcttatatttcaatttatcactcatgttcaaaaaactttaaacttatttttgacactatagactattcgaactttttcaataatttataaggatgatgttgtaattataatcacacttcttatcaatattaatattttcctaccaaccaattattcttctaatactattatcaaaaaataaataaataattaaaataaagaataaaataaaattaggtaaggttagcata

SEQ ID NO: 345023 - DNA, 629 bp, Cannabis indica
agattgagagcttacaatttaaatataaaagttagatatttgtttatttaataatttatcatattattattgttattatgttattattataataattcataaaactgaagagtcaggatagtataagtttcattcaaccctaaaattatatcgttctattcttcccacccatttgtgcaagactaaccctaaaattttcaagtcatcatgtatttgaggtaagaaactctttatttacttatttattgatcaaaataggagaatattcgtaggtctccttttcttatttttccatatgaaacatgtctcagtaaaactatcatatctctttcaatactcatccgattcttgcaatcttggtgcctatagaaaacttattgaatttcccataattcttataaagaaaggtcttactgaatcaaaatttatctatgtcaaaaattagtatgtctacgttgtttgttgtaaatcgttttttcatattttctatataagttgtctcagtaaaatccaaatatctctctgaataatgatccgattctagcgatcttgataccgttgaaaatataattcaattttctaaatgttttatgaagaaactattcactaattattgattattctaagtc

SEQ ID NO: 345024 - DNA, 771 bp, Cannabis indica
tttcccaggtccctatcctgattctggttggaggtcctggttattgtgtgggttcgggtctcggtctaggttcgggtcctagtcctagtcctagttcaattttagttccatttgcgattctgagttcgagttcgggtcggagttcgagtcctggtctgagtttgagttctgagtttgggttcgggtccgaatttaagtctaggtccagatcagtctccgggtgtgggttcgtgtccttggtcttggtctaggttgggtccgagtcccaagttccaatcacgatctgagtcttgattcatttctgggtctaagtccttgtttgtgatcctggtttgggttctaggttggttccgggtccgggtctaactttgggtctgattctaggtgtgggtatttgagttcgggtccgagtatgtgtccgggtttgtgtccaggtctggaccccgatctgggtcgaggtttgggtcccgagtgctggtccaatttttggtctgggtcaggatctcggtcctgatctaggtccagcatttcgatcccattctgggtcttggtccgagtccaggttcgtatccggatcgctatctaggtgcaagtctgtgtttgggatggagtctcagatttaggtccacgtccgggtctcagttccggtctaggtacacgaccgtgtccgggcccgagttccagtctcagtttgggtctgaggcaaggtctgggttcggttctaggtctggctcaaggtcctggtcacggtcctagtcttgttctagggtc

SEQ ID NO: 345025 - DNA, 1272 bp, Cannabis indica
tgagtggaagaagccattaatttacgctgcaaccactgtaaggtttctgacactttatatgtgtttatttcatatcattttagaagttcatgtttaggatgttaaaaacatacttgttagtaaatctatatcctggtaaaataattccaacaactggcctcagatccatggtaattgatttacttacaacaaatttggaattaaaacgatacttgtgtgatttggatgtaattcatatttatctatgtgttttttatgattgtttgatgtttgcaaatattttacgaaaaataattagaattttttttttggaataatttttgttgaatagtttagaaaaaattaagcaattgacttttgtaaagaacttaatttcgattaaatttttattagttatgaatttttgaaaattcaaaaaattaagggtggtgtcacccctcgtacgcgcgcgaatccccttgatttcaggggtgcacgcgcattcggacaagccctgtccgagatttctcggtcaggatgggctgatttgtctaaaatttgtcccctgcgcgcgcgaagaagctgctagtagcctcctgcgccgtgagttctcggccagagaccccatcgtgaacgcgaggatggtatgcaatgcataccagccgcaccaaatacaaatttttcccattttttttatttttcatgttttttgatggaattaatttcgaattttttgtgtaattttgtacttagatttttatttttcatatttcaaatctaattatcagaaattatattaattcgtatttttcaaattaatttaagatattagtgaaatttgaagcttaaaaataggtaaaaatctatctttttgcttacttagttatcttatttttaaaaaattgaattattttatcttatttttaaatttaaggtcaaatattttatatttttaattttttttaatttttttcaataaaatgacctcatttaatatttaaaataagattgttataatcatgaaattttaaattgaaataagatattttgctaacaatggtggaggctcatgaaataggaatgaccttgattctcgcctaaacgggacaacatcggattctcttttcgatcgaataaaaggttgctagaatgttgccattttagatgagttgactactctattcaatggatgttgttttgactctcgcctaaacgggacactgtatcagtttgttgaaaaccttggacaataaataatatgttctattttttggtatttttataaacatattt

SEQ ID NO: 345026 - DNA, 507 bp, Cannabis indica
atacttacttttgatattgttatgtatattatgtgtcctacttattttataaatagactttttttagttttaactaaaaataacaatattataaaaatacttacagttggccaaataaattaatatacagctcaaataaaaaaaaattacacaaataccacttacacacatcttcaacccaggatccatgcttccggggcaaccattacgcaaccacacagtaacccaacgcaaccgaaacaaaaatttaaccagaaagagaactaccattaattctagcgaccacctaagaagacgaccagaatcaatcaaaataggaggtgttttaaatttatgaaaaataagtgttaaaaaactactaggaaactaaaattcaaccaaaaatccaatttaatttgcataaaactaatgtccagacttcaattctcaaatccaagaaatgcagatctcaagaagttgaactagagttccaaacaatccaactcaagtataattcaaaaaaaatta

SEQ ID NO: 345027 - DNA, 495 bp, Cannabis indica
ggcatttgtgtatgattaatcaggaattaaatacatgatataatgcaaacccacaacttaattgtttttggtcaaacctttctgacgagaaagggatcaaaccatcataactttttggtttaaacttgtctgacgagaaaggaaaatcaaaagttataaataagatatagctcataacttgcgtacgaagctgaatattaacggttcacgcaagataggaaagtattaaacgagacatcgagaggtcttgataaaagtacttaaacctagtgaatggatatataatctaactattcatacaagcaatcaaaaatgtacaaagtgataaaatcattaaaagtatattcaagtttgcttaagacaaactataattgtcatagcgaggcagaattgataactgctcgtaaatcaaaagtctagtagattactaactgcttaaataagaaaattacgagcaatggaaagaccctaaagtactttgcatttgatcaaaat

SEQ ID NO: 345028 - DNA, 1768 bp, Cannabis indica
tttgttattagggaaaactcttatgcaaaatattttttttaaaattttgtaatacaataatctcttaggattggtagcacctaagtatactttaaataatacttctcgcatccttccagaagtgttgggcaaagtaaacacaagacaccatcacggtatgacaattctgagatgaatcatgctaggaatgtgatctttagtctcttagcatactcgagagtatgtgagttaatgatttgcaagctttgtaaataattcattatctactatttttaagcattgtcactctgttgtgtattctgtatatctcgagatgaaccttctaagttgatcgttcatcgcacaaatttgatcaatcgatagttattattcatagcttgtccttgtctttaaaagggtgagtttgaatatttataccatatgtattttttgaggtgagtttattgaatgcattaattgctttataacacgagctggtttctttacacgtgtcaacatcatattgttgctcaaaatatgggcataacaaagacataaaacaacaataatttattttattttgttgttagtcatattaaaatatacactattctatggaatacaatatacaatttgattctatggaatacaatatacaatatacaatttattttattttgttgttagtctcctagctttgtatataaatatacgatattctatggaatacaatatacaatttgattcaccattcattacatggtatcagagccatacttagaattgtgattcgaaatttaaaattcaaaattagagttcgttaaaaaataagattagggtttgagtttagggtttcttttttagaaaccctagttagagtgcgagttctttctcatcacccacgtagacggattacccagccaccgatctgtaaaaccccaaagtttaacaatcagtatcatcgcacgtgggccccacgtgccgcttaactccgctgcccacgtgccgctgcatgagggtgcatctaacctcctttctggtgacggtcactgtctgtcaagctcccaaccttttcctgacctccttgtatcggtctctaccgattgttgtcattttgtggtttgatacttttgccttctttatgtttgggtgttcattctttggtgtttgcttttttccttttctctttcactttttcttgctttttagattatgacaaagataaaatttgattcgaaatcagtggttgtttctgatgtggttcccgtgatgtcttaaattacggaccataaattaattggtttgaattatttggaatagagtaagacaatttgactgtatctaaggagtattgacaaagatgatcacttgactgacgatccttccaaagaaaaagatgattaaaggaaaatatggctccgtgaggatgctcacttgctctttcaaattcaaaattctatcgataatgagataattagtttgattaatcattgtgaattggttaaaaaactaatagattacttggagtttttgtattctagcaaagactacatatctcacatatatgatgttttcaaagccttttatcatgcagagaaacaaggtaagtctcttatgagttacttcatgacatttgaaaaaaacatatgaagaacttaatgtgttatttccatttagtcctaatgtgaaagttcaatagcgccaacgagagcatatggctattatgagttttcttgcaggaatctcatcaagatttaactctacaaagtcacaagttctctctagttct

SEQ ID NO: 345029 - DNA, 763 bp, Cannabis indica
ggtctaggtctgatttggagtccgggtcctagttcggttacggttctgggtctaggtccaatttaagttatgattccatgtccaagtcctagttctagtcccggttgacatccagttttggttccaattttaagtcataaggtactggttcgagtccactttagggttttggactaggttcaggtccaggtgtgggttcgggtccttgtccgagttcggttccttatcaaggttcgggtcaagggatgggtcccaaatccagacacagactacgggttttgtccaagccctgtgtcgggatctagatccaaatctcgggtcccattctggttccatttctagtgccgagtcacgagctggttcctaggttcaagttcaggtcttggtcgggtactaggtctcggtcctagttctgtttcccaggtccatatcctgattctgggtccacgtccttgttattgtgtgggtttgggtccgctctatgttcgggtcgagtcctagtctcggttcgcgtttaggtctcagtctgggttttgatctaggttcaggtttgggtttaggtcctggtcctagtcctagtactagttcagttctcgttccatttgtgattctgagttcgagtttgggttttagttcgggtcagagttcgagtcctggtctaagtttgggttggggtccagatttcagtctaggtccaaataggctctgggtgtgggttcgcgtccttggtcctggtctaggttgggtccgagtcccaagttcc

SEQ ID NO: 345030 - DNA, 892 bp, Cannabis indica
caaatcggctgtgtccatctttttatggttttttggagttcatcttttcaatcatcccactcaacttagccaaatccccagagaactcatctttgaagattgccatctcattacgaatggatgcttgagaatctttaataaatgataaatttctgcaaatattctcaaacttctcctcaaaatcctacaaaagacaaaaaatattaaaaaagataatatgaaatgttagcaaaacaatttgtgaaaaaaaatgtttgaaaactggtttcttaccttctcatcatccacactcttaggaagatacacgggttgaaacttaaaattcttcaaaagacgattacgtctctcagcatcagtaagacgaaaatcatctacaatgacctgttaaaaaccagtttctatactataaaaaaagccaaataaaaaaaatctaatagtaaaaccaggtacaaagactattatacctcagggttattgaaaaccttttcgagtaaagtcacaaaaccaggaacatcgaaactttgccaattaagtattcggcgaaactcagaacctttcctcacacaatattcaggggacaagctaggaataatctcataaagccaaacatgaaagggaacaacaaatccaggaagtttgtacttcttgaacttcttaccctttgcttcaagttcatcaaatatagaattaccatccttaatagcaattgtcaaatagtagaatgtcctctcccaaagtatttttccaaatgcaaaaccatttagaacatctaaataatcatcaccattaacaagcccaaaaagaaaattatctacctttttgtcatgtgtaaatccaaacaagtagcaagagagtaaatacacaacacccatcttaactacatcatcatcat

SEQ ID NO: 345031 - DNA, 827 bp, Cannabis indica
gttatgaccagcggatcgacgtgagggtatctcacattcttctcatcttcctctgtaattgggggttcctcggttttcacctttttggaatgttctggggcaaagatcgactgcttgttctttatctccctcacatatcttttctggacgttattgctttcccctacaatatgtggtcatcccaaaataaccaggatgtcctctccttccacaggaataggctgtaacccctggttgtttcggttattaggctgacggggcttgttgtatccctggccctgtcttttcacatacagtttaaaattaatggcctcgagcgatgagactctctatctcatctttcaagtggcgtcgtttgtcggtcgtatgcccaataactttatggaatttacaatatttgttatgatctcttttgctcctcaaattcctcataggctcgggtttgccgaaggctaccttctgctcatgtgcgaggtaaatattttcccgagtttcattgagcttggtataaatagtatacacttgcacgtatttgtcatgcttctttggtttctttctatccttcgacggttccctaatttcatcctttcttttcggacgagaagcccctgacttattaattctcgtggaagcagtccatgtttaaacattactgggtttacctcttgagcttatttcaacaagctcatttccttttggggttcttccttccagacaaacacctcagccctctcgttgaactcagtgatgcttcctatcggacgtccttgtcaatcatcccataactcgcccccggttgttaatggatcagtggagatccccgcctg

SEQ ID NO: 345032 - DNA, 500 bp, Cannabis indica
ttttgttatcatagtatatatattttaattgtggtatataatttgattagtgtgtacatatatatatattagtgatatatattttttataagttttattgtatagtatagtatattattttattttagatcatgtttaatttttattttattatatataaaggtgatatataattttacaagtatggtatacttattttatagttgtatataattttattaatatagtatatatatatttttttaataatattatattattttattttattttttattgtaggtatatatgttttgtttgtatggtatataatttttgttgtctatagtatatcatttacttgagatgatatttagttttaactttattatgtataaattttttagtatgtatacatattttaatagttgtatatatagctttgttagcatgatatatatattttttagtattaatttagtattgttataatttctttgtgatatataattttattacta

SEQ ID NO: 345033 - DNA, 889 bp, Cannabis indica
tctgagcttcttggaataacttgtcattttggagaaggtgatcatttcacgttctgaagaggagtcatccatgcattgataaaattcctcgtcgcttcaaagcgagattgaattgatgccatctcgaacaggtcagttaactggttcatgatttgtgcagccgtgtcagtgttggcgaaccttgttttcaaggtgtcaaccatactggaaagcatgatgtatcgagctttgttgttggcattctgccaaagctcgtacttctcttttacagctttttttgcattatcacccagctactcaggagacggttcagttaacacaaacagggaattttcaccaatgagagcaatgttaatgttctctttccatttgggaaagttagatccattcagcttattatcattcaacagtgacaccatgggattggtcattgtcatgttggatactacaaataacaataaatagaaatcaagtaaggttcaaacacaaaatctcattcagaaattattagcacatagcaagtaggaatgacaagccaaaatactaaagcatacaatcctaaataatttccaaggtcttcaacaaactgatatcaatgtcccgtttaggcgagagtcaaagttaccatccattgaatacagttgtcagctcatctaaaatgataaacattctagcaaccttttattcgataagaatgagagttcatcgttgtcccgtttcggcgagagtcaaggctattctatcttatgagcttccactattgtttcatacttttgtaacccttattaaaagtttccaccattagggtgatccatactaaaataaacacttacaaaaagtacttatctttcgagattctacagcgtgaaattgctaatgaacgttcctc

SEQ ID NO: 345034 - DNA, 765 bp, Cannabis indica
gtaataaatagacgcaaatactcttattttttgcatttgtagagggaaatttgaatttccatacttaaaacaccttatattttttcccctaaatgcatagttattaaaattggtcatatatgaccactttactaattttccaaaactacccctcacatttgaaatcatctcagcctctctctcaattcaccaacactaacggcaacccacgaaatccccaactcgcagcagacgtcgaccggtctcaacccacgctcaacccacgactgtcgacgctcaacccacgaccgtcgacgctcaaccctcgaccgtcaacgctcaacccgcgaccacggtggtgacccgaagcgaacatgtccaaggtatgttgtgtttttttttttttgtttttttagaaagggttaaaagatttattttgtgtgggattgtttgtgaaacattatttgttagatttaagaatttttttgtgaaaataggattcggatccgtgaacggagaagagattgacatttcggatctggggaagaagatggtctgatggggccgatgggggggtccgaatatggggtctgacgggtctgatgggtgggtccgatggggccgatggggggggtccgatggggtccgacgagtgcgatgggaggggtggtccgatgggtccgatgcatgtgcgggttgggaaaaaatggggttgagttatgtgagggttatttttgagttttttaaaagtgtcatatattttttagtttgaaatgtattggttta

SEQ ID NO: 345035 - DNA, 500 bp, Cannabis indica
gaagatcgatcttggaaaagaccgtcttccctttcaattgatcaaatagatcatcaatccaaggtaaatgatacttgttcttaatagtgagcttgttcaactctcggtagtcaatacacattcgcagggttccgtctttcttcttcaaaaacaaaaccggagcaccccaaggtgagtagctcggtctgatgaatcccagattcagtaactcttgtaattgtatcttcaattccttcaactcagctagagccattcggtacggtgccttagacactggatccactccccgacccaattctataacaaattcaattaccccgacaggtggcaatcttggcaaatcttctagaaagacatcaagaaactcgcataccaatctcgtactttcaggccctgatgtcataggttggctggtgtccacttcaataactatgaaccccagacaacctctacccatcaagtccatagcttttgacagtgatattctcggtatgcgtgtc

SEQ ID NO: 345036 - DNA, 594 bp, Cannabis indica
gcaagaggcagaaaaggagacccttggattccgagagacaaggggcactaaaacaggaagtggacaagttattagtcaatgactttatacatgaggtcttttatcccttgttgatagccaattcggatctcgtcccaaagtctaatggaacttggagaacttgtattaatttttctgatctgaataaggcgtgcccaaaagattgtttcccactacccatgatcgactagttagtggatgcaactgctaggcacgagcttatgtcatttatggatgcatattctggatataactagataaaaatgcatgtcccggatcaggaacataagagctttgtaaccaacatggggcagaatctagatatccccttgtttactgtgtgcaactatagtgcgagaagaaggtaagcaccagcaacctgtttactatgtaagtaaaaggctactaggggcaaaatctagatatccccctcttgaaaaactcattttgtacctagttcacgcatctcgcaagctacgaccgtactgccaggcacaccccataaaagtgttaaccgataagcccttgagacaggttttatcaaaaccagatgct

SEQ ID NO: 345037 - DNA, 899 bp, Cannabis indica
tatttatttttttaaataattattttattattattttgtatcttgaacctaacccaactatagttacgggagggcatacctatgtttaagggattttaaatcctagatgaatatctatataaggggggtgaaatcacttgtaaagggaccctgaaattgatactcacgagatcatactcttgagctccctctctcaaattctaaaaactcacttgaggagtgaactcttggagaacataactctagagaactctcctcaagcattgagatcaataacactccaagtggactagcctattaccgctgaaagggggtgaaccactataaaattcttgtgtttgtttttggtgaatttctttttgcaaaccgatttactttgattaactattgcttgtgttcatcttgctcgttttacgatcttcttagatccgttgacgaaaaaccgcgtcaacagtttggtgctttcattgagagcagtgaacacaattgttaatcaccctttaccatcatggtgagtacaagacggacgaactatgaggaggaggaccttgaacgaaggaaacaccatggaacaccatgaagagtaccaacccgttgagcccgctggcgaagggacttctcgacgtccaggcaaacaagctatgcctgacgatgaaggtcgggtccaagatccaggaagctcatcatcaccatcccatggtgtacgacgaactaccaatgtccatgaggtgtacatggagaacgagacattgcaccagcgtttagatgaaactctcagactcaacagagagtggcaagagaggtatggagcccaggaggccacaaggccacaaagaagaggaacccgcgggcgtcctggtacagcaagaaggggacgaccccgtgggagtcgttcaaca

SEQ ID NO: 345038 - DNA, 592 bp, Cannabis indica
tttttttaatgtgtactgtgtgtatatatctataaattgatttgtttacctcataatttttctgtcactgttgaaacttaagtgaatgttccatgtgcttcgttgtcgtttgtctaaacccatttttgtaccaaactaaaaagactctccatcattatagtgatgggcaatgttcttgtggcaagtattgctgaatttatcgacccagctatgttggatgtcatcattgtgtaccttctggtcgagcaatggcatctactccaatatttgtatcctattctctgaagatatgtcgagttctgacatgtatccttcaaatgatttcgtgttgtatgtcttggcagctttgacaaagtttaatataagatcttctctgtgtgctccaaaattgaccttaatgttgttaagcaagtggaatatgcatgctccatgggatatgtttgggtagacagttgctactgctttctctatgcatttgtgccggtctgatgaaatgattgtcatgcctgcgagtcaaagtatatcgaatgtcagtgtatgtctgttttaactggttttatttgttttttttttttgaaaccggttatttatg

SEQ ID NO: 345039 - DNA, 556 bp, Cannabis indica
accaagggacaatttcaagtctggaaaaatcttactagctgtataatgagaagggtgggatcgtaaagcaaaaatcatacaagattgatgataagatcgtcttctttttttgtgaaatttccatgttggaggtcaagtctgaggtaattaatccaacgaagcctacaactcttgccacaccttcggtagtgagcaccaacaaccatggttgcgagcccttatatatgcaataagtcgatcatcttcttctatagtccaagcccctttgtttgtattgagcaggaaaagaagaattatagatctgaaataactagttttcttttctttctttttttttaaataaaaataaaaataaaaaataaataaaaaaaatttctcttatattcttttcttctttattttttgctttttagtaagagcgataagaaatttggtggccttattttttgtggggatattggcgactaaactacctgaactttacggtttgtaacacttaaccacaaaaaccaaatttttggcgactaaactacctaaaccctggttccgttttgct

SEQ ID NO: 345040 - DNA, 537 bp, Cannabis indica
gtgtccactgttgatgattaaaagcaggtgttgcaggttgctggacattttgttgattgccatagcgaagatttggatgatcacaccatccgtcattatatgtgttcgaatatggattatactgctgccttagttcacctgggaaacctccaatagcattaatatctttttttggcccttcatagagagtaggacaagtatcagtagtatgccccacaacttgacatattccacatggctttatctgttggcctaaagcaagttattggatcacggaggttaattgagctatttgttgactaagctggttctgaatgggtttgctcacttaattaacctggcgtgatgttgagggagagtctcggcgagtgccaaactgttgtgaattggtagccatgtttgagataagatttctggcttctgttggggttctgtctaccaatgctcctccacttgctgcatctatcatacttctctcaaaaggtaagagaccttcataaaagtatttaattaagagttgttcactgatttggtggt

SEQ ID NO: 345041 - DNA, 580 bp, Cannabis indica
aggatagccgaggcattgaaggtgaaaaatcttatttgccatactgattcgcagctgattgtgaaccaggttctcagggaatacaatgccaaaggcttgaagatggaaaagtatttagagaaggtttgtaagaacttggaaagtttagattactttaaaatagagcaaattccaagagaaaaaaactccaacgcaaatgccctggcaaaacttgcctcgcagaatgactgggatgaattgaatttagttctggtagagatgctaagcgagccaactatatgtgaaacggaagacgtagagatgatagacagctctcctacatggatgactcctataatcaactatctactcgacggacaacttccaactgacaaaaataaggcgcgaaaactcttgtattcggtgcctcgctacacgataattgaaggcaaactatataaaagaggttattcaatgcctctacttcggtgtgttctccctacagaagcaaacgaaatcataagagaaatgcatattgaaggattttgtggagatcatgcaggttaacaaagcctatctaaaaagtgttgggttttgtgcc

SEQ ID NO: 345042 - DNA, 932 bp, Cannabis indica
atttttatttattattttttatataatcttattaaaaaaattaacaataataaaagttataaagagtatatttatatacaaattgataatatattttataaaaagaaaaatacgtcctatatcatttttttaatttaggaaaattatttcatattttaaatattttgatatacattaggattcatcttttttttaaaaaaaaaaataagaaaaatacttcatatttttatttgggggaattaatacttcatattttaaatatttttatatatattagtattcatatatataaaagaacaattttaaaatgtaaaagtttgtgtgagactgccagtagcattagaaatcaattgcaagttaagtgaaaaccacattttcattgtgttttccttgccattaaactaaagcccaacacttttacttagccatattaaaatattaaaaacctaaccaaacacagtaaactttcagattctcatttccacttctcccaatactgcataccaaacaaccctttggtgtggaaaaatggcagaagaatggcttgcatcgataattttaggaaaacaaaaactgaccttattaagttatatatatgtccttgaacttttcctaagtttaattaattttcaaaggcaaatttttcataaattgtaatttcatgtctggagaaaaagtataaaatgaaaatattttttaagttttcttttcattttaatgatgattcaattttaatctttggatttgatgtaaaaattaatattaaaattaagaaactgctataagtagtattaattatgtggatgtccaaatcttttatttattaccattaatgtaatcaacattctctttttcttagtttctctttctcttaatttcttaatatttgactcttgtatgtgtataaataggagatcacctattggaataaa

SEQ ID NO: 345043 - DNA, 449 bp, Cannabis indica
aattataagtcccctcccccaaacttagaatatacattgtccccaatgtgtcatgcaaaacaaggaaatggagacttacctgcacccccatcagaaggggttgaacctcaatactgcttcaaattggatcaagtccaccccttgcatccaaaagagccctcgtaccgaatgaagaaaattgacctccaatattgttaatttcagagttttgcacaagagtaagttcaccttcagaactaccacacatcaatcttttccaacgacgcctaatcgttcgaagtcgctctttaggctttactctcttcttatcagctttaacaaaagaacccttcaccatctcaatcttgcaacaggtaggaatgtcggttggggcaaaaacattaaaattgacctcttcatcttgcactcgcaactttaactcccccttttgaacatctattaaatgctcg

SEQ ID NO: 345044 - DNA, 519 bp, Cannabis indica
ttttggtgattttgaagttaattttaactgaaataatctatgtgtgctttaaaatataactaatttaaaagttttaaaaaaatggcaatttattatacacctgtgtaggcccatttgataaatataaattggtcatttcatataaaacaagctagcccgtttaagtccgatacgtgtccaatccaatacgaataatttgtgcttatgggccaggctagacttactttaaaaagggaaacttacaaaaatactgattttttaccaaatgttttcaaaaatactgggacacggcaaactttacatttttactgtccaagcccatttttatttcttttatactgcccaggcccaatatatttacttttatactgtaaacaataacaaaacacaaacagcacctctccttcgtggttggggacggacaaatcaacaccggaatcatagaaacaccaggaaaaaatcataaaatccgacaaagagaaaaaattaataaatcaacaacaaattactattttgtag

SEQ ID NO: 345045 - DNA, 708 bp, Cannabis indica
atcatctggttgtccacgtattttggacaaaatcaggggcaacacctttcaacaccattcctaattttgcagccatatgtgacaaaaaatctcacaactaaaaactttataagatgagaatcagaaatcttaatgatctccaaatttttttgttttctgatttctgataagtgagcatatagtatttttttctcctttaattccttatagcccatttgactgcatatcgaaagttctttatatggttacttaaatatctatccaatattcttaatatgtatattaagtacaaatacatacatgcttgagtatatattagattccaatataaattaagaatcttttatatttcttgaattctaaggtttcttttaggacaataacttagacaatttattttgtttagctacaagccttttacctggtatagtatctttcatgccaaaagttttgaatactttattgatatacctcttttgttataattcaagaatatctcaagaacaatctcaacatatcttgaattcttaatacaaaattggtatatcatcaatggcaagtaatttgtcaccaatatataataccaagatcatattcttactcccactgaacttgtgatgtatacacaatcatcaaaaacttctatctcaaaaccaaatgagaatacttaataaaaattgtgttattattgacgagaagcttacttga

SEQ ID NO: 345046 - DNA, 526 bp, Cannabis indica
ttatgtgttaaaaaatattttgttcatctaaagtgccaaatgggggagattgtaaagtccttttttggcaagttagatgacaatatttttttttatagtaagattgaattgcattcatacccgattgtcttactttgtatattcagttttagttgctattttctatgttgtgaaagatgcattttacagcttaacttttctttgtttggaaacttcttgtaagagaagcatttctctaatggaaagtggtttttaggaaaactttgattattgtcttatccttattgaattcaattgtatcttgatacaatcagaatatataatccgtttatggtaggaatcaagacttaatagaggatcggactcgattatagcaaatttcctttttctggtcaaatttgctaagtctgcttccgattctgatgctgcacatcgtgtttatcttaggaaagtcttgtacagctgtagattcgatcttgtggctatctctagggtttctatgatctataaatagagcctagagagc

SEQ ID NO: 345047 - DNA, 861 bp, Cannabis indica
ctcgttttagtaccacggtattagaatgggggaacatttacgaaaatactaccaataaagtaccaagtcagatgaccaatttaagtactgaatgaacatttgcttttaagtgaatggccttcttggcagactacgctcaaaggattcactaaaagaaacaaagtactcaggtcaggtgaccaccatttaaagtacagtttcttatgtctacaatttgttttatctcatgataagctaaatgatcagattggatcaaatagctctgacgtaagttactacggtaacaaatacacttttcgatcaataaatgaataaagatagttatttcaaaattcagattgagtcgaaattatcatcatgtttctaatttaccatacagtgcgtaaaaaaggtttggtcaaacccaaaacaccgaacagataaacaatatatttgtaaaagacaagtgaccaagagtcatacgtctgctcggtcacttggggggcacctatacctgtacaaagcatttggtaaaaataaaagaatcacaattgcacgacaattataaatagagaatgaaattcattaaggacaacaaaagcacgtaataccaggatcaaaagctgcccggtcatcctattgtctgaaaagtgaaaaataattccaagtttaaagaccccttagccggtcatcatgtcttaaaaaaggccttggggccgaataagatacataaaaaataacgagatgtaaggagaagtgtttaaacagctggagtcccaggctcttggttcggttcttctgcgccaattagagttagaggatttgttgtttgaacgggaggtacatcagcagtctggtcggaggatgaagcagccgcctcag

SEQ ID NO: 345048 - DNA, 389 bp, Cannabis indica
gttttcaactcattctatctcaactttgaattaatatttaatttgcagttggttatatatcattttgaactacatcgttcttatatactttgtgcaaggattatttttcaaaaatcatcatcgatcccaactgcttctctccccctgatcgagagaatttttaaaaattgtgatatctaataatattaatacacctgtagggatttcaatatatcacaatgaatcaatatttatttaaactcatatatattatatgacattgaacttcaggttcaataacttcagtttcaagttcaatacttatgaacttaattcatttctaagaatgagtaatacgtgtataattacaaggctaattaggatttttaccccctgaactttgacatgta

SEQ ID NO: 345049 - DNA, 449 bp, Cannabis indica
aatcatacatatatacccatcaagttattttaaagggtttacactttataattacttgtttgaaagaaatgattatttaattcacaactggaattcaaaatatttcatcagtaatgtgattttacaatcattaatctcaaaagaacttccccagttcaattacttattttatcaatcttccaggagcatctggttttgataaaacgagttttgatgtccaaggtcaacccccaacatactcccacaattgtttcaatatccagactcaatccctgacatataccggggtcccaagtaaagtaatcctggttttagttgtttgtcttcaactactactggttgacatccagctttccttggggcaacttgatatggcaaccgtagtgggccgatatctactcacgtcgcaattctttttacacaatagctttactggagtaactgccctt

SEQ ID NO: 345050 - DNA, 1113 bp, Cannabis indica
aagccctcgaactcatggctgatcagctaccaacttaccctttcctacacaataaagcacccatgagccaaggcccaacaagacagtataaacaacaatatgaataccaattataattatttaagtgttgatgccactgcatctatagtctatttaacatagacctacatgttacactcacacgtctatttatagcaaactggaggtgattgttgccaggggttcagcttctacccacttggtgaagtagtctactgtgactacagcgaactgtacccctccttttccctttgggagttgaacaatcaggtctatcctccatattgcgaagggcctaggagactgcatcatcgtgagctcattgggtataactattggaatttttgagaatctctggcattgtcacatattttgacgtaatccattgagtcttcaatcattgttggccaaaagtacccctatcaaagtatcttttaagataggctttgcccctagcatggttcccgcataagccctcatgcactactatcatcagtcgctcgacctcagccttggtgacacaccataagagtggcatagataagctccatctataattactctatctaggattagatacctaacaacctttcttcttatcttttttgcttcattgttactttcaggcaatgctctagtttgaaggtaagctacaataggtatcatccatgttggactgctatccaacatgtcgacttctttagcaatagtaatgctttgttcctttaggaactgtattgccaccaaggtttccttgccgataatggagctcttgccaaacaggaaagtgcaactactatagcattctattctctagggattttgcctgattgtgtagcctttgagctgacttagcaagtcttggatcttgctcaagcaggccaccattttttcacctcaagatatgtattcacctaggacttgattcatgactaattaagagtcacagaatatgtcctggtggtcaacccgtacttcatgtgccagcttgagactagctattagggcttcatattcaaccttgtagtttgaggatttgaagccggatttgattggtctttgtagtcgttacca

SEQ ID NO: 345051 - DNA, 639 bp, Cannabis indica
atagaccactggaaagctgcaaagaaagtaatgaggtatcttcagggtactaaggattacaaactgatgttcaaacgaactgacaatctagaagtagttggctactcagactcagatttcgctggttgtactgattcacgtaaatctacatctggttacgtgtttatgtttgctggtggagctgtgtcctggaggagtaacaaacaaactttgactgctacttctactatggaggctgagttcgtttcttgttttgaggctacatcacatggtgtatggctaaagagtttcatttcaggccttagagtggttgattccattgcaaggccgctaaagatgttctgtgacaattcagctgctgttttcatggctaagaacaacaaaagtggaagtcgaagcaagcacatcgacattaagtacttagctattagagaacgtgttaaggaaaataaagtggtcattcaacacattagcactgaattgatgattgccgatcctatgacaaaaggcttgccacctcataaattcaaggatcatgtagagaacatgggacttggttcccttatgtaatttgtacaaataaagttattattaatgaaactcttattttgatttttctcatatttatgcgcatcttaa

SEQ ID NO: 345052 - DNA, 860 bp, Cannabis indica
ttcaattcgtcaagctgggcctatacgatgggcttacctatttggcattatggttgacttggattacgtcagcgtctttctgagcggggatttgagtatgggctccaggctgcacgatcgttgttatattctactggtctgttccccttcttctgtttagatcgttccttagatcatgggttgatcccaacctttcgaacacagaagagcctagttgccttagcgattgattcgcttggttgacaggtggaatagcgccattaccctggttggaaccgtcaggtatgactcctcctgatgaattaccgaacaaggtctgctcgcctaccgcttggcccacgagcggaactcgtaaccggggattgggcggctgaccattagttgtctgggaagtgttcatcgttgggtcatcctctgtttctcccaggggaatgtcgttcggcgattactaacctacagtttggtaggctcttcgtatcagcacggtggcttgtcgactacgatcttcgatctctgcatggtgagcccttaatgcctccatctctttatctctccattcagcgaacagacgcctttgttcgtcaaacgcgagatttactgcagcgcgcagttcatcctgatcatgatgcagagtgttgttatgaccctgcatgagtttgactgcatcacggagattttgtaatttggttgcatctccgatggtcgtctgggcgttggttccaggcggaacagtcttattatggattccctggttgtgtgcggaactgttattccagtctcttgcacaccaggcgcaattccagtaacagcagctatttcaccattcaccacgcttctcgtctgttcgggattaacagcag

SEQ ID NO: 345053 - DNA, 1869 bp, Cannabis indica
agtcaacatcatttgaatgtgagcttctatctgagagagctgactcgatagagcagtgaatctcatcaaaagatgtctgaagctgattagtgaaggtaccaagagtatgccttcttatagcgagatggatgtctcgctattcgttgttcaaattcgttcagttgttatgcttagtttgtataatgtatattatacgctaagtcttttaacagtcaacatgcttcttttacttctcttcatatgaaatgaggttgatacctcgctttgtacttctgacgttaaatggtttcttgtgaacgcgcgagacaatagtttgtatatgcttatctcgcttaagactttacagtcaacaagttgtaaatgtactctatcagctccgcatttaatgagttattccattttaatatcttcttatataattatcattatatttgttgattcgtattctcccaaattgacacgtgtccttttctaaagtgtcagccgaattttgggtataacaattgtcccttaaaaagttctttttatgaaaagttctttttaaatgattacagagggtatatttgtcataatcccttttgaaaaaaatacatgtcctctaattttggcagttttgtggtttcgaggtgtattagcaattaatgaccgtcttttctacttctctttcaaattctacctgtaggattaattatcttcatgatctaatggagattaacctaggagtataaaataggaaaagaaccacctttgcattactctttctctttcagaaactctagaaattttttcaagcttttctgtcaaaaaaccattcccaaatttgctcaaaaccttgcatgccatctttatcattaacatttttcctacgagtttcatatgatttaattttcaacttcaaacattcggagggatcttcacaccgttcgttgattcgcagattgcaaagctgttcatcatcccacaaaccaactccaaatagtaagtgacttttcttctcattttcttacatgcttttgatgttgtgtttctggatatcctcttacttttccttctaacttttcagacttacttacacattctttatttgtcttcaacaaacttttctttccttcgtcgcccaacagcatggtatggaaaaactgaaatgcttggaaggcgatgttcataactgggcaagttagcgcgagactatgaccaaaaaatggcacgatgcgaagttggagaacactcgcctaactaaggatgccaagaaggtgaagaagaatcttgaggctaagcttgcagctgtcgagaaggaggcaaaggaaaagaccgaagaatgcgagaagctcaaaggggaacttgtggcaaccaaggtgactcttgatgggaaagaggtcgaaaccaaagaaccgttgttggcctccgccatttaccaagcttggatggcaaatctgaatatggatacaaatttcttggaagaatctgaggaggaaattcctgctttctacgagaagaccaaaaaggaggaagaagacgaggaggcagccaaagaagcagaactatccaagtctcctactatgtaggcttggtttttatttttattttatctaggttgatggccctaaggccaagacaatggtttgccccttgtggcactttttgtaaagaaaaatttgcaaggttggatggccaactttacttttattttatctttattaaatgctctgtatttctatatttgaacttaatatatatatatatatatatatgtttgcttgcatttttattcacgatttaaacaattatattttgatcaaatgcaaaatactttaggcctttccattgctcatattttcctcccataatatttaagtagttagtaatcta

SEQ ID NO: 345054 - DNA, 1247 bp, Cannabis indica
aaatcatgattaattaaaattttgcttatttaattaaaaacataaagtaacatacatataaaattttggcatcccgtttacaaaaacttttaaaaaagtttaaatatacatatataatagtctgtcgcttagcgactaaacaacaaaaatcctgatgtctcaaggatcgtacgctccaggcctaaccaccccgacatgtacaatcttcatcagctcgctctcacgactgctcagccttagccttgcctttacctacacatggaggtaactgtgagtcaacagactttgtaagaaaagcataacataaaacatactactatcctagattataatcaggcacccatacacccaaccataaccccattcccgtgtcccacacggtactgagtctagaatgttcatacgataatactatcgaccataatattagcctatactcaatatgctagtcatactccagccatattaatgtgataacatcgatcagtatttcagccaatatacatttatcagtatccagtacaactctatgtatactgatactcctatcaatgtactctaacaggcataaacaacatgtatgctaaacatgtaaatacatacgcataacattatactaatcttactttgtttctgaagttaggtctatcgaccaacctgagtggaacaactgctcggcgaattacgggcccttaaattacatcgttcacaacatggataattgacactctaacaggcataaacaacatgtatgctaaacatgtaaatacatacgcataacattatactaatcttaccttgtttctgaatttaggtctatcgaccaacctgagtggaacaactgctcggcgaatgacgggcccttaaattacatcgttcacaacatggataagtgacacgctaaatcacaaccggagacttaggttttaaacaaacaatctacctactgaaagttaacatgccaataccctaaactaatagggaattaaccaaccaaagctctaaaactaacacgaatcgacaacacaaaaaatccgggagacccagcacagatctggttaaccggttttacaggacctgtaaaaaccgattaatcggtttacactagaaaaccccaaaaattcaaaactctaaccaaatcaacaccaaagcttaccaaaccttccaaacctacatattataccccaataaacatattccaagcaataaaataactaaccaagctcagaatcaaaaatcaccattaa

SEQ ID NO: 345055 - DNA, 351 bp, Cannabis indica
ttacaaaacgccaactaagtttatgtttttgaagagaatcaagagagatcgttttggaaaagaagtttggttgaaaaaattaggcaatttttatggtaatttgatttatatatgttctggttatctaatattttaaatagtaattattttatgatcctatattttcaaatattattttattatgtcatataaaagtaaattctaatttatttttctacatttatgaaaattctttcttttacagatatcatttagagaggtgacagtgagggaagcccattttaagttgtaattgtaatgagcccaaattaatggcttaagtgtagaattattcaacaatttttttttttt

SEQ ID NO: 345056 - DNA, 1244 bp, Cannabis indica
aaaaccaagatttaataaatcaatataattcaattaatcaatccacaagaagacaaaatactagaaggtaaaaagaccaaaatgcccttgccctcacaaaacttatttaaagaattctaagggtattttggaaaattataaattcccgacatttccaatgtctaaataaccgtcccacaatactaacatgctaagttgtgattttactgagccaaacaccgagttccatattgccgggcaccggaaatgcaaaatatgaaattcactatatgacataaaaatgcattcggaattctaaaataacagcataaataattatttaaatatctataaataattttcataattaatcataattaactgctaatttccaaattaaactaagcggtctttacagatgtactatcaaactgtattattatattgtataaatgatgttgtacattacatttttatgtaaattattctcagtggtattaatttatacatgcataacttatgtatacaatattttaatacaagttaatagcattatataagagaaatttacaaaaatattgacttttcgcccaatctttacaaaaataatgccacacggcagaaattacttttatactgtcttgaccaatttttttttttcttttatactgtaattacttaaaaaaaaataaggcctccatcttacccacggacagaaccaccacaagaacaccaaaacaatcggaaaacaaccattaattctgatgagattgagaaaaaaatgtgaaatcaacgtcaaataaataatcatgacaaaacaactgtaaatgtaaagaccgcctatgttgatatattggattatcagataattagggttcactcatgagatttaattgttatttataatatatatatatatatattgtggatatttatttaagttagatataaattaattatgctatatatatgtgaatttttcgttttttaaaattgtgctcggtagctgtaacgccctaaataattagtcacgctacccaaaacacttatgaagccctaatcccctaaccgggattactaataaaattagagaagaatttaaactttaataacaataggaatggaaataaacttgtaatactttaaactttataaactaaaagttacagtagttgggacccaaaaacatttacaaaaatattacaacaactcctttctttcagccggcctaagcggcaaaacagagtctcaaaaacacaacactg

SEQ ID NO: 345057 - DNA, 493 bp, Cannabis indica
aaactttaacgagtgaattaaaaaaactaataatgtagcaccctactagttaaggcgtgctaccgtaattttttaatatgtgcactcatttactaatccaagggtttatggaaaaaaaatgtgaataatttaaatttttattataattaaactttaaacttgaatatatataaattctttacataattcaggatcctattttaaaattatagccacttaacaaaatagttaattacaaaaattgttgcctagtattgtgatattttgcacacgcaagtgcacgtattgtttacaagtagtagactcaccaagagtgaggtcaatcccacgaggattgtagttaagtacgttaaattgaactttacttctatttggttaaataaaaattaagaataggtcaaaactagaaatataataaaaacagtgataggagaaacaatttaaggaaataaacaaattaacagttaataaaaactagggcttcgattttaat

SEQ ID NO: 345058 - DNA, 827 bp, Cannabis indica
aagtgaggcccaaatccatattcctagggccggccacttttgtagggtttttcatctgatattttcattattttaatgccaaataattcaaacctaacccagtcccgccatctgggcgagttggaatgctatgttcctgcctcaaaccaccgagcgacaaacccgaagaaggggatgtgtgcctagtcgggtgctcattccaaacaaggggcaatgttgcctttgcacccgtactttaggaaggtggcagacttcttccgtctctgtccgactcaatttactcccaagggcatcaagtatttgtctgccctgttcgtcctctacaccacccagaaatgggatatgccttcttcgcatgaggttagctggttttttgacttgaagtctactcccaagcaaggcaggtcgggcacaggggacaaggccgtgagcaaaatgaggaattttgttgatgagtattacatggtggaaggcatgggcaccacctatactcggtttcagcagatccctatatattaccgtccacccttcacgctagcttttagggatagagctcaaggatcactcagctgccggatgatgctcggaatattactttgttgacctcggaggccaactttgtggagtacgggctttatccgaaggatttcattccccagcctgtgaaggagaagaagaggaaatccagtgctggttgggctgagaaagctcatcaggagaatgaacccattcaattgaagcgtgaagctaagttgaagggaggtgcggaagccaagcagtatgcttaggagcatttgagccggaagatgaggttgaggaagagcagg

SEQ ID NO: 345059 - DNA, 1141 bp, Cannabis indica
atatatatatttatataagaagagctagaaagttgactatacatgaatatgtgtaattttatataattttgactgtaaaatttcacatggccaattcttattggtagtcacaattctgaaaaattaattcatgatattacagtgtgcacatgtaatgtgatcatatgcatggaatctgattaaatattcttctgtgattaattaaaattaatattttgattattactatctgtaattatttacataattaaatatacatgtgtatccatgcattgctttccctaccttagttattgagaaagctttgcattgattgattatgttcaaattagaatagagagaaagaaacctataaatgatcgaaaggactaaaattattttgaccatggagtgttctaattaattatatttaaggttaattagaatttttgtcccctgaactttgacatgtaccaaatcatgtctcttgaacttttaaggccattgaaaatgtctcctgaactattgagatagttggatttaaggatttttgtctaattttattcaattttactatcttaatgattgtttatgtactaaaccatgttccctagactttgatatctaccaaatcatgcccttcgaactttgacatacactaaattatgccccctgaactttcatccatgttaaacttttttaactaaaattaaaaaaaaaaaacgttacttaaacttaataagtttaattagtaaaaaatgaaagctttatcaatttgtcaatatatattaggttaatattacgtgaaatacatgtattatatttttaatttttattttaattatataggtggcgtttggtaacacctttttaatcggttttttatttttaaaagtgaaaaagtgaaaatatttttcaaaaacatgttctataaaactgtttttacttttcaattttataaatagaaatcaaaattttaaaaacaaaaaaaaaatacactttcaacatatttttaaacagtttttttttccttaatcaatcatttggattacaaccagactcggacccaaatcccctcctcacggccttggcgctgaacccggcttctgacccgaacccgaatccaaccccggatcttgacccgacttaaataaaacaaaaa

SEQ ID NO: 345060 - DNA, 545 bp, Cannabis indica
gtgaaaatacaaaaataaacacatctaaaaaatttctaagattttcaactagataatatacagtgtcccggtaggcaagagtaaaagatatcatcagttgaatagagtagtcagctcatctaaaatagacaccattttaacaaccttttattcgatcaaaataagaatctaacgttgtcccagtagacaagagtcaatgctattcttattttatgagctttttaccattgttttatactttataaatttatgtgtaagtagtcactgtagggatgagcctaatagaaaagaaaatttacaaagtacttatctttcgagatcttacaatgttaaatgttcaatggataaccatccataagggggaagaaatcaagcgtctcgaggtcccattaaaacaataattatataagaccaacaatggagatcgaatatcttaaatttaaagctcattattttaaaagaaattgtattttcattttgatatccatttaaatctatttatttcaatatttatatatttacttaattaaaattactaatgtaga

SEQ ID NO: 345061 - DNA, 871 bp, Cannabis indica
attaaataattctctaattatttatttattatttaaattaaattgaaaatgttttttttttaaaaaaaaactattacttcactaaatttttaattacatgtttcaattttaattttatgttttaccttatttatttacttttatcaacaattaacttatcaattttatttcatttaaacaattaattaattctatattttctctactaaaatttctgcagcataacggcttaaaaattgtaaacccaaaatttccaaaacctataaataacacaaacaaatatttcacgacaatatataaacaaaacaataatccacccatccaccaacagtcaattttatcacagaacctacttcactaacatgcatagacatattaactaataacacatactactacctactaagcgaaagcaaaaaaatatacctgaatcgagtgcaaaaataacaacagcaggcagctagcggtaatccggagcggtcgaacagggacctaattccataaattaaaaagtaaaaccaaattaaaaatttaatacctaaatacatatcaacacatacacacatatatacgtatatacactcacatacacatatctattcacctacacccacttacacacatacacacacatacacatagactcacatacacttatacacacacatacatacatatatacatatatatatatatatttacatacatacatacacacatacacacatatatacatacatatttacatacatacatacattcatatatacatacatacacatatacacatatatacatacatacacatacatatttacatacatatattcatgcatacatacatacaaacatacatacataaatacataca

SEQ ID NO: 345062 - DNA, 681 bp, Cannabis indica
ttttatgtattgtacgtgtttgtggtaaaatcttgaatttggtttattttgaagaactaaagtcactttcctttttaattaattttggaagcaaaacttaagtaaataatttcgacataacaactaagttgaaaatgaaaatagacttgttatattaaactactataataacatttacattgacgtaatagtaaattcaaaatagaacaaagttgttaaatatcaaaaaatgacataacaaaaagttgtccaacagccacatgatatgagttctaaaataatacaatatatataaaataccactaaatgaaactcaacggatgttcaatcaagttgtataacttgagggatcttccgttgacttggagggctaacgtctcggtacgaggacttgggttgcgaaggacttccccttggattgtttgatgattcttcctttggatagattgggtaatggggtatggagacctcggtgtagtcgagaatgtcgtccatgatattttccaatttttctcttgaagtgttggcatattgcaatgcttgggcgaaatggtagagatgctcctgcttagcctctgttgctctaacatgtgccttccttatgagtttttcgtgctcatgcagaacaccctcgagcctagcacagttcacacatcctgaaattgaagctgaacggagtct

SEQ ID NO: 345063 - DNA, 1248 bp, Cannabis indica
aagataattagcttaatttaattaagattattttaaccaataattaaaccaaattaattatgggcctttatatgcaaccctacacgtatggattggtcctacacgtgtgagccatatttttaagtccaaaattgatttctcaattttataaataagatttattatttattctgccaataaatataattgattaattctcattaatctcttatttcacaatgattaaaacaaatattattttttctaaaataatatatttctttctttaatattatttaagaataatatatatttaactaattaatataattttatccaacaaaataaaatagttaaatactattaattatataattcataaattgacataattaatcaaatcaataatttcacaaattactacattgcccttaaatatttattttccatagaaattaattctcactcgaaagtaattcatcaaattaaacattcttctgtacaatgttgtatagaagtgactcagggaccatggacctatatttcgaagctccaataaacacttgataattattgatctcatcaatagaataatccaatttattaattccactattactctactataattatagaattgcactctttgacaatctagaattatatttacagaattcttacttgtagtccattgatataatcaatataagtagtttgccctccaattattagttcataattagagttggtcaaaatgacattttacccttccaattatctctttattccttatgtaccattaatccaatgtgaacagttaatctataatttattatagatttttgtatccaactgttagcactcccagaattaacactataagaaaactaatattcaatccattagggaagcttaaattctactattgtatagcatattctcagtcactcatgttattaagttcacaaaacagaagttgtaagaatcatcttctctgaaaaacttaaacaagtgaatcaaagaacccaatgaacacaaatatgagttcatgtatactcaagattcagtctgatctactaatgatcattattgtgatatgaataactctttcatggtaaatgatacatcaattaaagatatttattacatatcggtctagtcatgcatattcaaattatacacaacacctttactacatgtctatccccatatatgattagaattaaaatcacacacactagaagtatatattgtatagtaaatcgtact

SEQ ID NO: 345064 - DNA, 1031 bp, Cannabis indica
ttcaaggttattctaccacatgtcattttcagaactcaaagtgctttcttaccaaaccggttaatcacggataatgttcttgtggggtttgaacttgtccactctttgaagcatacgaagtcggaaaggatatgctgcacttaaactggatatgagtaaaacatttgatagggttgaatggtctttcattgcaacagtcatggggaaaatagggtttaatgtttggtggatctctctcataatgacttgccttcatacaacccaattttcttttctcataaatggggttgtatcaggtttagtcactcctcaacggggtctacgtcaaggcgacccattattcccatatttgtttcttatctgttcagaagccttatctcgattattgagatttgaagaatccattggtcgacttaaaggattatcagtatctcatcatgccccagttgtcactcacttattcttcgcgaatgatagtcttttatttttccaagcggatggttggtcttgtggtgccttaaagcgtgctttggatatatatcatagggcttcaagacaacaactcaatacagataaatctgtcatgtcattctccacgaataccacagaagcatcaaatcaatcctttcaacgaatcttgggtatgcccatttgtgaatgccatgagaagtatttgggtctccctgcttactccgaatgagataagaaatatttattcaacaacattaaggatcgaatctggaagcttctccattcatggactaacaagcttttctccattggtggtaaggaggtattgttgaaagcagttgttcaatcaatacccacttatgctatgagctgttttaagttaccatccaagttttgtaaggaaattgagtcaatgatggccaatttctggtggggaacaacaactgataagaagaaaactcattggaagaaatggaaatacctttgcaagtccaaactagaagggggcataggatttagggactttgttcattttaaccaagcacttttagcgaaacaag

SEQ ID NO: 345065 - DNA, 577 bp, Cannabis indica
gtaatggattttgtttgttgagcactaggtgagtttttaaggtaatttccatgtttaaattcaagtcttgcttgatattttgttgctgaaaaaaaaaagaggttaaagctagcttgaagtttaagttcttgaatatgagttcttggtgattttgctcaagttggagctttgaattttatgttgtttaatctgaaattttgatgtgttttgctggtgtttaagcatgaaaattatgtatgttaatgcctatttaggtactttatcatttggtgaatgattagcttgagttgtgtttgggtttgtgttgaattggttgaattttggggctgaaatttgttgctggtttttggtgttgttggagagtgaattaggtgtaattcatctcaatatatttgatttatgctaggtgaaagtttgctatgattgtgggctgtgggctggtttaacataaaaattggtatttttggatgcattttcgtggctcgaaacagggtttcctgggtttttcaacccagtagccgcggccatttttggcagcttattgtatttttttcggatttttgttttggtcataact

SEQ ID NO: 345066 - DNA, 527 bp, Cannabis indica
acaacacacgagatgagtgtttgcccgggatattgaacaacaaacaggcaaatatgccgaccaagagcactcaacagattaaaaggacaaaaaatgcacaaaaattaagtcaaaacccagaagtttgaaaattttgggttaagggttaaatttcacaaagcttcgaatgagcaaggtgagaatcgaataatgcgaggttaaaggcagaatgtcgtataccgcaaagtcgagaagaatggcattttctacaatggaaacacagaaattaaacatgcaaagttaaaagagaaaatattgaaaacttattcaatgtttgaagcctaaacgaagtccagtcgaagctgctcaggtggctctaacagaaatctcacgataaacttggagaaaattccttctttttgctctgggtatggtgagtagagaaaatggtgaaagtaaaattctaaaggacttccagtgtaacgacctaatctatagggacgccacgtgtgtgattttataaactagtttaatactaatagaataat

SEQ ID NO: 345067 - DNA, 598 bp, Cannabis indica
aaacagatgaacagtaaagcatgtcataaacacaaaagtgaggggtgcgaaaaacttacataaagtgttagaactgggggttgctgttgatcgacaaagaaatgtagactgacagtaacaagcaagggttaataagaaatctgtaagtgtttgaaggttttctggtccaagggtttctttctctctggaaaacttgaagaaatttggcgaaatgatgaaagtaaccaaatgaaggaaaggtggtggcttttataggccaaggcgcatgtggaacaggcacagtcacctaccaatcgaacggttggggaggcgcacgattcgaattcccaagatccaacagctagattgatttgtaattaaggcggtggaaacgtttgagtatccgtctgacacccattaatgcgccgtatcaatcaatgggcatgaaacgaatcaacgcctgcaaaaagtgaatcgctgcaataatggtgatcattaaatacgccttcacgcgcccaaagcacatgctaggaaaccgaggagtcaaccggaggcatctgaacaagccctattccttttttaaaataaacaaggcgtgggggataaatgttgcccctga

SEQ ID NO: 345068 - DNA, 691 bp, Cannabis indica
gatctattgattaggtaacatgcgttaagattctccccaaaaggttctgtccaaaccagctcctagtaacatgcacctaaccctctcaatcaaagttctattcatcctctcagcaacaccattttgctgaggggttttgatcacagttctatgtctcttgattcccattgtggcacacaatcccttgaactcatttgagcagtactcaagaccattgtcagttcttagtaccttaattttgttcccagtctggttttctagtagcctcttccatgtatcaaaggttcctagagcctcatctttgcttttcaacaaatacacccagactttcctgctgtaatcatcaataatactcataaagtagtgtgctccacctttggttggaatcctagatggcccccaaaggtcagaatggacataagctaacctttctgtggtggtgtgttctgccttgttgaacttcaatctacaagccttccccaaaacacattcatcacagaattcaagtctttctgttagcttctccttgaacagtccttgcctgttcatttcctcaagtcctctctgacttacatgccccaatctgaggtgccatagccttgcttgactgtgtttggttgagtccaaaacaggtgctgcacaacctgagattgtctttccatccaagaaatacaatccattactcaacctt

SEQ ID NO: 345069 - DNA, 716 bp, Cannabis indica
tcgttttttgagtgagttcccttctcctggcccaaaattacaccactcttctccactagcccattcggcccactagtaatgtcttggcccaatctttttcttctagtttcaagaaaaaccataccctcctcatcaatatccaaatcagatgccacctcattaaaacctttatttcctaaaataatctctccaacaactccattactatgcacgacacaatctcccacaattcttgcatggccattaatcaaatccctattcccatgcatcaatccttgacccaccattctaggaataacaacttgctgcccatccctaaaatcatggccattaaaattcttctctcctctcggctggaattcggtgcccaagtcttgttgaaccgcccccatcgcaccaccaccaccacctggcagacccacccccgacgctccaaaacccccaacaccaacagacgacgcaccataactccctccaccagaagccgtcgcaccaaactgcccagccccacctgaagccgatcggagccacttagctcccatggcgtattgagttcttcgagggaccgccttcatgaaggaaccatacggtttgacgatagaagcaatgggttgaataaagagcctagaacaatattgatcggagtggccaataacaccacaaatgaaacaaaaagtcggcacaaattcatagcgaaaattaatccaaaaccactc

SEQ ID NO: 345070 - DNA, 694 bp, Cannabis indica
tcatttatttaatgatagtagggtcgcaaatgttccacgttccagtagttctttattagcgagccgttgagtcgagccaatttgtaaactccaattccaactagtacttcgatgacatatggaccctcctagttcgggttgaacactcctgtaaaggcatctctcgtatttgcaaatactcgccttagcaccaagtctccaacattgaatagtcttttcttgactcttttgtagaagtatcttgtgactcggtgttgatatgctacgttggtgatttgcgactcatctcgtttttcatcaagtagatccaaggaaattttttgaagttcctagttttcttcttgactataaaaatctgttctatgagtcgatatgttcacttcaacaggcagcattgcttccgaaccaaatgctagcgagaaaggagtgtgacccattgccgtcttctcgctagttctgtgggcccagaatacttgaggtagctcgtcaacccacctacctttggaaggatctaacttcttcttgatagtatcctttaaggttttattaacagcttccacttgcccattcgcctgaggtctggatactgacgagaagctttaaataattttgttcttttcgtagaatttagtgaataagtcgccatcaaattgggttccattatcggatactatcttcatgggaattccaaatc

SEQ ID NO: 345071 - DNA, 602 bp, Cannabis indica
cttgtcctaaagacagtagtaggcacctagcactggtgctgtccctattgaatttatctttttgagttaattaattatttaattaattcaattaggtaaatatctaatttgaaaattggttaaagatatttcaaggttattgagatattctttcaagtagttgagagattccctcataaatattagtaatcaaattcggttatagatatttatttatttaaacaaataaataattatttaattaaagagatttaactaccataaataggaacctaatttgagaaataagaacattacttttacacagtgaattttggaacctgtagagagaaaaaagaaattgatatttttttcttagttgttcttgctcatgtattaagaactcgacaagaacaaagttacacactttatccttataacccacactattccttatatggtggatcgatttggaagacaccggtgtgagtccaaattgctaattcctcatcaactggattaagagatacaacatatgaaaagtttcgagaataccctaataggcttcaagagatatactctaaacttattatttttattattttgatttaatgtacacacat

SEQ ID NO: 345072 - DNA, 465 bp, Cannabis indica
atcggtgcactggatttacactgatgtgataatcagtgataaagtatacttccaccttggataagtgttatgtgttggaatatgttttaacaggatctagatttactaccagtatgttatttaacatccttaaatatgaatttctaaaacaatgtaaataaacacatataaagtttcaaaaaccttacagtgggtgcagggaaattataatggctccttccactcagatctctaacccttgtatcatgtctgtagcagagtatcaccaagatccgagcccgaatgtccttcgcttgaatctggattcttcacagttttacagactatgatttagtaccacttgatgtgtgtgggcacttactctatcactaaagggtatgaaaatatgaagagaaaaagagagaggagtagttcaaaaatagtaggagagatggctaaggaaaatttgactgaaggcttgaattt

SEQ ID NO: 345073 - DNA, 864 bp, Cannabis indica
agtgacattgtgacgacaatgaacttttttttatattttttttactcaaatcggtatctttattaattaatcaaatcgttaaaaataatagaacgtgcttcagaggaacaatctccaactgaagcacacgacgtggagagaaacaagaatctctggctaaacagtgagctagcttatttgcagatcgtttgacaaaacgcaattcaacattgtctaaagataaaagcaacacgggaacatcatgcactaaaaaaccaaaagaatatgacatagagactttactttgaatagcttgtgcgcataccaagctgtctgattccaaaattacttgtccccgatcaatccaacttaatgcttctttgatgtcaactatctcagcaacttcaggttgaaccctccctacatgaccccgattgaaagcctccacaatattaccatggcagtcgcgagccacacaaccccacccaaacctgtcttcaatcatcttaaactagaaaatttagtttctcaaaccagaaaacttagactctcaaacctgaaaacaatggcaaaaaacaaaacaatctcaaatcaataaacaagaaccaatctcaaaccataaaacaatcacaccatgtcacaaaagacaagacttgcggtaacagaaccgaacgaaagacaaaagacaaaagacaaggcggtggacgtcgttgatcggcgattccgaccgacgtggaccgaacggacgacgacccgccagcgacgctcctggactcgactcccctgtacggttatggtagaagcttctcgacttctcactcctcgactcagatcaattcgctgtagggtttctctttcctccgtattacgtggtcgatatttttc

SEQ ID NO: 345074 - DNA, 701 bp, Cannabis indica
tcataattaaacataaacaactgctgatttccaaattaactaagcgggctttacaattcagttgtaggaaaggttgggattgaaattgctagtttgagaatttaattctgttgtacaccagttttattttttataagtatcctttgttatggatagatgtgatgttgaaaatttttaaggaaggatcatcttctctaggatcggtcttcgatctagttattaccaattgaagactcgaaaggaggatattcctaaaacagttttttgtaccgatgacttagtagttgtcttcattaatggtattttgatttcttcgattcaaagaaggcatataagagacatctttggatggtgttgtaacatctctagaagcataggttttatgctaaatataagaaacacgagtattgttgaccgtaaatttgcagtgaaggttagaggttttctgaaactagcaggatactacagaatatttgttggaggttgtctatacccttagcggaattaaatcgaaagaattgaaatagaggttaatcattatcttaatgtttacattgttagtcggtgaggagaaaatgtgatttgatgtgacacttctaaacaaggattagattgtgttcttacacagtttaggacagttgttgcctatatacctagaccattgaaggagtatgagtagtggtatttcagtcatgatattg

SEQ ID NO: 345075 - DNA, 462 bp, Cannabis indica
ggtaggggtaggggacggccgtacgtacgactaaaactaaaactaggtaaggtaacttacttaagtacgttcctttacttacttcggtcgggaacgtaaagttaaaggtaacgaaacggaaaaggtagtagtacttccctttcccgttacggacgttcgttaccgaaaacccgaaaaaccgaaactaaaattaaaggttggggtagggtaacgttacctactttactttaccaactaaagtaacgtcgtaaagtaaaattactactttaattttaacggggttaccggggtaacgtaaggtttttaagggttttaaaaggtaaaaattaaaactaacttagtttaggggttaggggttaacgggttaaaacggttttaaaattttaaccctttttaccccttttaacgtaggttaggtaagtactactactaccataatagaggatcattaatcacattagg

SEQ ID NO: 345076 - DNA, 651 bp, Cannabis indica
cataattgaaattaggagctactggattagtatattcatgctcccgcaaaagatttgtaaaaagattgataggatttccaggaactttctttggggtgaaaggggtaatacctgtaagatgcatcttgcttcatgggattgtgtgtgtaagttgaaactatttggaggtttgggcttccgtgatggatataaatggaataaagtggctattgcaaagtacctttgggcagtaagttcaaagaaagattatttatgggtcaaatgagcacattgcatatacttaaaggaccaggatgtgtggtctcatgagcttaagcaatatgtgagctagtattggaaaaagttcatgaggctcatggagacgttctccctgaatgagatccaagctgtctgtgttgagaaccatttcaaagtaagtaaaatatatgaacacttcctacataatgatgatcgtgttggttatgtgggtgtcgtgtggtgctctctttctgccccaaagcactgattcatagtttgacatgccttaaatgaccaccttttgacaagggacaagctcattaggagacaaatgagagttgattcccctctttatcctatttgtgaattggagtttcagagtcactctcacctctttttctcatgcccattctc

SEQ ID NO: 345077 - DNA, 712 bp, Cannabis indica
cttggtgccaagatgaacttcagtagccaacattatttgaatgtcatcttcttctgaaacagctgacacaacggagcagtgaagctcattgaaagatgtctggagctgattagtgaaggtaccagttgtatgccttcctatagcgagatggatgtctcgctatccgttatctatgtcctccaagctattacacatagttagtataatgtatatgatacgctaagtgttctaatagccagttcgcctcgtcaacacttctacatattgcgaggttgatgcctcgctatgtcatgttgatatcatccttgcgattatgtcttttgacatgaaatggtttctcgttaatacgtgggtcaacagtttgtacatccttgtatcgctaaggactatgcagtctgcgagttataaatatacactattgacttctacatttaatgagttattccatttaatatctttaaatataattgccattatatttgttgatttgtattctccaaggctgacacgtgtcatcctctgaagtgccagccaaatttcgggtaaaatagtattgtccccttcggttgtatcaagacaaaacagaggcagtgggaccatcttatatagagaaagatgatagacaattttggaatcaagaaaaaaaaaattatctcctctactttgctacttgtttttagacatagtcattttctcagataagttgttgaga

SEQ ID NO: 345078 - DNA, 1961 bp, Cannabis indica
ccatccacgtataacttccaagtattcacgtcttgctgaacaagtggattttcttctggagttattccctctatcaagaaatctgccaaggcttggcccttgatggacgttcgtgggtgataagttatgtcaaactgtcccaattcaattgaccattttataaatcttccagaagcatctcattttgataaaacatgtctcaggggttaatcagttaacaccttaattggatgtgcctggaagtaaggccataacttgcaagatgcgtggattaggcataaggcaagtttttcaagaggggcatacctcgattctgcctccagtaaccttttactaacttagtaaacatgtttttggtgctttctctcttctcgcactattgctgcactaatcgcattgtccgagatagtcaagtagaggagtagagtttctccagttattggttttgccaaaactagaggtgttgacaaatgcctttttatgctcttaaagggctcctcacactcttctatccactcaaattttttattgcctcgcaatacattgaaaagtggtagacacttatcaattgactttgaaatgaatttgttaagtgctgccactcttcctgttaaggtctgaacttcctttggtttagttggtgatgtcataattatcaaagccttgatcttctcaggatttgcttcaatgctccttgcgttaactatgaatcccaaaaaatttcctgaggaaaatccaaaggaacactttttcgagttaagtttcatattgtacatctcaaagcactctgcgaggtctattgtgtgatctccactctttatcgattttgcaaacatcatcgatgtagacttccatgtttctttctatatgtctcgcaaacatgtcattcacaagtcgctgatatgttgccctagcatttttcaaaccaaacagcatgactttataacaataaagtcccatgttggttacgaaacttgtatgttcttgatcagggacatgcatttttatctagttatatccagaatatgcatccataaacgacataagctcgtgtccagcagttgcatccactaactggtcgatccttagtagtggaaagcaatcctttgcacatgccttatttaagtctgaaaagtcgatacaagttctccaggttccatttggttttgggacgagaacaaggttggatatccacaagaaatagaacgcctcgcgtatgaagtcgttaaccaacaacttatgtacttcctgcttgagtgccccttgtctctcagaatctaagggtcgtctcttttgtctcatggcttggtaatttgggtcaatattcaagtggtggcagataatcttaggctcatcatatctgcgtggctccaggcgaattgatcctggtttgccctcaaaaaacttattaatttctattttaattattcatccatgttcttcccaatgaatacacactttgtgggatttctaggatctagaacaacttcttccaattcctcaatttgtttcagtatatttcgttcgtcttgattctgaggatcaagatcctcatctttcttctcaccttcttcagtcacgtctgctattagctggtgaccgtcctttctattctatagctctatgcggtagcatttgcaagccagcatttggtcacctcgcaatactcctacacctgtcggtgtatgaaacatcagggataagtgcttaattgaactaattgcccctagtcaaattaactctggtcgacccaatagtatgttgtaggctgatggtaggtcgacaataagaaagtcttgcatgatagtggtggataaaggtgcttcgcccacggttaatgggagctcgattattccttgactagcaacactgtcgcctataaatccacacagatttaccatgcaaggttttaactttactttttcaagtcccattttcttcactgtatccttataaaggat

SEQ ID NO: 345079 - DNA, 728 bp, Cannabis indica
gctgtaagctatccaaccttctacaggctataagttatctggcttgctagtcatcctgccagggtcttatcaatacttgtgtatctgtgtctttgctcttgactttgaagctgtatggaatgtacctgtccgattgtaatggtttctaccacgtgtctactagttttggccacgtgaaggtgccacatcaggtgggcagaaattgggataacaagcaatatctctgagaactagtgactagctttgccagaacacaaaaatggactatgtgatgtcaaaatatcacttaagcatcaaaaaatacatcatcgacacgtttttccacttacccagtgtccaggttgacatcacatgttaacctgggcgctgggatgtcaacttgggcgctgggcctagaattgccttcaataaaatagtcataattcactcaatattgatctgattgatgtaattcaacttgtgtttcgaagctatttcaatgttctataaagtcatgtctcacacttcaatcgcaattctcaagttatcgactctaaatttcaccccaagagagttacgaatttaagctactattacctggaggctggagcgggtcccactgtcgtgacccagacttcgaaaattgacgatcaaccttagaagttaattttcacaatttgattatcatctactgtcaaaaatagccaacttatattttttttctttcatattttttggattattttatt

SEQ ID NO: 345080 - DNA, 597 bp, Cannabis indica
acccgaaataattttttagttaaaatttttctcatagtcgtgtacgttatagttatttaagacatcctgcaaaattttaagaaattcagaaaagtttaacacaccaaaaactacgttcaaacagtgtgttgcacacgtgactattttattttatacgcgtgtaaaatagactgtttgaccattattttctatattgtaaattattccgaatttctcaaaattttgtaggatatcttaaatagctataatgtacatgaatatgaaaaaaaaaattagactaaattttttttctagatgccgaaacaagtcaagggtgtatcagtatatcctttttaagggggtgcattgtagaatcacccaataaatgatatcatgggattataagtttttctatttctttaaatttatatgtgcttttttatattactagttggttaacacgtgctttgcacgtgtgtttaaccttttataattttattaaatttgtaatgtacaattaaaattaaaagagaattaaaattaaagaagaattaattttattaaaatataaatttatttggaaattaaaattaagattaaaggagattaatttagttc

SEQ ID NO: 345081 - DNA, 1330 bp, Cannabis indica
gagactgctgtggtggtgctggactatcagtaatcttcttatctgatgatgcttgagttggtgttgtttgatctttaatctcttcatccactggttgtatcatctcaggcccatcatatttctttccactccttaaggaaattgctttacattgctcttttccttttgcatcattagtgctaggcgaatttccttgagcttgtttttccacttgagtagccaattgttccatttgagtttctagagttttaatagaggctctagtttccatcatgaattggagcaataaatcagcttggatagtggagcctccactagaactttgttgttgcagctgttgttggttttgttggggctggtttctctgctggtagaacccctgttggttgtgcccataattattgttttgggaatagtttccaatggcttttgcttgatccattggcaaatcatccacatctgcctgacactcagaaaagtgatggggacctccacatatctcacaaaccacttgagcttgtttggcttgcactgcgatcagctttgttagggcctcaacctgagctgtcagctttgtaatggcatccacctctagcacaccagctaccttcttagtttgactcctttcagttggccactgctgattgtttagagccatctcctccaatagatcataagcctcatttgcactcttcctcatgaatgctccaccagctgcagcatctatgagtgttctggtgttaccaaccaacccattataaaaattgtgaaccagcatccacttctcaataccatggtgaggacactttctgattaaatccttgaacctctcccaagactcatggagagactcattctcttgttgacagaaattgttaatctctcctcgcagcttagcagattttgctgggggaaagaacttagacagaaatttagtagccaaatcatcccatgtagcaatagaattgggtggtaaggagattaaccagctcttggctctttctctaagtgagaatggaaacagtctcaatcggatggcgtcatcactaaccccattgactttgaaagtctgacataactccatgaaatttgatagatgcaaattggggtcttcagaagggagtccaccaaactagactgaagactgcaccatttgtagtatggcaggcttgatttcgaagttgttagcatccactgccggtggcctgatacatgactgaactcccgtaagagttgggagtatgtaatctctcaagctacggcccttagcttgatcttcaacggcacctccgttattgccgttgttacctccattattcacaacattagc

SEQ ID NO: 345082 - DNA, 390 bp, Cannabis indica
aaacaaaatcataagctcccaaaccccacaacagtttcaaaacttaaagtcaactcttatcacccaaacttataaaaaaaaaggaaggtcaaattttttaccttaagctttcctcctttaaggatcgacacctagttgctactagggtttagaacacaagttcttagactgaaaattgaagaaaaattgatggtggtgagggtggttttgtcgcacgaaagagagaggcagaggaagagattgagggtttgttctgtttgttttaaataaaaatttaacttatatataatcacataagatttaaaaattaataataatagttgtaatataataataaaaataatagtaacattaattataataataataaaaataattattttattattt

SEQ ID NO: 345083 - DNA, 558 bp, Cannabis indica
ggtctcactcaaaaccatactcttatcaacattagagtccacactagaaaccccattagcaagcttccatttagaatctgcaaccactaaaatctcaaaaccttcatcatcccttcgatcttcacccatctaagaaacaataacttgaggaccccctctcaccaccacggccctacattccttaccttcttcctcaagcaaattattagtgtgaaaggatagttttaacttattaccaaaaacaaaccaccgctcaacagaaaacacctcatcatcttcggtaccattcctcagccactgtgctccaatcaagtgttatttccttttaagtatgagctctcataaatgaaccataaggcttaacaatgtcctctatagataactcaaacagtttcaaacaaaactgttcagaatgaccaataataccatagatgaaacaaaaagtgagaacatactcatacttgaagttggcctaaaagaactcaccccccgtgcgcttaatcttcatgtgtcgttttaatgagatagttgtaacgccccgatttcccgagacgtcac

SEQ ID NO: 345084 - DNA, 617 bp, Cannabis indica
catgattcaatactagaaaatactctataatcaaaatccatggtcaacaacttaaatcatgcaattctttaccaaaaatcacaaagattaaaacccaacaccaagaacatgcaactccacaaactccacaattcaaaagatgcttttcaaccaataaaaccagcaaggattttaacaataatttctaaataacctcagctagaaaatacctcaattccaagcttaaaatccttccaattcgaagcttcaaagtcatgcaattcactccaacactcaacaattacacttgaaattcaagaaagggttagagagggagagaggatcggttagagagagaggaaaatccaaaattttgactttatttttttctgaaaatttcatttcacatccaatattcacataaaggtgacattacaaaaacgcccgtagggccatattcactctcacaagggtgttttagtcatttcatactcaattatttccaaatagatttcagatttcatattatcaaataaaatgcaaaataattcaatccaatttacatttcggacctgaacccagttcggcccgaaatgcccggttgtgactataccgcgccaacctgtcagaacacacct

SEQ ID NO: 345085 - DNA, 771 bp, Cannabis indica
aaatatttttattttaaaaaaatgatatctacaatacccctataatttgataaaatctccgtaattaataaattacgcttcatttattcatttactcaaatcccactaattaactcataattagctttaagtaagattataatcttactctaatatccatatatttacatatttaataaaatatgaccaaataaatatcaataaaattttcaggatattacactcgtgaactatgcagaattaactgtaaaaccacgcaaaaaccttgttttctttttgtatcaattattttttcttagatcatttatactttctctgcaaaaatatattacaaaaataggctcataatcataaacgaaaatttgcgttaacagtttggtgctttcattgagagcctacgtgataaaagctcaaaaaaatccctcctaaccaaagaagaaattttttctttatggctgataatggggaaaacgataacactcatcctgaagtgactactcaccatcctagaaaagagtcgatgggctcacaaaggccacctaattcacgaacaacacgttcgacacgatccacacgctcaaggaggagtcagcatgatggagaccaaaacccaaaaactgggaatgtggaacctagcacgaatgttggcggttctacacccatgggtgatggttcctatgaccctacgagatacgtaccgttggtcgagtctgaaaatcgtcaactccagcgatgtctagaggaggtaaaccaacgaaatgctaagttgga

SEQ ID NO: 345086 - DNA, 829 bp, Cannabis indica
tattctatttttttatgacatgcgtcacatgacatgtaataaaaactctggacagtatcagttatttttattgccgcctcaatccaaaaatattttttctacatccaaatcaaatggtgttaataatagtaagatattgaaacaaaagttttataaagtaaatattgtagtagtttttacctcattcagttgcagatttttcgtcaactctgaaatttgaatgttagtcattatttcgcgtaatccaacagaagattttggagaagattcatatgtcaagcagtttgctattgcgttttaatttctgtttcattattctccgcccttaatatagtgtaagtatgataattattataaatatagtctgcaaaattttaatttttttgtataatgtatagctataatagtatgtgcatttgatttcatgtgtattaccattccttcagtgcttctgcctcggggagttgagaattgattttgaaggtactcgtatcgcgtgatggcagagacaaccctaaattaaaatatatgtgttaattgaatttttgaatattcgcatttaaatatcagtagtttaattaatgcaatcacctctcttggtttgaacaattagttttgatcccaatattatgggtctgtcttcaattacttctgctatttgtaagcattcatcttggactttatgtccccacatcgtcaaacatgcttgtttgaagctacaactttgtaaagaaataaaaaaatatattagcataaattttattaaatagtatttaatatatcgcaataaaaatgaacacgtgggtatatttatagtggtagattaaat

SEQ ID NO: 345087 - DNA, 705 bp, Cannabis indica
atttcactagggtaataaccctaaattatgaactgttcatattagggtaataaccctaatcccggttacaattactcacatatatcatattcaacataagcgccactgtgcatactctacgtgcaaactactgtcttacgtattgtcccccaataacagagattctaaacccctgggtgctcctgattaggtgccggtaatcctagtcacacaatctgggatttcacaaatagggttaatccctaattccacgttcaccaaatataaagttggcattcaaaatacaaataatcataaagagctcataatgagctttccaacgatataaagaacgttcaaaacggagtcccgagtcaaaacttatggccaaaacaaaatcgagaaaaagatggctctctgctaggttttatggccgcgacgaccataaatctggccccggccactgggttcgaaaaacccagaaaatctcacattttaaagcctaaaaatgcccacttttccatatattcgaaccttaatcaaaccataccaaaaattaacttcttacagataaaaatcatcacaatagagagctaacaagattaattttaacattaatcaacagcatccaaccaaagctccaaagcttgagcaaaaatcatcaaaacccacaaacaaatttctaaattcacaagcatacttgaccacaactttcagcagcaagaa

SEQ ID NO: 345088 - DNA, 920 bp, Cannabis indica
catgtacacttccatatttcgtcggatctggtcattaaacattttgtttgccaatctttggtatgtcgctccagcgtttttaagaccaaacggcaatactttgtagcaatatagacacatatctgttcggaaacttgtatgttcttggtctggtggatgcattttggtttgattgtagcctgaataggcgtccacgaagcttaatatttcatgccctagtgttgcatctatgagctggtcgatccttggaaatggaaaacagtcttcgaagcatgctttgttgaggtctgtgaaatcagtacagactcgccatttcttgttcggcttgggcaccaatatgggatttgcgacccaagctgggtagaaagcttcaattgtaaaattgttgttgcgcaccttttctacttcttccttcaaggctaatgctcattctttgtccagtagccttcgcttttgttggactggccgaaagttgggaccaatattcaaaacgtgtgaaatgatagaaggatcaattccaaccatatatgcatgtgaccaggcaaaaacgtctaggtttgctctcagaaattctatcaattctgattttacttcgagcaacaaaccctttcggatcattagctttctggtcgggatatctggatcgattttgatctcttctaactcttccacaggtccaacatttctgcttgggtccccaagtccagaatccacatcttcatcctcgccttgggaagttccctacttgggaatgtttcttcccgtgtctgtgctctggccggaggatacttccttcttaggcttggccactgcaaggttataacactcccgagcaaactgctagtttcctcttagacaccctaccccattctttgttggaaacttcaggcatgagtggaatattgatgtgacagccttta

SEQ ID NO: 345089 - DNA, 1067 bp, Cannabis indica
aaactaaaccagtaatgaataaactgttcgaagagccccctaagggcagctgatggtgttaatacttagcagccttaggcaatgcctaagcttgctaataggaaccctgttagtgaacatgtcagttggatcgtccttagtgttcactttgcttacttgtacatagttttttgcgaaagatgtctcgtatgaaatgcatcttgatgtccatgtgttttgacttctcttgaaatatgagatttttcatcaaatgtaggacattttttattgtcacagtacattgtgatgttttttgaattgaagtcatgttccttagttaaacccttcacccatatggcttctttaattgcttctgtgactgccatatactctacttcagtggaagacagagctactaccttttgcaaggttgatttccatcttatgcattcaccttgagctgtgaaaacataacctgttagtgatctcctagtgtctatgcatccaacatagtcattgtccacataccctgcaacttcctcttttgaattgcagctagcatagtaagctaaactagtgttaagggttcctttaacatacctcattattcattttagagcttctcaattttgttctccagggtcaaaaatgaacttattagtgatgctcatggcatgtgccagatctagcctgcaaactatagcatacattaggcttcccactacactttcatatggcacactgtccatgacctttctttcatctactatatatctgaggtgaatgatcttttgagagtttgaagtgagcagccaaaggaatggtgattggtttggcactgctcatgttgaattcgctcaaaaccttttccaaataggtcttttgtgataaaaagatctttccatgcctctttcttgtgatttttataccaagtatcttcttagcatcacccaaatctttcaattctaattccctcgggagaccctttataacctctatttttgtcatgctttttccaaccaaaagtttgtcatctacatacaataggaggaacaacttttgttttaatactctcctatctcattctc

SEQ ID NO: 345090 - DNA, 589 bp, Cannabis indica
ttctcgtgagaaaataaaaattcgaagtagacgtagctagcttcattacgtcgtgacatggggtatgaactactataagttatgtgtgtctctctatttactctactcatcgctatttttatttcgccaatctagtgagcagatattgactactttttagcgtctaacaaaactaaatataattttttagcaaaactactgatattttgtttctaacatacttatacacatatttatgtaagtattattattattataactagatgaagaagaatatgagtagagaagaagaagatagacccatctttataataatatttgaaccgaggcaggtaagcgctgacctacaaaaaaattgagtcgggccatattgggctagtgattcggaacatttaggtcgcggccccgacctgacctacgaaatagcgcatttaaccatccttactcataagcgagtcctgcgggcaaggctgactcaagggtggggcagtagaggcccatgccctatgtcccccgcctaagcccaaataaccatttgacaaaaaggtcccaaatttatttttttttaaaatatcatattttgtatttt

SEQ ID NO: 345091 - DNA, 265 bp, Cannabis indica
atatcgcaataaaaatgaacacgtgggtatatttatagtggtagattaaatatatagtttaccattcatcaattaaatatatctcttgaattgtatgtggtccatagggagtgttgacttcttttggtgggttcattttgagagcaatagccaaaatatctaataaattgaaatattaaatagttagtcaatgaggaatatatatttatgaaaatcaaattgtaaatacctattagtttgctgaattctttgggtgtatgcaagt

SEQ ID NO: 345092 - DNA, 509 bp, Cannabis indica
atactacattaatattttattaagataaaaagtctaagtatattttcaaaatattatattttacatttttaccactacatacacaaaaaatataaaaagaaatttaaataaaaaacagatattcaattagatttttttaactaagacccgcaattaacttgagacgaatcacgggacatcctcatagagaaaatatgcaattattgttgtgataattcaacaaacaagcctttgaagctcttgttgttgttgttgttgtttgttttatttttttttttttttgacaatgaactttcattgaatataatcagagtttagtacatcatagagaaatggaggaaaatcatccatccaaactaattcgccatccaccctgagtgcacgaactgctaactcatatgcagccatattggccgaacgacgaacatgaattagagatgcctcaagaaaattgaatagcaaactagcaatatcatctaaaatagagccaaattcattacagaaggaag

SEQ ID NO: 345093 - DNA, 676 bp, Cannabis indica
agagaggtttcggtccattgatctaactgcaaggtacttcgcatccgggtcaaattttacacacgttgctttacttatgccagacaaatcagggaaagttttgatacaattccattccaatttaacattggcaacctggtaaactatatttcagcactcgtaagtgcaaggtaatattgattgattaatattttctccctctgtgtaaatatcacacctcctacctatattgctactccttttttctctcttcttaaaaaaaaaatcttctcaaatctgttgtgacccaaatttagaacgatcagaatcaagaaagaagaaaagaatgaattatcatgaactaaccttaatgttcaaaaaatggtgagatagtgaaagaaaaaaaaaaaactcttattattatatatatagtaattgcagttagagttctaactgacagagctatcatctttgtaagtttaagttataggtgttctttttatttgtgaaatttctattgtccaattcaatcttattattattctatatttatctttctaattttttaatttacgtgatattatttatatttattcttctaaaacaattttgaatacaggaactttcccatgaacaatttgtccaacccatggtccctacaaattagaagtatcgtatgtagtatggattgtatata

SEQ ID NO: 345094 - DNA, 522 bp, Cannabis indica
ggcacaaaacccaacaacaacattaatgatttggaagaagaaattaaatgttgtgaagttgaactgtctttaaaagagtctaaaattatttctttaaccaaggaacttgaaaacattaaaaaaatgttaaaatgctaaatccagtttccaacatttttgaaaaattcaaaaatctggccaaactaatctgctggtctgggctatgtttttaatcaatctgatttcaataccacttttgttaaatataaaatttttgtttctggaagaactgtttctacctcgtaggattctgtctctactgcaaaacactctgctgttacagaaaagaagcagcacggtaagtttgacaatcccaaagggaatggaagacgtttcattcctatttgtcatttttatgggataaaaggtcacattcgacctaagtgcataactatgcaaaacatgtttaaatctaattatcttggaaataaaagtgttttacaaaaataaaaatgggttgtcaaaaacaaatgcttggtaggt

SEQ ID NO: 345095 - DNA, 562 bp, Cannabis indica
gcaccatcctcttatcatttctcgtggttaaaaattaagattgtatcataattatccaaaaaaaagaagataaaaatattataaaaataggatacatgtttttttttttcaaatatttctacaaattataattaaaaaaaatattaaatttgacttaaatattttatatataaatatatttttaatatagtgtaataagagatattttgtgatttttataattattaaatatagaaattaaaaaaattcttttattattcgccattgaatcataatctaattaatggtttaatattgaaatatttacaccatatattacttttctccaaaatttatattatactttgacgagggaatttttacatttatactttctctatctttatttttttttctttttactcttttacatttattaaagcttatatagttttttttctttcttatacctctttgaattttttttttcattaacttattttttttaatagtttattgatctttttttttttctttctcttctctctatttattttttttttcttttccaattctctctctc

SEQ ID NO: 345096 - DNA, 615 bp, Cannabis indica
tatttaaggttgaaaagtcaatatttttttgacatttaatctcattttctgacagctacctcttattagagcatctctaacgacctcaataaatttggtgtcacactatcactaaatttggtgtaaaaaaatattttcactccaaccacaacaccaaaagttacactagaaaaatattcattattattatattaattttttaataaaataaaaataattatggtattcccatttaaatttacacacaataaattaaaatgtacttttacaatacaccccttcaaataaaagagtcacgcgtgcaacagatagtttgaattttatttttggtgtgttaaatttatttgaattttgtttgaaattttacatgatatcttaaataactataatgtacatgaccatgaaaaaaataaactaaaattctacaatttattaggggccaccgatggacccctatttattttagcatatgagagaatttttttagtctaatttgtttcttaagttgcagttatttaggacatcctacaaaatttttagaaattcaaaaaaaaaaaaaattaacacgccgaaaatagggtttaaacagtctatttcacacatgtataaaataaa

SEQ ID NO: 345097 - DNA, 884 bp, Cannabis indica
atacagaatggcacctaatgagttaaaagagcttaaaatacaactacaggagctcttagacaaagggttcattagaccgagttactcaccttggggtgcgccggtactcttcgtcaagaagaaagatggaagtatgaggatgtgcgtggactaccgtgagctcaacaaggtgaccatcaagaataagtaccctttgccaaggattgacgatctctttgatcaattgcaaggctcggctgtgttctcaaagatagatctaagatctgggtatcaccagctgaaggtccggaaggaagacatacccaagacagcattcagaacacggtatggacactatgagtttttagtaatgtctttcggactaactaacgccccagcagccttcatggatatgatgaatagggtgttcaaggagtacctagataagtttgttgttgtattcattgatgacattcttatctactccaaaactatggaggaacatgaggaacacctgaggatgactctaaaccgacttaaggagaaccaactatatgccaaattcaagaaatgtgaattctggttagagaaggtggcattcctaggccatatagtttccaaagatggagtcgaggtggatcctacaaagatcgaagcggtcaagagctggccaacacctaagactgcaagtgaagtaagaagcttcttgggtctagctggttactatagacgctttgttgaaggattttccaagatcgcaactcctctaaccaacttgactcgaaagacgcagaagtttgtctggtcagaaaagtgggagggtagcttccaaacacttaaggacaatctaataacagcccctatataatgtgttcccaataacaaggataagtttgtggtgtact

SEQ ID NO: 345098 - DNA, 893 bp, Cannabis indica
tgaaccatgcaacattaaatattatttctcatctatattaataagtaaatctgattatattgaaatgagttttatttatggcataaaacccaacataaatatggtaggacagaaattactttagaagaagtaatttcagccttgaagtcaaaagacttggagatcaagaatgagaagcatggaggttctaatggagaagtaaacttcagtagagggagacccaatcaaagaaaacatggacactacaaaagtaaaagtcacagcagagatcaccacaaaggaaagagtcacaacaagggaagatcaaactcaaaagaaccaactgatcctacgggatgctacaactgtggcaagccagggcatttcaagagagattgctattttctaaacaaaggcaaaccaaataaatataaaggacagggagaaaattctaactctaaacctaattttcataaaaataaccaagctaattatggtgatggttatgaaagtgttgatagtggtgaagtatacattgttgcatcatcttttaaagatgattggattttagattcaggttgtacttttcatatgactaatgacaagagttatatgtttgattatagggaatctaaaggaggaaaagtaatccttggaaacaatcagacttgtgagattaaaggctcgggatctatcagatttaaaatgtatgatgggatagtaagaaccctaacagcagtgaggtatgtgcctaatctttctagaaatttaatttctattagtgtgcttgatgatttgggtgttgtgagtaaggtagaggcaggtcatatgaagcttagtagaggagcattaacaatcatgaaaggaatcaaaaatggtggactttactacctacaaggctctcctatttcaag

SEQ ID NO: 345099 - DNA, 692 bp, Cannabis indica
ttcaacttaaattattttcaaacaaaatatataaatatgtcgtacccacttctatggccccctaactctcacaataggcccaaaaaagagaaatttaatcttaaaaggaacaactgttattaattgaataggcccaaacactaattgggcctaaataaaatctattatgatgtgacattttatttagcaacctagtccattttaattacaaaattaaatgggctacctatatgcatctaaacccaaagcaaacatataggctcacacaggcacactaatttggatagatcctatcatgttactaggtttatacacagatgaaagaagaatgcaaattttacctgttacaaattatttgtttgacctattgataattgaaccatgggttaaaatcaaatcattgaatttgtcaacaagttaaccatggaaatttagatcaacaataataggttttacattgttttaataatcaaacaatataaaacacacaaatatgtaacaagttggatagttggatacaggatttatttaaatttagattaattaattaatttattaattttgaaaaaaataaataaaatatttttttcggaaataagattaaaataaattaattaaaaaattaatttaaaatttaaacctataattttaaaaaaaataaggtttcaactaacctaaatatctatttcaaa

SEQ ID NO: 345100 - DNA, 1555 bp, Cannabis indica
aattctatttttttattattaaatactactatacatttttaatgcaaaatatatttaactgaccaatgcgatttcatgttttgaaagagacatctacagtttttgaccgacaattttaattaattatttttatgtgatgaactatataatgtaattatataagagattttgacgtaaaaatatattgttatcatcaaagactcttattttataaaacacatggttaacgattacgatacgaaaaatataattttatgaaatgtcaattacgctcatcaattatcgtgggacttgttttgacaatgaaactatgcattagcaatgaccaagtttatataaattagatgtgcggtaaaattactaaaatttttactttactaataattcatttctaaaatttattttttttgggggaaaacttctaaaattcgtgttttgataatattttactatttttatcaatcttttaatgttaagtttcgtgttcacgtgtacccagtatattgaattgttcacgtgtatacagtatgcacgcgacacaattttattggcacaggaattaaataattaattataaaataaaatataaaaaaataataatttaaaataaaaaaatccttttaaaaaatatttttttaatctatcatttttggttaacaatttgtgtttgtgtttcttcttcatcaagcttaccaccaccaccatccacagaaactgctacccactacaattggaaccacacaacctgtcaacatttcaaatcaaaatccaaatacaaataaacctataactaaaacaacaaatttatatttgaaatattccacacatttcagatgaaaaataccaaaaacaataacaaaaattcataatcaatgtcaatctcaacttctaacacaaaaaaaataaaattgaaaaataatatgggtacactactacaaatatcagaattcgcgacgtcttaaaaataatttttttggggggaccgttgctaaaaaaattaagtaactatttaaaaccgtcgagaaaaatttagtattcccgacagtttaaaattgtagtaaataaaatagaaaatattttcttaataaaatgtgatttttaatggacccttataggcgacggttaaaccgtcgcctataagggtccattaaaaattcgtcacatacttctcgacatatttcacacgtgtccacctattttttttctatttcccacatgcccacctatttcttcttcatttcccacaccctaaaacgaaactcttaactctccaaaaccccaccaatgcctccgcaccaacgccctcctctcttgccgtcttcctccctctctcgatctctctttcttctcatctctctcgtccatcgatctccacccacccctcctcccgtcggtctccctctactctctatcgcatacgtcagaccaccaccacctcctgtcggtgttcctctcatcttcgtcacatatgtcggaccacaaccacctcccgtccgtctccctctctccgagctcggtataaatacatttatttatttatatactttttatttat

SEQ ID NO: 345101 - DNA, 543 bp, Cannabis indica
agcaattttggttacacaacgggacaaaacaccaaatactttcatgccactgctagtgacagaaaaaggaacaatcaaattttgcacttaaaaaattctgatggagcttggactgattggggaaacggccttgaccaggttattacctcttacttttcagatttatttactactaattgttccttgcaaaatatcattgccactgatgtcagatgctctgtaaccaatgcacaaattgaagaacttttgaaaccagttgccaaagaagaaattaaaatggccctattccagatgcatccaaacaaagcacccggccctgatggaatgggtccgggattttttcagaatcattgggacattgtgagagcagatttggttaagcttgttactgatttctttgatatcgactgttttcagcgggagttgaatgaaacaaacctggttatgatccctaagaagaagaattttgtgacagttagtagtcccgtgatccgtaaggggaaataccgggtaagttgtgcaatcccacatcgcctggggaag

SEQ ID NO: 345102 - DNA, 522 bp, Cannabis indica
attagaagtcatttgtgtttacatgtagttattcatgtttatagtttaatatacaatgttagttaaatccagaacatattgtaattcacaattatagtaatgttaacacagcggaaagtaattgtgattatatgatttaaacgtttatgtcccatgattcattagtacactgaatttacattgatgtgggatcagcgataaaatttacttacaccttgaataagtgttatgttctttctaagatatatattgacaaagtatgctagtatctgatgtatagagtatacatttgattgggaccgatattgatcttggtaaagatattataatcttatcgttgtatctttctacgtcaatatcactggttgatcttatcagaagatcttaatcttgacatggttaggtttgatcttaagagtgttatttatattcttagagttgttaattaaagcctaccaattagttcgggtaacacatacatcttgagaacatgatagtacaattgagtgagagtgctaatca

SEQ ID NO: 345103 - DNA, 656 bp, Cannabis indica
aacatcttttaactactagggtaataaccctagaccaaacaaccactcattttagggtaataaccctaatcccggttcttaattgatcacaatcacaatatataatatgagcgccactatgcttaactctacgtgcatactactatcttacatattgtcccgcaaaagcagagattccaaatccctgggtgttcctgactaggtaccggtaatcctagtcacacaattcgggattttcacaaatagggttaacccctgatgtcacattcataaaatatttacatggcatttaaaattcaaaaaatcacatagagctcataacgatctttccgacgatataaagaactcccaaaatggagtcccgagtcaaaagttatggccaaaacaaaattcaactttttccccgatacggtccaaccggaattccggttggaacagccctgaaccaaccggaattccggttgtctgggcagcaacaacacgaaaaaacataacttttaaacctccaaaacctactcaaatctttcccaatcaccaccaaactttccagagcatcaacatatgacatattaaacatattccacagctcaaacacaataatttcaccaagaatcaaaaagtgccattaaagtcccaagcttgagttctatgaactc

SEQ ID NO: 345104 - DNA, 561 bp, Cannabis indica
ttgaacatgttcaagatgagatgacacaatggagggcatacatggatcgttttggccctccaccaaactagctttattgcattttttttagtatctttactcttgttttgtttgtgtgcaaagacctaatgctttttgactttgtgttggatggtattttctttatgtttggttttctttttagtttgttgaatgttatttgtttgtcattgttggatgttatggttttatttgtttttctaaatgcatgagaagtgttgcttaatttgccatcctttttgatgaatgaaaagggggagaaaattcatgattatttttatttttggcacaacctttaatttttttttggatatttaatcttttaatcttaagtataaaatttgagtgggagtttacaaaaacatgcaaggtaaataatcaaaaagggtatcttttaatcaatttttttttggatatctaattcaatatatattgtttaaatttttcctttctcttttcaaaatattcaaatatttgatatcatcaaaaatggggagatagttaactcaaacttttaggtct

SEQ ID NO: 345105 - DNA, 731 bp, Cannabis indica
tagccaagtttgtttggcgatttctaataaaaaagacttgttatgggttaaatggatcaataccatttacctaaaacaagaatcttactggttgtatgaggtcaagcccgacacaagttggtattggcgtaagctttgccacttgaggaagagattcatagaagatgacataaagggtgctgggaatacaggtaaattcagaactagcctgttatataacagcttgcttgatcaaaatcaatttcattgccataaaactatttggagttcacttaacttaccaaagcacagatttgttctttggcaagtggttaactcccatttgttaacaaaggataatatggcaagattaaacattcccttgtagtcgaacaagtgcccagtttgtgaggattgcatggaaactcatgaacatttgtttttctcctgctgtctatccaaaaagtgattgagttggtgtttgaatggcttggtactcgcatgtggccttcagatttttaaggtttgattggctggctgtctttgaacatggacaattgggtgagaaaaatcagcatagcagctgctgccgcaacctgctaccatctctgaattaatcgcaatagatgtgtttttgaggagtattcgcacaaggatactcgcattgttgctgatattaaaagtatagtaagatatactactacaaatatcagaattcgcgacagtcctaaaaatgatttttttcggggacc

SEQ ID NO: 345106 - DNA, 710 bp, Cannabis indica
aactactacatgacataaaaatgcatctctgaattcaataataacagtataataaattatttaaatagctataaataatttcataattaaacgtgattaactgctaatttccaaattaaactaagcggtctttacacaacataaaaacaacctttgagaactccaattcttcttttgtagctttgaatcctctccttgaagttacccgtcaaatcattaccccacaatttaagaggttcctgaacagccacaatcttttcaacaatattgttcgatgcaaaacctccccaatgctcctgaataatagaaaaacaagtctcttcacggagccaagccttctaaaaaagaaaagctttatttgatctagattgaattcgaaagttggggttaagaagaaacggacaatggtcggaagtggtgaaattgagattgagtaaacgagagattgggaataaattaaccaagtctgagttggcaagagctttaactaatcgaacctttatcaaattttccgaatccttacccttcgcccaagtgaattgatgacccaccaactccaaatccactaaatcacagtcggcaaccgcttgttgaaaaccttcaagaagccaatttgggtaagtattgttgggttttgtgccctaaataaaacccatttcaatataaccagatttacttattaataaagatcagaaataacattttatgtt

SEQ ID NO: 345107 - DNA, 645 bp, Cannabis indica
ctgttgcttccaagagcgcggctctgtccgacaccttgaaagcggaggcagacatggccaagaaggaagctgaggaggctagggcgaaagctggagctgttcggttggactagggtgagaccaacaagaagctgttcgctgctgagaagaagatctccgtgctaacaaaggatctcgaagctgtttatcgctttgaggagaccatcaagatcttatctgctgaagtaaactgtcttcagaatgagaggacttctctgcgagcagttcttcttcggatgaaggaggagaaggatgccaggtgggggagcttacgtccgaagttgacaggttgaaggaaaaggtcaatgccttggagacagccggtctcgagctcttctttgatttttggaaggctaatccccgggcaaactttgactacttgggcgaggctaaggacatgtatcttgagtactgcgcggcccaagttgcttatggtaggaatgaggcggctgcttcgacctccggccaagctgctccaacctccggtcaagctgctgatgcttttcctgttcaaacaacagatcctcctgctccagttggcccagaagaaccaaaccaagagcctgggactccagctgtttaaacatttcctttatctcttttttt

SEQ ID NO: 345108 - DNA, 384 bp, Cannabis indica
ggattataaagagaaattggaaaggccttctgggaacgcacagttttatctctccagtctcgtgttctcctttgctgagagtcccactgataggtctgcggtgctgacctagagtccacgtgtccaataccaaaaacgtgaataacagttataatttggttcgctacgtcatcaaggtcctaaaatttagaataacaattatattgtgcaattgttatattttattgtatacaaaaattataaattttaaagaaaaagtgtataagagttttccataataataagtttaattaatatactatcataagaaaattaaaatagtttactttgtcaatatatatactcatcaagcatatatcgattcttcaatataagcacccaaca

SEQ ID NO: 345109 - DNA, 665 bp, Cannabis indica
actctactaagcattcataattaatttataataaaagttagtaaatctatacctcgagctagctacctagaaaccgatcaacactaaataaatcggatccttgacaattgacctcacaatgtacaacataaagatataatacaaaattacaaatttctttatttagctactgttaacccaaaatccggctaccatctcagttggggacatgtgttaggataaaaggaatatagaacgatgcaatcgcttattatagaataactcattaattacgtaagtatcagagtatatttgtaacctgttgactgtaatgtcttatgcaaggaatcaatatacaaattgttccttagtatattagcgagaaaccatatgtcactgaatgcgaatagcgaggcatcaagtacattacatctaggaagacgaaagcgacacatgtcaattgcgaaagcccttagtgtataatgtacaaactaagtgtaacagtcgggttggctcgagacctagtaagcgaggtgcctatctcgctatggggaggcttcttaaaaacttcaaatatcttctcggtgaggcctacaatcctaacaagttagaagctaacattcaaacgagcctcgaagaactctttgtaaataagaaccgcgatcatcacaagacgagcatcatcg

SEQ ID NO: 345110 - DNA, 610 bp, Cannabis indica
atgtatagggcagaaaagctggagtcagactattcaagataagactcacttgagttgtctgatccatttcaacaccatgattctgggcttcctggaaataacttgccatttggagaaggtgatcacgcacattctgatggggttccatccgtgcattgataaatttcttagtcgcgtcaaagcgagactgaatagatgccattttgaatggctcaattaacttcgtcattatttttgcagccgtgacagtgtttgcgaacctttttttcaaggtgtcaaccatgctggaaagcatgaagtatcgagctttgttgttagcattctgccaatgctcgaacttctctttaacagctttagttgcattgtcacccagttgttcaggagacgggtcagtttacacaaacagggcactttcacctatgagagcaatattaatgttctctttccatttagggaagttatatccatttaccttattttcaatcaacagtgataacatgggatttgacatggttatatagtatactacaaaaataaatagaaatcaattgtggtttaacacaaaatcttattcagaaattattagcacatagcaagtaggaatgacaag

SEQ ID NO: 345111 - DNA, 1293 bp, Cannabis indica
tactcattatatttggtataaatgtaagtctttgacttagagttaatcacttttcttgtaataatgcatgattagaatgctttatgaagtacaaagattgagtggatatgttaatgtgtgaactggagtgctttatgaagcattgaaagtaagtgtttacaatactatatgattagggtgttttatgaaacactgaggttattgattatgtataactataaatactcttaattttgtaacaagtttgcctgtatagacgttgaattgtatatgtacgttgaaagagaatgatctcttggtatgtataatctgtggtactataatttgctattattttccatgattttctttatctagtagcttttcttgctgagtcactgtgactcacgggtacttcatggtgcaggtaagaagattagcagttctgttcggccatgggtcaaaggtcttccagcagtgtacatatcaaccgtgttgtcttggcttttgtgaagcaggatcaacccttttctatgatttgatgtataacctattcttgttcaaatggatttgtaattagttgtaaaagaattttcttagcaggggatccccatattacaacagtatttaaaatgaaagtctttatgttgaatttaattaaaggttttaattaaaccacactttttctaaaaatttatagattagtaataataataagtttataaaagcacacacgtggcgtccttgagagtcagggcgttacagaaatactatctttattcttttattgatcgaaaatgtatttgttaccgtagtaacttacattagagctagtgatccaatggatctttttagcttaatcatgacataaaacaaataagaaactgtactttaaagtggtctacctgacctgagtacttttgtttcttgaaacctttgtgcggagtccgcccaagaggccattcacttatagcgaatgttcaatagtactttaatgtggtctacccgacctgagtactttgaaatggtctatttgacttgagtactttaaagtggtctacccgacctgagtactcattggtagtatttccttaaatgttctccatccagtatcgtggtactaaaatgagtttcatttttttcgtcatacttaccaagtttgtatgctccggagtcgagaacttcgaccacctgataaggtccttcccagttgggtcccagtacgcctaacgtgctatctttggtgtttaggaatacccttcttaggaccatatctcccacaaataatttccgagctttcacttgtttgttgaa

SEQ ID NO: 345112 - DNA, 515 bp, Cannabis indica
ttgattgatgtttgtgaattctgggaaaaattattgattttctgtttctgaaattatttttattggatagtttggaaaattttaagcaatttactttttaacggaactcgagttcgatttaatttcaattagttatgaatttttgaaaatcggaaaaatggggtgataagaactcttcccacgcccgcagaatggctgcttgcagcctcccagtgccgtgaaaactcggccagtccccttgatgcgcgcgcggaatggtatgctatgcataccatccgtactattcatcaatttttttgttttcttcgatttttcatgctatttcatggaattaacttccgattttttgtgtagttttgtattttgatttttaattttcatattttcaaatctaattatcagaaataaattaatttgatttttaaattaattttagatattagtgaaatttgattttgaaaataggtaaaaatcaatttttgcttacctcttttcttatttcctttaaaatttga

SEQ ID NO: 345113 - DNA, 919 bp, Cannabis indica
taatataatgagtaatatataataaatatgttactaccgcacattgtgtcaattaaaaaaataaaaaaaaaatcttatcattgtattttaataaaatgtgtcaaaaaataaattaaatatatgtatctaaactacaaagcaacacacatacaaccaaaaaattgtcaggaagaaattaaaaatatacaccatacaaaatacatatgaataaaaaataactattggaacaaaaaattattctgaaaactacataaaaaataattaaaaaataacaaaaaaaaattaaaatatccagattattcataaatcaactccggataaactataaaacataaaaaaaaaaatactattttttattaatcatgtaaaatagagaaaaatataggatgagtgctcttatttatttatttattttttttttttgtaagattggtgttaaaaaaatacaagaaaaagtgtaaaagtaacataatcatattttagtaaaggttagaaaaggtgttagaaaaaaaaaaatataaaaatgtatacttatatatataaaaattttaaaaaaaaattaatgtagaaaaaaaaagataaaaaaaagagagatagaataaaaaaaataaaaaacaaagaaagagagaagagaagaaaaaattaggagtgttcatcaaaccgcataaattgtgcgcaacgtaccacactgcataaaatacagtttaaatcttttgcggtacggttacagtttgtatttttgccaaaccgtgcggtgcagtgcggtttgcgattttgaatttaataattgcagttcaaactgcaccgcaatatatattacaaagtcactaattttttacaatataatttttattcatttttttaatataagaacaaatatatatatatatatataactagcaaaaattacgtgcgaggc

SEQ ID NO: 345114 - DNA, 921 bp, Cannabis indica
taatttacctgcttcttactttcgttgtttttctgattttattatctcttaaaattttatataaccaaatagaaataagaatttaattttaacgtacttaactacaattctcgtgagattgaccccactctttgtgagtattacttgttaaaacgatacgtatacttgcatgttgtaaattaccgcaacagttagtaaatctagatcctagtcaaataattcccaacattcactactacaatttggcaaataatgtcacgcacaaaagtgtgggtcactatagagttaggagtaacttttagtgacatgcataattagactccaaacattaggtgttagtctcttgcaatgtgtgtcactgaaaatatagagtgtcactaaagagtgaatatatattgttctaatttttattaatttaaaaaatattgacctatactgacgtgccaaatatgattgggtaaatatatcccctcacacttagcgcatcactatatcataattctattttttttttgtaaaaaatatatatctataattaataaaaaaaataaaacaaccctatcacttttacaaaccctatcagcttactaagtaaataataaaatagtaaaataataaaataataaaatacagctgatcattaagaatccaaatgagtaataaaatacagctgtattctttattgtttattcatttcaataataataataataataataatttatttctctcttggttacttaaaactacgtaaccctaactctttctttctctaaccctgtcacattttctttctctaaccattaactctttctttctttctctgacggtggaaacacatcccagaagcgaactgacgacggaagcacctcccagccagcgaacgacttcccgacctgacggtcgaagcacctcccagcc

SEQ ID NO: 345115 - DNA, 1038 bp, Cannabis indica
gaaggaccataatattcgctaaagtccctacaacctgtaattttgaatatataaaaaggctcgattggttctaaatcccagctcgcatctatgtgaactgccctatcttccatagtactatattgctcggctatatcataaaatgactcgtggaaattaatcttgacgtggaatctagggtaccaactgtcaaacttatgagcaatgcggtccacgagaatggaattccaagtatgaaaattaagatgagagtcttggaaggtaactaatgtattacgctcagccctaagtacagtaggtgtaacaccctaactaaattaggcatgttagcgtgatttttaacttactatgcagctcgttgctaatcaactaggttatcgaaaaatcgtaattaattaaaatttgcttatttaattataaacttaaaataatacatttataaaatcccgggatcctgtttacaaaatacatttacaaaattttactactcatatacaaaatatttgtcgcctagcgaccaaacaacgaaagccctaatgtcccaaagatcgtacgctccaagcctaactgccccgacatgtaaaatcttcacgtgctcgctctcacggctcctcagctttagccttgcgtttaccaacacatgaaaatagcactgtgagtcaatagattcagtaagaaaagcataaacaataacataataataacctagattatgatcggacgcccataccccagtcataatcctatccccgtgacctgcacggtgctgagtctagaacgttcgtacgatagtactattgaccatgatatcagcctatactcggtacgctagtcatactctagttgtaccgatgggatactgtcaagtagtacggtactatcgaccataatatcagcctatactcggtatgctagtcatactctaaacataccgatgtgatactgtcgaatagtacaaaagccaacatacatatctaatgtaatctaacaggcttaactaacatgcacactaaacatgtaaatgttggaattatttta

SEQ ID NO: 345116 - DNA, 442 bp, Cannabis indica
ccatcattctgaaaaattttcctatcactagggtattccctagaaggacttaggcagctgttaccaactagtcatacatctttcactttcatcaatatgtaatccaaattttcaggaaggtaagtttgatacaattcaaaatttaacttaatgatttttgagctgcatatccaccgaatatttctccacccctatcagtttgcaagatctttaaccatttaccttgacatttttcaacatcgctaaaaaatcatgaaatttctcaaacatttcaaatttctttgcataaggtaaaatttagagtgatagtcttaagaatataacgataactcatatccacccctaaatgtacatcaatatttttaaatatagatgatcttacttacaagtgaatattgacatattttctctttacagagaatgatcttgtcaaaaccactat

SEQ ID NO: 345117 - DNA, 603 bp, Cannabis indica
caaacacaacaacatcaagttctaagtcatgtgtcagaaaatgctactcgtaatccttcaactatcgagaagcataagctatgactttgtcagcttgaatcctagaccctatattgatccatcataataaacaacaaactttggttaatctgatagtaaagctaacactggtgctgtgatcagtcattgcttcaactcctataagcttgtttcacacttgtcagaccatgtaaactgttggttctctttagtaaattctattaatggcatcaaaatcttagaaaaaccttctacaaattgtcgataattgtaacgccctaaataattaggcacgctaccaaagatacttacaaaaccctaatcccctaaacgagattactaataaaatcagcgcggaaattaaacttaaataacaaacggaatgaaaataaacttctaataatttaaactttgcaaattaaaaattataaaagttgggatcccaaaaatatttacaaaacgctattacaatagtccttttccattggccaacctaagtggcaaaacagagtcacaaaatacatcactagtagaccctaacctgctattggaaataattttacc

SEQ ID NO: 345118 - DNA, 694 bp, Cannabis indica
tagggcacaaaacccaacattcaagccttaagaaaattagctcacgttcaaataaaaaaaaatacaatccaaactcgaaattgttcatccatgggtgctgcctttttttttacaactatcaagtttctagtatttaaagacaagaaagaaaagaaaaggaatatataagaaaagggcaaaaaaaatgcaaacacaaaagcttgtgtccttctttttttcttgcacttgggtcccccttctctttccttcttctccgtactttctgcaattaattcccttcaaaaatggcagctgccatcatcctcaagaagaaggtgtacttagatgtgtttttattgttgagtaaatagggtacaaaatgacaccctaaaaatagaagcccaatcctctccaatcttggcccactatatttagttttcttcctttcacagcagccagctggcgtactttgagtgactggtacatacttgctgatgtggataagtgaaattcgttttttagactttttccacgtcacttcccaaactgcccagaatgctatagcattgcttcaacatttccttctagtttttagcttttgttccaacttttcctctgcatcattttcttttttctagcaagttaattcttctttcccacaacaaacaaacaatatttaattaaaaaaacacaattaacataataatttttacaa

SEQ ID NO: 345119 - DNA, 548 bp, Cannabis indica
gaatgatcttgtcaaaaccactataaagaagatgcaaatggcatatatattgttgtggtttgacgaatcctaggtctagttacagcaaagaattcttagaatagtccaagtgtatcctagtcacataatacaaaactcatactacatacattaacatagagtttggatccattgactgaaagtggatattaaaaacgtgtgaaagttatattgtattgtctaatgtattctagaagcaaaatttaagatttctctttggaatctaaaattttaagtcaaagacttaaatttataccaaatatacaatgagtaatgattctttcttggaccacaactactaatctaactataagtttatgtaacaccctaactagaataggcgtattacgtgatttttaaacgtactgtgcagcttgttgctaattaacgaggtttatggaaattgtgattaattaaaatttttgctttttaattaaacttataaaatatttcatacaaaatactgcgggatcccatttacaaaaagctttacaaaagtttactgtcta

SEQ ID NO: 345120 - DNA, 531 bp, Cannabis indica
atttttatatttgatttgattttgttttttgctttgcttaccccatctagctttaatacagctagcaaagaaatctcagcattgatttccctttttctaacttttttaattaatgatataggtagtcaaacttcttgggttgcccataaattcccatattaataatttttttaaaaaaataataataataaatatccagaaaaataaataataataatctaatttgtaaagtaattaagggctaaagagtaaaagactagacaagaccatggttaggcagtttggttcttgggactcaatctatggcataaccaagaattagtgacttcatcaatgaccaaataccaaaacaaaccaatagatatttcattacttaccataccgtcatcacatcttatcaaattaattagattaaaaaataaataaaaacaagaaaaaaaagggtcttggatggactatatatatacttcccttaaaaggaaagtgatcattaaaatattagagaaagatagggttttttttttctttttt

SEQ ID NO: 345121 - DNA, 941 bp, Cannabis indica
acacatatataataataaaaaatgagaaaccaataatgacgaatgaaaactgacatcaaaactgctaaagcagttatcaagggcagttccagattataaaactataactggaactggggggagtagtgtttggggggggggggaaaaatcaaacttagaaataaacggcccaataaaatgaacaacgcaaaaaggcccacattagaaggcccacaaaaatgaatgcatccaggcccaaagatatagagggcggcccaactcggtgtggaccagttattgatccttaagggagcgctacgggcaaaaaagaaggaaaacgataaacgacaagaacaagtaaagaaagcaccgacagaagcagaagaaagaacggaagagaataggtaaccgacggattgaagatcaactgtaagtgaaacgataaaccaaaatccaatgaggcacccaggtaacttgccgacggaggaagtacttgaaaggcaactaaaggaggatatcgaggtaactccactagcgaaacaaaggcccccgacggaagaaaactctgatctcctcagacgagagctttggcggaaaaaaaaaggtctcgagcataaagtaagaaactaatactttgaagaatgagatgtcgacggacacgacgccgtcggatttagggaaaataatagcattaaaacccactagaaacacagacacgtgtaacactagagttatctattagaatacgaacacgtggcaggggcaaaaagaataaaagaaagagaacacgtgtcgataaggggataggaggatgatagatcgtccatgcaagagaaggacgtacatataaataaaaggaaaaggacgtaaaagagggggattaggaactggaaaaagaaagagctcgcaaaagaaatttttactgttttcgaccaaaacaagcttcatctactttatcttaa

SEQ ID NO: 345122 - DNA, 572 bp, Cannabis indica
aagtttattttttaaatttgactaattggacaactaattagtttctacaataaatttaaaaatttaacaaaaatatatcttaaataatattaaaaaatcatgatatacaattttaaaataaagattggtaatctagatatttacaaatctcactaataagttattttattttattgttaacacatttagtttcttaaataagtttgaaagtaacacaaatgttactaaaattaaaaaggtaaggttaaaattttttaaacaacaaaataataaaatataatctaaaaaatgaacatataagtttaaaagtaactaaacaataaaaataactaaaatgtatatgaaatcatttttatgaaaatataatttattggtatcttattgatctattaaataattaaaaagttgtctttttacgcataatagtaaaaaaaaattacaaaaagtaactcattggtatattattagggaaatttgatatattatgctaaaaaatagaaaatggtgtttaattataccaagaatttacacataaaaaaaatatgccaattttttaatttccttcctaaatt

SEQ ID NO: 345123 - DNA, 1144 bp, Cannabis indica
acttgaggatgctaaaggaaattggctggaggagcttcctaaagtcctatggtcgtaccgaacaactgagaaaatggcaaccggacagactccatttgccatggcatatggatatgaagcaatgctgcccgtagaactcgaaccaccatcccacagaaggctaacatatagccaagaagccaatcatgtactccttgctaaatcacttaatgaaattaaagagaagcgaaccacagaaaacttaaagctgatggcacatcagcaaaaagtagcttgttatttcaacaaacaagtgaaggctcgaagattctttgtgggagatatggtcctaagaagagtatttctaaacaccaaaaacagtacgacaggtgtgctcggacctaattgggaaggaccatatcaggtggtcaatgttctcgaatcaggagcatacaaattgggtaagtatgatgaaaaaatgcagcccgttttgggaccaaggtattggaataggtaacatttaagaaaatactaccaatagaagtaccaggtcggatgaccatatcaagtactaagaaaaagaatatttactcttaagtgaatggccttctgggcggaccacacccaaaggttcagataaaatgacatagtactcaggttggacgaccaccatctaaagtacaatttttaattcctgcaatttgttttatttcatgttaagttaaagatcagattagatcaaattaatagctttgatgtatgttaatatggtaatagacatattttcgatcaataaatgaataaagatgtttatttcaaaattcaaattgagtcgagtttactagcatgttgttaatttaccatcaaatgcatacaaaaggtttggtcgagcccaaaaccccgaacacacaaaagagcacacttggaaaaaagtataagtgaccaagagtcataagtctgctcggtcacttgggggcacctatacctgcacaaagcaattggtaaaaataaaacaaacacaattgtaggatgattataaatagaaaatgaaattcaataaagataacacaagcatgtaaagccgggattaaaggctgcccggtcagcctgttgttcgaaaaattaaaaacaattccaagttaaaagattgcttggttggtcactt

SEQ ID NO: 345124 - DNA, 755 bp, Cannabis indica
tagttcttattttagtgagtaatcatccctaatggatgaacgttcattagcaatttaatgccgtagaatctcaaaagataagtattatttgtaagtgttttatttttagtatggatcaccctaatggtggcgactaggagtaagacttcaaaagtatgaaataatggtagaagctcataagatagaatgaccttgactcttgcctaaataggacaacgttggattctcatcttgatcgaataaaagattgctagaatgtttatcattttagatgagctgacaactctattcaatgaatggtatctttgactctcgcctcaacgggacactgatatcagtttgttgaaaaccttggaaattattgaggattgtatgttttagtattttcacttgtcattcccacttgctaaatgctaataatttgtgaaaatgattttgtgttaaatcgtactttatttctatttatttttatttgtagtatccaacatgactatgacaaatcccatggtgtcaccgttgactgataacaagctcaatggagctaactttatcaaatggagagagaacattaacattgctctcattggtgaaaatgccatgtttgtgttgactgaagaggctcttgagcagccaggtgagaatgcaaccaaggcagttaaagaaaagtttgagcgttggcataatgctaacaacaaagctcaatactttatgctatctagcatggttgacaccttgaaaacaaggtttgcaaacac

SEQ ID NO: 345125 - DNA, 612 bp, Cannabis indica
cggcctcaatcccacgatcctagcattcagcaatgatcccacgatctttgtgtttatgcgctttgtaacgagagaggaaactcctcctcctcaagtttcctgccctataaatagtgaggaatgttcactgggcagggggacgaaaaaagagagattgatcgaaactgtataacagtgatcatacgccgaaacgctataagctaaggctatctaagaattatatattcagagatattattgtaagagctataagaaaaggaatcttcttccttattcttaagtcaatacaactaacgaggattaggctattaccgaactgctcggggctgaacctctataaaatttctgtgtcttcttattattattatttgctttattacgtattcttattacgacatatcgtttatcgcttatcaaaagactcattgtcgttggctaaaagcgaagtcaacattttggtgctttcattgagagaagaatcacagatcgctctttcgacacgatggtgcaaactcgcagaggcctgtcagacccagcaaactcacagacgctggatccgatgttgcaggacccagggagttcgacggttccacccgctgtcaatcctggaca

SEQ ID NO: 345126 - DNA, 623 bp, Cannabis indica
ccagacccgaacttgaacctaggaccgagctcgtgacccgacaccagaaatggaacaagactgggaccccagatagggatccggatctggacccagggcttggacaaaacccgtattcggtgtttggatttccggcccatccctgacctgaaccctgacaagcatccgaacccaaacccgaaccataacagaaattggaccaagatacagaaccgtaacaggaccaggacccagactccaaatcaaacctagacttcaattaggagtcggatcccaacccaaacctggactcgggactcaaccccgaaactgaactcagaccaaaacatgtaaccagactagggacacgatacaagggacgggacatagaaccgcaccccaatctcgatcccaaacccaaactcagaaatgggatctgggacctcaaccagaaccagaccgagacccgtaacagtgatccagatcttgactcaggattcgggtaacggggtctggaatagagaagtagtcggtgtctagacctaggactcagactaggaccagaacccagacgaagaacgaaacccgaacccagacctagaccagggaaaaaaattagaacctgaacaagaatcatcgaacca

SEQ ID NO: 345127 - DNA, 1299 bp, Cannabis indica
aacactctcttgatcctcttattggagagttgaatggtaatgactagcacatcgacgtgagggtatctcacgttcttctcgtcttcctctgtgaatgtatgggggttcctcgattttcacctttttggaaggttctggggcaaagaccgacttctcgttctttatttctttcacatatctcttctgagcgttattgctctcccctgcaatatcggccctcccgaaacaaccaggatgtcctctccttccataggaataggttgtaacccctggttgtttgggttattaggctgacggggctggttgtatccctagccttgtcttctcacatactgcttaaaatggcctcgagcgatgagactctctatctcatctttcaactagcgacattcttcggccgtatgcccaatatctttatgaaatttacaatatttgttaggatctcttttgctcctaaaattcctcataggctcgggtttaccaaaggctaccttcttctcatgtgcgaggtaaatattttctcgagtttcattaagcttagtataaatagtatacactggcacatatttgtcatgcttcttttgtttctttctatcctttgacggttccctaattttgtcctttcttttcggaccagatacccccgagttatcaattctcgtggaaacagtccctgttgaaacattactaggtttacctcccgagcttgttttcaacaagttcatttcctttcgagcttcttccttctggacaaacacctgagctctcttgttgaactcaatgatgtttcttaccggacgtccttgtagatcatcccacaactcgcccccagcggttaatgaatctgtgaagattcccacctgaagggttgtaagttgcgtgctatcatccaagtttctaaccctagcggcagccgtgctaaaacgacttaagtacgccttaagtgtttcgtcaagctgctgctttatattggtaagcgaggccgcttcgggtcgcctatccctagtggcatgaaattgtttcttgaaatcccaggacagctgctcccaggaaattattgaatgacgagtgaacttgttaaactagctactcgctgctccaacaagcgaggtggggaacaaaatacagcgtaaattgttcttcacgttactcgtgcgcatatcgtgttaaagttattcaaatgcaagactggatctgtggtttcgtcataggacgagacatgcgggtttttgaatcccgaaggaaaaggggtattcataatatttgggggatacggctcaagctcctcgtcagagttgt

SEQ ID NO: 345128 - DNA, 1619 bp, Cannabis indica
ttcaatctctccagattctatttgtccctgatccaaaacattctaaggtcaatgtgtttggatttcccatggtaaataaggttcttgctcaagtgaattgcagattgtctgtctaaaaacactgagacttttcctttcaacatgttaatttcttgcaaaatgtcattgatccatgttgcttccttgaatgcctctgtgattgccatgaactcagcttctgtagtggacaaagcaactacatgttgcagttgtgatttccagtttatgcagcatgaatttaactggaaacaatagctagtgattgattttttggtgtccttgttggatgcataatcagcatcaacaaagccttctaacttcagtgtgttgccagtcttctcaaatgtcaaaccatagtttgaggttgtctttagataccttaaaagccatttcaaaccagtccaatattcttcaccaggattggacataaacctgctcaaagtgttgatagcatatgcaatgtcaggccttgtgcttatcattgcttacatgacactcccaatggctttggcataaggaatttcttccatctttttcttggatttttcatcttttgaggattgctctgttgtgaatacaaaatggctagctaaaggagcttgagtttcttttccatcctccatattgaaccttttaatgaccttttcaatgtatgattgttgtgtcagtagcagcttcttttctttcttgtctctcttgatttcaacgcctaggatttttctagcaactcccatatttttcatcttactcactgtttaggacatacttcagtttgcttatttggttttgatcctttctcataataagcaagtcatcaacatagatcagtaggaaggttgcagcttgtgaattcaaatttgtgaaatacaagcatgtgtcaaacttgaatctgatgtaaccaaattttgtgaccactgaatcaatcttcttgtaccattgccttggagattgcttcagaccatatagtgacatcttcaatagacaaaccagctccccttctttggattccaccttgaatccttcaggctgctccatgtatatagtttcttcaagttttccaataaaaaatgttgtttttacatccatttgctgtatgtcttagtcaagttgaacagcaatagcaatcatcattcttattgtcttcattttaacaactggagagaaaatttctaggtaatctaccccttcaacttgtgtgaatccttttgcaactagcctagccttgtacacctttcgttcatcctcagttaggtaagtttgcatgagtatagtttaagagtaaaccttgtttagacaactccaccaatccttgctaactgatatggcccaatttggcatgccaaagcttggaatcgatcttgtctttggtgactgctgcagctatgcaggggtcattgtttttccatccaagaagtacaagccatgtttcttgataactctcatgacaagtaatgaacctttagtgatcctcatagtcgccttaccagttttgtactcaaacctttcatcatcaagagtgtgacagtcagtggtcccgtgatccgtaaagggaaataatgggtaagctgtgcaatcccaca

SEQ ID NO: 345129 - DNA, 801 bp, Cannabis indica
ttgacaacaaagtcaaggactttcttgcaggttatggagacaaggggctcggtctctgtccatttagtgaataagtcgactgcatagctcctcctcgcctagtgggtaatgccccaattaggtcgatcccccatatagcaaatgggtagggcgaggtcatcattctaagttctgtcggcggtacgcagggtacatgtgaaaaccactgacacttatcacatttcttgacaaactcgtgtgtgtctttattgatcgttggccagtaatatccttgtctaatgatctttttagacagactttgtcaacccgcatgatccccacagaagccttcatgaatttctttgatgatttcatttgtttgtgcaggaagaacacaccaaagtaggggcattgaataccctcttctatatagtttgccttcgaccaatgtgtagcaaggcactgaatacaatagtttccacgtctcgtttttgtcttttggaagttttctgtcgagtaaataattaataataggtgtcatccaagttagagagctatctatcatctcgacatcttcagtttcacatatacttggctcgcccatcatctctaccggaactaagttcaattcatccaagtcattctgcgaggccaattttgcaaaggcatcagtgttggagttttgttctctcggaatttgttcgattttaaagtaattgaatccttcaaagttcttcgaacattctctaaatactttgccatttttaagcttttggcatggtattccccgaggacctagttcacgatcaactgcgaatcact

SEQ ID NO: 345130 - DNA, 316 bp, Cannabis indica
ttctatcgcagagtattatcaagatctgagcccgaacgtccttctctttgtgtgtgatgcttcacagtctttcaatctatgattgaggtaccatttgttgtgtgtgggcactactctatcactagggggttcaaaattgtgaagaggaaaagagagagagagagatagggtcggctatagagagagaaagtggaaggctcaatttttctgaaaaaggcaatctatgatttttctgacaaaaagcttgaaaaacttgttattttgactcagccatcactttctatttataggtaactactaggtttaggttagtaat

SEQ ID NO: 345131 - DNA, 1094 bp, Cannabis indica
ttaaaagcaaaagaagtaaaaaattcttaaaaacttacatcgtccccaagccatgtcctcagagtatgtagttcgaggaaccaagccgaattgtgtctaccggagaagcactctctcgggtacttgttcccaatctggctgagtacccaactgtgaaaagtcctgagcagcttccgatcaaccactctaagtgggtccgcattcacgagtgtcctcgcagcacttctttttcatttcagtgtactcatcgaaccacctaggtcgctttctcttcgtccggttctccacgagttttggagctgtctctaacacttgtacctcagaatcttgagtatcctcgatgctggtgatttttcgtcttctcaggtgtacagaacatgtcatcttcacccggtctgtaatcatttgggagaatgaagtcattttccggcgactgagcctcttcttctagttgtggttgtggctatggttgtggctgtgactgtgaatctactgccggtcttccaggatcttgcaggagcctcattatggtcttcaactaatccataatcgttgtttctcctcttagcagagcggtctgcccttccctcaaagcaatctgccccctctccacagtcccaaaatggcagggtatattggatcgcgagcctctgaggtgctgggaatagaagctgacgggggaacaggaggatcttgtgatgctgcagatgggtcaacaccagactcatctggaactgaagctgcagatgggtcaacactagactcatctgaaactccagacggtgcacgtggtggagacggtggaggtggggcagagtctctaaatattcgggctgcgtctgcttgttcttccaatatggaggaaagcttttcggcctggcttcgcaaagcatccggtgttggttgcccgtcctcacccaacacaagttcctccaagtcaacaaataaaggcggctgacccccagtgatgtaactcacaaactcaatctcatttagccggggacataacatggagctcccaagggtgacacactagaccgaataaaccctatgtccagtaacccttgaagctgaatcttcaactctttaagctc

SEQ ID NO: 345132 - DNA, 681 bp, Cannabis indica
ataaataattagaaaaaaaatattattaattattgtttgaaattattttaatgtatacaataaataaataatacattttatattaattaatgtaaataatggtgttgcaaatgttatatatataaatacgatataataaaacaaccttttaatcttcagcttaaaattaaaatctaatcatcacaaaaagctaatagacttttccttgttgattgagaccaccaacacatctcactcttgggtaaccaccattgcttccaattgatattggtgccacaaagtgaaaaaatcaataaaattaaattctattgctccatacttcacaaagtataggacttttcaagaaaataaaatgaagatacgaagctactcgatctttaaccaacagtttaaacactctcacaaagttgttctacatttagctgcacacaaattgaaagagaatgaacaaaaagcatcaaactgaatttatacagatatataaaatataaatacaactattgtattatattgttgactaaaaaggaacatgataaggtactacaatcagaaccttctttgacaatgagtcaatgactacaataatgatcacaattgttcttttattcattaaaacccaatagccatattggaatgtcaatgttccagaaccattcctatagaacacacatagattaccta

SEQ ID NO: 345133 - DNA, 413 bp, Cannabis indica
taaaataatttccaatagatggttgggaacatgatctacaattatggagtcttgactttcttaaggatcgaacattagttccctttatgtgttaattctagtactagaaagttgcgcccgaagttagatggaatctgaattatacttccactagtgaattaatagtactaaaggataaagaattattaagaaaggtaaaatggtaatttgaccaaaattaatcacaaaccgacacaaactaatcacgagaattgattatatctaataatttaaatttcatacatggttgttgtgtaattacctgattgaataaatatgtcaaacattataattactcaaaattacactcatttccaattaatgttgttgttacaaaaaagtaacatgaaaatagatattttttaaaagaaaaa

SEQ ID NO: 345134 - DNA, 832 bp, Cannabis indica
cacacagatgctaagcccattaacaattgatcaccaacaacatgggctaacacagcaaagaactatccaatcaacccaagttttaataaaaccaataaaatttaatgtaagcccaaataaaagtctaacaaataacagttatcgaattataggaattttatgtacatatatataaaactaagaaattacccgcgcttcgcgtgcagttatattttatttaataataatgtgataagttcataaataaagataaataaataaataaatttgaaaagatttattattaatatctcattaaatttaaatttttaatcaaatatttagatttattattaaatatctcattaaatttgaagttaaatttaatcaaatatttttaaggagaattttatttatatacgcaaatatcataataatttcaagaataacaatagtcaaattaatttttatataccgaaacttttatatagataccgaaaaaataaaatgtcaacttatatatataggctcggtatctctgtttctctcttgcaaatgcattatcacttttttttaatgtctcaaatcataagtgtcatattaatagctaataaatatatttaactataaatattaattttagaaatactaaaccattagatcttggtccgatagcgaataataaaacagaaatttgaatttctatgcttaatttaggtacttaattaaaaaaatatatcaaataatacctttttttacgctatataaaaatatatatttatatgtaaaatatttaagtcgaattcaacttcttttatcacttttttgccaaaaaacttttttttattatttt

SEQ ID NO: 345135 - DNA, 512 bp, Cannabis indica
ttggctttacttcttagttcgttattctgactatcaattacagttgtttaaactaacaataaatttaattacgagtgtcttccaagtcataacagggtgagttccttaaaactctcccattacaacaaggtaccgtgactttctgtctaagaacactacgtattgacctcgtcagttgtatcaatacagcagaggcagtgagaccatcttatatatataaaaaataagatgatagaacaatttcagaattaagaaaatatatctcctctactttgctactttcagatttagtcattttcttaaaaaagtagtatttgttgaaacaaacactttcttatcttaatgaccataggatggtccacccctaatcactttagaatagctatcgaacatgcaaaccttagttaacagttctagcttttcttaagttcacgatcaatacatctctgaatctagaaatggtatacactaagtacaaaaccattctgttggaatttattttaccaggatct

SEQ ID NO: 345136 - DNA, 555 bp, Cannabis indica
tcaggagcagcaaggcagaacagatacgtgcacaattggaacatgttttgtggaaagattaaagcgagttgggagactgttgatagaagctctccacagaaaattaagaacctttggagggagctgcaactgccataagagccgccagattctagagctttctggaatatctctgctgggtttcattgattgaagcagagaatatgtactcataacagtgaaaactcctgatgcatcatgtaaccagtaccacaaatcagtattcatatgactactgagcggaatcttccacaccaaagctcgatctctagcagtgagtagatcagctaatacttccccatcccattcaacccgctcgactttcattaaagagtcgaccgactttcccacaagacctggatggacagattcaatgaaagggttcattcatcagtaagccaaggctcagacaaaatatttacggtagaaccatcacccaccaaccgccgaatcccagccccaactaactccttagcctcaaacatgttaggttttatgccctaaataaaactcttt

SEQ ID NO: 345137 - DNA, 524 bp, Cannabis indica
attcaaaggcctatgttaaaaaatgtgacaaatgccagagacttttaaagatacctcgagctacgcctaacgtgttaactcagatgcaaagtccttggcattctgccatttgggaaattgacctgatcagacaattacccaaaggcaaaggtggagtgtagtatgcagtggtggtggttgattatttcactaagtggacggaagccgagccactagcaaccattacgtccaaaaaagttcaagactttgttgtgaagaacataatctgtcgatttggattgtcgtacaaaatagtttcggacaatggcaagcagtttcacagccagtccttcactgatttttgtgcgaaacatatggtattatcaaaagtttctccgcggtggcgcatccctaggcaaatggtcaagttgaagcagtcaacaagacgctgaaggatagactaaagaaaaggcttgaggatgctaaaggaaactggccagagaaatttcccaaagtcttatggtcatacaaaaaaactgagaaaa

SEQ ID NO: 345138 - DNA, 431 bp, Cannabis indica
attatcaacgtggatagcaaaataaccttgagagttttttatttaatctaaaatttagaaaataataaatatcattttactatttcttgaaattaagttattgattaattgtactttcataattcattggctctttggtatattggtaaagaagattattaatgtagttatcaagtgcattatttgggaaaaaagaatctcattctttgaaaacaattgattgttaattgatttttttttttgagatatatatattatctattttcttgagaaatggataacaataagcaattatataaggcactattttttgtaaaatatttacatttttacgttcaaagaatatttttttacatttttacagttttccaaaaaataacacgaaaacaacataaaatcaacaagaaaacaacataaaaataacatcaaaa

SEQ ID NO: 345139 - DNA, 557 bp, Cannabis indica
tcaacttggtggttcaaagttctattcaaagattgacttgagatcaggctaccatcaattgaggattagggaagaagatatccttaagagtgctttcaagacacgttatggacactttgagttttttgtaatgccatttgggttaatgaatgcacttgctgcatttatggatctcatgaatagagtctttagacctttcttggataagtttgtagtggtattcattgattatatcttgatgaattttaagacatgtgaggatcatgctgaacacttaacaataatattacagacattgagagatcatcgattatatgctaagaaagagaagtgcgacttttggatgacaaaagtcaaagtcttaggccatttaatttctcaagatggtatcattgttgatcctgcaaagatagactctattctacagtgggaaagaccaaataatgtcactgaagttcgaagttttcttgggttagcaggctactatcgttgctttgttgagaatttctctcagatttctatgcctttgacaaagttaacaagaaaagaagtaaagt

SEQ ID NO: 345140 - DNA, 793 bp, Cannabis indica
agctaagagtcgtatgcaaaagaacaagtgtagttcggggagtgagcccccagagcagtacaaaagcatgttatcctttttgggaggtagaaatatggtaaggcatctctaggagaagaagagtttattcaaacagtcacctcgcatttaatgcagtatgggaaaagcgtctgggaatgcttataagatgacatgttagacaacgtaagccttgtttaagacgattacacgataatcgaaggggctagtgacggctccgttatgaagtatcacatcaattaaggaatgataaagattaatctcacctaatccatatgatacctacggcataagttatgcatgccctatgttgtatctcttgggaacttgtgctcatacattactggcattgaaagacaagttaccccttttaaactatcccaccaatctctataaatacccctgagaaaaataagaaaggggatcgaaaaaagagagaaaaaacacaccaagaacattctatgtacaagaactctcaataataacaaagactcgttgactacgactcattaatgcttgaaccacgtaaaaatcatctgcattaattatcccaaagctcttatcgttatttcatttaattggttatcaaaaatctcggtcaacatttattaatctatatatatatctatataatatatataatgaaaacatacaagatggtgacataattctttaaaatctctctaattagcattatttcttctcttcttaattctttttttttttaatttttaatttttattaaatttataaa
